United States Patent Application Publication US 2024/0327476 A1 - sequence listing, part 59

SEQ ID NO: 111985 - DNA, 711 bp, synthetic construct
  misc_feature 1..711: note = Description of Artificial Sequence: Synthetic coding sequence
  source 1..711: mol_type = other DNA
atggcagagacgaagctgcaactatttgtcaaagcaagcgaagacggggagtctgttggacattgcccctcttgccagagactgttcatggtgttgctgcttaagggcgtccccttcactttaactaccgtagacactagacgaagtcccgacgtgctgaaagacttcgcacccggatcacagttgcctattttactgtacgactctgatgctaaaaccgataccctgcagattgaggatttcctggaggaaacccttggaccgcccgacttccccagcttagcaccgcgataccgcgaaagcaatactgcgggcaatgatgtattccacaaattcagtgcatttattaaaaatcctgtccctgctcaagatgaagccctgtaccaacagttgttaagggctttagcccggctggatagctacttgcgcgccccactggagcacgagttggcaggagagcctcagctgagagagagcagacgcagattcctagacggggatagacttacgctggccgattgctccctgctgcccaagctgcatatagtcgacaccgtctgcgcccattttcgccaggctccgattcccgccgagctacgcggagtacgcaggtacctggattccgctatgcaggagaaggagttcaagtacacgtgcccgcattctgccgagatcttagcggcctacaggcccgcagtccacccgaggtag

SEQ ID NO: 111986 - DNA, 348 bp, synthetic construct
  misc_feature 1..348: note = Description of Artificial Sequence: Synthetic coding sequence
  source 1..348: mol_type = other DNA
atgaattcaggtgtgtgcttatgcgtattgatggccgtactggcagccggggcactaacccagccagtgcctcctgccgatccggccggaagcgggctgcagagagccgaagaagcaccacgccggcagctccgcgtgagccagagaacggacggtgaaagccgcgctcatttaggagccttacttgcacggtacatccagcaggctaggaaagctcccagcggaagaatgagtatcgtgaaaaatctccagaatctagacccttcacaccgaatttccgatagggattatatgggttggatggacttcggccggagatcagctgaggaatatgagtacccatcatag

SEQ ID NO: 111987 - DNA, 348 bp, synthetic construct
  misc_feature 1..348: note = Description of Artificial Sequence: Synthetic coding sequence
  source 1..348: mol_type = other DNA
atgaacagcggcgtgtgtttatgtgtgcttatggccgtcctagccgccggggccctcacccaaccagtccctccagcagatcctgccggcagtggccttcagagggcagaggaagcaccacggcggcagctgagagtgtcccagaggacagatggagaaagcagagctcatcttggcgccctactggcccgttatatccagcaagcccgtaaagctccaagtggtcgtatgagtattgtgaagaatcttcaaaaccttgatccatcccatagaatctccgacagagactacatgggttggatggatttcgggcggcgaagcgcagaggagtacgagtatccctcatag

SEQ ID NO: 111988 - DNA, 348 bp, synthetic construct
  misc_feature 1..348: note = Description of Artificial Sequence: Synthetic coding sequence
  source 1..348: mol_type = other DNA
atgaattcaggcgtctgcctgtgtgtgttgatggcagttctggcagccggagctctcacccagccagtgccccccgctgatccagccggaagtggtttacaaagggcagaagaggcaccacgtcgacagttacgggtctcccagaggacggacggcgagtcccgagcacacctcggagccttgctggccaggtacatccaacaagcccgtaaggctccatccggacgtatgtcaattgttaagaacctgcaaaacctggatccttcacatcgaatttccgacagggattacatggggtggatggacttcggccggcgttcggccgaggagtatgaatacccatcatag

SEQ ID NO: 111989 - DNA, 1287 bp, synthetic construct
  misc_feature 1..1287: note = Description of Artificial Sequence: Synthetic coding sequence
  source 1..1287: mol_type = other DNA
atggacgttgtggactcattactggtcaacggaagcaacattaccccgccatgcgaactcgggttagaaaatgaaacgctcttttgtctggatcagcctcggccttccaaagagtggcagcctgccgtgcagatcctgttgtattccctgatctttttgttgagcgtcttaggtaataccctggtgattaccgttctgatacggaacaaaaggatgagaacagtcacgaacatcttcctcttgtccctcgcagtcagcgatctgatgctttgtctattctgtatgccattcaacctcatccctaatctactgaaagactttatttttgggtctgccgtgtgcaagaccacaacctacttcatgggtacctcggttagtgtgagcacctttaaccttgtggccatctcactcgaacggtatggtgcaatatgtaaacccttgcaaagccgcgtctggcagaccaaatctcacgccctgaaggtcattgccgctacctggtgtctgagttttaccatcatgacaccataccccatctactccaaccttgtgccattcacaaagaacaacaaccagactgccaacatgtgccgcttcctcctccccaatgacgtaatgcagcaaagttggcacactttccttctgctcatcttgtttctgatccctggtattgttatgatggtcgcctatggccttatcagtctggaactgtaccagggcatcaaattcgaagcctcccagaagaagagcgctaaggagaggaagccgagcaccacaagctccgggaaatacgaagatagcgatgggtgttatcttcaaaagacccgcccacctcgaaaacttgaattacgccagctgtctacggggtccagtagccgagctaacagaattaggtcaaattcttccgcagccaatctgatggccaaaaaaagagtaattcgaatgttaatcgtcattgtggtacttttttttctgtgctggatgcccatcttctccgccaatgcctggcgagcatatgatactgcatccgcagaacggcgtctgtccggcacaccgatcagcttcattctactgctttcatatacttcatcttgcgttaaccctataatctactgttttatgaataaacggttccggctcggttttatggccactttcccgtgctgtcccaatccaggaccccccggcgcaaggggtgaggttggtgaggaggaggaggggggtacaactggagctagtttgtctagattctcctactctcatatgtccgcatccgtcccaccccagtag

SEQ ID NO: 111990 - DNA, 1344 bp, synthetic construct
  misc_feature 1..1344: note = Description of Artificial Sequence: Synthetic coding sequence
  source 1..1344: mol_type = other DNA
atggaactgttgaagctgaataggagtgttcagggcactggccccggccctggggcgagcctatgccgcccgggggctccactgctgaattccagtagcgttggaaatctaagttgcgagcctcctcggatccgaggagcgggtactcgcgagctcgaactggccatccgtattacgttgtatgccgttatctttctcatgtctgtcggtggcaacatgctaattattgtggtgctcggcctgagccgccggctgcgtacagtcactaacgcttttctgctgtcattggccgttagtgatctgctgcttgccgtcgcatgtatgccctttacactgctgcccaaccttatgggaacattcatcttcgggacggtgatatgtaaagcggtgtcttatctgatgggagtctcagtgtcagtatctacgctctcattggtggccatcgccctcgagagatattccgcaatctgtaggccacttcaggcccgggtgtggcagaccaggtcacacgctgccagggtaatcgttgctacctggctgttgtccggtctgctcatggtcccttatccggtatacactgtggtccagccggtaggacccagagtgctgcagtgcgttcatagatggccctctgctcgcgtgagacagacctggagtgtgctgctgctgctgcttctcttctttatccctggtgtcgttatggcagttgcgtatggccttattagcagggagctgtatctaggtttgaggttcgatggcgactccgacagtgactcgcagagcagggtcagaaaccaaggagggctaccaggcgctgttcaccaaaacggccgatgccggcccgagaccggggccgtgggtgaggatagtgatggctgctacgtccagctgcccaggtcacggccagctctggagctgacagcccttacagcgccgggccctgggagcgggtccaggcctacccaggcgaagcttttggcaaaaaaacgcgtggtgcgcatgctgctcgtgatagtcgtcctgtttttcttgtgttggcttcccgtctattcagcaaacacttggagagcattcgacggccctggagcccaccgggccctctcaggggcccctatctccttcatccatcttctgtcatacgcctccgcctgcgtcaatccactagtgtattgttttatgcacagaagatttcggcaggcatgtctagagacctgcgctagatgttgccctcgtcctcctcgagctagaccccgtgcccttccggacgaagatccccctacaccctccatagcttctctgtccagactgtcttacacaactatcagcaccctaggtccaggatag

SEQ ID NO: 111991 - DNA, 1551 bp, synthetic construct
  misc_feature 1..1551: note = Description of Artificial Sequence: Synthetic coding sequence
  source 1..1551: mol_type = other DNA
atggagctgctgaaactcaataggtccgtccaggggacaggcccaggtcccggagcctccctgtgtaggcccggtgcccctctgttgaactcgtctagtgtagggaatctgagttgtgagcccccccgtatcagaggcgccggaacaagagaactcgagttggctatacgaattaccctttatgccgtaatttttctgatgagcgtggggggtaatatgctgatcattgtcgtactggggctctcaagacggctccggaccgtcactaatgcattcttgctgtcgctcgctgtgagcgaccttcttctggcggtagcgtgcatgcctttcaccctgctgccaaacctgatggggactttcattttcggcacagttatttgcaaggccgtgtcttatctcatgggcgtctccgtctcggtctccacgcttagtctggtcgccattgccctggagcggtatagcgccatatgccggcccctgcaggccagggtttggcagacaaggtctcacgccgccagggttattgtagctacctggcttctatccggacttctgatggtcccttatcctgtgtatacggtggtccagcccgttggcccaagggtgctacaatgtgtgcaccgatggcctagcgcccgcgtgcggcaaacctggagcgtgctactgctcctgttgcttttcttcattcccggggtagtgatggctgtcgcctatggcctcatttctagagaattgtacctcggcctccggttcgacggagactctgatagtgatagtcagtccagggtgaggaaccagggcgggttgcctgggggagccggccctcgcgagcagaatttgggcgaagccgaactgtggcgtgctacggggcccgctggcgtaggcggaactgagatgaaggtacgggtaagacggaagttagagatggaactgtcttgggagaggcggtcggggggagattgggctggggattggggcgactcccccttcagcctgacagcacatcccctgtgcagcggggccgtgcatcagaacggccggtgtagaccggaaactggcgccgttggcgaagattccgatggatgctacgtgcaactgcccagatccaggcccgccctggagctcactgccctcacggcccccggtccgggcagtggatccaggcccactcaggcgaaattactggctaaaaagagggttgtgcggatgctccttgtgattgtagtgcttttctttctgtgttggttgcctgtctacagtgctaatacgtggagggcgtttgatggccctggagctcaccgtgccctgtctggcgctcccatttcatttatacacctgctgtcatatgcatcggcctgcgtcaacccccttgtgtactgctttatgcacaggcgttttaggcaagcatgcttggagacctgtgcacgatgttgcccaaggcctcctcgcgcccggcctagagcactccctgatgaggatccccctactccatcaatcgccagccttagtcgactgagttatacgactatttcaacattagggcccggatag

SEQ ID NO: 111992 - DNA, 819 bp, synthetic construct
  misc_feature 1..819: note = Description of Artificial Sequence: Synthetic coding sequence
  source 1..819: mol_type = other DNA
atgagctgtcacaactgttctgatccccaggtactttgctcctccgggcagctgttccttcaacccctctgggaccacctgagatcctgggaggctctgctgcagagccccttcttccccgtcattttctctattactacatatgtggggttctgcttaccgttcgttgtgctcgacattctctgctcctgggtgcctgcactacgacggtataagattcaccccgatttcagccccagtgcgcagcagctgcttccttgtctgggccaaactctgtatcaacacgtgatgtttgtattccccgttacactcttgcattgggccagaagccccgcactgctcccacatgaggccccagaactcctgctgctgctccatcacattctcttttgcctattgctgttcgacatggaatttttcgtttggcatctactgcaccataaggtgccctggctgtaccgcacttttcacaaagtgcatcatcagaactctagttcctttgcgctggccacacagtatatgtcagtttgggaactgttctctttgggattctttgacatgatgaacgtgacattattgggctgccaccctctgacaactctgacctttcatgttgtgaacatttggctcagtgtggaagaccactctggttacaacttcccatggtccacccaccggttggtgccctttggttggtatggaggcgtggtgcaccatgatttacaccattcgcactttaactgtaattttgctccttactttacgcattgggataagatactgggcaccctcagaacagccagcgtgcccgcaagatag

SEQ ID NO: 111993 - DNA, 1482 bp, synthetic construct
  misc_feature 1..1482: note = Description of Artificial Sequence: Synthetic coding sequence
  source 1..1482: mol_type = other DNA
atgctggccgctacagtcctgaccctggctctcctcggcaatgctcatgcatgttctaaggggacaagtcacgaagcaggcatcgtctgtcggatcacgaagcctgctctacttgtcctcaaccatgaaaccgccaaggttattcaaaccgctttccagcgtgcatcttatcccgatataaccggcgagaaggcaatgatgctgcttgggcaggtgaagtacggcctgcacaatattcagatcagccatctgagcattgcttcgtctcaagtcgagttagtcgaggccaaaagcatcgacgtgtcaattcagaacgtatctgtcgtgtttaaaggcactcttaaatatgggtatactactgcttggtggctaggcatcgatcagtccatcgacttcgagatcgatagcgcaattgaccttcagatcaatactcagttaacctgcgattcaggtcgcgtgcggactgatgctccggactgttacctgtccttccacaaactgttactgcacctgcagggtgagcgggagcctggttggattaagcagctgtttaccaacttcatctcatttacattgaagcttgtactgaaaggccaaatctgtaaggaaatcaacgtcatttccaatatcatggctgatttcgtccagactagggccgcttctatcctatctgacggagacatcggcgtggacatttctctgactggcgaccccgttattactgcttcctacttagagtctcatcacaaaggccacttcatatacaagaatgtctcggaggatcttccgctgcctacctttagcccgactctgttaggggactccaggatgctttacttttggttttcagagagggtatttcatagcctcgcgaaagtagcatttcaagatgggcgcttaatgctctccctgatgggcgacgagttcaaggccgtcttggaaacctggggttttaacacgaaccaagaaattttccaagaggtggtaggcgggttcccttcacaggcacaggtgacggtccattgtctaaaaatgccaaagatctcctgccagaataaaggtgtggtggtgaactcttccgttatggtgaaatttctcttcccccggcctgatcagcaacacagtgtggcttacacttttgaagaggacattgtcactactgtgcaggcaagttattctaaaaagaagttgtttctgtctctgctggattttcagattactcctaaaacagtgtctaatcttacagagtcctcatctgagagtgtccagagcttcctgcagtccatgattaccgcggtcggtatacctgaggtgatgtcacggctggaagttgtctttactgcgctgatgaattcaaaaggagtttccctgtttgatattatcaatccagaaattatcacaagggacggatttctgctcctacagatggacttcggtttcccagaacatttgcttgtagatttcctgcaaagtctttcctag

SEQ ID NO: 111994 - DNA, 1302 bp, synthetic construct
  misc_feature 1..1302: note = Description of Artificial Sequence: Synthetic coding sequence
  source 1..1302: mol_type = other DNA
atgctggccgccaccgttctgacactagccctgctggggaacgcccacgcttgctccaaaggcacgtctcacgaggcgggcatagtctgcagaattacgaagccagcactgctcgtcctgaaccacgagacagccaaagtcattcagactgcctttcagagagccagttaccctgatataaccggggagaaagctatgatgctactcggacaagtgaagtacggactgcacaacatccagatctcccatttatccatcgcatcgagtcaggtggaacttgtagaagccaaaagcatagatgtgtcaatccagaacgtgtccgttgttttcaaagggacactaaagtacggatacacaacggcttggtggttgggcatcgatcaaagtatagatttcgagatcgattcagctattgatttgcaaatcaatacacagcttacctgcgactctggacgcgtccggactgatgccccagattgctatctctctttccacaagctcttactgcatttgcagggcgaaagggaacctgggtggatcaaacagctctttacaaactttatttctttcacactgaaacttgttctaaaagggcagatttgcaaggagattaacgtcatctccaatataatggcagattttgtgcagacccgagccgcgagcatactgagcgacggggatataggagtggacatctctctcaccggcgaccctgtcatcactgcatcatatctggagtcacaccacaaggcggtgcttgaaacctgggggtttaacacaaaccaggagatatttcaagaggtggtggggggttttccgtcccaggcccaggtgaccgtgcattgtctaaagatgcctaagatttcttgtcagaacaagggcgtggtggtgaacagtagcgtcatggttaaattcttattcccacgtcctgatcagcaacacagtgtggcttatacgttcgaggaggatattgttaccaccgtgcaagctagttatagcaagaagaaattatttctgtctctcctggactttcaaatcacacctaaaaccgtctctaacttgaccgagtcctcctcagagagcgtgcagtccttcctccagtccatgatcactgctgttgggatccctgaggttatgtctaggctggaggtggtcttcaccgctctgatgaacagtaagggagtctctctgtttgacattattaatcctgagataatcacacgggatggcttcctcctgctccagatggactttgggtttccagaacatttgctcgtcgattttcttcagtcgctctcatag

SEQ ID NO: 111995 - DNA, 1374 bp, synthetic construct
  misc_feature 1..1374: note = Description of Artificial Sequence: Synthetic coding sequence
  source 1..1374: mol_type = other DNA
atgaagactaagttttgtactggaggagaagctgagccatcccctcttggcctcctactgtcctgcgggagtggctctgctgcccccgcccccggtgtgggacagcagagagatgcagccagcgatctagaatcaaagcagctgggcggacaacagcccccactcgccctgcctccaccgccccccctaccgctgccacttccactcccccagcccccccctccacagccccccgccgatgaacagcccgaacccaggaccagacggagagcctatctgtggtgtaaagagttcctgccaggggcttggcggggtctgagggaggatgagtttcacatttccgtgatcagaggaggactcagcaacatgttattccagtgtagtctgcccgacaccaccgcgacactgggggacgaaccacggaaggtcctgttgagactgtacggcgcgattctccagatgcgcagctgtaataaggagggcagcgagcaagcacagaaagaaaatgaattccaaggagctgaagccatggtcctcgaaagcgtaatgttcgccattcttgcagagcgaagcctgggacctaagctctacggaattttcccacaaggaaggctggaacagttcataccatctcggcgcctggatactgaagagctaagcctgcccgatataagtgccgaaatagctgagaagatggccactttccatggcatgaagatgccgttcaacaaggagccaaagtggctctttgggacgatggagaagtacttaaaggaggtcctgcgtataaaatttaccgaagagtcccggataaaaaagctgcataaactgctaagctacaacttacccctagaactggaaaaccttaggagcctgctggagtcaactccatcccccgtggttttctgccacaatgattgtcaggaaggtaacatactgctgctcgaaggaagagagaactccgaaaaacagaagttaatgttgatcgattttgagtattcctcttataattacaggggatttgatatcgggaaccacttctgtgagtggatgtacgactactcctacgagaagtacccattcttcagagcgaacattaggaaatacccaactaaaaaacagcagctccactttattagctcctatctgcccgcctttcaaaacgatttcgaaaatctgtccactgaagagaagagcataattaaggaggagatgcttttagaagtgaaccggttcgctctggcaagtcatttcctgtggggcctgtggtcgatcgtgcaggccaagatctctagcattgagtttggatacatggactacgcccaggccaggtttgatgcatacttccaccagaagagaaagcttggagtgtag

SEQ ID NO: 111996 - DNA, 1320 bp, synthetic construct
  misc_feature 1..1320: note = Description of Artificial Sequence: Synthetic coding sequence
  source 1..1320: mol_type = other DNA
atgaagacaaagttctgcaccggtggagaagcagagccctctcctttggggctgttgcttagctgtgggtccggcagcgctgcacctgccccaggtgtgggtcagcagcgcgacgcagcatcagatctggaatctaagcagctaggagggcagcagccaccactggccctgccacccccccctcctctcccacttccgcttcccctcccccagcctcccccaccccaacctccagcggacgagcagccggaaccacgcacccgccgccgcgcttacctctggtgtaaagagttcttgcccggcgcatggcgcggcctcagagaggacgaattccatatttctgtgattaggggtggtctaagcaatatgctttttcagtgtagtctccccgacacgaccgccacactgggtgatgagcctaggaaagttctgctccgtctgtatggggccatcttgcagatgggagcagaagccatggtgctggagagcgtgatgttcgcgatcctggccgagaggtcactaggaccgaaactctatggtatcttcccacaaggccgcctcgaacagttcattccatcacggcgactggacaccgaagagttgtccctgccggatatcagcgccgaaatcgctgagaagatggccacctttcacgggatgaaaatgccattcaataaggagccgaagtggctgtttggcaccatggagaagtacctcaaagaagtgctgcgcatcaaatttactgaagagtcgaggatcaaaaaactgcataagttgctgtcttacaatctccccctcgaactggaaaatctcagatctctgttagagtcgactccttcgcctgttgtgttttgccataatgattgtcaggagggcaatattctgctgttggagggccgggagaattcggaaaagcagaagctcatgttgatcgactttgaatacagcagttacaactacaggggattcgacatcggcaaccacttttgtgagtggatgtacgactacagttatgagaagtacccctttttccgcgcgaacatcagaaagtaccccaccaagaagcagcagctgcactttatttcaagctacttgccagctttccagaacgatttcgagaatctcagcaccgaagaaaagtccatcattaaggaggagatgctcctagaggtcaatcggttcgccttagctagccacttcctctggggcctgtggagcatcgtgcaggcaaaaatatcgagcattgagttcgggtatatggattatgcacaggcacgattcgatgcatactttcaccagaagagaaagctgggagtgtag

SEQ ID NO: 111997 - DNA, 1188 bp, synthetic construct
  misc_feature 1..1188: note = Description of Artificial Sequence: Synthetic coding sequence
  source 1..1188: mol_type = other DNA
atggcagctgaggcaaccgcagtggccggcagcggcgctgttggagggtgcctggccaaggatgggctgcagcagtctaagtgcccagacactactcccaagcgcagaagggcctcgtccctgagccgggacgccgaacgcagggcctaccagtggtgcagagagtacctcgggggagcttggagaagggtgcagcccgaggagctgagagtttacccagtctcaggcggcctatctaatctgctctttagatgttcccttcctgaccacctgccttcagtgggtgaggaacccagggaagtcctgctgcgtctttacggggcaatcctccagggagtggacagtttggttctggagtcggtcatgtttgctatcttagccgagagatctctgggaccgcaactgtacggcgtgttcccagaaggacgactcgagcaatacatcccgtcccgacccctgaaaacccaggagctccgggaacccgtcttgtctgccgccattgccaccaagatggctcagttccacgggatggagatgccttttaccaaggaacctcactggctatttgggacaatggagcgatacctcaagcagatacaggacctgccaccaacaggcctacccgagatgaatctcttagaaatgtatagcttaaaggatgaaatgggaaacttgagaaagttgctcgagtccacaccaagcccagtcgtcttctgccacaacgatatacaggaggggaatatcctcctccttagcgaaccagagaacgccgattccttgatgctcgtggattttgaatatagttcctacaattatcggggatttgatatcggaaatcatttttgcgagtgggtgtatgactacactcacgaagaatggcctttctacaaagcacggcctaccgactatccaacgcaagagcagcagcttcacttcataagacactacttagccgaagccaagaagggcgaaaccctctcccaagaggaacagcggaaattagaggaggacctcttggtcgaagtgtctcggtatgccttggcctctcattttttttgggggttgtggtctatcctccaggcctccatgtcaacaattgagtttgggtatctggactacgcccaaagcagattccagttttacttccagcaaaagggccagctgaccagtgtgcatagttctagctag

SEQ ID NO: 111998 - DNA, 2247 bp, synthetic construct
  misc_feature 1..2247: note = Description of Artificial Sequence: Synthetic coding sequence
  source 1..2247: mol_type = other DNA
atggggctgcgcaccgccaagaaaaggggccttggaggcgggggcaagtggaagcgcgaggaaggtggaggtacccgagggcgccgagaggtgcgccccgcctgctttctgcaaagcgggggcagaggagatcctggtgatgtcggagggcccgccggaaaccctgggtgcagtccccacccgcgggctgccactcgacccccccccctgccggcccatacccctgctcacacacctgaatggtgtggtgctgctagtgctgaggcagccgaaccccgcagagccggaccccatctgtgcattcccgctcctggcttgacaaagacacctatactggaaaaggtgcctagaaagatggccgccaagactcctagtagcgaagagtcggggctgccaaaactgcctgtgccacccctgcaacagacactcgctacatacctgcaatgtatgcgtcacttagtgtcagaggaacagttcaggaaatcccaagctatcgtgcaacagtttggggctcctggcgggctcggggaaaccctgcaacagaagctgttagaacgacaggaaaaaacagccaattgggtgtccgagtattggcttaacgacatgtatctaaataatcgtctcgcgctccccgtgaactcatcacccgctgttatctttgcgcgccaacacttccctggcactgatgaccagctcaggttcgcggcaagcctgatcagtggcgtgctcagctacaaagccctgttagacagccattccatccccacagattgtgctaagggacagctttccgggcagcccctgtgcatgaaacagtactacggcctgtttagctcttataggctccccggtcacacgcaggacacccttgtggctcaaaactctagtatcatgcctgagccagaacacgtgatcgtcgcatgctgtaaccaattcttcgtcctggatgtggtaattaactttcgaaggctgtctgaaggggatctattcacccagctccgaaaaatcgtcaaaatggcctccaacgaggacgaaagacttccccctattgggctgctgacttctgatggcaggagcgaatgggctgaagcaaggaccgtgctggtaaaggattctaccaatagggacagcctggacatgattgagcggtgcatttgcttggtgtgcctggatgctcccgggggagtcgagctatcagacactcatcgagcacttcagctattacacggtggtgggtattcgaaaaatggggccaaccggtggtatgacaagtctctgcagttcgtggtggggagggacggtacttgcggagtggtatgtgagcactctcctttcgacggcatcgtgctggtgcagtgcactgaacatctcctgaagcacgtgacccagagcagcagaaaactcattagggcggattcagtgtcagaactacccgcgccacgacgcttgcggtggaagtgttctccagagatccagggacacctcgctagttccgcggagaaactccagagaattgtgaagaacctcgactttatagtgtataaattcgataactacggaaagacctttataaaaaaacagaaatgctcgcccgatgccttcattcaagtggcattgcagctcgctttttacaggctgcatcgccgtctggtgccaacctatgagtctgcttcaatccgcagattccaagagggaagagtggataacatcaggtccgccacacctgaggccctcgcattcgtgagggcggtaactgatcataaagccgccgtgccggcctccgaaaagttgctgctgttgaaagacgcaatccgggcacagaccgcctacactgttatggcgatcacgggcatggcgatcgacaaccatttgcttgcattgcgcgaactcgcccgagccatgtgcaaagaacttcctgagatgttcatggacgagacatacctcatgtcaaaccgtttcgtgttgtcaaccagccaggtgcccaccacaaccgaaatgttttgctgctatggtcctgtggttccaaatggatacggcgcatgctacaatcctcagcccgaaaccatcttattctgcatatctagctttcactcctgtaaagagacatccagtagcaaattcgccaaggctgtcgaagaaagtttaatcgacatgcgcgatctgtgcagtctgctgccccccacagaatcaaaaccactagccaccaaggagaaagcgacaagaccttcgcaagggcaccaaccctag

SEQ ID NO: 111999 - DNA, 1893 bp, synthetic construct
  misc_feature 1..1893: note = Description of Artificial Sequence: Synthetic coding sequence
  source 1..1893: mol_type = other DNA
atggcagctaaaacaccatcctcagaggagtccggtttaccaaaactgccagtgccgccacttcagcaaacactggccacttatttgcagtgcatgcggcacctcgtctctgaggagcaattccgcaagagccaggcaatcgttcagcaattcggcgccccaggcggactgggggagacgcttcagcagaaattgctcgagaggcaagagaaaacagcaaattgggttagcgagtactggctcaacgatatgtacctgaacaatagactggcactgcctgtgaactccagcccagctgtgatcttcgcacgccaacactttccaggtacagacgaccagcttcggtttgctgcctcgttgatatccggagtcctctcttacaaggctctactcgattcccattctattcccactgattgcgcaaaaggacagctctctggccagcccttgtgcatgaagcagtactacggcctgttttctagttaccgactgcctgggcacacccaggacactctggttgcgcagaactcgtccatcatgccagaacccgaacacgtaatagtggcttgctgcaatcaattcttcgttctggatgttgtaatcaacttcaggcgcttgtctgagggcgacttgtttactcagctgcggaagattgtcaagatggccagtaacgaggacgaaagactgccgccaatcggactcctgactagcgacggtcgcagcgagtgggccgaagcccggaccgtcctggtgaaggattcgaccaacagggattcacttgatatgatagagcgctgcatttgcctcgtgtgcctagatgcaccgggaggcgtcgaactttccgacactcaccgtgcccttcagttacttcatggggggggttatagcaagaacggcgcaaacaggtggtacgataagtcacttcaattcgtggtgggacgcgatggaacttgcggcgtcgtgtgtgagcacagcccctttgatggaattgtgctggtccagtgtacagagcacctcttgaagcacgtgactcagtcctctcgtaagctgatcagagctgactctgtgtcagagcttcctgcgccaaggaggctgaggtggaaatgtagtcctgagatccaaggtcatttggcatcctccgctgaaaagctgcagcgcattgttaagaacctcgattttatcgtgtataagtttgataactacggtaagaccttcatcaaaaagcagaaatgctctcccgatgcattcatacaagtggcccttcagttggccttctatcgcctccaccgcaggctggtccccacatacgaatctgcctctatcagacgattccaggaaggacgagttgataacataaggtccgctaccccagaagcacttgcttttgtgagagctgttaccgaccacaaggccgctgtgcctgcctcagaaaaacttctactgctgaaagatgcaatccgcgctcaaacagcctacacagtgatggccatcaccggtatggccatcgataatcaccttctggccctgcgcgagctagcgagagccatgtgtaaggagctaccagaaatgtttatggatgagacatatctcatgtctaatcgtttcgtcttatccacttcccaggtacccacaaccaccgaaatgttctgttgctatggaccagtggttcccaacggctatggcgcctgctacaaccctcagcctgaaaccattttgttctgtattagctcttttcactcatgcaaggaaacaagtagctccaagtttgccaaggccgtggaggagagccttattgacatgcgggacctctgttctcttctgccacccaccgaatccaaaccattggccaccaaggagaaggctacacgaccctcgcaaggtcaccagccctag

SEQ ID NO: 112000 - DNA, 1893 bp, synthetic construct
  misc_feature 1..1893: note = Description of Artificial Sequence: Synthetic coding sequence
  source 1..1893: mol_type = other DNA
atggctgccaaaacaccaagttccgaggaatcaggactccccaaactgccggtgcccccactccagcagaccctagccacctacctgcaatgtatgcggcaccttgtatcagaggaacagtttcgcaaatcccaggcaatagttcagcaatttggggctcctgggggactcggggagacactgcaacagaagctactcgagaggcaggagaaaactgctaattgggtgagcgagtactggctgaacgacatgtatctgaataatcgactcgctctgcccgttaactccagccccgctgtgatcttcgcacgtcagcacttccctggtaccgatgatcagctgcggtttgccgcctccctgatttctggagtgctcagttacaaagcattactcgatagtcactccatccctaccgattgcgctaagggccagctaagcggtcaacccctctgcatgaaacagtactatggcctttttagtagctaccgcctgcccggacacacacaggacactctggtagcacaaaactcaagcataatgcctgagccagagcatgtaatcgtggcctgctgtaaccagttttttgtgctggatgtggtgattaacttcaggaggctgagcgaaggtgatcttttcacacagttacgaaaaatcgtgaagatggcctctaatgaggatgaacgcttgccccctataggactcttaacttcggacggacggtccgaatgggctgaagcacggacagtgctggtgaaggacagtacgaacagagattcgctcgatatgatcgaacgttgcatttgcttggtgtgcctagacgccccggggggtgtggagctgagtgacacccaccgtgcccttcagctactgcacggcggggggtattccaagaacggcgcgaatagatggtacgataaaagccttcagttcgtggtgggcagagatggcacttgcggggtcgtttgcgaacacagcccgttcgacggcattgttctggtgcagtgcacagagcatttacttaagcacgttacccagagctcacgaaaactcattcgggccgattcagtgagtgaactcccggccccccgccgcctcagatggaagtgtagcccagagattcaggggcatctggcgtcttccgctgaaaagctgcaacggattgtcaagaaccttgacttcatcgtatacaagtttgacaactatggaaagacctttataaaaaaacaaaagtgctctccagatgcctttattcaggtggcacttcaattggcgttctataggctgcatagaaggctggtacccacctatgagtctgcctccataaggcgcttccaggaagggcgggtcgacaatattcgttcggctacacccgaggcactggctttcgtacgggcggtgactgaccataaggccgccgtgccggcatctgaaaagttgctcctcctcaaggatgcgattcgggcacagacagcttacaccgtcatggctatcaccggcatggcgatcgacaatcacttgcttgccctgagggagttggcccgggccatgtgtaaggaattaccggaaatgttcatggacgagacctacctcatgtctaatcgctttgtgcttagtacgtctcaggtgccaactactaccgagatgttctgctgttacggtccggtcgtgccgaacggctatggcgcttgttacaatccacaacccgagacaatcctgttctgcatttcctcattccattcctgcaaagagacttcttccagtaagtttgccaaagccgtggaggaatctctcattgatatgagggatctgtgctctctgctgccccctaccgagtcaaagccgcttgcaaccaaggaaaaggctacgcgtccttcccaggggcaccagccttag

SEQ ID NO: 112001 - DNA, 1893 bp, synthetic construct
  misc_feature 1..1893: note = Description of Artificial Sequence: Synthetic coding sequence
  source 1..1893: mol_type = other DNA
atggcagcaaagaccccttcgagcgaagagtcagggcttcctaaactccccgttcctcctctgcagcagacactggctacatatctccagtgtatgcgtcatctggtgagcgaggagcagtttcggaagtcgcaggccatcgtacagcagttcggggctcctggaggattgggagaaaccttacagcagaagctattggaaagacaggaaaagactgccaattgggtctcagagtactggcttaatgacatgtatctgaacaataggctggcgctcccagtgaatagctctccagccgtcatcttcgcccgtcagcattttcccggaactgacgaccagctcagatttgccgcctccctgattagcggcgtcttgagctataaagctctcttggacagtcactctatccctactgactgtgcaaaaggacagctttctggtcagccactgtgtatgaaacagtattatggccttttctcatcatacagactgccgggccatacccaggatactctggtggcccagaactcgtccataatgcctgagccggagcacgtcattgtggcttgctgcaatcaattttttgtgctggatgtggttatcaacttccgccgtctgagcgagggcgatctgtttacgcagctgagaaaaatagtgaaaatggcttccaacgaagacgagagacttcccccaattggtctcctgacttcagatgggcgtagtgagtgggccgaggccagaaccgtgctcgtgaaggactccactaaccgcgattcactggacatgatcgagcggtgcatatgcctggtttgcctcgatgcacccggtggtgtggaactgtccgacacccacagggccctacagctactccacggaggtggctactctaaaaacggcgccaatcgctggtatgacaaatccttgcagtttgttgtgggacgcgacggtacatgtggcgttgtgtgcgagcactcaccctttgatggtattgtattggtccagtgtaccgagcatctactgaagcacgtaacccagtcgtctcgaaaactgatcagggccgacagcgtctcagaactccccgcgccgagaagactgagatggaaatgctcccctgaaattcaaggtcatctggccagttctgccgaaaagttgcaacggatagtgaaaaatctagacttcattgtatataaattcgataactatggaaaaaccttcataaagaagcagaagtgttcaccagatgcatttattcaggttgcacttcagttagctttttacagattgcataggcgcctcgtaccaacttacgagagcgcatcgatccgtagattccaggagggacgtgtcgataatatccgcagcgcgactccagaggcactggctttcgtcagagccgttaccgaccacaaggcagcagttccggctagcgaaaagttacttctgctgaaggatgcgataagagctcagactgcctacactgtgatggccatcaccggcatggccatcgacaatcaccttcttgctctgcgggaacttgcccgcgcaatgtgcaaagagctacccgaaatgtttatggacgaaacatacctcatgagcaatagatttgtgctctctacaagtcaggtgccaaccacaaccgaaatgttttgctgttatggacccgtggtgcctaacggctatggcgcctgttataaccctcagccagagacgattctgttctgtatctcttcctttcatagttgcaaggaaacctcctcgtcaaaattcgctaaggctgtggaagaatcactgatcgacatgcgggacttatgctccctcctgccccctaccgagtccaagcctctggcgacaaaggaaaaagccacccgcccgagtcagggtcaccagccttag

SEQ ID NO: 112002 - DNA, 2001 bp, synthetic construct
  misc_feature 1..2001: note = Description of Artificial Sequence: Synthetic coding sequence
  source 1..2001: mol_type = other DNA
atgtggcctgagtgtagggacgaggccctttccacagtgggtccacatctgtgtatccccgcccccggcctaactaaaacacccatcctggagaaggtgcctaggaagatggctgccaagactccttccagtgaagaatcaggcttgccgaagctccctgtgcccccactgcagcagacgctggctacctatctgcagtgtatgcgccaccttgtgtcagaagaacagtttcgaaaaagccaagccattgtgcagcagttcggggcccccggaggactgggagagactctgcagcagaagctcctcgaacgacaggagaaaaccgccaactgggtgtcagaatactggctgaacgacatgtacctgaacaatcgcctggctcttcccgtgaactcgtcgcccgcagtgattttcgcccgccaacacttccccgggaccgacgatcagctcagatttgccgccagtttaatctctggtgtgttgagctataaagcattactggatagtcacagtatacccaccgattgtgccaagggccagctgagtggacagcctctttgcatgaagcagtattacgggctattttcgagctaccgcctgcccggccacacccaggataccttggtggcccagaacagctccatcatgccggaacctgagcacgtgatcgtggcttgttgtaaccagttctttgttttagatgtcgttattaattttcgacggttgtctgaaggcgatctgttcactcaactgaggaaaatcgtgaagatggcatcaaacgaggatgagcgtctgccccccattggactgctgacatcagacgggcgctctgaatgggctgaagctagaacagtgttagtcaaagattcgactaacagggatagcctggacatgattgagagatgcatctgtttggtatgcctggatgccccgggcggagtcgaactgtctgatacccaccgggctctccagctgttgcacggtggtggatattccaaaaatggtgccaacaggtggtatgataagtcactgcagttcgtggtcggtagagacggaacttgcggggttgtatgcgagcacagcccctttgacgggatcgtgctggtccagtgtacggagcacctactgaagcacgtgacccaaagtagcagaaaattgattcgggccgatagcgtgagcgaactgccggcccctcgccgactcaggtggaaatgttccccagaaatccagggacacctcgccagctccgctgagaagctgcagaggattgtgaaaaacctggacttcatcgtgtacaagttcgataactatggaaaaactttcatcaaaaagcagaaatgcagccctgatgcattcattcaagtggcgctgcaacttgcgttctaccgcctgcatcggagactggtacccacatacgagagcgcctcgattcggcgcttccaggagggaagagtcgataacatcaggtctgctacacccgaagcattggcctttgtccgggccgtgacagaccataaagcggcagtgcccgcctcagagaagcttctgctgctgaaagacgctattcgggcacagacggcctatactgtcatggcaatcactggtatggccattgataatcacctgttagcactcagagaactcgcacgcgctatgtgcaaagaactgcctgaaatgttcatggacgagacgtatctgatgagcaaccggttcgtcttgtcaacaagccaggtgcctacaactaccgagatgttctgctgttatgggccggtggtcccaaatggatacggggcttgttacaatccacagccagaaaccattctcttttgtatcagttcctttcattcttgtaaggaaacctcatcctccaagttcgcgaaagccgtagaggagtctctgatagacatgagggacctttgtagtctgctccccccaaccgaaagtaagcccctagcaaccaaggagaaagcgacccggccttcccaggggcaccaaccttag

SEQ ID NO: 112003 - DNA, 1638 bp, synthetic construct
  misc_feature 1..1638: note = Description of Artificial Sequence: Synthetic coding sequence
  source 1..1638: mol_type = other DNA
atggctgccaaaaccccttcgagcgaggagtctggactgcccaaacttcccgttccccccctgcaacagactctagcgacctacttacaatgcatgcggcacctggtcagtgaagaacagtttcggaaatcccaagccatagtgcagcagttcggcgccccagggggcttgggcgagacgctgcagcagaagttgctcgagagacaggagaagaccgccaactgggtgagcgagtattggttaaacgacatgtatctgaacaaccgcctggctctcccagttaatagttcacccgcagtcatctttgccaggcagcatttcccgggcacggacgatcaacttaggtttgctgctagcttaatcagcggcgtcttatcctataaggccttacttgattcacactcgatccctaccgactgcgccaagggtcagctgtccggccagccgctgtgcatgaaacaatattacggcctattctcgagctatcgactccctggccacactcaggataccctcgtggcccagaacagtagcatcatgccagaacccgagcatgtcatcgtcgcctgctgtaatcagttttttgtgctggatgttgtgattaattttagaagactgtcggagggcgacctgttcacacagctgcgtaagatagtcaaaatggcaagtaatgaggatgaaagactgcccccgatcggattgctgacctccgacggccggtctgagtgggcagaggccaggactgtgctcgtgaaagacagtacaaatcgggactccctggatatgattgagagatgcatctgtcttgtttgtctcgatgctcccggaggggtagagctgtccgatacgcacagagcgctccagttactgcacggaggcggatatagcaaaaatggagccaatagatggtacgacaaatcactgcagttcgtggtcggcagagacggaacttgcggggtggtgtgtgaacattccccttttgatggcattgtgttggtacagtgcaccgaacatctccttaagcatgtgacacagagttcccggaaattgatccgcgccgactccgtgagcgagcttccagctccaaggagactcaggtggaaatgcagccccgagatccaggggcacctagccagctccgccgaaaagctgcaacgcattgttaaaaatctggactttatcgtgtataaattcgataactacggaaagacctttatcaaaaagcaaaagtgttcccccgatgctttcattcaagtggccctgcagctggctttttaccgattgcaccgaaggctcgtccccacctacgagtccgcctctatcaggagatttcaagagggtagggtggataacataaggagtgccacacctgaagccttagcgtttgtacgtgcagtgactgatcataaggctgcagtcccagcctctgagaaactcctgttattaaaagatgccattcgagcacagactgcctacaccgtaatggctatcaccggcatggccatagacaaccacctcctggccctcagggaactggcacgcgctatgtgtaaagagctgccggagatgtttatggatgaaacctacctcatgagcaatagattcgtcctgagtacttcacaattatgctggccatag

SEQ ID NO: 112004 - DNA, 1383 bp, synthetic construct
  misc_feature 1..1383: note = Description of Artificial Sequence: Synthetic coding sequence
  source 1..1383: mol_type = other DNA
atgaatacatcagccccaccagcagtgtccccaaatataacggtgctggcccccggcaaaggaccctggcaggtggctttcattggaataacaacaggactgctgtcactggcaaccgtgaccgggaacttgcttgttctgatcagtttcaaggtaaatactgagctgaagaccgtgaacaactattttctgctcagcctggcatgtgccgatcttatcatcggaaccttctctatgaacctgtataccacctacctgttgatgggccattgggcactcggcactttggcatgcgacctgtggctggctttggactatgtggcgtcaaatgcgagtgttatgaatctgttactgatctccttcgatcgatatttttcggtaacacgcccactttcatatagggcaaagaggaccccgcgacgcgcggccctgatgattgggctggcctggctcgttagttttgtgctgtgggcacccgctattctgttttggcaatatctggtcggggaacgaaccgttctggccggtcagtgctacatacagtttttgagtcaacccatcatcacttttggcacagccatggctgccttttatcttcccgtgactgttatgtgtactctctactggaggatttaccgagagaccgagaacagagcacgggagctggctgcactgcagggaagcgaaacccctggtaagggcggaggttcatcatcctcctccgagagatcccagcccggggccgaggggagccctgagacaccccctggccggtgctgccgatgctgccgtgctcccaggctcctgcaagcttacagttggaaagaggaggaagaggaggacgaaggctcaatggaaagtctgaccagcagcgagggcgaggaacctgggtcggaagtcgtgatcaaaatgcccatggtggaccccgaggcacaagcaccaacaaaacagcctccccgatcaagcccaaacaccgtcaagagacccacaaagaaggggagggacagagcagggaagggacagaaacctcgtgggaaagagcaactcgccaaaaggaagaccttctcactcgttaaggaaaaaaaggccgcccgcacattgtccgcgattcttctggcattcatcctgacctggacaccctacaacattatggtgcttgtctccactttctgcaaagactgcgttccagaaacactatgggaattgggctactggctctgctacgtcaactctacaatcaacccaatgtgctacgccctgtgcaataaggcgttcagagacaccttccgtctgctactgctgtgtaggtgggacaaacgccgctggcggaagatcccaaaacgtcccggctcggtgcatcgcacacccagccggcagtgctag

SEQ ID NO: 112005 - DNA, 405 bp, synthetic construct
  misc_feature 1..405: note = Description of Artificial Sequence: Synthetic coding sequence
  source 1..405: mol_type = other DNA
atgaatacctctgcaccacctgcagtgtctcccaacatcacagtgctggcccccggcaaaggcccgtggcaagtggccttcatcggcattaccaccggcctccttagtctagctactgtcactggtaatctgctggttctgatctcattcaaagtgaacactgagcttaaaacagtcaacaattatttcttactgagtctcgcatgtgcggacttgattatcgggaccttcagcatgaacctgtacactacctacctacttatgggccactgggcactaggtaccctggcctgtgatctttggctggccctggattacgtggcctctaacgcctctgttatgaacctgttgctgatctccttcgacagatacttctctgtaaccaggcctctcagctacagatag

SEQ ID NO: 112006 - DNA, 1365 bp, synthetic construct
  misc_feature 1..1365: note = Description of Artificial Sequence: Synthetic coding sequence
  source 1..1365: mol_type = other DNA
atgaacaccagtgccccaccagctgtctctccaaacataacggtgctggctcctgggaagggcccctggcaggtcgccttcattggcatcactaccgggctgttaagccttgccaccgtgaccggcaatctgcttgtactcatctcctttaaagtgaacaccgaactcaaaaccgttaataactacttcctcctgtccctcgcttgtgcggatctgattattggaacattcagcatgaatctctatactacttacctgctgatggggcactgggccttagggacattggcgtgtgacttgtggctggctttggactacgtggcatcaaacgccagtgttatgaacctgctgctcatcagctttgatcggtatttttcggtgaccaggccgttgtcttacagagcaaagagaacaccgcggcgcgccgcactcatgattgggctggcatggctggtgagtttcgtactgtgggctccagcaattttgttctggcagtatctcgttggggagcgcacggttttggcaggccagtgctacatccagtttctgtcccagcctataatcacattcggcactgcgatggcagcgttttatttgcctgtcacagtgatgtgcaccctgtattggcggatttatcgggagaccgagaaccgcgctcgagagctagcggcactgcaggggagtgaaacacccggaaagggaggggggagctcctctagcagcgaacgaagccagccaggagccgagggatccccggaaacccctcccggacggtgttgcaggtgctgccgggccccacgcctccttcaggcctattcgtggaaggaggaggaagaggaggacgaagggagtatggagtctctgactagttcagagggcgaagagcctggtagcgaagtggtgattaaaatgccaatggttgaccccgaagcgcaggcacctacaaagcaaccacccagatcttcgccaaacaccgtgaagcgtcccactaaaaaaggaagggaccgcgccggaaaaggccaaaaacctagggggaaggagcagctcgccaaacggaaaacattctccttggtgaaggagaaaaaggccgcaagaacattgtccgcaatattactagcctttattttgacgtggacaccctataatatcatggtcttggttagtactttttgtaaggattgtgtgccagaaacactgtgggagctgggctattggctgtgttacgttaacagcactatcaatccgatgtgttacgctctgtgcaataaggccttcagagatacttttcggctcctgttgttgtgcaggtgggataaaagaaggtggcgtaaaatcccaaagcgcccgggatctgtccaccgatag

SEQ ID NO: 112007 - DNA, 1401 bp, synthetic construct
  misc_feature 1..1401: note = Description of Artificial Sequence: Synthetic coding sequence
  source 1..1401: mol_type = other DNA
atgaataactctactaactcatcaaataatagcttagcactgacaagcccctacaaaacatttgaggtcgtgtttatcgtgctggttgccgggtcccttagtctcgttacaattattgggaacatattagtgatggtgtctatcaaggttaataggcacttacagaccgttaataactacttcttattttctctcgcctgcgcagatctgatcataggagtgttctctatgaacctttacactctgtacacagttataggctattggccactgggcccagtggtatgtgatctctggctggctcttgactatgtcgtgtctaatgcttcggtcatgaacctccttattatatctttcgacaggtatttttgtgtgactaaaccgctcacttacccggttaaaaggactactaagatggccgggatgatgattgcggctgcctgggttctgagcttcattctctgggctcctgcaatactgttttggcagtttatcgtgggggtgaggactgtggaggatggcgagtgttatatccagttcttctcgaacgctgctgttaccttcggaaccgcaatagccgccttctatctgcctgtcattattatgaccgtcttatactggcatatctcgcgtgcgagcaagtcccggatcaagaaggacaagaaagagcctgtggcaaaccaagacccggtctccccgagccttgtgcaggggcggattgtcaagcccaataataacaacatgccctccagtgacgacggcttggaacataacaaaatacagaacggcaaagctccccgcgatcccgtcacagagaactgcgtccagggtgaagaaaaagagtcatctaacgattccacctcggtgtccgccgtcgcaagcaatatgcgcgacgacgagataacccaggacgagaacacggtctccactagcctgggtcacagcaaggacgagaattcaaagcagacttgtatccgcattgggacaaagacgcctaaatctgattcttgcaccccaaccaacactaccgtggaggtggtcggcagtagcggccagaatggcgacgagaaacagaatatcgtggcccgtaagatcgttaaaatgactaaacaacctgctaagaaaaaacctcctccttcaagggagaaaaaagtgactcgcactattttggccattctgctcgccttcattatcacatgggccccatacaacgtgatggttcttatcaacactttctgcgcaccctgtattcctaatactgtctggactattgggtattggctatgctatatcaacagcacaatcaacccagcatgttacgctttgtgcaacgctacctttaaaaaaacatttaagcacttgctgatgtgtcactacaaaaacatcggagcgactagatag

SEQ ID NO: 112008 - DNA, 1401 bp, synthetic construct
  misc_feature 1..1401: note = Description of Artificial Sequence: Synthetic coding sequence
  source 1..1401: mol_type = other DNA
atgaataatagtaccaatagctctaacaattccctcgcgctcacctcaccttacaaaaccttcgaggttgtctttatcgtactggtcgcaggatcgctcagtctggtgacaatcatcggcaacattcttgttatggtgtcaatcaaggtgaatcgacacctccagaccgtgaataactacttcctgtttagccttgcatgcgccgacctgattattggggtcttttcaatgaacttatatactctgtatacggtgattggctactggccactgggtcccgtggtctgtgacctgtggctagcattggactatgtggtgagtaacgctagtgtgatgaatctgctgatcatttcgttcgatcggtatttctgcgtcactaaacccctaacctaccccgtgaagagaaccaccaaaatggcaggtatgatgattgccgcagcctgggtcctttcctttattctttgggccccagccatccttttttggcagttcatagtgggagtgcgcacagtcgaggacggcgagtgttacattcagttcttctccaatgctgccgtcacttttggtacagctattgccgcgttctacctccccgttatcattatgacggttctatactggcacatcagcagagcttccaagtctcgaattaagaaagacaaaaaggagcccgtagcaaaccaggacccagtctcaccgtccctggtgcagggacggatcgttaaaccaaataataataacatgccttcttctgacgatggattagaacataacaaaatacaaaatggaaaggctccacgcgacccagtgaccgaaaactgtgtgcagggagaagaaaaggaatcctcaaacgactcaacaagcgtctctgcagtggcatcaaatatgcgcgacgacgaaataactcaagacgagaacacagtgtctacgtctctgggccattccaaagatgaaaattctaagcagacctgcatccgtatcggcacaaaaacaccaaaaagtgactcctgtaccccaactaatacaactgtcgaggtagtgggttccagcggacagaacggcgacgagaaacagaatatcgtggcacgaaagatcgtaaaaatgaccaaacaaccagctaaaaaaaaaccgcctccttccagggaaaagaaggtgacacgaactattcttgctatcctcctggcctttattatcacttgggccccctacaatgtcatggtcctaataaacacattttgtgccccctgtatcccgaacacagtttggaccatcggttattggctctgttatattaattccacaattaacccagcatgctatgccctctgcaatgccacttttaaaaagactttcaaacacctgctgatgtgccactataagaatatcggagccacaagatag

SEQ ID NO: 112009 - DNA, 1401 bp, synthetic construct
  misc_feature 1..1401: note = Description of Artificial Sequence: Synthetic coding sequence
  source 1..1401: mol_type = other DNA
atgaacaattccaccaacagttccaataattctttggcccttactagtccctataaaacattcgaagtggtgttcattgtacttgttgccggatctttgtccctggtcacaattattggcaatattctggtcatggtttcaatcaaggtaaatcgacacctgcagaccgtgaacaattacttcttgttttctctcgcctgcgccgatttaatcatcggagttttctccatgaacctttatactttgtatacggttatcggttactggccccttggtccggttgtgtgcgatctctggctcgccctggattacgtcgtgtccaacgccagcgttatgaacctcctgattatctcttttgatcgctatttttgcgtgaccaagccattgacctaccctgtgaagagaaccacaaagatggcagggatgatgattgcagccgcgtgggtcctgagttttattctttgggcacctgccatcctattctggcagttcatcgtgggggtgcggaccgtcgaggacggagagtgctacatccaatttttttccaatgccgctgtcacgttcggcacagcgatagctgccttctatctacctgtgatcatcatgacagtcctatactggcatatcagccgggcctcgaaatcacggattaagaaggataaaaaggagcctgtggccaatcaggaccccgtcagtcctagtctagtacagggtaggatcgtgaagcctaacaacaataatatgcccagtagtgatgacgggcttgaacacaacaaaatacagaacggaaaagctccacgcgacccagtaactgaaaattgtgtgcaaggagaggagaaggagagttcaaacgacagtacatccgtcagcgccgtagcctccaatatgagggacgatgaaatcactcaagacgagaacaccgtctctacaagtttgggacactctaaagatgaaaatagcaagcagacctgtattagaatcggtaccaagacccccaaatccgattcttgcacccctaccaatacaacagttgaggtggtgggctcatctggacagaacggggacgagaagcagaacatcgttgcgcggaaaatcgtaaaaatgactaaacagcccgctaaaaaaaagccgcctccatcaagggaaaaaaaggtcacgaggactattctcgccatcctcctcgcgttcatcatcacctgggcaccctacaacgttatggtactgataaacaccttctgtgcgccctgtattcccaatactgtctggaccatcgggtactggctatgttacataaatagtacgataaaccccgcctgctacgccctgtgtaatgccactttcaagaagacctttaagcacctcctgatgtgccactataaaaatattggcgccaccaggtag

SEQ ID NO: 112010 - DNA, 1401 bp, synthetic construct
  misc_feature 1..1401: note = Description of Artificial Sequence: Synthetic coding sequence
  source 1..1401: mol_type = other DNA
atgaataactccaccaattcctctaataacagcctggctctgacctccccatacaagacattcgaagtggtcttcatcgtgctggtcgccggctccctctctctggtgaccattataggtaatatcttggtgatggtgagcatcaaggtgaatcgccacctgcaaacggtcaataactatttcctctttagcttggcatgcgcggatttgatcattggggtcttctccatgaatctctatacactgtacaccgttataggctactggcccctgggtccagtcgtgtgcgacttgtggcttgcccttgactacgttgtctctaacgccagtgtgatgaacctgctcatcatcagctttgaccgttacttttgtgtgacgaagccactgacgtacccagtgaagcggactaccaagatggccgggatgatgatcgcagccgcttgggtactgagctttatcctgtgggcaccagctattcttttttggcagttcatcgtgggcgtcagaacggtggaggatggcgagtgttatattcagtttttcagcaacgctgctgtaacatttggaaccgcgattgccgccttctacttacctgtcattattatgactgtactttattggcacattagtagggcctccaaaagccgcatcaagaaggacaagaaggaacctgtggccaatcaggacccagtgagtccaagcctagttcaagggcggatagtgaagccaaataataacaacatgccaagctctgacgacgggctggagcataacaagattcagaacggaaaggctccccgggatcccgttacggagaattgcgtccagggtgaggagaaggagagttcaaacgacagtacctctgtctcagccgttgccagcaatatgcgagacgacgaaatcactcaagatgaaaacaccgtttcgacctccctcgggcacagcaaggacgaaaacagcaagcagacctgcatcaggatcggaacaaagaccccaaagagtgactcatgcacccctactaacaccaccgttgaggtggttggctccagcgggcagaacggagacgaaaagcaaaacattgtggctcgaaaaattgtgaagatgacgaaacagccagctaaaaagaagcctcctccatctcgagagaaaaaagttactaggactatattggccatcttgcttgccttcattattacatgggcaccctataacgtaatggtcttaattaataccttttgcgccccttgtattccaaacacagtctggacaatcggctactggctatgctacattaatagtaccattaatcccgcatgttacgccctgtgtaatgccacatttaagaagacctttaagcacctactgatgtgccattataaaaacattggggctacacgctag

SEQ ID NO: 112011 - DNA, 1401 bp, synthetic construct
  misc_feature 1..1401: note = Description of Artificial Sequence: Synthetic coding sequence
  source 1..1401: mol_type = other DNA
atgaacaacagtactaactcatcgaataatagcttggccctgacctccccctacaaaactttcgaagtggtcttcattgtgctcgtggctgggtcactcagcctggtgacgatcatcgggaacattctcgtgatggtgtctatcaaggtgaatcgccatttacagaccgtcaacaattactttttgttctccctggcttgcgcagatctgatcataggtgtcttttctatgaacttgtacacgctatacaccgtcatcggctactggcccctcggacctgtcgtgtgcgatctttggctagctctggattacgtcgtctccaatgccagtgtgatgaatctcttgataatctccttcgaccgttacttttgtgtaacaaagccccttacctatccagttaagagaactacaaaaatggcggggatgatgattgccgccgcgtgggtattgtcctttattttgtgggcccctgctattcttttttggcagttcatagtcggcgttcgcactgtggaggacggggagtgttatattcagttcttctcaaacgcagctgtaacctttgggacagcaatcgccgcattctatttgcctgtgattattatgaccgtcttatattggcatatcagcagggcctcaaagtcccgcatcaaaaaggataagaaagagccagtagccaatcaggatccggtgagtccttctctggtacagggcaggattgtgaagcccaataacaataacatgccgagctctgatgacggactggaacacaacaagatccagaatggcaaagcacctagagatccagttacagagaattgtgtacagggcgaggagaaggagtctagcaatgattcgactagcgtttctgctgtggccagtaacatgagagatgatgagatcactcaagatgagaatacagtgtcaacctcactggggcacagcaaggacgaaaatagtaagcagacctgtatccgcataggtaccaaaacaccaaaatccgattcttgtacacccaccaacactaccgtagaggtggtcggcagcagtggtcagaacggggatgagaagcagaacattgtagcaaggaaaattgtcaagatgaccaaacagccagcaaaaaagaaaccacctccttcacgagaaaagaaggtcaccagaactatcctcgccattctgctcgcattcatcatcacctgggcaccttacaacgtcatggtgctgataaatacattctgcgccccttgtattcccaacactgtgtggacaataggatactggctctgttacatcaattcgaccattaatccagcgtgctatgcgctgtgtaacgcgacatttaagaagacattcaagcatctgctgatgtgccactacaaaaatatcggggctacgaggtag

SEQ ID NO: 112012 - DNA, 1401 bp, synthetic construct
  misc_feature 1..1401: note = Description of Artificial Sequence: Synthetic coding sequence
  source 1..1401: mol_type = other DNA
atgaataacagcacaaactcctctaataactccttggcactgacctccccatataagacatttgaggtggtgtttatcgtactcgtagcagggagtctgtcattggtgaccattattggcaacattctggttatggtgtcaattaaagtgaatagacatttgcagaccgtgaataattacttcctgttttctttagcttgtgcagacttgataattggcgtgttttctatgaacctctacacactttatacagtcattggctactggccactgggcccagttgtgtgcgatctgtggctggccctggactatgtcgtgagcaatgcctccgtcatgaatctcctcattatttccttcgatagatacttttgtgttaccaaaccccttacttatcccgtgaagagaaccaccaagatggctgggatgatgattgccgcagcttgggtcttatcatttatcctgtgggcacccgcgatactattctggcaatttattgtgggcgtgcgaaccgtggaagatggcgagtgttacatccagtttttttctaatgcggccgtgaccttcgggaccgccattgcggccttctatctcccggtgatcatcatgactgttctctattggcacatttcacgcgcctctaaaagtaggataaaaaaggataaaaaggagcctgtcgctaaccaggatcccgtatccccctccctcgtgcaaggccgcattgtgaagccaaataataacaatatgcccagtagtgatgacgggctcgaacacaacaaaatccagaacggaaaagcacctcgtgacccggtcaccgagaactgcgtccaaggggaggagaaggagagttcaaacgactccacatctgtcagcgctgtggcctctaacatgcgtgacgatgagatcacccaggacgagaacaccgtttcaacatccctgggacactcaaaggatgaaaacagcaagcaaacatgcatacgtatcggcacaaaaactcctaaatcagacagttgcacccccaccaataccactgtagaggttgtgggatcatctggccagaatggggacgagaagcagaacatcgtggcccgtaaaattgtgaaaatgacaaaacagccagcaaaaaaaaagccacctcccagtcgggagaaaaaggtcactaggactatactggcaatcctattggctttcattatcacgtgggccccttacaacgtcatggtgctgatcaacaccttctgtgccccctgcattcccaacactgtatggaccattggatattggctgtgctacatcaatagcactatcaacccggcctgctacgcattatgcaacgcgaccttcaaaaagaccttcaagcatttactaatgtgccactataagaacatcggtgcgacgcgctag

SEQ ID NO: 112013 - DNA, 1773 bp, synthetic construct
  misc_feature 1..1773: note = Description of Artificial Sequence: Synthetic coding sequence
  source 1..1773: mol_type = other DNA
atgacactgcataataattcaaccacatcacccctcttcccaaacatctcatcgtcctggattcattccccctccgacgcgggcttgccgcctggaacagtaactcacttcggctcttataacgtttcacgggccgctggaaacttcagctccccagatggtaccacagatgatcccttgggaggccataccgtatggcaggtggtatttatcgcttttttgactgggatcctggcgcttgtcactattatcgggaacattctcgtgatagtgagttttaaagtcaataagcagctaaagacagtgaacaactatttcctcctgtcactggcgtgtgctgacctaatcatcggcgttatctcaatgaatcttttcactacgtacatcattatgaacaggtgggcacttggcaacctggcctgtgacctctggctcgcaatagattatgtggccagtaatgcttcagtaatgaatctgctcgtgatctccttcgaccggtatttcagtattacaaggcctctcacctatcgggctaagagaacaaccaagcgcgctggtgtcatgatcgggctggcctgggtaatcagttttgtcttgtgggctccagccatcctgttctggcagtatttcgtggggaaacggaccgtgcccccaggagaatgtttcatacagtttctctccgagcctactatcacctttggcacggccatcgccgcattctacatgcccgtgaccatcatgaccatcctctactggcgtatttacaaggagacagaaaagagaaccaaggaactggccggcctccaggcctctggaactgaagctgaaactgagaacttcgtgcatcccactggcagcagcaggagctgcagctcctatgaattgcagcagcagtccatgaagcgatccaacaggcggaagtatggccgatgtcacttctggtttacaactaagtcatggaagccctcgagtgagcagatggatcaagatcattcatccagtgattcatggaacaataacgatgctgctgcgtctctggagaactctgcctcatcagatgaggaggacatcggatccgaaaccagagcaatctattccatagtgctcaagctacccggacattctaccatactgaatagcaccaaactgccaagcagcgataacctgcaggtgcccgaggaagagcttgggatggtggatctggaacggaaggcagacaagctgcaagcccagaaaagcgtggatgatggtggaagtttccccaaaagtttcagtaaacttcctattcaactggagtccgccgtcgatacagccaagacaagtgacgttaactcatctgtaggcaaaagtactgctacactgccactcagcttcaaggaggccacgttggcgaagaggttcgcccttaagactcgttctcagatcactaagagaaagaggatgagtctagtgaaggaaaagaaggctgcccagacattgtcggccatcctgctagcattcatcataacgtggacgccttacaacattatggtattggtaaatacattctgcgacagttgtattcccaagaccttttggaacctgggatactggctgtgctatatcaatagcacagtcaatcctgtttgctacgctctctgcaacaaaacattccgcacaacctttaagatgctccttctctgtcagtgcgataaaaaaaaacgaagaaagcagcagtatcagcagagacagagcgtgatcttccataagagagcacccgagcaggctctctag

SEQ ID NO: 112014 - DNA, 333 bp, synthetic construct
  misc_feature 1..333: note = Description of Artificial Sequence: Synthetic coding sequence
  source 1..333: mol_type = other DNA
atgactttgcacaataactcaacgaccagcccactgttccccaatataagctctagctggatccatagtccatcagatgccggactgcctcctggcaccgtgacacactttggcagttacaacgtttctcgtgccgctggaaactttagttcgccagacgggaccacagatgaccctctgggcgggcacacagtctggcaggtggtttttatagcgttcctgaccggtattcttgcattagtgacaatcatcggtaacattcttgtcattgttagcttcaaagtgaacaaacagctgaagaccgtcaataactatttcttattatccctttag

SEQ ID NO: 112015 - DNA, 1440 bp, synthetic construct
  misc_feature 1..1440: note = Description of Artificial Sequence: Synthetic coding sequence
  source 1..1440: mol_type = other DNA
atggccaacttcaccccagtaaacggatctagcgggaaccagtccgtaaggcttgttacaagtagctcccacaacaggtacgaaacagtcgaaatggttttcatagctaccgttacaggatcactgagtttggtgacagtagttggcaacattttagttatgctctccattaaggtcaaccgtcagctgcagaccgtaaataactatttcctctttagcttggcttgcgccgacctgataattggagccttttcaatgaatctgtataccgtgtacataatcaagggctattggcctctcggagctgtggtttgtgacctatggttggcactggactacgtggtctccaacgccagcgtaatgaatttacttataatcagttttgaccgctacttctgcgtcaccaagcccctcacgtacccagcacgacgaaccaccaagatggcggggttgatgatagcagccgcgtgggtgctttcatttgtgttgtgggccccagccattctgttttggcaattcgttgtgggcaagcggacggtccctgacaatcagtgcttcatccagtttctgtctaacccagctgtgactttcggtacggctatcgcagcattctatctgcccgtggtaattatgacagtcctttacatccacattagtctcgcgtctcgcagtcgggtacacaagcatcgacccgagggacccaaggagaaaaaagcgaaaacactggcctttctcaaatctcctctcatgaaacagagcgtaaagaagcctccaccaggagaggcggcacgagaggagctgaggaacgggaagctcgaggaagctccccctcccgccttgcctccgcccccaagacctgtggcagataaggatactagcaatgagtctagctctggctccgccacacagaacacaaaggaaagacctgccaccgaactgtccacaactgaagctaccacccctgctatgcctgctcctccactccaaccacgtgcattaaatcccgctagtcgttggtcaaaaatccaaatcgtcactaagcagaccggcaatgagtgcgtgactgccatcgaaatcgtgcctgcaacccccgctggaatgaggccggccgccaacgttgctcggaagttcgcatcaatcgccagaaatcaggtgaggaagaaaaggcagatggccgctcgcgagcgcaaggtgactcgaacgatcttcgctatactgctcgctttcatccttacctggacgccctacaatgttatggtcttagtgaatactttttgtcagagttgcatacctgataccgtctggtccatcggctactggctgtgttatgtaaatagcactattaacccagcctgctatgctctgtgcaacgccaccttcaagaaaacttttcggcacctgctgctgtgccagtacagaaatatagggactgcgcgctag

SEQ ID NO: 112016 - DNA, 1599 bp, synthetic construct
  misc_feature 1..1599: note = Description of Artificial Sequence: Synthetic coding sequence
  source 1..1599: mol_type = other DNA
atggaaggggactcttatcataacgccacaactgtgaacggaacccccgtgaaccaccagcctttggagagacacaggttatgggaagtaatcaccatcgccgccgttaccgcagtggtctccctcataacaattgtgggcaacgttctagtgatgatttccttcaaggtaaatagccagttgaaaacggtcaataactattatctgctaagtttagcttgtgcagatcttatcattggcatcttttcgatgaatctatatacgacttacatcctgatgggacgctgggcattgggtagtctggcttgcgacctgtggctggccctggattacgtcgcatcaaatgcctcggttatgaacttacttgtgattagcttcgacagatacttttccatcactcggcccctcacataccgcgctaagcggacgcccaaaagagccggaatcatgataggtctggcctggctaatttctttcatcctctgggctcctgcaattttatgttggcagtacctggttgggaagcgtactgttccactagacgagtgccagatccagttcctatccgaacctacaataacttttggaacagctattgccgcgttttacatcccggtctctgtcatgaccatcttgtattgtagaatttatagagaaaccgaaaaaaggacaaaggacctcgcggatctccaggggagtgactctgtaaccaaagctgaaaaacgcaagcccgctcaccgagcactcttccgctcttgtctcagatgtccaagacccacactggcgcagcgggaaagaaatcaagccagttggtcaagtagtaggcggagcacttcaactacaggaaaacccagccaggcaactgggccctctgcaaattgggcgaaagcagagcagctgacgacttgctcttcatacccctcatccgaggatgaggacaaacccgctactgaccccgttcttcaggtagtttataagtctcaggggaaggaatcacctggagaagagttttcagccgaggaaacagaggagacattcgtcaaagccgagaccgagaagtcggattatgacactcctaattatctgctctcacctgccgccgctcacaggcccaagtcccagaagtgtgtggcctacaaatttcgcctagtagttaaagccgatggtaaccaggagactaataatgggtgccataaggtaaagattatgccatgccctttccccgtcgccaaggagccatcaaccaaagggttgaaccctaatcccagtcaccagatgaccaagcgaaagcgggttgtgctcgtgaaggaacgcaaggcagctcagactctgtccgctattttgctggcgttcataatcacttggacgccgtataatatcatggtactagtaagtaccttttgtgacaaatgtgtgcctgttactctctggcacctggggtattggttgtgttacgtcaattcaacggtgaaccctatttgttacgccctgtgtaatcggactttccgcaaaactttcaagatgcttttgctgtgtagatggaaaaaaaagaaagtggaagagaaattatattggcagggcaacagcaaactgccctag

SEQ ID NO: 112017 - DNA, 1599 bp, synthetic construct
  misc_feature 1..1599: note = Description of Artificial Sequence: Synthetic coding sequence
  source 1..1599: mol_type = other DNA
atggagggcgactcctatcacaacgctacgacggtgaacggcacccctgtgaaccatcaacccttggagcgacataggctgtgggaggtcattaccattgcagcggtgaccgctgttgtgtcccttatcaccatagttggaaatgtgcttgtgatgatcagcttcaaggtgaattcgcagctaaaaacagttaataactattacctcttgagtctcgcctgtgcggatctgatcattggcattttctcaatgaacctgtatactacctacattttgatggggagatgggcactggggtcattggcttgcgatctgtggctggccctcgactacgtggcctcaaacgcctctgttatgaacttgttagtcatcagctttgatcgatattttagcatcacacgacctctaacatacagggctaaacgaactcccaagagggccggcatcatgattggcctggcatggttaatttcctttatactgtgggccccagctatactctgttggcagtatctggtgggtaaacggaccgtgcctcttgacgagtgtcagatccaatttctctccgaacctacaatcacattcggtactgctatcgcagcattctacatcccggtctctgtaatgacgatcttgtattgccgtatctaccgggaaaccgaaaagcgcactaaagacctcgctgacttgcagggatctgatagtgtaacaaaagctgagaagcgcaagccagcccatcgcgctctgtttaggtcatgtctccgatgcccccgcccaactcttgcgcaacgcgagcggaaccaggcatcctggagttccagtaggaggagcacctctaccacaggaaaaccctctcaggccacaggccccagcgcaaattgggcaaaggcggagcagctcactacctgcagctcatatccatcctctgaggacgaggataagccagctactgaccctgtgttgcaagtagtatacaaatcacaaggaaaggagtctccaggagaagaattcagtgccgaggaaacagaagaaacgtttgttaaagctgagactgagaagtcggactacgacactccgaattatctgctgagccccgctgctgcacatcgtcctaaaagtcagaaatgtgtcgcctataagttccgcttggtggtgaaggcagatggaaatcaggagaccaataatggctgccataaggtgaaaatcatgccatgtccatttcctgtggcgaaagaaccaagtacaaaaggattgaacccaaatccatcacatcaaatgactaagaggaagagggtggtcctggtcaaggaaagaaaagctgcccaaaccctgtctgctattctgttggcattcataatcacttggacaccgtataacataatggtgttggtgtcaaccttctgcgataaatgtgttccggtcaccctgtggcacctaggatactggctatgttatgtgaattcaactgtgaatcccatctgttatgctctgtgtaaccgtacctttaggaaaacctttaagatgcttcttctgtgcaggtggaagaaaaaaaaggttgaggagaagctgtactggcagggaaactccaagctcccctag

SEQ ID NO: 112018 - DNA, 69 bp, synthetic construct
  misc_feature 1..69: note = Description of Artificial Sequence: Synthetic coding sequence
  source 1..69: mol_type = other DNA
atggaaggtgatagttaccataacgcaaccactgtgaacgggaccccagtaaatcaccaacccctttag

SEQ ID NO: 112019 - DNA, 1449 bp, synthetic construct
  misc_feature 1..1449: note = Description of Artificial Sequence: Synthetic coding sequence
  source 1..1449: mol_type = other DNA
atggaaccatggccacttctcttactgttctcgctctgttcggcaggcctcgttcttggaagcgaacatgagactaggctcgttgctaagttgttcaaagattactcttccgtggtgcggcccgtggaggaccatcgccaagtggttgaggtgactgttggtttgcagctgatccagttgattaacgtggacgaggtcaatcagatcgtgaccacaaatgtccgactgaagcaaggagacatggtggatctccccaggcccagctgtgtcacgctgggcgtgcccttgttctcacacttacagaacgagcagtgggtcgactacaacttgaagtggaatccagacgactatggaggcgttaaaaagatccatatacccagcgaaaaaatctggaggcctgatcttgtgctgtataacaacgctgatggggactttgcaatcgtaaagtttacaaaagtgctgctacagtacactggacacatcacctggactcctccagctattttcaaatcatattgtgagattattgtgactcattttccgtttgatgagcaaaattgttccatgaagctgggtacttggacctacgacggatccgttgtggctattaatcctgagagcgaccagcctgacctctcaaattttatggaatcaggcgagtgggtcattaaggagagtcgagggtggaagcacagtgttacctactcctgttgtcccgatacaccatatctggacatcacataccactttgtcatgcaacgccttcccctatacttcattgtcaatgtaatcatcccctgcttgctttttagctttctcactgggttggtgttctatttaccaacagattccggggagaagatgaccctgagcatttcagtgctacttagccttactgtgtttctgttggtgattgtcgagttgatcccctcgacctcctccgccgtccctctgataggtaagtatatgctatttacaatggtgtttgtcatcgcttcaatcattatcaccgtgattgttataaatacacaccaccgatctccatcaacgcacgtcatgcccaactgggtccggaaggtattcattgataccatccctaacatcatgttcttttctaccatgaaacgcccatctcgagaaaagcaggacaaaaaaatttttaccgaagacattgatatctctgatatcagtggcaagccaggaccccctccgatgggatttcattcgccactgatcaaacaccctgaagtgaagtcagccatcgagggaattaagtacattgcagagaccatgaagagcgatcaggagagcaataacgccgctgcagaatggaagtacgtcgctatggtcatggatcatatcttacttggtgtgttcatgctcgtgtgcatcataggcaccctcgctgtatttgctgggcgtctcatagagcttaatcagcagggttag

SEQ ID NO: 112020 - DNA, 1374 bp, synthetic construct
  misc_feature 1..1374: note = Description of Artificial Sequence: Synthetic coding sequence
  source 1..1374: mol_type = other DNA
atggagccctggccactcctgctgctattcagcttatgctccgcagggcttgtcttagggagtgaacacgagaccaggttagtggccaaacttttcaaagactactccagtgtcgtgcggccagtcgaggatcatagacaggtggttgaagtaaccgtgggtctgcagctcatacaactcattaatgtggatgaagtcaaccagatcgtcaccactaatgttaggctgaagcaacagtgggtggactacaacctcaagtggaatccagatgactatgggggcgttaagaagattcacattccgtccgaaaaaatatggcgtccagacctggtattatacaacaatgccgacggggactttgccatagtgaagttcaccaaagttttgctgcaatacaccggccacatcacttggacgcctcccgccatcttcaagtcatattgtgagataatcgtaactcattttccctttgatgagcagaactgtagcatgaagctcggcacttggacctatgatggcagcgtagtggctataaaccctgagtccgatcaacccgatctgtctaacttcatggaaagcggggagtgggtgatcaaggagtctcggggttggaaacactctgtgacttacagttgctgccctgacaccccttatctggacatcacttaccactttgtgatgcaacgactgcccctttattttattgtgaatgtgattattccgtgtctgttgtttagtttcctgacaggcctcgtcttctacctccccactgattcaggcgaaaaaatgaccctttcaataagcgtgctcctctccctcaccgtgtttctactagtcatcgtcgaactgattccttccacctcatcagctgtccccctcatcgggaagtacatgcttttcaccatggtattcgtcatagcgtctataatcatcacagttatcgtcattaacacacatcataggtcacccagcacacacgttatgccgaactgggtacgcaaggtgtttatagatactatccccaacatcatgtttttctctaccatgaaacggccctctagagaaaaacaagacaaaaaaatctttaccgaggatattgacataagtgatatctccgggaagcccggccctccaccaatggggtttcactctccactcattaaacacccagaagtcaaatctgcgatagaaggcatcaagtacatcgccgaaaccatgaagtctgaccaggagtccaacaacgccgcagctgagtggaagtacgtggctatggtgatggatcatatcctcttaggagtgttcatgctcgtttgtattatcggaactctggcggttttcgcgggtcggctgatcgagcttaaccagcaagggtag

SEQ ID NO: 112021 - DNA, 1353 bp, synthetic construct
  misc_feature 1..1353: note = Description of Artificial Sequence: Synthetic coding sequence
  source 1..1353: mol_type = other DNA
atgggattgcggtctcatcatctgtcacttggtcttctcctcttatttttactacccgcggaatgcttgggcgcagaggggaggctggcactgaaactctttcgtgacctctttgcgaactatacctccgcactacgccctgtcgccgatacagaccagacgctcaatgtgaccctggaggtgacactgtcgcagattatcgacatggatgagcgaaatcaggttctgaccctttacctgtggatccgacaagaatggacggacgcctacctaaggtgggatcccaacgcatacggcggcctggatgcgattcgaatcccttcctccctggtatggcgaccggatatcgttctgtacaacaaagcagacgcgcagcccccggggtcagctagcacaaatgtggtgctccggcacgatggcgccgtcaggtgggacgcgcctgcaattacgcggtccagctgccgggttgatgtggcagctttcccctttgatgcccaacactgtgggcttacatttggatcatggacccatggaggccatcagctcgacgtgaggccaaggggggccgctgccagtctggctgattttgttgaaaatgtcgagtggagagtcctgggaatgcccgctcgcaggagagtgttaacctatggctgctgctcggaaccctacccggacgtaacatttactctgcttctccggaggcgggccgccgcctatgtttgtaatctcctgctgccgtgcgtactcataagccttctcgcaccactggcgttccacctccctgccgacagcggtgagaaggtgagcctgggggtcaccgtcttgctggcccttacagtgttccaattacttctcgcggagagcatgcccccggcagagtctgtgccgttaattggcaagtattacatggcaacaatgaccatggtgactttctcgaccgccctgaccatccttattatgaacctccattactgcggccctagtgtccggcctgttccagcttgggccagagcactgctcctggggcacctggcccgtggcttgtgtgtgcgggagagaggcgaaccgtgcggacagtccagaccacccgagttgagccccagccctcaaagtcctgagggcggcgctggcccacccgcagggccttgccacgaaccaaggtgtctctgtagacaggaggccctacttcatcacgtggccactattgcaaataccttccgctcacaccgggccgcccagcgttgtcacgaggactggaagcgcctagcaagagtcatggaccgcttctttctggccattttcttcagtatggccttggtgatgtccctacttgtgctggtgcaggcgttgtag

SEQ ID NO: 112022 - DNA, 1590 bp, synthetic construct
  misc_feature 1..1590: note = Description of Artificial Sequence: Synthetic coding sequence
  source 1..1590: mol_type = other DNA
atgggccctagctgtcccgtcttcctcagtttcaccaaactctcactgtggtggttgctgctcactccggctggtggagaggaagccaagcgaccgccgcccagagcgcccggtgaccctctgagctcgcccagccctacagctttgccccagggaggatctcatacggagaccgaggaccggttatttaagcacctgttccgaggatataatcgatgggctcgcccagtgccaaacacttcagacgtagtgattgttaggttcggtctctctatagcccagctcattgacgtggatgagaaaaaccagatgatgacaactaatgtttggctcaagcaagaatggagcgattacaaacttaggtggaaccctactgatttcgggaacattactagtctgagggtcccctctgagatgatttggatccccgatattgtactctacaataacgccgacggcgaattcgcggtcacacacatgacgaaggcacatctttttagcaccggaaccgtgcactgggtaccacctgctatttataaaagtagttgtagcatcgatgtcaccttttttccattcgatcaacagaactgtaaaatgaagtttggtagctggacctatgacaaagccaagattgatcttgagcaaatggagcagaccgtggacctgaaggattactgggagagcggcgagtgggccatagtcaacgctactgggacatacaacagcaaaaagtatgactgttgcgctgaaatctaccccgatgtgacttacgccttcgttattaggagacttcccctgttctatacaatcaacttgatcattccatgtctcctgatctcatgcttaacagtgctggtcttttatctccctagcgattgcggagaaaaaatcacgctgtgtatctccgttttgctgagcctaactgtattcctccttttaattacagagatcatcccctcgaccagcctcgtgattccactgattggcgaatacttgctctttacaatgattttcgtgacactgtccatagtaatcactgtatttgtcttaaatgttcaccataggtcacccagcacccacaccatgcctcactgggtccggggggccctgttaggatgcgtgccccggtggcttttaatgaatcggccccccccccccgtggagctttgccaccctctcagattaaaattatcaccttcttatcactggctggagagcaatgtggacgctgaagagcgggaagttgtggtagaagaggaagaccgttgggcatgcgcgggccacgtggctccctccgtcggaaccctttgttcgcacggtcacttgcactcaggtgcttcaggaccaaaagccgaggcgctgttgcaggagggggaattactcctgtctccccacatgcagaaagcccttgagggcgtccattacattgcagaccatcttcggagcgaggacgctgacagtagtgtcaaagaagattggaagtacgtcgctatggttatcgaccgaatatttctctggttgttcatcattgtttgctttctgggcacgataggattgtttctccctcccttcctagccggcatgatctag

SEQ ID NO: 112023 - DNA, 1590 bp, synthetic construct
  misc_feature 1..1590: note = Description of Artificial Sequence: Synthetic coding sequence
  source 1..1590: mol_type = other DNA
atgggcccaagttgccccgtcttcttgtccttcactaaacttagcctgtggtggcttctcctaacacctgccgggggtgaagaagccaagaggcctccccccagggcgccaggcgatccgctttcctctccctcacccactgctctcccgcagggaggaagccacacagagacagaagatagactctttaaacatctcttcaggggatataaccggtgggcaaggcctgttccgaataccagtgatgtggtcatagtgcgcttcggcctgagcattgcgcagctcatcgacgttgatgagaagaaccagatgatgactactaacgtctggttgaaacaggagtggagtgactacaaactccgctggaaccctactgatttcggcaatattaccagtctccgcgtcccttccgagatgatttggatccccgacatcgtattgtacaataacgccgacggcgaatttgccgtgacacatatgactaaagcccatctgttctccaccggaacggtccattgggtgccacctgcaatttacaagagctcttgtagcatagacgttacattctttccatttgatcaacagaattgtaaaatgaaatttggctcttggacctatgataaggctaaaatcgacctagaacaaatggagcagaccgtcgacctgaaagactactgggagtctggcgagtgggctattgtaaacgctactgggacttataacagtaaaaagtacgactgttgcgctgaaatttaccccgacgtaacatacgcctttgtcattcgacgccttcccctcttttacactattaatttgattatcccatgtctcctgatctcatgcttaacggtcctggtgttctatcttccaagcgactgcggggaaaagattactctgtgcatcagcgtcctcctgtctctcaccgttttcctccttctgatcacagaaattatcccttccacatccttggttattccacttatcggcgagtatctgttatttacaatgatctttgtgacactctccatcgtgataacagtctttgtactgaacgtacaccatcgttcacccagcacacataccatgccccattgggttagaggtgctctcctggggtgcgtgccaaggtggctcctgatgaaccggccaccccccccagtcgaactgtgtcaccctcttagattgaagctctcacctagctatcactggcttgaatcaaacgtagacgcggaagagcgggaagtggtggtggaggaggaggatcggtgggcttgcgcaggccatgtagccccatcggtaggaacactatgttcgcacggtcacctccattctggcgcgagcgggccgaaggctgaggccctgctgcaagagggagagctgctgttgtccccgcacatgcaaaaggcactggagggggttcattatatcgcagaccacctccggagtgaggatgccgactcctctgtgaaagaagattggaagtacgtcgcaatggttatcgatagaattttcttgtggctgttcataattgtgtgcttcttggggactattgggcttttcttaccacctttcctggctgggatgatatag

SEQ ID NO: 112024 - DNA, 1518 bp, synthetic construct
  misc_feature 1..1518: note = Description of Artificial Sequence: Synthetic coding sequence
  source 1..1518: mol_type = other DNA
atgggttcagggccgctgtccctcccactggcactgtcccccccccgacttctcctgctactgctcctctctctgctgcctgttgctcgcgcatctgaagccgagcaccgcctctttgagagattattcgaagattacaatgagatcattcggccagtggcaaacgtgtctgaccccgttatcatccattttgaagtgtccatgagccagctggtaaaagtggacgaggtcaatcagataatggaaacaaacctgtggctgaaacaaatatggaacgactacaaactgaaatggaacccatcagactatggaggtgccgagttcatgcgggtgcccgctcaaaagatatggaagcccgacatcgttctctataacaatgctgtgggagacttccaggtggatgataagaccaaagctcttctcaagtatactggtgaagtgacatggattccaccagctatcttcaagagcagttgcaagatcgatgtgacatactttccctttgattaccaaaattgtaccatgaaattcgggtcctggagttatgataaagcaaaaatcgacctggtcctcatcggctcctccatgaatctgaaagactactgggagagtggagaatgggctattatcaaagctccaggttataagcacgacattaagtacaattgctgtgaggaaatctatcctgatatcacttatagcttatatatcagacgtctgcccctcttctacactatcaacctgattattccatgcctgttgatttcgttcctcaccgtattagttttttacctcccctctgactgcggggagaaggtgacactgtgcatttcggttctgctgtccctaactgtatttttactcgtcattacagaaaccattccctcgactagcttagtaatacccttaatcggtgaatatctgctcttcactatgatcttcgtgactttgagtattgtcattacagtgttcgtgctgaatgtgcactaccgaacgcctactacacacaccatgcccagctgggtgaagacagtgttcctgaatctactgcctcgtgtgatgttcatgacacgacccaccagcaacgagggcaacgcccagaaacctagaccactgtacggtgccgaattgagcaacttaaattgcttctccagagccgagagcaaaggatgcaaggaagggtacccctgtcaggacggaatgtgcgggtattgccatcatagaaggattaaaattagtaacttttcggccaacctgacccgctcctcttcatccgaatctgtggatgctgttctgagcctctctgcactttctcctgaaataaaagaggctattcagagcgtaaaatatattgccgagaacatgaaggcgcagaacgaggccaaagagatacaggacgactggaaatatgtcgccatggtgattgataggatttttctctgggtgtttacgcttgtgtgtatactgggtacagcaggtctgtttttgcagcccctgatggcccgggaggacgcttag

SEQ ID NO: 112025 - DNA, 939 bp, synthetic construct
  misc_feature 1..939: note = Description of Artificial Sequence: Synthetic coding sequence
  source 1..939: mol_type = other DNA
accaaggctctgctgaagtacactggagaagtcacttggatcccacccgcgatatttaagagttcttgcaagatcgacgttacatacttcccgtttgattaccagaattgcaccatgaagtttggcagctggtcctatgataaggccaagatcgatctagtacttatcgggtccagcatgaacttgaaggattactgggagtctggagaatgggcaatcataaaagcacccggatataagcacgatatcaagtacaactgttgtgaggaaatataccccgacatcacttactctctgtacatccggcgcctcccacttttttacactataaatcttatcattccctgtttgttaatatcttttttgacagtgctggttttttatctgcccagcgactgtggtgaaaaggtcactttgtgcatctctgtcctgctatctctcacggtcttcctactagtgattacagagacaataccgtctacaagcctggtaatcccactgattggtgaatatctgctctttaccatgatcttcgtgaccctctctatcgtcatcacggttttcgtgctgaacgtgcactataggactccaacaacccacactatgccctcatgggtgaaaactgttttcctcaacctcttaccgagggtcatgtttatgacgcggcccacatccaatgaaggtaatgcccagaaacccagaccactatacggtgcaagccccaaggcagctcggcgagagattaaggaggcaattcaatctgtgaagtacatagctgagaacatgaaagcccagaacgaggcaaaggagatccaggatgattggaaatatgtcgctatggttatcgacaggatttttctatgggtgttcaccctcgtgtgtatcctgggcaccgccggcctatttctccagccccttatggcccgagaagatgcctag

SEQ ID NO: 112026 - DNA, 1470 bp, synthetic construct
  misc_feature 1..1470: note = Description of Artificial Sequence: Synthetic coding sequence
  source 1..1470: mol_type = other DNA
atgggctcaggtccactgtctttgcctctggcattatccccccctcggcttctgttgctactccttctgtctcttctgcctgtggcccgtgcatcagaggccgaacatcgcttgttcgagcgtctgttcgaggattataacgagatcatcaggccagtcgctaacgtgtctgaccccgtgatcattcactttgaggtatcgatgagccagcttgttaaggtggacgaagtgaatcagattatggagacgaatctgtggctcaagcagatttggaacgactacaaactcaagtggaatccctcggattatgggggcgcagagttcatgcgagttcccgcccaaaaaatctggaagcccgacatcgtgttgtataataacgccgttggcgacttccaggtcgatgacaagaccaaagccctgctgaaatacaccggtgaggtcacctggatcccacccgccattttcaagtctagctgtaaaattgacgtcacctatttccccttcgactaccagaactgcaccatgaaattcggctcatggtcttatgacaaagcgaaaattgatctggtattaattggcagtagtatgaatttaaaagattattgggagtccggcgagtgggcaattatcaaggctcccggatacaagcacgatatcaaatataactgctgcgaagagatttatccagacattacctacagcctgtatatcaggaggctccccctgttctataccatcaacctcatcataccttgcttgttgatttctttcctgacggtgctagttttttacttgcccagtgattgcggagagaaggtgacactgtgtatctcggtactcctgagcctcacggtcttcttgctcgtcatcactgagaccattccaagcacaagcctggtaatccccctgataggcgaatacctcctgttcaccatgatcttcgttacgctcagcatagtgatcactgtttttgtactgaatgtgcactatcgtacacctaccacccacactatgccatcttgggtgaaaactgtgtttttgaatcttctgcccagagtgatgtttatgacacggccgacgtctaatgaaggcaacgctcaaaagcctaggccactgtatggggcagagctgtcgaatttgaattgtttttccagggccgagtctaagggctgtaaggagggatacccgtgccaggacgggatgtgcggatactgtcatcacaggagaataaagatttccaacttctccgcaaatctgactaggagcagctctagcgagtcagtcgacgcagtcctgtccctgagcgcacttagcccagaaatcaaggaggccattcaatctgtaaagtatatcgctgagaatatgaaggcgcagaatgaagcaaaagaggagcagaaggcccaagaaatccagcagctgaagagaaaagagaaaagcactgaaacatcggatcaggaaccaggactctag

SEQ ID NO: 112027 - DNA, 1518 bp, synthetic construct
  misc_feature 1..1518: note = Description of Artificial Sequence: Synthetic coding sequence
  source 1..1518: mol_type = other DNA
atggggagcggtcccttgtctcttcctcttgcattaagccctccccggttgttactcctgttactcctgagccttcttcccgtggcaagagcctctgaggccgagcaccggctgttcgaacgactgttcgaggattacaatgagatcattaggccagtagctaacgtgtccgaccccgtcatcatccacttcgaggtttccatgtctcagctcgtgaaagttgacgaggtcaatcagataatggaaaccaatctctggcttaagcagatctggaatgactacaagttgaagtggaatccctccgattatggtggtgctgaatttatgcgcgtgccggcacagaaaatctggaaacctgatattgtcctctacaacaatgcagtgggagattttcaggtggacgacaaaacaaaagccctgttgaagtacactggcgaggttacatggattcctcctgccatatttaagtcatcttgtaagattgacgttacgtatttccctttcgattaccaaaattgtacaatgaagtttggctcttggagctacgacaaggccaaaattgacctcgtgctgatcggaagtagcatgaatctcaaggactactgggaaagcggagagtgggccattattaaagccccaggctacaaacacgatattaaatacaactgttgcgaggagatctaccctgatataacctattcactctatatccgccgactgcccttgttttatacgatcaatctcatcatcccatgcttactgatctcatttctcactgtcttagtgttttacttgccaagcgattgtggggaaaaggtgactctgtgcatcagtgtcttgctcagtctaacggtgtttctcctcgttattactgaaaccattcctagcaccagcctggtcattccattgatcggggaatatctgctgttcaccatgatcttcgtcactctctctattgttattacagtgttcgttctgaatgttcactacaggacacccaccacgcacacaatgccttcatgggtcaaaaccgtgtttcttaatcttctgccgagagtgatgtttatgactagacccacttccaatgagggcaacgcccagaaaccccgccccctgtatggcgccgagctcagcaacctgaattgtttttccagagcagagtctaaaggatgcaaagaaggctatccttgtcaggatggcatgtgcggttattgtcaccacaggaggatcaaaatttctaatttttcagctaacctgaccagaagtagttcatccgagtctgtggatgctgtcctgtctctcagcgccctttccccagagatcaaagaagctattcagtcggtgaaatacatcgcagaaaacatgaaggcccagaatgaggctaaagaaattcaagatgactggaagtatgtagccatggtgatcgaccggatcttcctgtgggtctttaccctggtatgtatcttaggtactgccgggctgttcctgcaacctctgatggcacgtgaggacgcttag

SEQ ID NO: 112028 - DNA, 1602 bp, synthetic construct
  misc_feature 1..1602: note = Description of Artificial Sequence: Synthetic coding sequence
  source 1..1602: mol_type = other DNA
gctcccgagccaggagaggcaccgagattggaccgagctcaccccggatgtgcctgcgcagagctctccttactctggctgtgctgttgcacgttcacatccgcagatggcgacttcgctgtgacacacttgactaaggctcacctgttccatgatggccgggtgcagtggacaccaccagccatctataaatcttcatgcagcatagatgttactttcttccccttcgaccagcagaactgcaccatgaagtttggctcctggacttacgataaggctaagattgacttagtgaatatgcatagcagagtagaccaactggatttttgggaatctggggaatgggtgatcgttgacgctgtcggaacttacaatactcggaagtatgagtgctgcgccgaaatatatcccgatattacttatgcgttcgttattcgacgcctgcctttattttacaccataaacttgatcatcccatgcctgctgatcagctgcctgacggtacttgtgttctacttgccatccgaatgcggagagaaaatcactctgtgcatcagtgtactgctgagtctcacagtttttttattacttattacggaaatcatcccttccacctcacttgtcatcccccttattggggagtacctgctgtttacgatgattttcgtgacactgtctatcgttattaccgtgttcgttctgaacgtgcaccatcgaagtcctaggacgcacactatgcctacttgggtgaggcgagtattcctggacatagtacctagactgctcctcatgaagcgcccatctgtggtgaaggataactgtcggagactgatcgagagcatgcataagatggccagcgccccgcggttctggcctgaaccggaaggcgagccccctgccacctccggcactcaatctctgcacccacccagcccctcattttgcgtccctctcgacgtcccagcagaacctggtccatcctgcaagtcaccgtccgatcagctgcctccgcagcagccgctcgaagccgaaaaggccagtccgcatcccagccctggaccatgtaggcctcctcacggcactcaggctcccggcctggctaaggccaggagcctctcagtgcagcacatgagttcgccaggggaggccgttgaaggcggagtacggtgccgctcaaggtctatccagtattgtgtgccccgggatgacgcagccccagaagcagacggccaggccgctggagcccttgcctctagaaacacccactccgcagagttgccaccccctgaccaaccttctccctgcaagtgcacttgtaagaaggagccgtcatctgtgtctccttcggcgactgttaaaactcggtcaacaaaggccccgccccctcacctgccactttctccggccctgactcgggccgtggaaggggtacaatacattgccgaccatctgaaggcagaggacacagatttctctgtgaaagaagactggaaatacgtggctatggtgatcgatcggattttcctttggatgttcattatcgtttgcttactgggaactgtagggctattccttccaccttggctggctggaatgatttag

SEQ ID NO: 112029 - DNA, 1884 bp, synthetic construct
  misc_feature 1..1884: note = Description of Artificial Sequence: Synthetic coding sequence
  source 1..1884: mol_type = other DNA
atggagttaggtggccccggcgcacctcgccttctaccacccttgcttctgctgctcggcacgggtctgctccgcgcctcctcacacgtggaaaccagagcacatgccgaagagaggcttctgaaaaagttattctccgggtataataagtggtctcggccagttgcaaacatctccgatgtcgtccttgttcggtttgggctctccatcgcccagctgatcgacgtggacgaaaaaaatcagatgatgactaccaatgtctgggtgaagcaagaatggcacgactacaagctgagatgggatcctgcagactacgaaaatgtgacctctattaggatcccatccgagcttatctggaggcctgacatcgttttgtacaacaacgctgacggggacttcgctgtgactcacctgactaaagcccacctctttcacgatggaagggtgcagtggaccccaccggctatctataagtcctcatgctccattgacgtgacgtttttcccctttgaccaacagaattgtaccatgaagttcggctcttggacatatgacaaagcaaaaattgacctagtgaacatgcattctagggttgaccagctggatttttgggaatccggcgagtgggtgatagtggatgccgtaggaacttacaacacaagaaagtacgagtgttgcgccgagatttaccccgacatcacttacgcctttgtcatacgccgcttgcccctcttctacactatcaacttaatcatcccctgtttgctgatttcctgtctgaccgtgctggtgttttacctcccatccgaatgtggggaaaagatcactttgtgcataagcgtactgctgtctttaacagtgtttttgctcctcattacagagatcattccatccacaagcctagtcatcccactcattggagaatacttacttttcaccatgatcttcgtgaccttatcgatcgttattaccgtctttgtactgaatgtacaccatcgatcccctaggacgcatacaatgcctacttgggtaagaagagtgttcctcgatatcgttccacggctgctgttgatgaagaggccctctgtggtgaaagataattgcagaagattaatagaatcaatgcacaaaatggccagtgctcctaggttttggcctgaacctgaaggagagcctcccgccacctccgggactcagtccctgcaccccccctccccgtctttttgtgtgcccttggatgtgcccgcagagcctggccccagttgtaagtcccccagtgaccagctgccgcctcagcagccacttgaggcagagaaagcttccccacatcctagtccaggcccctgcagacctccacatggcacacaggccccaggtctggccaaggccagatcactaagtgtgcagcacatgagcagccccggggaggctgtcgaagggggcgttcgctgtcgatcacggagtatccagtattgtgtgccacgagacgacgctgcccccgaggccgacgggcaggccgccggcgctttggcgtctaggaacacccattccgcagagctgcctccccctgatcagcctagtccttgcaagtgcacttgcaagaaggagccttcatcggtcagtccctcggctaccgtaaaaacaagatctaccaaggccccgccaccgcatctgcctctatccccggcactcactagagccgtagaaggcgtccagtatattgccgatcacctcaaggccgaggacaccgacttttcagtcaaagaggattggaaatatgttgccatggtgatcgatcggatctttctctggatgtttattattgtttgcttactggggacagtgggcctgtttctgccaccctggcttgcgggaatgatctag

SEQ ID NO: 112030 - DNA, 1671 bp, synthetic construct
  misc_feature 1..1671: note = Description of Artificial Sequence: Synthetic coding sequence
  source 1..1671: mol_type = other DNA
atgcgaatgagcccaccatcggcaagccctccttcttcatcagggggaagaacaagttcttcaacaactactgccggagagccattttgggccggtgttctgttcgccataaggcctcacccaggcttatcaggaagaatagtttggaccgccgggtgcccaggagagggtgccgacggagactttgcagtcacacatctcacgaaggcacatctgtttcacgatgggcgcgttcagtggaccccaccagcaatctataagagttcgtgctccatcgacgtgactttttttccctttgatcagcagaactgcacaatgaaatttggaagctggacttacgacaaagctaagatagaccttgtgaacatgcactcacgcgtggaccagctcgatttttgggaaagcggagagtgggtgatcgtagacgccgtcgggacatacaacacccggaagtacgaatgctgcgctgaaatttaccctgacataacatacgccttcgtgatcagacggctgccgttgttctataccatcaacctgatcatcccatgccttttgattagctgcttaaccgtgcttgtgttctacttgccaagcgagtgcggcgaaaaaatcacgctttgcatcagcgttctgctgtctctaacagtgttcctgctgctcattacagaaatcatccccagcacaagtctggttattccattaataggagagtatctgttatttacaatgatattcgtgactctatcgatcgtcattacagtgtttgtcttaaacgtgcaccatcggtctccacgcacccatacaatgcctacctgggttagacgggtgttcctggacatcgtgcctaggctgctcctcatgaagcggccctccgtggtcaaggacaattgccggaggttaatagagtcaatgcacaaaatggctagtgcccctaggttctggcctgagccagagggggaacctccagcaaccagtggcacacagagtctacatcccccatctcccagcttttgcgtacccttggatgtccccgcggagccgggaccgtcttgcaaatcgccctcggaccaactgcctccccagcagccacttgaagccgaaaaggccagccctcaccccagccccggtccatgtaggcctccacatggtacacaggcacctggcctcgcgaaagctcggtctctgtctgtacagcatatgtcgtcacctggagaggcggtcgaaggcggagtgcgatgccgctctaggagcatccagtactgcgtgcctagagacgatgccgctcccgaagccgacgggcaggcggctggggcactcgcgagcagaaacacacatagcgccgagcttccacctccagaccagccctctccctgtaagtgtacctgcaagaaggaaccctccagtgtatctccttccgctaccgtcaaaacccgttctaccaaagccccccccccccatcttccactttctcccgcgctgacgagggcagtggaaggtgttcagtatattgccgatcaccttaaggcagaagatactgattttagcgtgaaggaggattggaaatatgtcgctatggttattgacagaatatttctgtggatgttcatcattgtgtgtttgctcgggaccgtcgggctctttttaccgccctggctggccggaatgatctag

SEQ ID NO: 112031 - DNA, 1407 bp, synthetic construct
  misc_feature 1..1407: note = Description of Artificial Sequence: Synthetic coding sequence
  source 1..1407: mol_type = other DNA
atggccgctcgagggagcggacctcgcgcactccggcttctcctgctggtgcagttagttgcggggcggtgcggactggccggtgcagcaggtggagcccagagaggcttgtcggaaccttccagtatcgcaaaacacgaggactcactgttaaaggatctgtttcaggactacgagcgatgggtaagaccagtggagcacctcaacgacaaaatcaaaataaagtttggactggcaatctcccagttggtggatgtggatgaaaagaatcaactgatgacgacaaacgtctggctgaaacaggaatggatcgacgtcaaactgcggtggaatcctgatgattatggcggcattaaggtgatcagagttcccagtgattcagtctggactcccgatattgtcctattcgataatgccgatggcaggttcgaaggcacctctactaaaactgtaatccggtacaacgggaccgtaacttggacacccccagctaactacaaatcatcctgtacaatcgatgtgaccttcttcccttttgacctccaaaactgcagcatgaagttcgggtcctggacttatgatggctcacaggtggatatcattctcgaggaccaggatgtggataaaagagatttctttgataatggcgagtgggagattgtcagcgctactggtagcaaaggcaataggacggacagctgttgttggtacccctatgttacctactcatttgtgatcaagcgtctccccctgttctatacattattcttgattatcccatgcatcggattgtcattcctgacagtgcttgtcttctaccttccctccaatgagggagagaagatttgtttatgtactagcgtgctggtgagcctcaccgtcttcctgttagtgatcgaggagatcatccccagttcatcaaaggtaatcccgctaataggagaatacctggtgttcaccatgatctttgtaaccctttcaataatggtcaccgttttcgctataaatattcaccaccgctcttctagcactcacaacgctatggcaccactcgtgcgaaaaattttcctacatacccttcccaagctcctgtgtatgcggagccacgtggatcgctactttacccagaaagaggagaccgagtcgggcagcggacccaaaagttcacggaacacattggaagcggcactcgacagtattagatacatcacccgccacattatgaaagagaatgacgtacgcgaagtggtagaggattggaagtttattgcccaggttctggatcggatgttcttatggaccttcctcttcgtgtcaatcgtgggatcgctgggactgttcgtccccgttatttataagtgggcgaatattctgatccccgtgcacattggtaacgcaaataaatag

SEQ ID NO: 112032 - DNA, 1485 bp, synthetic construct
  misc_feature 1..1485: note = Description of Artificial Sequence: Synthetic coding sequence
  source 1..1485: mol_type = other DNA
atgctgacctctaagggtcaggggtttctccacggcggcctctgcttgtggctgtgcgtatttacacccttcttcaagggctgtgtcggttgcgctacagaggaacggctgttccacaaacttttctcccactataaccagttcatcagaccagtcgagaacgtttcagaccctgtgaccgtacattttgaagtggccatcacacagcttgccaacgttgatgaggtgaaccagattatggaaacaaatctatggctccgccatatctggaatgactataaacttcgatgggatcccatggagtatgacggcatcgagacccttcgtgtgccagccgataagatctggaagccagatattgttctttacaataatgctgtgggtgatttccaagttgaaggcaaaaccaaggcattgctgaagtacaatggcatgataacctggacacctccggcaatttttaaaagttcctgtcctatggatattaccttttttccgtttgatcaccagaattgctctctcaagtttggcagttggacttacgacaaggcagaaatagatctattaatcattgggagcaaagtggacatgaacgacttctgggagaactcggaatgggaaatcatcgatgcgagtggctataaacatgatataaaatacaattgctgcgaggagatatatactgatataacttattcattttatatccggcgcctaccgatgttttatacgattaacctgattatcccttgtctcttcatcagctttctgacggtgttggtcttctacctcccctctgattgtggagaaaaggtgactctgtgtatcagcgtgttgctgtctcttactgtgtttttgctggtaataaccgaaactatcccgagcacgtcgttggtcgtgcccctagtcggggagtatctcttgttcacaatgatcttcgtcaccctgtcaattgtggttactgtctttgtactcaatatccactaccgtacgccaactacccatactatgccacggtgggttaaaacggtctttctgaaattgctgccccaagttctacttatgcgctggcctctagacaagacccggggaaccgggtcagacgccgtgccacgtggcctggctagacgacctgctaaaggaaaactcgcgtcccatggggaacccaggcatctcaaagaatgctttcactgccataagtctaacgagctggcaacgtctaaacgcagattaagtcaccagccactacagtgggttgtcgagaattccgagcacagtccagaagtggaggatgtcattaattctgtgcagtttatagcggaaaacatgaagagccataatgaaaccaaggaagttgaagatgactggaagtatgtggcgatggtggtcgatagagtgttcctgtgggtctttatcatagtatgtgtgtttggaactgccggcctgtttctgcagcctctgttaggaaatacgggcaaatcttag

SEQ ID NO: 112033 - DNA, 1440 bp, synthetic construct
  misc_feature 1..1440: note = Description of Artificial Sequence: Synthetic coding sequence
  source 1..1440: mol_type = other DNA
atgctcaccagtaaagggcaaggctttctccatgggggcctgtgcctgtggctttgtgttttcaccccatttttcaaggggtgtgtgggatgtgccactgaggagcggctcttccataagcttttttcacactacaatcagtttataaggcccgtggaaaacgtctctgacccagtgaccgtccattttgaggttgctataacgcaactagctaacgtgatatggaatgattacaagctgaggtgggatcctatggagtatgatgggattgagaccctgagggtgcctgcggacaagatttggaagccggacattgtgctttacaataacgcagtcggggacttccaggtcgaggggaagacaaaggccctgttgaaatacaacggcatgattacctggaccccccccgctatttttaagtctagttgtccaatggacatcactttttttccctttgaccatcagaactgtagtttaaagttcggctcctggacttacgacaaggcggaaatcgacttgctgattatcggcagcaaagtagatatgaacgacttttgggagaactcagagtgggagattatcgatgcctctgggtataaacacgacattaagtacaattgctgcgaggaaatctatacagatattacctacagtttctatattagacgcttacctatgttctatacaattaatttgattatcccatgtttgtttatatcctttctgacagtgctcgtgttttacctgccgagcgattgcggcgagaaggttaccctttgcataagtgtgttgcttagtttaactgtgtttcttctcgtcatcaccgaaactatacccagtacatctctcgtggtccctctggtgggtgagtacctattgtttacaatgatctttgttaccctttcgatcgtcgtgaccgtatttgtgcttaacattcactataggaccccgacgactcacaccatgccacgatgggtgaagaccgtattcctgaagttgcttccacaggtcttactgatgaggtggcctctggacaaaacgcggggtactggctcggatgccgtccccaggggattagcccgcagacccgccaaaggaaaattagcaagccatggtgagcctaggcatctaaaagagtgttttcactgccacaaatctaatgagctagccacatcaaaacgacggctgtcccatcagcctttgcagtgggtggtggagaattccgagcactcccctgaggtcgaagatgtgatcaatagcgtgcagtttatagccgaaaatatgaagagccataacgagaccaaggaagtggaggatgactggaaatacgtggctatggtggtagatcgagtgttcctgtgggttttcattattgtctgtgtgtttgggacagcaggtctgttcctccagcccctgctgggtaataccggtaagtcctag

SEQ ID NO: 112034 - DNA, 1509 bp, synthetic construct
  misc_feature 1..1509: note = Description of Artificial Sequence: Synthetic coding sequence
  source 1..1509: mol_type = other DNA
atgcgttgcagccctggcggagtttggctcgccctagccgcgagcctgttacacgtgtccttacagggagagttccagagaaagctctacaaggagctggtgaaaaattacaatcccctggaaagaccagtcgcgaacgactctcagcctctaactgtctacttcagcctatctctgcttcaaataatggatgtggacgagaagaaccaggtgcttacaactaacatttggctccagatgtcttggacagatcactacctgcagtggaacgtgagcgagtatccgggggtaaaaaccgtgcggtttcctgacggtcagatatggaaacccgatattctgttatacaactccgccgatgagcggttcgacgcaaccttccacaccaacgtgttggtgaatagtagcggccactgccagtatttaccgccagggatcttcaagtcatcctgttacatcgatgtacgctggtttccattcgatgtccagcactgtaagctgaaattcggatcctggtcctacggcggctggtccctggatctgcagatgcaggaagcagacatcagcgggtacatccctaatggcgagtgggatttggtgggcatccccggcaaacggtctgaacgcttttacgagtgctgcaaggaaccatatcccgatgttacattcacagttacgatgcggaggcgcacactctactatgggctgaacctcctgatcccttgcgtgctgatttctgccctggccttactcgtctttctcctcccggcagattctggagaaaagattagcctgggaatcaccgtgctgctcagtctgacagtctttatgctcttagtcgctgaaatcatgccggccacctctgactccgtaccccttatagcccagtattttgcctcgacgatgattatcgtcgggctcagcgttgtagtgaccgtcatcgttttgcaataccatcatcacgaccccgatggcggcaaaatgcccaagtggactcgagtaattctgctgaattggtgcgcctggtttctgcgtatgaagcggcccggagaagataaagtgcgcccagcttgccagcacaaacagcgtcgctgctctctggccagtgtggagatgtcagctgtggcccctccacccgctagcaacggcaacttgctgtatatcggatttcggggcctggatggggttcactgcgttcccaccccagattctggagtggtatgcggccgcatggcttgctcgcccacccacgacgaacatttgcttcatggtggccagccaccagaaggagatcccgatctggcgaagatcctggaggaagtgaggtatatagcaaaccggttccggtgtcaggacgagtctgaggctgtgtgctctgaatggaaattcgccgcctgcgttgtcgaccggctatgtttgatggcattcagcgtgttcacaattatatgcacaattggaatcctcatgtccgcccccaacttcgtcgaggctgtcagtaaggactttgcatag

SEQ ID NO: 112035 - DNA, 210 bp, synthetic construct
  misc_feature 1..210: note = Description of Artificial Sequence: Synthetic coding sequence
  source 1..210: mol_type = other DNA
atgcagaagtattgtatttatcagcactttcagtttcaattactgatccagcacctttggatagccgccaactgtgatatctgggctaaagtagctcgggtcatcggcctgctggcctcccacaagacagacctccaggaaaatactcccgtagttgaggcatttccaaactcccctagaacccctaccttgccaggggttctaacttag

SEQ ID NO: 112036 - DNA, 1239 bp, synthetic construct
  misc_feature 1..1239: note = Description of Artificial Sequence: Synthetic coding sequence
  source 1..1239: mol_type = other DNA
atgcaaaaatattgcatatatcaacatttccaatttcagctgctgatacagcacttgtggatcgctgcgaattgcgacatagccgatgagaggttcgatgcgacttttcacaccaacgtgctagtcaacagctctgggcattgccagtatctccctcctggaatatttaagtcctcctgctatatcgacgtgaggtggtttccgttcgatgttcagcactgtaagctcaagttcgggtcctggtcttacgggggatggtctctggatcttcagatgcaggaggccgacatctctggttatatccccaatggcgaatgggacctcgtcggcatcccaggaaaaagatccgaacgcttctacgagtgctgtaaggaaccgtaccctgacgtaacttttactgtgacaatgagacgtcgcactctttattatggattgaatctgttaattccctgcgtgctcattagcgcacttgccctgttagtttttctcctaccagctgacagcggagagaaaatttccctgggcattacagtgctgttatctctgactgtgttcatgctgctggtggctgagatcatgcccgccacaagtgacagcgtgccactgatcgcccaatacttcgcctccactatgataatcgttgggctctcagtggtggttaccgtaattgtgctgcaataccaccaccatgatcctgacggggggaagatgcctaagtggacgcgcgtcatactgctgaactggtgcgcctggttcctgcgaatgaaacgccctggtgaagacaaggtgaggcccgcctgccaacacaagcagagacggtgcagcttggcctccgtggaaatgtccgctgtcgcaccaccccccgcatcaaacggtaatcttttgtacattggcttccggggcttggatggcgttcactgcgttcccacccctgacagtggcgtggtgtgtggaagaatggcttgctcgcctacccacgacgagcatctcctacacggaggccaaccccccgaaggagatcccgacctcgccaaaatcctcgaggaggtgcggtacatagccaacaggttccggtgtcaggacgagtccgaggccgtgtgctccgaatggaagtttgcggcctgtgtggtggaccggctgtgtctgatggcattctccgtgtttacaatcatctgcaccattggcatcctgatgtcagcgcctaacttcgtggaagccgtctcaaaggattttgcatag

SEQ ID NO: 112037 - DNA, 447 bp, synthetic construct
  misc_feature 1..447: note = Description of Artificial Sequence: Synthetic coding sequence
  source 1..447: mol_type = other DNA
atgaggtgtagccccggtggcgtatggctagccctggccgcctctctgctgcacgtttctttgcagggcgaatttcaaagaaaactatacaaagaactggttaagaactacaaccctttagagaggccagtggccaacgattcacagccattgacagtttactttagtttaagtctgctccagattatggatgtggatgagaagaaccaagtgcttaccactaacatctggctccagatgtcgtggaccgaccattatctgcaatggaacgtgtcggaataccccggagttaagaccgtgaggttcccagacggacaaatctggaagccagatattctgctgtataattcctcctatgaccagcagcaggaagtgctggcctatgggatgcattgctggagtccccagttcggccctacctctagcagcatgtttcccgtcgtgtag

SEQ ID NO: 112038 - DNA, 600 bp, synthetic construct
  misc_feature 1..600: note = Description of Artificial Sequence: Synthetic coding sequence
  source 1..600: mol_type = other DNA
atgacaaattctcgcaagtgttggccaatggggtgcaccgccggtgcacactctctggatcctcacccacgcctatgcagtttgctgtgtatcggggaattttgcggccgtgacggctgctccgccgacgaacgtttcgatgccacatttcacaccaatgtcctggtgaactctagcggccattgccagtacttgccccctgggatctttaaatctagctgttacattgatgtaaggtggttcccatttgacgtgcaacactgcaaactgaaatttgggtcttggtcttacggcggttggtccctggacctgcaaatgcaagaggcggacatttctggctacatccccaacggcgagtgggacttagtgggcatccccggaaaacggtccgaaagattttacgagtgctgcaaagaaccctatcctgatgtcacattcactgtgaccatgaggcgtcgaacactctattacggcctcaatctgctgatcccatgcgtcctcataagtgcactcgcgctgttagtctttctcttaccggcagattccggcgagaaaatatcactgggcataacagtcttgttatccctaacagtgttttag

SEQ ID NO: 112039 - DNA, 1596 bp, synthetic construct
  misc_feature 1..1596: note = Description of Artificial Sequence: Synthetic coding sequence
  source 1..1596: mol_type = other DNA
atgaggtgctcgcctgggggtgtctggctggctctcgctgcaagcctcctgcatggtaaagccaccgcctcccccccatccactcccccctgggatcccgggcatattcctggtgcgtccgtccgtcctgcgcccgggccggtaagccttcaaggcgaatttcagagaaaactttataaagaattggtaaagaactataatcccctggagaggcccgtggctaatgactctcagcccctgactgtttacttttctctttctcttctccagatcatggacgtggatgaaaagaatcaagtcctgaccactaacatctggctccagatgtcttggacagaccactatctgcagtggaacgtgagtgaataccctggggtgaagacagtgagattccccgatggtcagatatggaaacccgatattctgctgtacaatagcgcagacgagagattcgatgcaacattccacacaaatgtgttagtgaactccagcggccattgccagtacttgccacctgggatatttaaatcttcgtgttatattgacgtccgttggttcccatttgacgttcagcactgtaagctgaagttcggcagctggtcgtacggaggatggagccttgacctgcagatgcaggaggccgacatctctgggtatatccctaacggtgagtgggacctggtgggaattcctggaaagcgctctgagcgcttctatgagtgttgcaaagagccctacccagatgtaaccttcactgtgaccatgcgcagacgaaccctgtactatggactaaatttactcatcccatgtgtgctcatcagcgccctcgccttgctggttttcttattgccagctgattccggcgaaaaaatctccctcggaattactgtgctgctctcactgaccgtcttcatgctgttagtggcagaaatcatgcctgccactagtgactcggtgccacttattgcccagtacttcgcctcaaccatgattattgttgggttatctgtagtggtgaccgtgatcgtgctccagtaccatcaccatgaccctgacggaggaaaaatgccgaaatggaccagagtaatcctcttgaattggtgtgcttggttcctcaggatgaaaaggccaggagaagacaaggtgcgtcccgcgtgtcaacacaaacagagacgctgctcactcgcctcagtggagatgtcagctgtggctccccccccagcttcaaacggcaacctgctatacataggcttccggggcttggatggagtgcattgcgtgccgacgccagacagtggcgttgtctgtggccgcatggcctgtagccccacacacgacgagcatctgctccacggcggccagccccccgagggagaccccgacttagccaaaatcttggaagaagttagatatattgcaaacagattccggtgtcaggacgaatccgaggcggtgtgttccgagtggaagtttgcggcatgtgtggtagaccgtctgtgccttatggccttttccgtgttcactataatctgtaccatcgggatccttatgagcgcccccaacttcgtagaagccgtgagcaaagacttcgcttag

SEQ ID NO: 112040 - DNA, 966 bp, synthetic construct
  misc_feature 1..966: note = Description of Artificial Sequence: Synthetic coding sequence
  source 1..966: mol_type = other DNA
atgcaggaggcagatatatcagggtatatacccaacggcgaatgggacctggtaggtatccctggcaaaaggagcgagcgattctacgaatgctgcaaggagccctacccggacgtgacctttacggtgaccatgcgaagacgtacattgtattatggcctcaacctgctgattccatgcgtgctgatctccgcacttgccctgcttgtctttttgctcccggccgattcaggagagaaaatttccttgggcattaccgttcttctgtctctaaccgtctttatgttgttggtggccgaaatcatgcccgccacttctgatagcgtacctctcattgcccagtattttgcatccactatgattatcgtgggcttgtcagtcgtcgtgacggtgatcgtgttgcagtatcatcaccatgatcccgacggaggcaaaatgcctaaatggactcgggtgatcctccttaattggtgcgcctggttcctgaggatgaaacgacccggagaggataaagtgcgaccggcgtgccaacacaaacagcggcggtgctcattagcaagcgtagaaatgtctgctgtggcaccacctcccgcttctaacggcaacttgctctacatcggctttagaggattggacggtgtgcactgtgtccctacacctgactccggggtagtgtgtgggcgcatggcctgtagtcctactcacgacgagcacttactccacgggggccaaccaccagagggcgaccccgatctcgctaagatccttgaagaagttagatatattgcaaatcgcttccggtgtcaggatgaaagtgaggcagtgtgctccgagtggaaattcgccgcttgtgtcgtggaccggttgtgtttgatggcctttagcgtctttactatcatatgtaccatcggcattttgatgtctgcgccaaactttgttgaagctgtgtccaaggattttgcatag

SEQ ID NO: 112041 - DNA, 1440 bp, synthetic construct
  misc_feature 1..1440: note = Description of Artificial Sequence: Synthetic coding sequence
  source 1..1440: mol_type = other DNA
atgaactggagccactcatgtatttctttttgctggatttattttgcagcaagcagactgagggcagcggaaactgctgacggaaaatatgcacaaaagctgtttaacgatctcttcgaggattacagcaatgccttgcggccagtcgaggacacagataaagtgctgaacgtgactcttcagattaccctcagccagataaaggatatggatgagaggaatcaaattctgacggcgtatctttggatccggcagatatggcacgacgcttatctgacctgggacagggatcaatacgacggcctggattccattcgtattccatctgacctcgtgtggaggcctgacattgtactctacaacaaagctgatgacgagtcctccgagccagtcaataccaatgtagtgctgcgctatgacggactcatcacatgggacgcgcccgccatcacaaaatcctcgtgcgtagtagatgtgacgtattttccctttgataatcaacagtgcaacttaacattcggatcctggacatataacggaaaccaggtggacatctttaacgcgttagactccggcgatctgtccgatttcatagaggatgttgaatgggaggtacatggaatgcctgccgtgaagaatgtgatcagttacgggtgttgcagtgaaccgtatccagacgtcacatttaccctgctcctgaagaggaggtcgtccttctatatcgtaaacttgctgattccctgtgtgttgatatccttcctcgctcccttatccttttatctgccagctgcctctggagagaaggtcagcctgggtgtgaccattctgttggctatgacggtctttcagctcatggtcgcggaaatcatgccagcttctgagaacgtgccgttaataggcaagtattatatcgcaaccatggccctgatcacagcatccactgccctgaccataatggtgatgaatatccacttttgcggcgccgaagcgcggccggtaccccattgggctagagtggtcatcttgaagtacatgtctagagtcctctttgtatatgacgtgggggagtcgtgcctctcaccccaccattcacgtgaaagggaccatctgaccaaagtgtactccaaactgcccgagagtaatctaaaagcagctagaaacaaagatctgagtcgaaaaaaagacatgaacaagaggttgaagaacgatcttggatgtcagggcaagaacccgcaggaggcagagtcttattgtgcacagtacaaagtactcacacggaacatcgagtacatcgcgaagtgcctcaaggatcacaaggcaacgaatagcaaggggtctgagtggaagaaggttgccaaagttatcgatagattctttatgtggatattctttattatggtctttgtgatgacaattctcataattgccagggctgactag

SEQ ID NO: 112042 - DNA, 1506 bp, synthetic construct
  misc_feature 1..1506: note = Description of Artificial Sequence: Synthetic coding sequence
  source 1..1506: mol_type = other DNA
atgacacctggagcactgttgatgctgctgggggccttaggtgctccactggcaccaggcgtgcgggggtctgaagccgagggccgcctgagagagaaactgttttctgggtacgattcatccgtaaggcctgcacgcgaagtgggggatcgcgtgagagtgtctgtgggccttatactggcccagctgatttctctgaatgaaaaagacgaggagatgagcaccaaggtgtacttggacctcgagtggaccgattatcggctgtcttgggaccctgctgagcacgacggcatcgatagcctgcgcataactgccgagagcgtctggctccccgatgtcgtgctgctcaacaataacgacggcaacttcgacgtggcactcgatatctctgtggtcgtctcaagtgacggatcagtcaggtggcagcctcccggtatctaccgaagcagttgctctatccaagtgacatattttcctttcgactggcagaactgtacgatggtcttctcatcatactcgtatgattcgagtgaggtgtctttacagacagggctgggcccggatggccaaggccaccaggaaatacacattcatgaaggcacatttattgaaaacggccaatgggagatcatacataagccttcccgcctcatccaaccacctggagatccacgagggggccgagagggacaacggcaagaagttatattttacttgatcatcagacggaagcccctattctacctcgtgaacgtgatcgcgccttgtatattgattaccctcctggccatctttgtgttttatcttccgccagatgctggagaaaaaatggggctctcaatttttgctttgttgaccctgaccgtctttctgcttctgctggcggacaaagtgcctgagactagcctctcagtcccaatcatcatcaagtacctgatgtttacaatggtcctggtgacgttcagcgttatccttagcgttgtcgtgctgaatcttcaccaccgtagcccacacactcaccagatgcccctgtgggtccggcagatcttcatccacaaattacccctatatttgaggctcaaaaggcccaagcctgagcgggatctcatgcctgagccaccacactgtagttccccgggttcgggctggggtcgcggcacggacgaatactttatcagaaaacctcccagtgattttctgtttcccaaaccaaatagattccaacctgagcttagcgcccccgacttgaggcggttcatcgacggaccaaacagagcggtagccttgttgcctgagctgagagaagttgtcagtagcatctcttatatcgccaggcagctccaggagcaggaggaccacgatgctctgaaagaagattggcagtttgtcgctatggtggtagatagactgtttctctggacattcattatattcacgagtgtggggacccttgtaattttcctcgacgctacttaccacttaccaccccccgatccctttccttag

SEQ ID NO: 112043 - DNA, 1290 bp, synthetic construct
  misc_feature 1..1290: note = Description of Artificial Sequence: Synthetic coding sequence
  source 1..1290: mol_type = other DNA
atgtccactaaagtgtacctcgacctagagtggacagactataggctgtcttgggatccagccgaacatgatgggatagacagtctgaggattaccgctgaaagtgtgtggctgcctgacgtggtcctgctgaacaataatgacggaaacttcgacgtcgccttggatatctctgtggttgtgagcagcgatggctctgtgaggtggcagcccccgggaatttaccggtcatcctgtagtattcaagttacctacttccctttcgactggcagaattgtaccatggtattcagctcctattcttatgactcatctgaagtcagccttcagaccggtctgggtccagatggccagggacatcaggagattcacattcacgaaggaacattcatcgagaacggtcagtgggaaattatccataaaccatcaaggctgatacagcctcctggcgatccacgggggggccgcgagggacagcgacaagaggtgattttttatctgattattaggaggaagccccttttctacttggtaaatgtcatagcaccgtgtattctcataaccctgttggccatctttgttttttatctgcccccagacgccggagagaagatgggattgagtatatttgcactgctcactctcactgtgttcctgctgcttctagctgataaagtgcccgagaccagcctctccgttccgatcataattaaatacttgatgtttaccatggtgttagtgacgttctctgtcattctgtctgtggtagtattgaacctacatcatcggagtcctcacactcaccaaatgcccctgtgggtacgccagatattcatccacaagttacccttgtaccttagactgaaaaggcctaaacccgaaagggatctcatgccagagccgcctcactgttcctctccgggctctggttggggtcgcggcaccgatgagtactttatcagaaagccaccttccgatttcctcttccccaagcccaatcgattccaaccagagcttagtgctcccgatctccgaaggtttattgacggccctaaccgagccgtcgccctactccccgaattacgcgaggtggtcagctcgattagctatatcgcaaggcagctccaggaacaggaagatcacgatgccttaaaagaagattggcagttcgtggccatggtagtcgatcgcctgttcctgtggaccttcatcatttttacctcagttgggacactggtgattttcctggacgccacataccatctaccccctccagatccattcccctag

SEQ ID NO: 112044 - DNA, 1509 bp, synthetic construct
  misc_feature 1..1509: note = Description of Artificial Sequence: Synthetic coding sequence
  source 1..1509: mol_type = other DNA
atggctcggcggtgcgggcccgttgcactgctcttgggatttggactcctccgtctgtgtagcggcgtgtggggtactgacacagaggagcgtctagtggagcaccttttagaccccagccgctataacaagctgattcggccggctaccaacggctctgaactggtgacagtccagctgatggtaagcttggcccaactcatctcagtccacgaacgggagcagattatgactacgaacgtttggctgactcaagagtgggaagattatcgcctcacttggaaaccagaggaatttgacaatatgaaaaaagtgcggctgccttctaaacatatctggctccccgatgtagtgctgtacaacaacgctgatggcatgtacgaggtttctttttatagtaatgcggtcgttagctatgacggctccattttttggctacctcccgctatctataagtctgcctgcaagatcgaggtgaagcactttccttttgaccaacagaactgcacaatgaaatttaggtcttggacatatgatcggacagaaatagacttagtgctcaagtccgaggtggctagtctcgatgacttcacacccagtggcgaatgggatatagtggctctcccaggcaggcggaatgagaaccccgacgatagcacctacgtggatattacctacgattttataattagaaggaagcctctgttctataccatcaacttgattattccctgcgtattaattacctcattggcaattttggtgttctacctgcccagcgattgtggcgaaaagatgaccctgtgtatctccgtgctgctagctttgacagtcttcctgcttctgattagcaagattgtgcctccgacatctctggatgtccctttggtgggcaagtatctaatgtttacaatggtgctggtgacgttctccatcgtgaccagcgtgtgtgttcttaatgtccatcaccggtcacctaccactcacaccatggccccatgggttaaagtggtctttctggaaaagctcccggcccttctttttatgcagcagccgagacatcactgcgctcggcagaggttgcgcctgcgacggcggcagcgggaaagggagggagcaggagccctttttttccgggaagcacccggcgctgactcctgcacctgctttgtgaaccgggcttctgtgcagggcctcgcgggcgctttcggggctgaacctgcgccggtagccgggccaggtaggtcaggcgagccatgtggttgtggactccgtgaagcagtggatggagtgcgtttcatcgctgaccacatgcgctccgaggatgatgaccagtcggtaagcgaggattggaaatacgtggccatggttatcgatagacttttcttgtggatattcgtattcgtctgtgtgttcggtaccattggcatgttcttgcagccactcttccagaactataccacaaccacattcctgcacagcgatcattcagcaccaagctccaagtag

SEQ ID NO: 112045 - DNA, 1377 bp, synthetic construct
  misc_feature 1..1377: note = Description of Artificial Sequence: Synthetic coding sequence
  source 1..1377: mol_type = other DNA
atgttgcctgattttatgctcgtgttaatcgtcttggggataccatccagcgccaccacgggatttaattcaattgccgagaacgaagatgcactgcttagacatctatttcaaggctaccaaaaatgggtgaggccggttctacatagcaacgatactattaaggtgtatttcgggctgaagataagccaactggtggatgtggacgagaaaaatcagcttatgactactaatgtgtggctgaaacaagagtggaccgatcacaaacttcgatggaacccggatgattacggcggcattcacagcatcaaagtcccaagtgaatccctgtggttgccagatatcgtgctgttcgaaaatgcggacggtcgcttcgagggaagtctgatgacaaaggtgatcgtcaagtccaacgggacagtcgtgtggacgccccccgcgtcatacaaatcaagttgtacaatggacgttaccttttttcctttcgataggcagaattgttccatgaagtttgggagttggacttacgacggtacaatggtggatctcattctgataaacgaaaatgtcgacagaaaagatttcttcgataatggggagtgggagattctcaacgccaaggggatgaagggtaacagaagggatggggtgtacagctacccctttattacctacagctttgtgcttagacggcttcctctcttttacactcttttcctaatcataccctgcttggggttgtcattcctgacagtcttggtgttctatttaccctccgatgagggtgagaaactcagtttgtctacttcagtccttgtttctttaacagtgttcctgctagtgatcgaagagatcatcccttcatcttcaaaggtgatccctctgatcggggagtatctcctcttcattatgatcttcgtgaccttgtctatcatcgtgactgtattcgtgatcaatgtgcatcatcgatcaagctccacataccatccgatggcaccctgggtgaaacggctgtttctgcaaaagctgcctaagctgctatgtatgaaagaccacgtcgatcgttacagctccccagagaaggaggaatctcaacccgtcgtgaagggaaaagttctagagaagaagaaacaaaagcagctgtcagatggagaaaaagtgttagtggcattcctggagaaagcagctgacagcatccgatatattagtagacacgtgaagaaggagcacttcatcagccaggtggtgcaggattggaagtttgttgcccaggtgctcgaccggatctttttgtggttgttcctaatcgtgagtgtgacagggtcagtgcttatctttaccccagccctaaagatgtggctccattcttatcattag

SEQ ID NO: 112046 - DNA, 1497 bp, synthetic construct
  misc_feature 1..1497: note = Description of Artificial Sequence: Synthetic coding sequence
  source 1..1497: mol_type = other DNA
atgagaagagctcccagccttgtcctctttttcttggttgccctgtgtggtcgaggaaattgtcgggttgcaaacgctgaagagaagctgatggacgacctcctaaacaaaacccgctataataacctgatccgcccagccacctcgagctctcaactgatcagcataaagctgcagctgtcccttgcgcagctcatctctgtgaacgagcgagagcagattatgacgacaaacgtctggctgaaacaggaatggaccgactataggctgacgtggaactcgtcgaggtatgaaggcgtcaacattttgcggatacccgctaagcgtatctggcttcctgacatcgtgctgtacaacaacgccgatggcacctatgaggtgtcggtgtacactaacttgattgtgaggagcaacgggagtgtgctatggttgccgcccgccatttacaagagcgcctgcaagatcgaggtgaagtatttccccttcgatcagcagaactgcactctgaaattccggtcctggacgtatgaccacacggaaatcgacatggtcctgatgaccccgactgccagcatggacgactttacgccatcaggtgagtgggatattgtcgcgctccctggtcgccggacggtaaacccccaggacccaagctatgtggacgttacctacgattttattattaaaaggaagccactcttttataccatcaatctgatcatcccgtgcgtcctgacgactctcctggccatcctggtgttttacctgccttcagactgtggcgaaaagatgacgctctgcatttcagtattgctggccctaacatttttccttctcttgatctcaaaaattgtgcccccgaccagcctggatgtcccgctgatcggaaagtacctgatgttcaccatggtcctggtgacattttctatcgttacttcagtgtgtgttctgaatgttcaccatcggtctcccagcacccacaccatggccccttgggtcaaacgttgttttctgcacaagctacccacctttttgtttatgaaaaggcctgggcccgattcatccccagccagggcctttcccccttctaagtcctgcgtgacaaaaccagaggcaaccgccacgtctactagtccttccaacttctatggcaatagcatgtattttgttaaccctgcctccgccgcttctaagtcccctgccggctccacccccgtcgctattccaagggacttttggctgagatcctctggccggtttaggcaggatgtacaggaggccctggagggcgtgtcattcatagctcaacacatgaagaacgacgacgaggaccagagcgtggttgaagactggaaatatgtggcaatggtagtggacagactgttcttgtgggtcttcatgttcgtatgcgtattgggtactgtgggacttttcttgccacccctgttccagactcacgctgcctcggaaggtccctatgcggcccagcgcgactag

SEQ ID NO: 112047 - DNA, 696 bp, synthetic construct
  misc_feature 1..696: note = Description of Artificial Sequence: Synthetic coding sequence
  source 1..696: mol_type = other DNA
atgcgtcgagccccctccctcgtgctattctttcttgtcgccctatgtggccgcggcaactgtcgggttgctaatgccgaagaaaagcttatggacgacctgctcaataagacaaggtataacaatctgatcagaccagcaacatccagctcacaactgatctctattaagctgcagttatctctcgcacagcttattagcgtgaacgagcgggagcagattatgactaccaacgtttggctcaagcaggagtggactgactatcgcttgacatggaactcaagtcgttatgaaggagtaaatattctacggattccggcgaaaagaatctggctgcccgatatagtcctgtataataaaagccttagaaccggtagcacctggttgtggtggtggaccggctgcagttgcggttgttcctgcctctgtgcctcctgggctttgtggggatccagctacagaccttcttctcgacctatgcagctgctgcgaggacctaccctgccgtcagtgactgagggacccctgggatgcggagtcaggggctgtgagtggcccggaggccacttcgccgcatctttctgggtcgtcgccgatgaggccctgtccaagtatgtgagcattgggcaccagcctcatcagaccagccattcaaggggaacgggaaaggatgggggtctgggttgtccgctttag

SEQ ID NO: 112048 - DNA, 1554 bp, synthetic construct
  misc_feature 1..1554: note = Description of Artificial Sequence: Synthetic coding sequence
  source 1..1554: mol_type = other DNA
atggaaggccccgtactgaccctgggactcctcgccgcgctggccgtgtgtggcagctggggtctgaacgaggaggaacgtctcatccggcatctgtttcaggagaaagggtacaacaaagaactcaggccggtcgcacataaggaggaatcggtggacgtggcactggcattgacactgagcaacctgataagcctgaaggaagtggaggaaaccctgacaactaatgtgtggatcgaacacgggtggactgataacaggctgaaatggaacgcagaggaatttggcaacatatctgtgctgagactgcccccggacatggtgtggttgcccgaaattgtcttggagaataacaacgacgggtcgttccagatcagttattcatgcaatgtgctggtgtaccactatggattcgtgtactggctgcccccagccatcttccgcagctcatgtcctatatccgtgacctattttccgttcgactggcaaaactgctcactcaagttctcctccctcaagtacaccgctaaagagattacactgagtttaaaacaggacgcgaaggagaatcgcacttacccagtggagtggattatcatcgaccccgaagggtttacagaaaacggggaatgggagattgtccatagaccagctcgggtcaacgtggatcctcgagcgccgctcgacagtcctagtcgccaggacattacattctacttgattataaggaggaagccactgttttatatcatcaatattctagttccatgcgtgctgatctccttcatggtgaatcttgtcttttatttgcccgccgactctggcgaaaagacctccgtggccatatctgtcttacttgcccagagcgtattcctgctgcttatctccaagcggctgccggcaacttcaatggctatcccactgattgggaaattcctgttgttcggaatggtccttgtaaccatggtggtggtgatctgtgtcattgtcctgaacatccacttccgtacacccagcacccacgtcctgtcggagggtgtgaaaaaactgttcctggaaacactgcccgaacttttgcacatgagtaggccggctgaggatggaccttcccctggggctctcgtgcgaagatccagcagcctgggatatatctcaaaggctgaggagtactttctcttgaaaagtcggagtgatctcatgtttgagaaacaatccgaaaggcacggcttggcccggcgactgaccaccgcgcggagaccaccagcaagttcggagcaggcacagcaggaactgtttaacgagctcaagcccgccgtggacggcgcaaactttatcgtgaaccatatgcgcgaccaaaataactacaacgaagagaaggatagctggaacagggtcgctcggacggtggacagactctgtctgttcgttgtgactcccgtgatggttgtgggtacggcctggatcttcctgcagggcgtgtataaccagccacctccccagccctttcctggtgacccctattcatataacgtccaagacaaacgattcatctag

SEQ ID NO: 112049 - DNA, 708 bp, synthetic construct
  misc_feature 1..708: note = Description of Artificial Sequence: Synthetic coding sequence
  source 1..708: mol_type = other DNA
atggaaggccctgtcttaactttgggtctcctcgctgctctggcggtttgtggatcttggggcttgaatgaggaggaaagacttattaggcacctcttccaggaaaaagggtacaacaaggaactccgccccgtagctcacaaggaagagagcgttgacgtcgccctcgcactcactctgtccaatctcatatccctgaaagaggtagaggaaacattaaccaccaacgtctggatcgaacatggatggacagacaatcggcttaagtggaatgcagaagagttcggcaatatttccgtgctgagactccccccagatatggtctggctgcctgagatcgtcctggaaaataataatgacggcagctttcagatcagctactcttgcaacgtgctcgtatatcattacgggtttgtgtattggctaccccctgctatattccgcagctcatgccctattagcgtgacctattttccctttgattggcagaattgtagcttgaaatttcgagaaagaggcgttggagactctcctccagctggccaggggcagcgaggaccccagtctcctagtggacagcctcaacctcctggccatcacctgcttcctcatcatccaccccaagctccgttgctgcaccatcaacatcccggcgcgctgcgggcacatctgctgcatggccagcctgggcttctccccaccggctag

SEQ ID NO: 112050 - DNA, 972 bp, synthetic construct
  misc_feature 1..972: note = Description of Artificial Sequence: Synthetic coding sequence
  source 1..972: mol_type = other DNA
atgctgaagaacctggagacctccgtgtcctgtgcctcacctagaacatggtgtgggtcccaaaggctttgctggcgtacaacgatgacagcccccagccgctcgccgacaccagccacgtgcctgagtacaaccactgcttcatgcaccggatgccatcttccttccagcgccccccctgccccttctctctcacccatttccccttccaccggcaggactgcaccatctagttctgggggtgagaaaacctcagtggcaatcagtgtgctgctcgcacagagcgtatttctgctgctgatctctaagcggctccccgccacttcgatggcaattccgctgattgggaaattcctgctgtttgggatggtcctcgtgactatggtcgttgtcatctgtgtcatagtgttaaacattcattttcgaactccctctacgcatgtgttaagtgaaggcgtgaagaaactattcttggagaccttgcccgagctgctacacatgtccagacctgcagaggatgggccctctccaggcgcactggtgaggaggagcagtagcctggggtatatttccaaggctgaggagtatttcctgctgaaaagtagatcagatctaatgttcgagaagcaaagcgaacggcatggcctggctcggcggttgactactgctaggaggccacctgctagtagcgaacaagcccagcaggaactgtttaatgagcttaagcccgccgtggatggtgccaatttcatcgtaaatcatatgcgtgatcagaataattataatgaagagaaggacagttggaacagggtcgctcgcacagtcgacaggctgtgcctgttcgttgtgacaccagtcatggtcgttggcactgcatggatctttctgcagggtgtgtataaccagccacctccgcaaccattcccaggggacccatatagctataacgtgcaggacaaaaggttcatttag

SEQ ID NO: 112051 - DNA, 708 bp, synthetic construct
  misc_feature 1..708: note = Description of Artificial Sequence: Synthetic coding sequence
  source 1..708: mol_type = other DNA
atggaaggccctgttctgacactgggcttgctggccgcgttagcagtgtgcggatcctggggacttaacgaagaagaaagactgatcagacatctgttccaagaaaagggatataataaggaactgagacctgttgcccacaaggaagagagtgtggatgtcgcactcgctctaacactgtcgaatctcatatccctgaaggaagtggaggaaaccctcaccacaaatgtgtggattgaacacggctggactgataatagattgaagtggaacgcagaagaattcggaaacatctccgtgctgcggctacccccagatatggtttggttaccagaaattgtactggagaataataacgatggcagcttccagatcagttactcctgtaacgtgttagtataccattacggcttcgtctattggctcccccctgcaatcttccgaagcagctgtccaataagtgtgacttatttcccctttgattggcagaattgcagtctcaagtttagagagagaggcgttggggatagtcctccagcaggccaggggcaacggggcccccaaagcccctctggacaacctcaaccaccaggtcatcatctgctgccccaccaccccccacaggcaccactgttgcatcaccagcaccccggagctctccgtgcccatctgctgcacggccaacctggcctattaccaactggttag

SEQ ID NO: 112052 - DNA, 1509 bp, synthetic construct
  misc_feature 1..1509: note = Description of Artificial Sequence: Synthetic coding sequence
  source 1..1509: mol_type = other DNA
atggaaggcccagtgctgaccctcgggttgctcgcagccctggctgtctgcgggtcatggggattgaatgaggaggagagattgatccgtcatttattccaggagaagggttataataaggaattgaggcctgtggcccataaagaagaatcagtggacgtggcactcgcattgacccttagcaatctgatctcacttggatggacagacaacaggttaaaatggaacgccgaggagtttggaaatatcagcgtactcaggctgccacccgacatggtatggttacccgagatagtactagaaaacaataatgatggatcctttcagatttcttatagttgcaatgtcctggtctatcactacggatttgtctactggctgcctcctgcaatcttcaggtcctcgtgccccatctccgtgacatatttcccatttgattggcagaattgtagcctgaaattcagtagtctgaaatacacagctaaagagattactcttagccttaaacaggacgcaaaggaaaacagaacgtaccctgttgagtggatcatcatcgaccctgagggatttaccgaaaatggcgaatgggagatcgtgcatcggccagcccgcgtgaatgtggatccccgcgcccctctggattcccccagccggcaggatatcactttctacctcattattaggcggaaaccacttttctatattatcaatattctggtgccatgtgtgctcatttcctttatggtcaatcttgtgttttacctaccggcagactccggcgagaagacctccgttgcgataagcgtgcttctggcccagtctgtgtttttgctgctgatttccaagcggctgcccgctacttcaatggccatcccactcataggtaaattcctcttattcggaatggtgcttgtgacaatggttgtggtgatctgtgttattgtcctgaatatccacttcagaactccttcaacccatgtgctcagcgagggggtcaagaagctgttcctggagacccttcctgaactgctgcatatgtcgcgacccgccgaggacgggccaagccctggcgccctggtgcgtaggtcctccagcctgggctacatttccaaagcggaagagtattttctgttaaagtctaggtccgatctcatgttcgaaaagcagtctgaacgccatgggttagcaagacgcctgaccaccgcccgtaggccccccgccagttcagagcaagcccagcaagaactctttaacgagcttaagccagccgtggacggcgctaattttatcgtgaatcacatgcgcgaccaaaataattataacgaggaaaaggactcctggaatagggtagccaggacagtggaccggttgtgcttatttgtagtgacacccgtcatggtggtgggcacagcttggatttttctgcaaggggtctacaatcagccccctcctcaaccatttcccggcgatccatatagctacaatgtccaggacaaacgcttcatatag

SEQ ID NO: 112053 - DNA, 1482 bp, synthetic construct
  misc_feature 1..1482: note = Description of Artificial Sequence: Synthetic coding sequence
  source 1..1482: mol_type = other DNA
atggcccgcgccccgctcggtgttctgctcctgctcgggttgctaggccgcggggtgggaaaaaacgaggagctcagattgtaccaccacctgtttaataactatgacccgggctcccgacctgtccgcgaacctgaagatactgtgaccatttccctgaaagtcacactgactaacttgatctcactgaatgagaaggaagagactctcaccacatccgtgtggattggcatcgactggcaggactaccggctgaattactccaaagacgatttcgggggaattgaaacgctacgggtgccgtccgaactcgtctggttgccagagatcgtgctggaaaacaatattgacggacagtttggagtcgcctacgatgctaacgtcctggtctacgaaggtggatcggttacgtggctgccccctgctatctatagatcagtgtgtgcagtggaggtgacatattttccatttgattggcagaattgctctctcatttttcgctctcagacttataacgctgaggaggtcgagtttactttcgccgttgacaacgatggcaaaactattaataaaatcgatatagatacggaggcctatactgaaaacggagagtgggctatcgatttctgcccgggcgtgatcagaagacaccacgggggtgcgaccgacggtcccggggaaactgatgtgatctattcactaattattcggcggaaaccactgttttatgtgatcaacataatcgttccttgcgtcctgattagtggcttggtgttacttgcctactttttaccagcccaggctgggggacaaaagtgcacagtcagtattaacgtgcttcttgctcagactgtattcctttttttaatcgctcaaaagatccccgaaacgtccctatctgtgcctctgctggggcgcttcctgatatttgttatggtcgtggcaacactgatcgtgatgaactgcgtaattgtgctcaatgtgtcgcagcgcactccaacaactcatgccatgagtcctcgcctcaggcatgtgctgctggagctgctccctagattgctgggctcacccccaccaccagaagccccaagagcagcttctccaccacgtagagcttcttccgtcggtctgctcctcagggctgaagagttgatcctcaagaagcctcggtctgagctcgtgttcgaagggcaaaggcatagacagggtacgtggaccgcagcattctgtcaaagtctgggagctgcggcaccagaagtgaggtgctgcgttgacgccgttaatttcgtggccgagtctacaagagatcaggaggccacgggagaggaggtctcagactgggtacggatggggaatgcgctggataacatttgcttctgggcggcactcgtgctattctcagtgggatcctcactgatctttttaggcgcatatttcaaccgcgttccagatctgccctacgccccttgcatccagccatag

SEQ ID NO: 112054 - DNA, 1554 bp, synthetic construct
  misc_feature 1..1554: note = Description of Artificial Sequence: Synthetic coding sequence
  source 1..1554: mol_type = other DNA
atgcatggcgggcagggccctcttctgctgctgctgcttctcgccgtttgtttgggcgcccagggccgcaaccaggaggagcgacttttggccgatcttatgcagaactacgaccccaatttgcgccctgcagagagggactccgacgtggtgaacgtaagcctcaaactgacactaactaacctgattagcctgaatgaacgtgaagaggctctgactacaaatgtatggatcgaaatgcaatggtgtgactatcgactcagatgggatcctagagattatgagggcctgtgggtgttacgagttccgtctaccatggtgtggcggcccgacatcgtcctggaaaacaatgtagatggcgtctttgaggtggccctgtactgcaatgttctcgtctcgcctgatggatgtatctactggttacccccagccatattcagaagcgcatgttcgatctcagtgacatatttcccattcgactggcaaaactgctctctaatctttcagagccaaacatactcaaccaatgaaattgatctgcaactctctcaggaagatggacagacaattgagtggatatttattgaccctgaggcctttaccgagaatggggaatgggccatccaacatcggcccgctaagatgctgctcgatcctgccgcgcccgcccaggaggccggccaccagaaagtggtgttctatctgctgattcagaggaagcccctcttttatgttatcaacatcattgccccgtgcgttctgatctcctctgtggctattttgatccacttcctcccggcaaaagcaggtggccagaagtgcactgtggccatcaacgtgctccttgctcaaacagtgtttttgtttttggtggccaagaaggtccccgaaaccagtcaggcagtacccctcatctctaaataccttacattcctgctcgtagtgaccatcttgatcgtggtcaatgctgtggtagtactgaacgtgtccttgcgatcacctcacacgcatagcatggctaggggggtcagaaaggtatttcttagactcctcccgcagctactgcgaatgcatgtgaggcccctcgccccagccgcagtgcaggatacacagtccagattgcagaatggtagttccggttggtctattacaaccggggaagaagtagccttatgtttgccacgctccgagctgcttttccaacagtggcaaaggcaaggactggtggccgcggcactggaaaagttggaaaagggccccgagctggggctaagccaattctgcggaagcctcaagcaggctgcgccggccatacaggcttgtgtcgaggcatgtaacctcatagcttgcgcccgtcatcagcagtctcactttgataacggaaatgaggaatggtttctagtcggtagagtccttgatcgggtgtgctttcttgcgatgctgtccttatttatatgcggcactgccggtattttcctcatggcccactataatagggtacctgccctcccattccccggggatcccaggccgtacttgcctagtcctgattag

SEQ ID NO: 112055 - DNA, 1554 bp, synthetic construct
  misc_feature 1..1554: note = Description of Artificial Sequence: Synthetic coding sequence
  source 1..1554: mol_type = other DNA
atgcacggcggacaaggcccactcctgttactcctccttcttgccgtctgcctgggcgctcaggggcgtaatcaagaggaacgcctacttgctgatctgatgcagaattatgatcctaacttgcgccctgcagaaagagactcagatgttgtgaacgtgtctcttaaactgactctgactaatctgataagtttaaatgagcgggaagaggccttaaccactaacgtgtggattgagatgcagtggtgcgactacaggctgagatgggatccacgcgattacgagggactgtgggtgctgagggttccttccactatggtgtggcgccccgacattgtgttagagaacaacgtcgacggagtgttcgaggtggcactgtactgcaatgtgttagtgtcacccgatggatgcatctactggttaccacctgccatctttcgcagtgcttgttctatcagcgtgacctacttcccttttgactggcagaattgcagtttaatttttcagagtcagacatattctacaaacgagatcgatcttcagctgtcacaagaggacggccagacaatcgaatggatttttatcgaccccgaggccttcactgagaacggagagtgggcgatccagcatcgtcccgccaagatgctccttgatccagcagcacccgcacaggaagccggtcaccagaaagtcgtgttttaccttcttattcagcggaagccattattctatgtgatcaatattatcgccccttgtgtccttatttcttcagtggcaatactaattcactttttacccgctaaagcaggcggccagaagtgcaccgtagcaataaacgtgcttcttgcccagaccgtgttcctcttcctggtagccaagaaggtacccgaaacatctcaggctgtcccgctcatctctaagtatcttaccttcctcctggtcgtgacaatactgatcgttgtgaatgctgtggtggtgttaaacgtgtccctccgtagcccgcatacccattccatggctagaggtgtcaggaaagtgtttttaagattgctgccacagctcctgcgtatgcacgtccggcccctggctcctgctgccgtccaggacactcagtcacggttacaaaacggaagcagcggttggtctatcacaacaggagaggaggtggcgctctgtctgccacgatcggagctgctattccagcaatggcagcggcagggcctggtggctgctgcccttgagaaactcgagaaaggaccagagctgggacttagccagttctgtggctccctcaagcaggccgcacctgccattcaagcctgtgtcgaagcttgcaatctgatcgcatgtgctcgacatcagcagtcacactttgacaacgggaatgaagagtggttccttgtaggaagagtgctggatagagtttgttttctggccatgctgagtttatttatttgcgggactgcgggcatttttttgatggctcattacaacagagtacccgctctccccttcccaggagaccccagaccctatctgccaagccccgattag

SEQ ID NO: 112056 - DNA, 1080 bp, synthetic construct
  misc_feature 1..1080: note = Description of Artificial Sequence: Synthetic coding sequence
  source 1..1080: mol_type = other DNA
atggtcagacctatgttactgctcagtctcggtctgctggcaggcctgctgccggcactagccgcttgccctcaaaattgccattgtcactcagatttgcaacatgttatttgcgacaaggtggggctccagaaaattccaaaagtctcggaaaaaaccaaactgctgaacctgcaacgcaataacttccccgtactggctgcaaacagctttagagccatgcccaatctcgtttcgttgcatctgcaacactgtcagatacgagaggtcgctgccggtgccttccgtggtctgaaacagttgatttacctctatctttctcacaacgatataagggttttaagggcgggagcatttgacgacttaaccgaactgacttatttgtatctcgaccacaataaagttaccgaattgcctaggggcttgctctcccccctagtgaacttgttcatcctgcagctgaataataacaaaattcgcgagctccgggccggagcctttcagggggctaaggatctgcggtggctttatttgagcgagaatgctctaagtagtcttcagcctggcgccctggatgatgtggagaacctagcaaagtttcacgtagatcgcaatcagctatcaagctatccctcagctgcgctatccaagttacgagtcgttgaagaactgaaactctcccataaccctctcaaatccatccctgataacgcatttcaatcattcggcagatatctggaaaccctgtggttggataatacaaacctggagaagttctcagatggcgccttcctaggggtaaccacactgaagcacgtgcacctggagaacaaccgtctgaaccagcttccttccaattttccgttcgatagtctggagaccctagcgcttacgaacaatccttggaagtgtacatgccagctgcgtggactgagaagatggcttgaggccaaggcctcacgcccagatgccacatgcgcgtcccctgccaagttcaagggacagcacatacgggacactgacgccttcaggagctgtaaattcccaacaaaacgcagtaaaaaagccggcaggcattag

SEQ ID NO: 112057 - DNA, 129 bp, synthetic construct
  misc_feature 1..129: note = Description of Artificial Sequence: Synthetic coding sequence
  source 1..129: mol_type = other DNA
tgagcgtcacgtcccgacgcgacctgcgcaagtccagcaaagttcaagggccagcacattagggatactgacgcattcaggtcttgcaaatttcccaccaaaagatccaaaaaggccggacgccattag

SEQ ID NO: 112058 - DNA, 1080 bp, synthetic construct
  misc_feature 1..1080: note = Description of Artificial Sequence: Synthetic coding sequence
  source 1..1080: mol_type = other DNA
atggtgaggcctatgctgctgttgtccctggggttgctggctggcctgctgcccgcacttgctgcttgcccccagaactgtcactgccactccgatcttcaacatgtcatttgtgataaagtggggctccagaagatcccaaaagttagcgaaaagacaaaactgttaaatctgcagcgtaacaatttcccggtcctcgccgcgaactcttttcgcgccatgccaaacttagtctctcttcacctgcagcattgccagatcagggaggtcgccgccggggcgttccgcggactcaagcagctaatttacctgtacctcagccacaacgatattagggtgcttagggctggcgctttcgatgatctgacagagctgacgtacctttacctcgatcataataaggtgactgaacttccacgagggctgttatccccactggtgaacttgtttatccttcagttaaacaacaacaagattcgagagttgcgcgccggggccttccagggagcgaaagatctccggtggctgtatctttccgaaaacgcactgtcatccctccagcctggcgctttggatgatgtagagaacttggctaaatttcacgtagaccgcaatcaattgagctcttacccgtccgccgctctttccaaactgcgcgttgtagaagaattgaagctttcccacaaccctttgaaatctattcccgacaacgccttccagtcttttggcaggtatttggagacgttgtggctggataatactaacctcgagaagttttcggacggcgcctttctaggcgtgactacactaaaacacgtccatctagagaacaacaggctgaatcagcttcccagtaattttccatttgactctctggagacacttgcacttacaaacaacccttggaaatgcacctgccagctccgggggttacggaggtggttagaggcaaaggcctccagaccagatgccacctgtgccagtccagccaagtttaaaggtcagcatattagggatactgacgcttttcggagttgcaagtttccaacgaagaggagtaagaaagccggcagacattag

SEQ ID NO: 112059 - DNA, 2328 bp, synthetic construct
  misc_feature 1..2328: note = Description of Artificial Sequence: Synthetic coding sequence
  source 1..2328: mol_type = other DNA
atgcgcgcatccctcctgctgtccgttctgagacccgccggcccagtggccgttggaataagtctcggattcacactaagtcttctgtctgtgacctgggtggaggaaccctgtggaccaggtcccccccaacctggcgacagcgagctaccgccgcgtggcaatacaaatgccgcccgcaggcccaactctgttcagcctggagctgaaagggaaaagcctggcgccggagaaggggcaggcgagaattgggaaccccgtgtgcttccctatcatcctgctcagccagggcaggcagccaagaaggccgtgaggacccgctacatcagcactgagctaggcattaggcagcgcttactcgtggccgtgctcacgtcccagactacccttcctacgctgggtgtggctgtcaatagaaccttgggacatcgactagaacgcgttgtgttcctgacaggcgcgcgggggagacgcgctccaccggggatggcagtggtcaccctgggtgaggaaaggcccattggacacttacatctagccctcagacacttgctggaacagcacggagacgactttgattggttttttctggtccctgatacaacctacactgaggcccacggcctggcacggctgactggacacttgtcactggcctcagcggcacatctctacctgggaagaccacaggactttatcggcggcgagcccactcccggccgatactgtcacggggggtttggagtgctgctatcacgaatgctgctgcagcaattgcggccgcacctggaggggtgtcggaacgacatcgtttcagcccggcctgatgagtggttaggccgctgtatacttgacgccacaggcgtgggatgcaccggagaccatgagggtgtgcactatagccatctcgaactgagcccaggtgagccagttcaagagggcgacccccattttcgttccgcactgactgctcaccccgtgagggaccccgtgcacatgtatcagctgcacaaagcatttgcacgggccgagcttgagcgtacataccaagagatccaggagctgcagtgggaaatccagaacactagccatctcgcagtcgatggtgatcaggccgctgcctggcctgtgggtattcccgctccttctagaccggccagccgattcgaggtgctccggtgggactactttaccgagcaacacgccttttcttgcgcagacgggtcaccaaggtgcccgctgcggggagcagaccgcgcagacgtcgccgatgtcctaggaaccgctcttgaagaacttaaccgccggtaccaccccgcattgaggttacaaaaacagcaactcgtgaatgggtaccgacgctttgatccggcccgcgggatggagtatactttggatttgcagttggaagccctcactccccaaggggggcgtaggcccctcacacgaagagttcaacttcttaggcccttgtcccgggtcgaaatccttccagttccttacgtgacggaggcgagtagactcacagtactgctacctttggccgcagctgaaagagacctagcaccagggtttctggaggcattcgcaacggcggcattggaacccggcgacgctgcagcggcacttacattacttctcctatacgagcccagacaggcccagcgtgtagctcatgcagatgtatttgcccccgtgaaagcccatgtcgccgagctggaaaggaggttcccaggggccagggtgccttggctttccgtccaaaccgcagcaccatcccccttacggctgatggaccttttgagcaagaagcaccctctggacacactgtttctgctggcaggaccagatacagtgttgacacctgattttctgaataggtgtcgtatgcacgcgatttccggttggcaggccttctttccgatgcacttccaggcattccatccagccgttgcccccccacagggaccagggccccctgagctgggacgtgacacgggtcgctttgatcgccaggccgctagtgaagcttgtttctacaattctgactacgtggctgcccgcggcaggcttgccgccgcttcagagcaggaagaagaactgctggagtcgctcgacgtctatgaactcttcctgcacttttcatctctgcatgtgctgcgggcagtcgaacccgcactgctgcagcggtatcgggctcagacctgctcggctcgtctgtctgaggacctttaccaccgctgcctgcagagtgtcctggaggggctggggagcagaacacagctcgccatgctcctcttcgaacaggaacaggggaacagcacatag

SEQ ID NO: 112060 - DNA, 1842 bp, synthetic construct
  misc_feature 1..1842: note = Description of Artificial Sequence: Synthetic coding sequence
  source 1..1842: mol_type = other DNA
atggcagtagtgacacttggggaagaacgtcccattggccatctgcacctggccttgcggcacctattagagcagcacggcgatgatttcgactggtttttcttggttcctgataccacttacaccgaagcccatggcctcgcccggctcaccggccacctctccctggcttctgccgcccacctgtatttgggccggccgcaggatttcatcgggggcgagcctactcctgggcgatactgccacggtggattcggcgtcctgctcagtaggatgttactgcagcagctccgtcctcacttggagggatgcagaaatgacatcgtgtccgctcgcccagacgaatggctagggaggtgtatcctggatgcaacaggcgtgggctgcacgggcgaccacgaaggtgtccactactctcacctggagctgagccctggggaaccagtgcaagagggcgatccacactttcgctcagctcttaccgctcaccctgtcagagatccggttcacatgtatcagctgcacaaggccttcgcacgcgctgagctggaaagaacctatcaggagatccaggaactccagtgggagattcagaacacatcacatctagccgtagatggcgaccaagccgccgcgtggcccgttggaatcccagccccgtcccgccccgcttccaggttcgaggtgttgcgatgggattacttcacagagcaacacgccttcagttgtgccgacggatcaccaagatgcccactgcgtggcgccgatcgcgcagatgtggctgacgtgctcggaaccgcgctcgaagagctaaaccgcaggtatcatcctgcgctaaggctccagaaacagcaattagtgaacgggtacaggaggtttgatccagcgcggggaatggagtacacgctggacctgcagctggaggccttaaccccacagggggggcgtcgcccactgactagacgggtacaattgctcagacccctgagccgggtcgaaatactgccagtcccatatgtgactgaggcctccaggctcacagtcctgctgcctttagccgctgctgaacgggacctagcccctgggtttctggaagcatttgctacagctgctctagagcccggtgatgctgcggcagcactcacattgctattactgtacgagccacgccaggcacaaagggtggcacatgccgacgtatttgcccctgtcaaggctcacgtggctgaattggaacgcaggttccccggggcaagagtcccttggctctccgtccaaactgctgccccaagccccctgcgattaatggatctcttaagtaaaaagcatcccctggacaccctgtttctcctggccggtccagatacagtgcttacacccgatttcctgaaccgctgccgaatgcatgcgatcagcgggtggcaggcattcttcccaatgcactttcaagcattccatccagccgtggctcccccacaaggtccaggtccgcccgagttgggacgcgacacggggcggtttgatcggcaagccgcttcagaagcctgtttctacaacagtgactatgtggcagcccgaggtcgcctcgccgctgcatccgaacaggaagaggagttgctggagtctttggatgtgtatgagctgttcctacacttcagcagcttgcacgtactgagggccgtggagcccgccttgttacagcgatacagagctcagacgtgctctgccagattatcagaggacctctatcatcggtgtctacagagcgtgctcgagggcttaggcagcaggacacagctagctatgctgctgttcgaacaggaacaagggaacagtacgtag

SEQ ID NO: 112061 - DNA, 2319 bp, synthetic construct
  misc_feature 1..2319: note = Description of Artificial Sequence: Synthetic coding sequence
  source 1..2319: mol_type = other DNA
atgaggttatcctccttgctggctctcctgagaccagcactgccacttatccttggattatctttgggatgcagcctgagcttgttgagagtctcttggatccagggagagggggaagacccatgcgtggaagccgtgggtgaaaggggcggaccccagaaccccgattcgagggcacgccttgatcagagcgatgaggatttcaagcctaggatcgtaccttattacagggatcccaataaaccctacaagaaggtgctgagaacacgctacattcagaccgaactggggtcaagagaacggctcctcgtagctgtcctgacgagtcgggctactttgagcacactcgctgtcgccgtgaacagaacagtggcccaccattttccccggctgctctatttcaccggccagcgcggcgcaagagctcccgcaggcatgcaggtggtcagccatggtgacgaaagaccagcatggctgatgtcagaaacccttagacatttacatacccatttcggggccgactatgactggttctttatcatgcaggacgatacgtatgtgcaggcccctaggttggctgctctggccgggcacttatcaatcaaccaggatttgtacctgggcagagctgaagagttcattggggccggagagcaggctaggtactgccacggtggatttggatacctgctgtctagatcacttctgctccggcttcggccccacttagatggctgtcgaggagatattcttagcgctcgccccgatgaatggctcggacggtgtctaatagacagcctgggcgtgggatgtgtctctcaacatcagggccagcagtatcgatcttttgagctggccaaaaacagagatcctgagaaggaaggatcttctgcgtttcttagtgccttcgccgttcaccccgtgagcgagggaacgctgatgtaccgcctccataagcgcttctccgccctagaattggagagagcttactctgagattgaacagttacaggcacagattagaaatctcacggtcctaactccggagggggaggccgggctgtcttggccagttggccttcctgccccttttaccccacattcccggttcgaggtcctggggtgggactatttcacagagcagcacaccttcagctgtgcggacggagccccgaagtgtcccctgcagggagctagtcgagccgatgtgggggatgccctggaaactgccctcgagcagctgaataggaggtaccaacccagactgaggtttcagaagcagcgcctgctgaatggataccggcgatttgatccagctcgggggatggaatacacgcttgatctcttgctggagtgtgtcacccagcgcggccaccgccgggccctcgctagaagggtgtctctgttgaggcccctgtctagggtcgagatactacccatgccctacgtcacagaggccaccagagtacagctggtacttccattgctggtcgctgaagccgcggcagcgccagcatttttggaagccttcgcggccaatgtgctcgaacctcgggaacacgccttgctgacacttctgttggtgtatgggccgagggaaggcggcaggggcgccccagatccctttctgggcgtcaaagcagccgcagccgagcttgaacgcaggtatcctgggacaagactggcatggcttgccgtcagagcagaagcaccttcccaggtgaggcttatggatgtggtaagcaaaaagcaccctgtcgatacgctgttcttcttaactacggtgtggacaagacccgggccagaagtactaaaccgctgcagaatgaacgctattagcggatggcaggccttctttcctgtgcacttccaggagtttaatccagctctaagcccccaaagatcccctcctggcccaccaggcgcggggcccgatccaccctcacctccaggcgctgacccaagtagaggcgccccaatcggcgggaggttcgaccgccaagccagtgctgaaggatgtttttacaacgccgattatctggccgctcgcgcacgactagcaggcgaacttgcggggcaggaagaagaggaggcccttgaaggcctggaggttatggatgtgttcctgcggtttagcgggctccacctcttccgtgccgtggagcctgggctcgtccagaaattttccctaagggattgcagtcccagactgtcagaggaattgtaccaccgttgcagactaagcaacttggaagggctcggggggcgggcgcagcttgccatggccctgtttgaacaggagcaagctaattcgacgtag

SEQ ID NO: 112062 - DNA, 2004 bp, synthetic construct
  misc_feature 1..2004: note = Description of Artificial Sequence: Synthetic coding sequence
  source 1..2004: mol_type = other DNA
atgcggttgtcatctctcttggctctgctcagaccagcactgccccttatcctgggcctcagccttggttgtagtctgtctttattaagagtcagttggatccagggggagggtgaggacccttgcgtggaagcggtcggggagcgcgggggcccgcagaatcccgacagccgggcgcgactagaccagtctgacgaagactttaagcctcgtatagtgccctattacagagaccccaacaaaccctacaagaaggtactccgtaccaggtacatccagaccgagctcggctctagagaacgtcttctggtggcagtcctcactagccgcgccacccttagtacactggccgtcgcagttaataggacagtcgcccaccactttccacgcctattatactttactggtcaacgtggggctagagcacctgccgggatgcaggtggtgagtcatggagacgaacgcccagcgtggctgatgtcggagaccttaagacacctccacactcacttcggagccgactatgattggttttttatcatgcaagacgatacttacgttcaggccccccgactggccgcgctggctggccacctgagtattaatcaggacttgtatctgggccgggcagaagagtttattggtgccggcgagcaagccaggtactgtcatggcggattcggatatctgcttagtaggagcctactgctgagactgagaccacacctagacggctgccgcggtgatattctgtcagcccgccctgacgaatggttgggaaggtgcctgatcgattcgctcggtgtcggctgcgtatcacagcatcagggacaacagtatcgctccttcgaactggctaagaacagagatccagaaaaagaaggttcatctgctttcctgtccgcatttgctgtgcacccggtcagtgagggcacacttatgtaccggttacacaagaggttttccgcactggagctcgagcgcgcctacagtgaaatcgagcagttacaggcccagatacgtaacctgactgttctgactccagagggagaagcaggactgtcttggcctgttggacttcctgcaccctttaccccccacagccggttcgaggttctgggctgggactactttaccgagcagcacaccttctcgtgcgccgatggggctcccaagtgcccactccagggcgcttcgcgggccgacgtgggcgacgctctggagaccgccctagagcagctcaaccgccgctaccagccccgcctcaggttccagaagcagcgccttttgaacgggtacaggcggtttgatcctgctaggggcatggaatacacattggatcttttgcttgagtgcgtcacacagagggggcacagaagggccctggcgcggcgggtaagtctcttgaggcctctgagtcgcgtcgagattctccccatgccttacgtgaccgaagcgacacgggtccaattggtgctgcctctactggtcgcagaagccgctgctgcacccgcgtttctggaggcctttgcggcaaatgtgttggagcccagggaacacgccctgttaacacttctgctcgtgtacggtccccgggagggcggcaggggagcaccagatcctttcctcggcgtaaaagccgccgcggctgaattggagcgacgatacccgggtacacgcctcgcatggcttgctgtcagggccgaggcccccagccaggtgaggctaatggatgtggtgtccaaaaagcatccagtggacactttatttttccttaccactgtttggacaaggcccgggcctgaagtcttgaaccggtgcaggatgaatgctattagcggctggcaggcctttttccccgtgcacttccaggaatttaaccctgccctttctccgcaacgaagcccaccccctaatttgataacattcccactgagcgcgtcggcccccggccgagcacgacaagacggcggacaaatcgaaaattgttgctgcatcttctag

SEQ ID NO: 112063 - DNA, 6969 bp, synthetic construct
  misc_feature 1..6969: note = Description of Artificial Sequence: Synthetic coding sequence
  source 1..6969: mol_type = other DNA
atgcaatctggacctcgcccacccttgccagctcccggcttggccttggccctcacattgaccatgctggcccgcctagcgtcagcagcaagcttcttcggagagaaccacctggaagtgcctgttgccactgccttgaccgacattgacttgcagctgcaattctctacctcccagccagaggctctcctcctcctggcagctggccctgccgaccatttactactgcagctgtattctggaagactccaagtgagacttgtgcttgggcaggaagaactgcgcctgcagaccccagccgagacactgctgtccgattcaattccccacacagtcgtgttaacagtcgtggagggctgggccacactcagcgtcgatggatttctaaatgcctcatccgccgtcccaggggctccgctcgaagtaccttatggtctgttcgttggcggcaccggcactttagggctcccttatctcagaggcaccagtcgccccctgcgcggttgcctgcatgccgcaaccctcaacggccggtcactgctgaggcctttgacccctgacgtgcacgaaggatgtgcggaggagttctcagcaagcgacgacgtggctctgggtttcagcgggccccacagccttgctgctttccccgcctggggcacacaggacgagggaaccctagaatttacactgacgacccagtcaaggcaggctcctctcgcgttccaagccggcgggagacgtggagatttcatatacgtggatattttcgaaggccatctcagggccgtcgtcgaaaagggccaagggaccgtgctgctgcacaatagcgtacccgtggccgacggtcagccacacgaagtttctgtgcacatcaacgctcacaggctggaaattagcgtggatcagtacccaacccacacctcgaatcgaggcgtgctgtcttaccttgagccacgaggctctttgcttcttggtgggctcgacgccgaggcatccagacacttgcaagagcatagacttgggctgactcctgaggccacaaacgcttccttgctgggatgcatggaggacctctcagtgaacggccagcggagggggctgcgtgaggctctcttaactcgcaacatggcggccggctgcaggctcgaggaggaggaatacgaagatgacgcatacgggcactacgaggcattctctaccctcgctcctgaagcttggccagcgatggagctgcccgagccttgcgtgcctgagccaggtctacctccagtgtttgcaaatttcacacagctgttgactataagcccactggtggttgccgagggcggaaccgcatggttagaatggcgccatgtgcaaccaacactcgatctcatggaagccgaactgcgcaagtctcaagtacttttctccgtgactaggggtgctcgtcacggagaattagagctggacatcccgggcgcacaggcccggaagatgtttacccttctcgacgtagtgaaccgcaaagcgcggtttatacatgatggcagtgaagatacttctgatcagctggtgctagaagtgtcagtcaccgcccgcgttcctatgccgtcttgtctccgaagaggtcagacctatctattgcctatacaggtcaatccagtgaacgacccgcctcacatcatctttccacatggatcccttatggtgatattagagcatacccagaaacctctgggccccgaggtattccaggcgtatgaccccgactcagcctgcgaaggattaaccttccaggtgctgggcacttcttctgggctccccgtagagaggagggaccagcccggagagcctgcaacagagtttagctgtagagaacttgaggctgggtctttagtatacgtacaccgtgggggccctgcccaggatcttactttcagggtgtccgacggattacaggcatctccaccagcgacgttgaaggtagtggctattagacccgctatccagattcaccgatccaccggcctgcggcttgctcaggggagcgccatgccaattctcccggctaacctgtctgtggagacaaatgcagtgggtcaggatgtgagtgtgttgtttcgcgtgaccggtgcactgcagtttggggaactccagaaacagggggcgggaggagtggagggcgccgagtggtgggcgacgcaagcatttcaccaacgcgatgtagaacaggggcgagtgcgctacttgtcaactgaccctcagcaccacgcatatgacacggtggagaacctggccttagaagttcaagttggtcaagagatcctaagtaatttatcttttcccgtgacaatccaaagggccacagtgtggatgctgaggcttgagcctttgcatactcagaacacgcagcaggagacactgactacagctcacctcgaagctacactagaagaggcagggcccagccctcccaccttccactatgaagtcgttcaagcacccaggaagggaaatctgcagctgcagggtaccaggcttagcgacggccagggcttcacacaggatgacatacaggctggacgagtgacatatggggccactgcccgcgctagcgaagccgtggaggacacctttcgctttagagtgacggcccccccgtattttagtcccctctatacattccccattcacatcggtggagaccccgacgcacccgtgcttacaaacgtcttactcgtggtccccgagggcggcgagggggtcctgagtgctgaccaccttttcgtaaagtctcttaatagcgcaagctacttgtacgaggtgatggagcgccctcggcacggtcgactcgcctggcgtggcacacaggacaaaacgactatggtgacgagtttcaccaacgaagaccttctcagggggcggttggtgtaccaacacgacgattccgagactacagaagatgatattccatttgtagctaccagacaaggcgaatcatctggcgacatggcctgggaggaggttcgcggggtttttagggttgccatccagcctgtgaatgaccacgccccagtgcagaccatctctaggatttttcacgtggcaagaggcggccgtcgccttctcacaacagatgatgtagcattcagcgatgctgacagcggcttcgccgacgcccagcttgtactgacaagaaaggacctgttgttcggatctatcgtggcagtggacgaacctacccgaccaatatacaggttcacacaggaggacctaagaaagcgtcgggttcttttcgtgcatagtggagctgatcgtggctggattcaattacaagtctcagatgggcaacaccaggccactgctctgctcgaggtacaggcttccgagccttacctaagggtagcaaacggctcttcattggtggtgccacagggaggacagggtactatcgacaccgcggtgttacacctcgatacgaacttagacatcagatctggtgacgaggtgcactaccacgttacggccgggcctcgctggggccaactggtgcgggccggacagcccgcaactgcgttctcccagcaagaccttcttgatggggcagtcctctacagccacaatggttctctgtctcccagagataccatggctttctccgtagaagccggacccgttcacacagatgccaccctgcaagttacgatcgcattggagggccctctggcccccctgaagctggtccgccacaagaagatttacgtttttcagggtgaagcagctgagatacggcgggatcagctcgaggccgcccaagaagccgtaccgccagcagacattgttttctctgtgaaatcccctcccagcgctgggtatttggttatggtgagcaggggcgctctcgctgacgagccgccaagcctggaccccgtccagtctttcagtcaagaagctgtcgatacaggtcgagtactttatctgcacagtaggcctgaggcttggagcgacgctttcagcctagatgttgccagcggactgggggcccctttggagggcgtactcgtggagctggaggttctgcctgccgccatccccctggaagcccagaattttagcgttccagagggagggtcattgactttggctcccccactacttagggtgtccgggccgtatttcccaacactcctcggattaagcctgcaggtcttagagcctccacaacacggagccctgcagaaggaggacggcccacaggcgaggaccctttcagccttctcgtggcggatggtcgaggagcagttgatcagatacgtacacgacgggtccgagaccctgaccgacagcttcgtccttatggccaacgcctccgagatggacaggcaaagccatccagtggcatttaccgtcacagtcctgcctgtcaatgaccagccccccatactaacgaccaatacaggacttcagatgtgggagggagccactgcgccaatccccgccgaggcattgaggtcgaccgacggagacagcggcagcgaggatttagtttatacaattgagcaaccaagcaacggacgggtagtattaaggggggccccaggcaccgaggtcaggtctttcacgcaggcacagctggacggtgggcttgtgctgttttcccaccggggcactttggacggcgggtttcgcttccggctgtctgatggcgagcacaccagccctgggcacttctttagggtgaccgcacagaaacaggttttactttctttgaagggatcacagaccttgacagtgtgtcccgggtctgtccagcccttgtcctcccagacactgagagcaagttccagcgccggcacagaccctcagctcttgctttatagagttgtgcggggccctcaactggggcggctttttcacgcgcaacaggacagcactggtgaggctctggtgaactttacgcaggcggaggtctatgcgggcaatattctgtacgaacacgagatgcctcctgagcccttttgggaggcacacgacacactcgagctccagctctccagccctcctgcacgcgatgtggctgccaccttggcggtcgccgtctccttcgaggcggcttgccctcagcgcccgtcacatctgtggaaaaacaaaggcttatgggtgcccgagggccagagagcaagaattacagtggcggccctcgacgccagcaatctgctggccagtgtccccagccctcagagatccgaacacgatgtactgtttcaggtgacccagttcccatctcggggccagcttctggttagtgaggaaccgcttcatgccggccaaccacactttctccaaagtcagctggccgcgggccagctggtgtacgctcacggaggtggaggaacacagcaggacggctttcactttagagctcacctacaggggcctgccggtgcttccgttgcaggtccgcagaccagcgaggccttcgccattacagtgcgcgatgtgaacgagcggcccccccaaccacaggcttctgtgcccctgaggctcacacgcgggtctcgggccccaattagccgcgcgcaattatcagtcgttgatccagactccgcccccggcgaaattgagtatgaagtgcagcgggcccctcataacggcttcttgtccttagtggggggtggactgggacccgtgacccggttcacacaagctgacgttgacagcggccgactggctttcgtggcaaacggaagtagcgtggcaggcattttccagctgagcatgtccgacggcgcctcacctcctctgcctatgtcgcttgctgtggacatccttcctagcgctattgaagtccagcttcgtgcaccactggaggtcccacaagcccttggtagatccagcctctcccagcagcagctcagggtcgttagcgaccgcgaggagcctgaggccgcttatcggctgatccagggaccccagtatggtcacctgctggttggaggcaggcctaccagcgcattcagccagttccagatcgatcagggcgaagtggtctttgcctttactaacttctcgtcctctcacgatcatttccgggtactggctctggcacgcggcgttaatgcttcagctgtggtgaacgtgactgtgcgcgctctcctgcatgtctgggctggaggcccatggccccagggcgccactctgcgtctggaccccacagtactggacgccggagagttagccaatcgaacaggctcggtcccccgttttcgtcttctcgagggccccagacatgggcgtgtagtcagggttccacgagccagaacggagcccggtggatcccagctggtggagcagtttactcagcaggacctagaggacggccggttaggcttagaagtcggacggcccgaagggcgcgcgccgggccctgcgggggacagccttacactggagctgtgggcccagggagttcctccagccgtggccagcttggacttcgctaccgagccatacaatgccgcaagaccatatagtgtagcgcttctgagcgtacctgaagctgcacgtacggaggcagggaagcccgaaagttcaacaccaacgggggagccaggtccgatggcatccagtccagaaccagcagtcgctaaagggggattcctcagttttttggaagcgaacatgttctccgtgattattcctatgtgcctggttctgctccttctggctctgatactccctctcctgttctacctgcggaaacggaataaaactggaaaacacgacgtgcaagtgttgactgccaaaccccggaatggactggccggtgataccgaaacattccgcaaagtggagccaggtcaggccataccgctgactgccgtccctggccaggggcctcccccgggagggcagcctgacccagagcttttgcagttttgccgcacaccaaacccagccctcaaaaatggccagtactgggtttag

SEQ ID NO: 112064 - DNA, 984 bp, synthetic construct
  misc_feature 1..984: note = Description of Artificial Sequence: Synthetic coding sequence
  source 1..984: mol_type = other DNA
gaacaacaccgggaagagcctgaggccgcttacaggttgatccaggggcctcagtatggccatctgctcgtcggtgggcgtcccacttccgcttttagccaatttcagattgaccagggggaggttgtgttcgccttcaccaattttagctcttctcatgaccatttccgtgttttggcgctggctcgaggggttaacgccagcgccgttgtgaacgttacagtgcgagctttattacacgtctgggcagggggcccctggccacaaggtgctaccctgcgcctggaccccaccgtcttagatgccggagagttagcaaatcgtacagggagtgtgccacgatttcgactgctggagggccccagacacggaagagtagtgagagttccccgggcacgaaccgagcctgggggatcccagcttgtggaacagtttactcaacaggatctggaagacggtagactggggctggaggtgggaagacctgaaggaagagcccctggtccagcgggcgattcccttaccctggaactgtgggctcagggcgtgcctcctgccgtggcatcactggatttcgccacagaaccttacaacgccgctcgaccctatagcgttgccctgctgagcgtgcccgaggcagctcgtacagaagctggaaaacctgagtccagcacccctacaggagaacctggtcctatggctagctcacccgagcctgcggtggccaagggcgggtttctaagtttcctcgaagctaacatgttctcggtaatcattcccatgtgtcttgtcctgttgctcctggccctcatcttgccacttttgttctacctgcggaaaagaaacaagaccggaaagcacgacgttcaggtcctgaccgctaaaccacgaaatggcctggccggagacacagagaccttcaggaaggtggagcccggacaagcaattccacttaccgccgtccccgggcagggcccaccttag

SEQ ID NO: 112065 - DNA, 2409 bp, synthetic construct
  misc_feature 1..2409: note = Description of Artificial Sequence: Synthetic coding sequence
  source 1..2409: mol_type = other DNA
atggcggcacgcggacgacgtgcttggttatcggtcctattagggctagtcctgggatttgtgctggcctcaagactggttctgccaagagcaagtgagttgaagcgtgcagggcccagaaggcgggcaagccccgagggctgtagatctgggcaggccgcggcttcacaggctggaggcgctcggggggacgcccggggagctcagctgtggcccccggggtccgaccccgacggtggtccgagagaccggaactttctgtttgtcggagtaatgacagcacaaaagtatttacagacccgggcagtcgcagcctacagaacatggtccaagactatacccggcaaggtccaattcttttcgagtgagggctctgataccagtgtaccaattcccgtggtaccgctgagaggcgttgacgattcctatccacctcaaaagaaaagcttcatgatgctgaagtatatgcacgatcactacctggataagtacgagtggttcatgagggctgacgatgatgtgtacattaaaggcgatagactcgaaaacttcctgcgcagcctgaacagcagcgaaccattgtttctgggccagactggtctcggaactactgaagaaatgggtaaacttgcattagagcccggcgaaaacttttgtatggggggccccggggttatcatgagtcgtgaagtcttacgaaggatggtcccccatatcggcaagtgtctgcgcgagatgtacacgacccacgaagatgtggaggtgggtcgttgcgttcggaggttcgccggcgtccaatgtgtgtggagttacgaaatgcagcaactgttctacgaaaactatgagcagaacaagaaagggtacattagagatctccacaactccaaaattcatcaggccataacgttacatcccaataagaaccccccttaccaatatagactccactcttacatgctctcacgtaagatctcagagctgaggcaccgcaccatccagttacaccgagaaattgtgcttatgagcaaatatagcaataccgagatccacaaagaagacttgcaactcggcatcccacctagtttcatgagattccagcctcgccagagggaggagattctcgaatgggaattccttactggaaagtatttgtacagtgctgtcgacgggcaacctccccggcgcggcatggacagtgctcagcgagaagccttggacgatattgttatgcaggtgatggaaatgattaacgcaaatgccaaaacacgcggacgcattattgacttcaaggaaatccaatatggctatagacgagtgaacccaatgtacggtgctgagtatatcctcgacctgctcctcctgtacaagaagcacaaggggaagaaaatgactgtgccagtgcggcgccacgcgtacctgcagcagacttttagcaagatccagttcgtagagcatgaagagttggacgcacaagagctggccaagcgtattaaccaggaatccggcagcttgagttttctctccaacagtctcaaaaagctggtcccctttcaactgcccggcagcaaatctgagcacaaagaaccaaaagacaagaaaattaacatcctaatcccattgagtgggcgatttgacatgttcgtgcgtttcatgggaaacttcgagaaaacatgcttaatcccgaatcagaatgttaagctggtggtactcctgtttaacagcgactccaacccagataaagccaagcaggttgagctaatgcgcgattaccgcattaagtatccgaaggccgacatgcagattctgcctgtgtcaggagagttctcgcgcgctctggctctcgaggtcgggagctcccagtttaataacgaaagtctgttgtttttctgcgacgtggatcttgtgttcacaacggaatttttgcagaggtgtagagccaacactgtgttaggacagcagatctattttccaatcattttcagccaatacgatcccaaaatcgtctattctggcaaggtgccttctgataaccatttcgcttttacccagaaaactggcttctggagaaactatggctttggaataacctgcatctacaagggcgatctagtcagagtcggcggtttcgacgtttctattcaaggctgggggttggaggacgtggatctgtttaataaagtggtccaggcggggcttaagactttccgttcccaggaggtgggagtggttcacgtgcaccaccctgtgttttgtgaccccaacctagaccctaagcagtacaagatgtgcctcggctcgaaagcatcaacttacggatcaactcagcagctggcggaaatgtggctggagaagaacgatccctcttattccaagagctctaacaacaacggctccgtgcgtacagcttag

SEQ ID NO: 112066 - DNA, 2649 bp, synthetic construct
  misc_feature 1..2649: note = Description of Artificial Sequence: Synthetic coding sequence
  source 1..2649: mol_type = other DNA
atggctgtccggtccaggcgaccatggatgagcgtggcactgggactggtgctgggctttaccgctgcctcatggctaattgctcctagagttgcagagctatccgaacggaaacgtcggggatcctcgctgtgctcttattatggccgaagcgccgccggacctcgcgccggtgcccagcagccgctacctcagcctcagtcccggcctcggcaagaacagtccccgccaccggctcgtcaggatctgcagggcccacctctgccagaagctgcccccggcattaccagcttccgtagtagcccctggcaacagcccccacctctccagcagagacgacgagggcgagagccagagggcgctaccggattgcccggtgcaccagctgccgagggggagcccgaggaggaggacggcggtgcggctggccagcgccgtgatggtcgcccgggtagctctcacaacggctcaggagacgggggcgcagccgccccaagcgctcgcccccgagacttcttgtatgtcggggtgatgacggctcagaagtatctaggctcccgagccttggctgctcaaaggacttgggcccggttcatccccggccgggtagaattcttttcttcccagcagccgcctaatgcagggcagccccctccaccactgcccgtaatagcactccctggggttgatgatagctacccccctcagaaaaaatcttttatgatgataaagtacatgcatgaccattatctggataaatacgagtggttcatgagggccgacgacgacgtctacatcaagggggacaaacttgaggaattcttgcgtagcctgaactcttctaaacccctttatcttggccagactggcctgggcaacattgaagagcttgggaagctcggacttgagcccggcgagaacttctgtatgggaggccccggaatgatcttctccagagaggtgctgcgcagaatggtgccccatatcggggagtgtttgcgcgaaatgtacaccactcacgaggacgttgaagtgggcaggtgtgtgagacgatttggcggaacccagtgtgtgtggtcgtacgagatgcaacaactgttccatgagaactacgaacataatcggaaaggatatatccaggatttgcacaactcaaagatccacgcggctataacactgcacccaaacaaacggcctgcctaccaataccgcctccataactatatgctgtcgcggaaaatctctgaattacgctataggacgattcagctccatagggaatctgccctcatgtcgaaactgtcgaacaccgaggtgtctaaagaagatcagcaactcggagtcatcccttcctttaaccattttcaaccaagagagagaaatgaggtgatcgaatgggaatttctcactggaaagctcctgtatagtgccgcggagaaccaaccaccacgacagagcttgtcctccattctacgaaccgctcttgacgacaccgttttacaggtaatggagatgattaatgagaatgcaaagagccgcggcaggttgatagatttcaaggagatccaatacggttatcgtcgggtgaaccccatgcacggggtagagtacattctggacctgctcctgttatacaaacgccacaaaggccgcaaactcacggtaccagtgcgaaggcacgcttacctccaacagctcttctccaaaccctttttccgggaaaccgaggaactggacgtgaactccctggtcgaatcaatcaatagtgaaacacagtccttcagcttcataagcaattccctcaaaatcctttcttctttccagggcgccaaggagatggggggacataatgagaaaaaggtgcacatcctggtgccactgattggccggtacgatattttcttgcgctttatggaaaattttgaaaacatgtgtctgatcccaaaacaaaacgtgaagctcgtgattatcctcttcagtcgcgactcaggccaggactccagcaagcacatcgagctcattaagggataccaaaacaaataccccaaggcagagatgactctgatcccaatgaagggcgaattcagccgcgggttaggcctggagatggcttctgcccagttcgataacgatactcttcttctattttgtgatgtagatctgatcttcagagaggactttctccagcgatgcagggacaacaccattcaggggcagcaggtctactaccccattattttcagccagtatgaccccaaggtgacaaacggagggaatccccccaccgacgactactttattttcagcaagaaaactggcttttggagagactacggctatggtattacttgtatctacaagtcagatctgctgggagcagggggcttcgatacgtctatacaaggctggggcttggaagacgttgacttgtacaataaagtaatcctgtccgggctcaggccatttcgcagccaggaggtgggtgtggtgcacatcttccatcccgtgcactgtgaccccaacttagaccctaaacagtacaagatgtgtttaggaagcaaggcctcaacgttcgcttctaccatgcaactggcggagctatggctggaaaagcatctgggagtacggtataacaggacgttatcatag

SEQ ID NO: 112067 - DNA, 2868 bp, synthetic construct
  misc_feature 1..2868: note = Description of Artificial Sequence: Synthetic coding sequence
  source 1..2868: mol_type = other DNA
atgcctagcctgccagccccgcctgccccactgctcctgcttggattgctgctccttggctcacgcccagccagaggagctggacccgagccccctgtgctccccattagatccgagaaagaacctttgcccgtacggggggctgccggctgcacgtttggcggtaaggtctacgcccttgatgagacctggcacccagatctgggcgagccattcggagtgatgcgctgcgttctgtgcgcgtgcgaagctccacagtggggcaggaggactagggggcccggaagagtaagctgtaagaacattaaaccagagtgtcccactcctgcctgcgggcagccacggcagctgcccgggcactgctgccagacatgtccacaggaaagatcctcctctgaacggcagccgtccggcctgtcttttgagtatcctcgggaccctgaacatcgaagctattcagaccgtggagagccgggggctgaagaaagggctaggggcgacggccatacggacttcgtggcactcctaaccgggccacggagccaggcagtggcacgggcccgggtttcactgcttcggtcttctctgaggttctccatctcttaccgccgcctagaccggcccaccaggatccggttcagcgatagcaacggaagcgtgctatttgagcaccctgccgccccaactcaagatggtttggtctgtggcgtttggagagcagtcccaagattgagcctgcggcttctgcgagccgagcaactgcatgtagccctcgtcacactgacccatccgtccggtgaagtatggggaccactgatcagacaccgggctctggcagccgaaaccttctctgcaatcctcaccctcgaggggcccccccagcagggcgttggcggaatcaccctgctgacactttcagataccgaagattctctgcacttcctcctgctgttccgcgggctgctggaaccacgctcaggcggcttgacccaggtaccgctgaggttacagatcctccaccagggccagcttctgcgggaactgcaggcaaacgtgtcagcacaagagccaggcttcgcagaagtcctacctaacctgacagtgcaggaaatggattggctcgttctgggggaacttcaaatggccctggaatgggccggccgtccgggccttagaatctctggccacattgctgcacgaaaatcatgcgacgtactgcagtcagtgctgtgtggcgcggatgccctgattcccgtgcagaccggtgccgctgggagtgcctcactgacactgctggggaacggaagtctcatctaccaggttcaggtcgtcggaacaagctctgaagttgtagccatgacactggaaacgaaacctcaacggcgggatcaacgcactgtgttgtgtcacatggcaggcctgcagccagggggccacactgccgtgggcatatgccctggtctcggcgctcgcggagcacacatgctgttgcagaacgagctcttcctgaacgtgggcaccaaagattttccagacggagagttgaggggccatgtcgcagccctgccatattgcgggcacagcgctaggcacgacacactgcctgtcccactcgctggagccttggtcctcccccctgtgaagagccaggccgcagggcatgcatggctgagcctggacacgcactgtcacctccattatgaagtgctgctggccgggctgggtggaagtgaacaggggacggtaaccgctcacctactagggccacccggtaccccaggccctcggcggttgttgaagggattctacggcagtgaagcccagggggtggtgaaggatctggagcccgagctgctcaggcacctcgctaaggggatggcaagcctgatgatcacaaccaagggttcccctagaggtgaattgaggggtcaggtccacatcgccaatcagtgtgaagtggggggactgcgtctcgaggccgccggcgcagaaggggtgagggcattgggagctcctgatactgcctctgcagccccccccgttgtacctggactgccagccttagcacctgcaaaacccggtggcccaggccggccacgcgaccctaacacctgtttttttgagggccagcaacggccccatggcgcaaggtgggccccaaactacgaccccctctgctccctctgcacttgccagcgcagaactgtgatctgcgatcctgttgtttgtccacccccttcctgtccccaccctgtccaagctcctgatcagtgctgccccgtgtgcccagaaaagcaagacgtgcgagacctgcctgggctccctaggagcagagaccctggagagggatgctactttgatggcgaccgctcttggcgagcggcaggcacacgatggcatccagtggtcccaccttttggtttgattaaatgtgccgtttgcacatgcaaaggcgggacgggcgaggtgcattgtgaaaaagtccagtgtccgaggctggcctgcgctcagcccgtgagagtcaacccaacagactgttgtaaacagtgtcccgtgggatcaggtgcacacccccagcttggggatcctatgcaggccgacggacccagagggtgccgatttgcaggccagtggtttcctgagagccagagctggcatcccagcgtcccaccatttggcgagatgagctgcattacctgtaggtgtggcgccggggtcccacattgtgagagggacgattgctccctcccgctctcctgtggcagcggcaaggaatctcgctgctgctcccgatgcacagcgcaccgtcgacctgcccccgagactaggactgaccctgaactggagaaggaagccgaggggagctag

SEQ ID NO: 112068 - DNA, 285 bp, synthetic construct
  misc_feature 1..285: note = Description of Artificial Sequence: Synthetic coding sequence
  source 1..285: mol_type = other DNA
atgccatcattgcctgccccaccagcgcccctgctcctcctgggcctgttactgcttggatcaaggccggctagaggggccggacctgagccacctgtgctgcccatcaggagtgaaaaagaacctctgcccgtacgtggagccgcaggatgtactttcggcggtaaggtttatgccctggacgaaacctggcatccggatttaggggagccctttggtgtcatgagatgcgtactctgtgcatgtgaagccaccggaacactaagaccacgggaaatgaagtag

SEQ ID NO: 112069 - DNA, 1512 bp, synthetic construct
  misc_feature 1..1512: note = Description of Artificial Sequence: Synthetic coding sequence
  source 1..1512: mol_type = other DNA
ggtgagcacctgtcccagaaaggacctcatgtgagaccatgtcggacaaaccccgggagcttggaagctcccgactcaacacctggggcggccactgccaggacatccgggcagtgcctgtcgcccggcgagtggggctctgggagtaggtgtcacttgagctggcccttggccattgcccaccataccctgctgtgcccccaggaaccagggttcgcggaagtgctccctaatctgacagtccaggaaatggattggcttgttcttggcgagctgcagatggccttagagtgggcaggtagacccgggttgaggataagtggacacatagctgcacgcaagtcttgtgacgttctccagagtgtcctgtgcggggcagatgccctgatccccgtgcagactggagccgcaggttccgctagtttgaccttactcggaaatggaagcttgatttaccaagttcaggtggtggggacatcgagcgaggttgttgccatgacactggagaccaaaccacagcggcgggaccagaggactgtgctgtgccatatggcagggctacagcccggaggccatacagccgtcggcatctgcccaggtctcggcgccaggggcgcccacatgctgctgcagaatgagctgtttttaaacgttggcacaaaggatttcccagacggagagctaagaggacacgtcgcagcactcccgtattgcgggcactctgcgcggcatgacacccttccagttcccttggctggtgccttagtgcttccacccgtgaagtctcaagctgccggtcacgcttggctctccctggatacccattgtcaccttcactacgaagttctgttggcagggctaggcgggtctgagcagggtaccgtaaccgcgcacctgctcggccctcccggtacacctggccccagacgcctcctcaaagggttctacgggtcagaagctcagggggtggtcaaggatctagagcctgaactgctgcgccatcttgccaaggggatggcatctctgatgattaccacaaaagggtccccacggggagaactgaggggtcaggtgcacatcgcaaatcagtgcgaggtcggaggactccgtctcgaagcggctggagcggaaggcgtacgggccctgggtgcacctgatacagcaagcgctgcgccccctgtcgtgcccggcctgcccgcgctggctcctgctaagcccggaggacccggcagaccgcgggatccaaacacctgtttctttgagggccagcagagaccgcacggcgcgaggtgggccccaaactacgaccctctctgttccctttgtacatgtcagcggcggaccgtgatatgcgaccccgtcgtttgcccaccgccgtcatgcccccacccagtgcaggcccccgaccagtgctgtcccgtgtgtcccgaaaagcaagatgttcgcgacctgcctggacttccccgctcacgtgacccaggagagggaggacactggagaggagctctgtag

SEQ ID NO: 112070 - DNA, 2748 bp, synthetic construct
  misc_feature 1..2748: note = Description of Artificial Sequence: Synthetic coding sequence
  source 1..2748: mol_type = other DNA
atgccttcccttcctgccccaccagctcccctgctcctactggggctgctactgctgggatctcgaccagcacgtggggccggccctgagccccccgttctgcctatcaggagtgagaaagagcccctgccagtgcggggtgccgctggctgtacattcggtgggaaagtgtatgcgttggatgaaacatggcacccggatctcggtgaaccttttggcgttatgcgctgcgtcctgtgtgcctgcgaagccccacagtggggtcgaagaacacggggaccagggagagtcagctgcaagaatatcaagcccgaatgtcctacccccgcctgcggacaacctagacagttacccggccattgttgccaaacgtgcccacaagagcggtcatccagcgagcgacaaccaagtgggctgtctttcgagtacccgagggaccccgagcataggagctattccgatcgcggagaacccggggcagaggaacgtgctcgcggcgacggccatacagactttgtagcattgctgacaggaccgcgatctcaggctgtcgctagggcgagggtgagcctgcttcggagtagcttgagattttctatcagctaccgacgccttgataggcccactcggataagattttctgattccaatggtagtgtgcttttcgaacatcctgccgctccgactcaagacggactggtgtgcggagtgtggcgggcagtgccgcgactctccctgcggctgttgagggccgagcagctgcatgttgccctagtgaccctgacccacccaagcggtgaagtttggggaccgcttattcggcaccgggccctcgccgctgaaaccttcagcgccatcctgactttggaagggcctccacagcaaggcgtcggagggattactctcctcacactcagtgacacggaagactccctgcacttcttgctgctgttcaggggcctcctcgagccccgatccggaggcctgacccaagtgcctcttcggctgcagatcttgcaccaggggcagttactccgtgagttgcaggctaatgtgtctgcccaagagcctggattcgcggaagtcttacctaacttgacagtgcaagagatggattggctggtgctaggcgaactgcagatggccctagaatgggccggaagacccgggctccggatcagtggccacattgccgccaggaagagctgtgacgtcctccaatccgtattgtgcggggccgatgcccttattcctgtgcagacgggggctgctggtagtgcctctctaacacttttaggcaatggctctctcatctatcaggctgtagggatttgccctggcctcggtgcccgtggtgctcacatgctcctccagaacgaactgttcttgaatgttggcactaaagacttcccagacggagagctaagaggacacgtcgctgcactgccctactgtggtcactcagccagacacgatactctcccagtccctctcgcaggagcactggtgctgcctcctgttaaaagtcaggccgcgggtcacgcttggctaagtctcgatacacattgtcacctgcactacgaggtgctactggctggactggggggctcggaacaaggaaccgtaactgctcacctgctaggcccccctgggaccccagggcctagacgcctacttaagggcttctatggctcagaagcccagggcgtggtaaaggatctggagcccgagctgctccgccatcttgccaagggcatggcaagcctgatgatcaccaccaagggctccccaagaggggagctgcggggtcaggtccacatcgccaaccaatgcgaagtgggcggtctgcgactggaggcagccggggccgagggcgtcagggctctaggcgctccagacaccgccagcgccgcacctccggtagttccaggacttcccgcactggctcctgccaagccaggtggacctggacgacccagggatcctaatacatgcttttttgagggccaacagcggccacatggagccagatgggctcccaattatgaccctctgtgctccctgtgtacgtgccagcgtaggactgtgatatgtgacccagtcgtgtgtcccccacctagctgccctcatccggtccaggctcctgaccagtgttgcccggtgtgtccagagaaacaagacgttagagacctccccggcctgcctaggagcagggacccgggggagggttgctacttcgatggagaccgcagctggcgcgccgctgggacccgatggcaccccgtggtaccaccatttggactgatcaagtgtgctgtttgtacctgcaaagggggtacaggcgaagtccactgcgagaaagtacagtgtcctaggttggcatgcgcccaaccagtccgcgtgaatccaaccgactgttgtaagcaatgccctgtgggatctggagcccatccgcagcttggagatcccatgcaagcggatgggccccggggatgccgatttgccggccagtggtttcccgagagccagtcttggcacccctcggtccctcccttcggcgaaatgtcctgcataacctgcagatgtggcgccggggtcccacattgcgagcgtgacgattgtagtctgccgctgtcttgcggctcagggaaagaatcccgctgctgcagtcggtgtaccgcacatcgtcggccagcccccgaaactcgcacagaccctgagctcgagaaggaggcagaggggtcgtag

SEQ ID NO: 112071 - DNA, 1494 bp, synthetic construct
  misc_feature 1..1494: note = Description of Artificial Sequence: Synthetic coding sequence
  source 1..1494: mol_type = other DNA
atggactggctcgtgttgggagaactacagatggctctggaatgggctgggcgaccaggcctgaggatatcgggccacatcgccgcacgcaaatcctgtgacgttctgcaatctgtgctgtgcggcgcagatgctttgatcccagttcagactggcgccgcagggtccgctagcctcacgcttttgggcaatggcagcctcatctaccaggtccaggttgtgggaacctcatctgaagtcgtcgccatgactttggagaccaaacctcagcggagggatcagaggactgtgctgtgccacatggctggtttgcagccaggagggcacacagcagtgggaatctgccccggactgggcgctcgcggtgctcatatgctccttcagaatgagctttttctcaatgtagggacaaaagactttcccgacggagagctgcgcggccacgttgcagcattgccatactgtggacactcagcccgccatgacactctccccgtgcccctggccggagccttggtgcttccacctgtcaagagtcaggccgccgggcacgcttggctttctctggacactcattgccacctgcactacgaagttctattggcgggacttggtggatcagaacagggtactgtcactgcccatctgctcggtccccctgggactccgggaccacggcggttgcttaagggattttatggatctgaagcacagggagttgtcaaggacctcgaaccagaactcctgagacaccttgcaaagggcatggcatcgcttatgataacaacgaagggctccccacgtggcgagctgcggggccagcgaagaacagtgatttgtgaccctgtcgtctgtccgcccccatcatgcccacatcccgttcaggcccccgatcaatgctgtccagtatgcccagagaagcaggacgtgagggacctgccagggctcccgcgcagccgcgacccaggagaaggatgctactttgatggcgaccggtcctggagggcagccgggactaggtggcatcctgtagtgcccccgtttggattgatcaagtgtgcagtgtgtacctgcaaaggcggcacaggtgaggtgcactgcgaaaaagttcagtgtccaaggctagcctgtgctcaacccgtgcgagtaaacccaaccgactgctgcaagcagtgcccagtgggcagtggtgctcaccctcaactgggggatcctatgcaggcagacggacccaggggctgcaggttcgccggtcagtggtttccagaatcacagtcctggcacccgagcgttcctccatttggcgagatgagttgtattacatgccgatgtggggccggggtgccccactgtgaacgagacgactgctccttaccattatcctgtggctccgggaaagaaagcaggtgctgctcgaggtgcacggcccatcgacgtccagctccagagactaggacagatcccgagctggagaaagaagctgagggaagttag

SEQ ID NO: 112072 - DNA, 3126 bp, synthetic construct
  misc_feature 1..3126: note = Description of Artificial Sequence: Synthetic coding sequence
  source 1..3126: mol_type = other DNA
atggagaacatgttccttcaaagttcgatgctgacctgcattttcctcctgattagcgggtcttgcgaattgtgcgccgaagagaacttctcaaggtcatatccttgcgacgagaagaaacagaatgacagtgttatcgctgaatgctcaaatagaaggctccaggaggttccacagactgtcgggaagtacgtgactgaactggatctctctgataattttattacccatatcacaaatgagtcattccagggattgcaaaacttgaccaagattaacctgaaccataatcctaacgtacagcatcagaatgggaatccaggcatccagagtaatggcctgaacatcacagacggcgcattcctgaacttaaagaacttgcgggaactgctacttgaggataatcagcttccccagattccatccggcctacctgaatctctgaccgaactttctctgattcagaataatatttacaacatcactaaggaggggatttctcgacttattaatcttaagaatttatatcttgcctggaactgctattttaacaaagtgtgtgaaaaaaccaatatcgaagacggagtcttcgaaaccctgactaacttggaacttctctctctgtctttcaactccctgagtcatgtgcccccgaaactcccatcctccctgagaaagctcttcctatctaatacccagatcaagtacattagtgaagaggactttaaagggctcattaacctaactctgctcgatcttagtggcaattgtccacggtgctttaatgcaccatttccttgtgtcccgtgtgacggaggagcctcaataaacattgaccgctttgcatttcaaaatctcactcagctacggtaccttaacttgagttctacaagcctgcgaaagatcaatgccgcctggttcaagaacatgccacacctgaaagtcttggatctcgagttcaattatctcgtgggcgagatcgcaagtggggccttcttgaccatgctgcctagactcgaaatcttggacctgtccttcaactacatcaaggggagctacccccagcatatcaacatctcccgtaacttctcgaaactgctctccctgcgcgctctgcacttgagaggctatgtgttccaggagctgcgggaggacgattttcaacctctcatgcagctgccgaacctgtctactattaacctgggcataaactttattaaacaaatcgatttcaagctcttccagaatttctctaacttggagattatctatctcagcgagaacaggatttctcccctggttaaggacacgagacagtcctatgccaattcatccagcttccagcgccatattcgtaagcgcagatctaccgactttgaattcgatcctcacagcaatttttatcattttaccagacctctcattaagcctcaatgcgccgcttacggaaaggcactggatctctccttgaatagtatcttttttattgggcctaaccagttcgaaaatctcccggatattgcgtgcctcaatctgtctgcaaattccaatgcacaagtactttctggtaccgagttctctgcgatcccacatgtgaagtacctggacctgaccaacaataggctggacttcgataatgcaagtgccttaactgagctgagcgacctggaagtcctcgatctctcctacaattcccactacttccggatcgctggcgttactcaccacctcgagtttatacagaattttacgaatctcaaagtactgaatttgtctcataataatatctacactctgactgacaaatataacctcgagagtaagagcctggtggagctggtattcagcggtaacaggctggacatactgtggaatgatgacgacaatagatatatatcgatattcaagggattaaaaaatctgacccgtttggacctcagtttaaatagactcaaacacatccctaacgaagcattcctgaacctgcctgcttccctgaccgaactgcacattaatgacaatatgcttaaattctttaattggaccttgcttcagcagtttccacgccttgaacttctcgatctgcgcgggaataaactcctgtttcttacggactcgttgagcgactttacctcctcgctccggacactgctgttatctcacaataggatctcacacttacctagcgggttcctgtcagaggtgtcctccctcaaacacttagatttatccagcaacttactgaagacgatcaataagagcgcgctggagactaagactaccaccaagctgagtatgctggaactccatgggaacccatttgaatgcacatgtgatatcggagactttcggcggtggatggacgagcatctaaacgttaagattcctaggctagtggatgtaatctgtgcttcaccaggcgatcaaagaggaaagtctatcgtgtctctagaattgactacctgcgtatctgatgttaccgctgtaatcctgtttttcttcacattctttattaccacaatggtaatgctggctgcccttgcacaccacctattctattgggacgtgtggttcatctacaacgtctgcctggcaaaagtgaagggctatcggtctctttcgacgtcgcagaccttctatgatgcttatatctcatacgacacaaaagatgcgagcgtgactgactgggttatcaatgaactccgataccacctggaggaaagcagagataagaacgtgcttctttgcctcgaggaaagggactgggaccccgggctcgccatcattgacaaccttatgcagtcaatcaaccagtccaagaaaactgtatttgttctgacgaagaagtacgctaagagctggaattttaagactgccttctatctcgcactgcagcggttgatggacgagaacatggacgttataatatttatactactggaacccgtccttcaacattcacagtatttgagactacgacagaggatatgtaaaagctcaatcctgcagtggccggacaaccccaaggccgaaggcctcttctggcagactctcaggaacgtcgttttgaccgaaaacgatagtcgctataacaatatgtatgtcgatagcattaaacagtactag

SEQ ID NO: 112073 - DNA, 1377 bp, synthetic construct
  misc_feature 1..1377: note = Description of Artificial Sequence: Synthetic coding sequence
  source 1..1377: mol_type = other DNA
atgagaaagaagtggaagatgggggggatgaaatacatcttctctttacttttcttcctgttgctagaggggggaaagacagaacaggtcaagcactcagagacgtactgtatgtttcaagacaaaaagtaccgtgtgggtgagaggtggcacccttacctagagccatatggtctggtctactgcgtgaactgcatctgttccgagaatgggaacgttctatgcagtcgtgtcaggtgccccaacgttcattgtctgagtccagtgcacatccctcacctgtgttgtcctaggtgtccagaggattccctgccaccggttaacaacaaagtgacttctaaaagttgtgagtacaacgggaccacgtatcagcacggcgaactctttgttgccgaagggctgttccagaaccggcagcctaaccagtgtactcagtgcagctgctctgaggggaacgtgtattgcggactcaaaacatgtccgaaattgacctgtgctttccctgtttcagtcccggactcgtgttgtcgcgtctgccggggcgacggagagttgtcatgggaacatagcgacggagacatattcagacagccagcgaatcgcgaagcccggcactcttaccatcggagtcactatgatccccccccaagccggcaggcaggggggctctccagattcccaggggctaggtcccacaggggcgccctcatggattctcagcaggcaagcggaactattgtgcagatcgtgatcaataacaagcacaaacatggacaagtttgcgtgagtaatggaaagacctactcccatggcgaatcctggcaccccaatctgcgagcattcggcattgtggaatgtgtactgtgtacctgcaacgtaacaaaacaggaatgtaagaaaatacattgccctaaccggtatccttgcaaatatccacagaaaatagacgggaaatgctgtaaggtttgcccaggaaagaaagcaaaagaagagttgcctggccagtctttcgataataaggggtatttttgcggagaagaaaccatgcccgtgtacgagtccgtgtttatggaggacggggagacgaccagaaaaatcgctttggagactgaacggccgcctcaggtcgaagtacacgtctggaccatccggaaaggaatccttcaacactttcacatcgagaaaatatctaagagaatgtttgaagaattaccccacttcaaattagtaactcggacaaccctgtctcagtggaaaattttcactgaaggcgaggcccagatcagtcagatgtgtagcagccgcgtctgtagaactgaactagaggatttggtcaaggttctgtacctggagcggtcggagaagggccactgctag

SEQ ID NO: 112074 - DNA, 1353 bp, synthetic construct
  misc_feature 1..1353: note = Description of Artificial Sequence: Synthetic coding sequence
  source 1..1353: mol_type = other DNA
atgggagggatgaagtatattttcagcctgctgttcttcctgctgctagaagggggcaagacagagcaggtcaaacacagcgaaacatattgtatgttccaggacaagaagtatagggtaggggagcggtggcacccttatctggagccatatggcctcgtttattgtgtgaattgcatttgtagcgagaatggcaatgtcctatgcagcagagtgcgctgtcctaatgtgcattgcttaagccctgtccatatcccccacctgtgttgccctcgctgcccagattctcttccgccagtcaacaataaagtgacttcaaaatcgtgcgaatacaatggcactacctaccagcatggggaactgtttgtagctgagggcctgttccagaatcgccagcctaaccaatgtacccagtgctcctgcagcgaggggaacgtgtattgtgggctgaaaacgtgccccaaacttacctgcgctttccccgtgtcagttcctgactcttgctgccgggtgtgccggggggacggcgaattatcatgggagcactccgacggcgacatctttaggcagcccgctaaccgggaagcccgccattcctatcaccgaagccattacgatccgcctccttcacgacaggccggcgggctgtcgcgcttccccggagccagaagccatcgaggcgccctcatggacagtcagcaagccagtggaacgatagtacaaattgtgatcaataataagcacaagcacggacaggtttgtgtgagtaatggaaaaacttattcacatggcgaaagttggcacccgaatcttagagcctttggtattgtggagtgtgtgctgtgcacgtgtaatgtgactaaacaggagtgcaaaaaaatacactgtccaaatcgctacccctgcaaatacccccagaagatagacggaaagtgctgcaaagtatgtcccgggaagaaggccaaagagctccctgggcagtccttcgacaataaaggctacttttgcggggaggaaaccatgcccgtgtatgaaagcgtttttatggaggacggtgaaaccacgaggaaaattgctctggaaactgagaggcctcctcaggtagaggtccatgtctggactattagaaaaggcattctgcagcactttcacatagagaagatctcaaaacggatgttcgaagaactgccccatttcaagcttgtgaccagaaccacactttcacagtggaagatcttcaccgagggggaggcacaaatctcccagatgtgctcctcccgggtatgccgtactgaactggaggatctcgtgaaagtactttatcttgagaggagtgagaagggacactgttag

SEQ ID NO: 112075 - DNA, 1371 bp, synthetic construct
  misc_feature 1..1371: note = Description of Artificial Sequence: Synthetic coding sequence
  source 1..1371: mol_type = other DNA
atgagaaaaaagtggaagatgggaggcatgaagtatatatttagcctgttattcttcctccttcttgagggcggaaagaccgagcaagttaaacattccgagacatactgcatgttccaggataaaaagtatagagtgggcgagaggtggcatccttacttggagccatacggcttagtgtactgtgtgaattgtatctgttccgagaatggcaacgtgctgtgcagtcgtgtgcgctgtccaaacgttcactgcctcagccctgtacatatccctcatttgtgctgcccacgatgcccagattcacttccacctgtgaataataaagtcacgagcaaaagctgtgagtacaacggaactacataccaacacggagaactgttcgtggcagagggcctctttcagaaccgtcagccaaaccaatgtacccagtgctcatgctctgagggcaacgtgtactgcggtctgaaaacatgcccaaaactaacttgcgcttttcctgtttcagtccccgattcatgctgccgagtgtgccgcggggacggcgagttatcttgggagcattcggacggcgacatattcaggcagccagccaatcgggaagcgagacactcgtatcatcgcagccactatgaccctcctccttctcgacaggccggaggcctgtcccgctttcctggagctcggagtcaccgaggggctctgatggacagtcaacaggcctccggcacaatcgtacagattgtcataaataacaaacataagcacgggcaggtttgcgtctctaatgggaaaacgtatagccatggagaaagctggcatcctaacctgcgggccttcgggatagtggagtgcgtgctctgtacctgcaacgtgacaaaacaggagtgtaaaaagattcattgccccaacagatatccctgcaagtatcctcagaaaattgacggtaaatgttgtaaggtttgccccgggaagaaggctaaagagctgcccggacagtcctttgacaacaaggggtacttttgcggcgaagagaccatgccagtgtacgaatcagtgttcatggaggacggggagaccacgcggaaaatagccttagagaccgagcggccgccacaggtggaggtccacgtgtggacaatcaggaaaggcatcctccagcacttccatatcgagaagatttctaagaggatgttcgaagaacttcctcattttaagctcgtgacacgcactacccttagccaatggaagatattcactgaaggtgaagcacagataagccagatgtgctcttccagggtttgccgtaccgagctggaggacttggtgaaagtcctgtacttagaacggtccgagaaaggccactgttag

SEQ ID NO: 112076 - DNA, 1134 bp, synthetic construct
  misc_feature 1..1134: note = Description of Artificial Sequence: Synthetic coding sequence
  source 1..1134: mol_type = other DNA
atgaggaagaagtggaaaatgggtggcatgaaatatatcttctccctgctgttttttctgctgctcgaaggtggcaagaccgaacaagtgaaacactctgaaacgtactgtatgttccaggataagaaatatagagtcggagagcgctggcacccgtatctggaaccctacggactggtttattgtgtcaactgtatctgttccgaaaacgggaacgtgctttgctcaagggtgagatgtccaaatgtccactgtctgagccccgtgcacatcccccacttatgctgtcccaggtgtcctggtgacggggaactgagttgggagcactctgacggtgatatcttcagacagccagccaatcgggaggcccgacacagctaccaccggagccactatgatccacctccatcgcgacaggcaggtggcctttccagattcccgggcgcccggagccaccgcggcgccctgatggattctcagcaggcctcaggcaccatcgtccagattgttatcaacaataaacacaaacacgggcaggtgtgtgtaagtaatggaaagacctattctcacggggaaagttggcacccaaatttgcgcgcgttcggaattgtggagtgtgtcctgtgtacttgtaacgtcaccaaacaggaatgtaaaaaaatacattgccccaaccggtatccctgcaagtacccccagaagatcgacggcaaatgttgcaaagtctgccctggcaagaaggccaaggaactccctggtcagtctttcgataataaaggctacttctgtggcgaggagacaatgccagtttatgaatcagtgtttatggaagacggagagaccactcggaaaatcgcacttgagacagagaggcctcctcaggtggaggtgcatgtgtggacaatcaggaagggtattctgcagcattttcacatcgaaaaaatcagtaagcggatgttcgaagagttaccacactttaaactggtaacacgcacgactttgtctcaatggaaaatttttacggaaggagaggctcaaatctctcaaatgtgttctagcagggtgtgcagaacagaattagaggatctcgttaaggtgctgtatctggaacgcagtgagaagggtcattgctag

SEQ ID NO: 112077 - DNA, 1374 bp, synthetic construct
  misc_feature 1..1374: note = Description of Artificial Sequence: Synthetic coding sequence
  source 1..1374: mol_type = other DNA
atgcgcaagaagtggaaaatgggaggaatgaagtatatcttcagcctgctgtttttccttcttctggaaggagggaagacagaacaggtaaaacattccgaaacctactgcatgtttcaagataaaaaatatcgggtcggggagcgctggcacccttacctggagccttacgggctggtgtattgtgtcaactgtatatgttctgagaatgggaacgtgctgtgcagcagggtgcgatgtccaaatgtgcactgtctcagcccggtgcatatccctcatctatgctgtcccagatgcccagactccttaccgccggtcaacaataaggtgacatccaagtcatgcgagtataatgggacgacttatcaacatggtgagctgttcgttgctgagggattgtttcaaaatcgacagccgaaccaatgtacacaatgctcttgttcggaaggtaatgtatactgtgggctcaaaacctgtcccaaacttacatgcgcgtttcctgtgtcagtccctgactcgtgttgccgggtgtgccgtggagacggagaactgtcatgggagcacagcgacggcgacatattccggcagcccgccaatagggaagcacgtcactcataccacagaagtcattacgacccaccaccttcacgtcaggcagggggtctgtcaaggttcccaggcgcacggtcccatagaggcgcccttatggacagtcagcaggcctccggaactattgtccagatcgtgatcaataataagcacaaacacggacaagtttgtgtgtccaatggaaagacgtattcccacggagagagctggcaccccaatcttagggcctttgggattgtcgagtgtgtactttgcacctgcaacgtgacaaagcaagagtgtaagaaaatccattgtccaaacaggtatccatgtaagtatcctcagaaaattgatggcaagtgttgtaaggtgtgtccaggcaagaaagcaaaggaagagttgccaggtcaatctttcgataacaagggatacttttgtggtgaggaaaccatgccagtatacgagtccgtatttatggaagatggagaaactacacgcaaaatcgcccttgaaactgaacgcccccctcaggtcgaagttcacgtgtggaccatcagaaagggcatcctgcagcatttccacattgagaagatcagcaagcgtatgtttgaagagttgcctcactttaagttggttacacgcaccaccctaagtcagtggaaaatctttacagaaggagaagctcaaatctcccagatgtgtagcagcagagtgtgtcggacggagctagaagatttagttaaggtgctttacctcgagcggagtgagaaaggacactgttag

SEQ ID NO: 112078 - DNA, 1137 bp, synthetic construct
  misc_feature 1..1137: note = Description of Artificial Sequence: Synthetic coding sequence
  source 1..1137: mol_type = other DNA
atgcgtaaaaagtggaagatgggaggcatgaagtacatattttctctcctgttctttttattgctcgaaggaggaaagactgagcaagtgaagcactccgaaacttattgcatgtttcaggataagaaatatagggtcggggagaggtggcatccatacctcgaaccttacgggctggtatattgtgttaactgcatttgcagtgaaaacgggaacgttctttgttccagggtgaggtgccccaatgttcactgtctgagtcctgtccacatccctcacctgtgttgtccacgatgtcctggagatggggagctgtcatgggagcactctgacggggatatttttcgtcagccagccaatagagaggcccgccattcctaccatagatctcattacgacccacctcccagtcggcaggcaggcggactttccagatttcccggcgcaaggtctcaccgcggggcgttgatggactctcagcaagccagcgggacgattgtccaaatcgttatcaataataaacacaaacatggacaggtatgcgtaagcaatggtaagacatactcccacggcgagtcttggcaccctaatcttcgcgcctttggaattgtagaatgcgtgttgtgcacctgtaacgttacgaaacaggagtgcaagaaaatacattgtcctaaccggtacccttgcaagtacccccagaaaattgacgggaaatgctgtaaggtgtgcccggggaagaaagccaaagaggaactgccggggcagagcttcgacaacaaggggtacttctgtggtgaggagacgatgcctgtgtatgaatcagtctttatggaagacggcgagactaccaggaagatagctctcgagaccgaacggcccccccaggtggaggttcatgtatggacgattaggaaggggatacttcaacacttccatattgagaaaatctctaagcgtatgtttgaagagctcccacatttcaagttggtgacacgcacgaccctttctcagtggaagatctttacagaaggcgaggctcaaatatcccagatgtgcagctcaagagtgtgtcgcactgagttagaggatctcgtaaaggttctgtacctggagcggtcagagaaggggcattgctag

SEQ ID NO: 112079 - DNA, 1356 bp, synthetic construct
  misc_feature 1..1356: note = Description of Artificial Sequence: Synthetic coding sequence
  source 1..1356: mol_type = other DNA
atggtccctgaggtgcgtgttcttagtagcctcctgggtctggcactgttgtggtttccactggattcccatgctcgggcacgaccagacatgttttgcctgttccatggtaagagatattctccgggtgagagctggcacccctacctcgagccccaaggcctgatgtactgcctgaggtgcacatgctcagaaggcgcccatgtctcttgctacaggctccattgccctcccgtgcactgccctcaacccgtcacagagccccagcaatgttgtccgaagtgtgttgagccgcacaccccttcgggtctgcgcgctccaccaaagtcatgtcagcacaacggaaccatgtatcagcatggcgagatcttctctgcccatgagctcttcccaagccggctgccaaaccaatgtgtattgtgttcttgtacggagggccagatctactgtggattgactacctgtcccgaacctggctgcccagcccctttgcctctgcctgatagctgctgccaggcctgcaaggacgaggcaagtgagcaaagtgatgaagaggatagtgtgcaatccctgcacggagtccggcacccacaagatccatgctcaagtgacgccgggagaaaacggggtcctggcactcctgctcccaccggactgtctgcaccactaagctttattcccaggcacttcagacctaagggagccgggagcaccaccgtcaagattgtcttgaaggagaagcataaaaaagcctgcgtgcacggaggaaagacctattcacacggagaggtgtggcatccagcatttagggcttttggccctctgccctgtattctctgtacatgcgaagacggtcgtcaagactgtcaacgcgtgacctgccctacggagtacccatgtcggcatccagagaaggtagctgggaaatgttgtaagatttgccctgaagacaaggccgatcccggccacagcgaaattagcagcacccgctgtcctaaggcacccggaagggttctcgtacacacctcagtgtcgcccagcccagacaacttgcgcaggttcgctctcgaacatgaagcctccgatctggtcgagatctatctgtggaagctggtaaaagacgaggaaacagaagcccaaaggggggaggtccccggaccccggcctcattcacaaaatttacccctggactcagatcaagaatcgcaagaggcacgcctgccagagcgggggaccgctctgccaacagcccggtggcccccccggcgcagcctcgagcgtctgccatcccccgatccaggcgcggagggacacggccagagccgccagtctgatcaggatatcaccaaaacctag

SEQ ID NO: 112080 - DNA, 846 bp, synthetic construct
  misc_feature 1..846: note = Description of Artificial Sequence: Synthetic coding sequence
  source 1..846: mol_type = other DNA
atgtaccaacacggggagatcttctctgcccacgaactgtttccttccaggctgccgaatcagtgtgtgctctgctcctgtaccgaggggcagatatattgtggcctgaccacatgtcccgaacctggctgccctgcaccattgcctctaccggactcttgttgccaggcctgcaaggctggaagctcttggggacttttgtgtagtgtgagtgactttcaccccagctgccatctgcaacgtcatccccaggacccttgctcaagtgacgctgggagaaagcgcgggcccggcactcccgcccctacagggctcagcgcacctctgagtttcatcccaagacactttagaccaaagggggcaggctctaccaccgtgaagattgtgctgaaggagaaacataagaaagcttgcgtgcacgggggcaagacttatagccatggagaggtgtggcatccagcttttagagcgttcgggcctttgccttgcattctgtgtacatgtgaagacggccgccaggactgccaaagagtaacttgcccaaccgaatatccatgccgccatccagagaaagtcgcggggaaatgttgtaagatctgccccgaggacaaagcagatccagggcactccgaaattagctctacccggtgtcccaaagcaccgggtagggtccttgtacatacctctgtcagcccctctcctgacaatctgcggcgcttcgctctggaacatgaggccagtgatttggtcgaaatctacctgtggaaactggtaaaaggagtgtttttagctcagaccctcgagctgaaagtgaccgcgtcccccgataaagtcaccaaaacctag

SEQ ID NO: 112081 - DNA, 1290 bp, synthetic construct
  misc_feature 1..1290: note = Description of Artificial Sequence: Synthetic coding sequence
  source 1..1290: mol_type = other DNA
atggtcccggaggtgcgggttctgagcagcctacttggcctcgcactgttgtggtttccactcgactcccatgcgagggccagacctgacatgttttgtctgttccacgggaaacgctacagcccaggcgagtcgtggcatccatacctggagccacagggcctgatgtactgtcttcgatgtacctgttctgagggagctcacgtgtcttgctataggttacactgtcctcctgtgcactgcccacagccggtgaccgagcctcagcaatgctgccccaagtgtgtggaaccccacacgccaagcggcctgagggccccgcccaagagctgtcagcataatggcacaatgtatcagcatggtgaaatctttagtgctcacgaattgttccctagcaggctcccgaaccagtgcgttttgtgtagctgtactgaggggcagatctattgcggcctcaccacgtgtccagagcctggttgcccagccccactgcccctgccagacagttgctgtcaggcttgcaaggatgaagccagtgaacagtccgacgaggaggattctgtgcaatcactccatggcgtgcgccatccccaggacccttgttcctcagacgcgggtcggaaacgcgggcccggaactcctgcgccaacggggttgtcggcgcctctgtctttcatacccaggcatttccggccaaagggggctggaagtaccaccgtgaaaattgttctgaaggagaagcacaagaaggcctgcgtgcacggcggtaagacctactctcacggggaggtgtggcaccccgcgttccgggctttcggcccactcccatgcatcctgtgcacctgcgaagatggacgacaagactgccaaagggtcacgtgcccgactgagtatccatgccgccaccccgaaaaggtcgcaggcaagtgctgcaagatttgcccagaagataaagccgatcccggtcacagcgaaatttcctctactaggtgccccaaggcgcccggcagagtgttggtgcatacctctgttagcccttcccccgacaacctaaggaggttcgcactggagcacgaggccagtgatctcgttgagatttacctgtggaagctcgtcaagggaatctttcatctgactcagatcaaaaaagttaggaagcaggacttccagaaagaggcccaacactttaggctgcttgccggacctcatgagggccactggaatgtgttcttagcccagactctcgagttgaaggtcaccgccagccccgacaaggtgaccaagacctag

SEQ ID NO: 112082 - DNA, 840 bp, synthetic construct
  misc_feature 1..840: note = Description of Artificial Sequence: Synthetic coding sequence
  source 1..840: mol_type = other DNA
atgtaccagcacggcgagatcttctctgctcacgagctcttccccagccgacttcccaaccagtgcgttctctgctcatgtaccgagggccagatttactgcgggctcacaacctgtccggaaccaggttgtcccgcacctcttcctctgcctgacagctgctgtcaggcctgcaaagacgaggccagtgaacagagtgatgaagaagactctgtgcaaagcctccacggcgtccgccatccacaagacccctgctcatccgatgccggccgaaagcgcggccccggcacccccgccccaacggggctaagcgcccctctgagttttatccctcgccacttcagaccaaagggcgccggctcaaccaccgtgaagatcgtccttaaagagaagcataaaaaagcctgtgttcacgggggcaagacttacagccacggagaggtttggcatcccgccttcagggctttcggccctttgccatgcattctctgtacatgtgaagacgggcgccaggattgtcagcgtgttacatgtccaacagaatacccctgccgtcaccctgagaaagtggcaggaaagtgctgcaagatctgtccagaggataaggccgatccagggcactctgagattagctccacccgctgtcccaaggcacctggacgggtgctggtgcacaccagcgtgtctcccagccctgacaatctccggaggtttgcgctggagcacgaagctagtgatctggttgaaatttacctgtggaaactggtcaaggatgtgttcctggcccaaaccttggagctgaaggtcactgccagccccgataaagtgacgaaaacatag

SEQ ID NO: 112083 - DNA, 498 bp, synthetic construct
  misc_feature 1..498: note = Description of Artificial Sequence: Synthetic coding sequence
  source 1..498: mol_type = other DNA
atggaaatgtttcagggcctcctgttgttactgttactcagcatgggtggcacttgggcctctaaggagcccctgcggccgaggtgccggcctatcaatgctaccctggcagttgagaaggagggctgccctgtctgcatcaccgttaataccaccatctgcgccgggtattgcccaaccatgaccagagttttgcagggcgtcttgccagcgctcccacaggtggtctgcaactaccgggacgtacgcttcgaatccatcaggctgcccggctgtccccggggtgttaacccagttgtgtcatacgccgtggcactttcttgtcagtgcgctctttgcaggaggtcaactaccgattgtgggggaccaaaagatcaccctttgacttgtgacgatcccagattccaggactcttcctccagtaaagctcctccaccttctttgccttctccttctcggctacctgggccttcggatacgcccattctaccccagtag

SEQ ID NO: 112084 - DNA, 507 bp, synthetic construct
  misc_feature 1..507: note = Description of Artificial Sequence: Synthetic coding sequence
  source 1..507: mol_type = other DNA
gctccgcggatggagatgttccaaggactgctgctgttgctcctcctgagtatgggcggtacctgggcatcgaaagagccccttcgacccaggtgccggcctattaatgccactttggcagtagagaaggagggatgtccggtgtgcattacagtgaacaccacaatctgcgcagggtactgtcccacaatgacccgggtgctccagggcgttttgcccgcactgccccaggtggtatgcaattacagggatgtcaggtttgagtcaattcgactcccaggatgtccccgtggcgtgaatcctgttgtttcctatgcagtcgccctttcctgtcaatgcgccctgtgtcggagaagcacaacagactgtggtggacccaaggatcacccgttaacatgcgacgatccgaggtttcaggactcatcttcgtccaaggcgcctcccccatccctcccgtctccctcaaggctgccaggtccttcggacacccctatactgccacagtag

SEQ ID NO: 112085 - DNA, 654 bp, synthetic construct
  misc_feature 1..654: note = Description of Artificial Sequence: Synthetic coding sequence
  source 1..654: mol_type = other DNA
atggcgcctggtagccggacctcactgcttttggcctttgcgctactgtgcctcccctggctgcaggaggctggagcagtacagactgtacctttatcgaggctgtttgatcacgccatgctgcaggcccacagagcccaccagctggcaattgacacctaccaggagtttgaagagacttatatccccaaagatcagaaatacagctttctgcacgatagccaaacgtctttttgcttttccgacagcatcccgaccccctctaatatggaggaaacccagcagaaatcaaacctggaacttctgagaatcagtctgctgcttattgaaagttggttggagccagtccggttcctgagatctatgttcgccaacaacctggtatacgatacgtctgacagtgacgattatcatcttctcaaggatctggaagaaggcatccagacgttgatgggaagacttgaagacggatcccgtcgcaccggtcagattctgaagcagacgtacagtaaatttgacaccaacagccacaatcatgatgctctgctgaaaaattacggcctgctgtactgctttaggaaagacatggacaaagtagaaacttttctcaggatggtccagtgtagatcagttgagggttcctgtgggttttag

SEQ ID NO: 112086 - DNA, 771 bp, synthetic construct
  misc_feature 1..771: note = Description of Artificial Sequence: Synthetic coding sequence
  source 1..771: mol_type = other DNA
atggccccagggtccagaacttctttgctgttggcattcgctctgctctgtctgccgtggcttcaggaagctggagctgtgcagacggtccccctttcccgtcttttcgatcacgccatgctccaggctcacagagctcaccaattggctatcgacacgtaccaggagttcgaggaaacgtacatcccaaaggaccaaaagtactctttcctgcatgacagtcagacttccttttgtttctccgattccatccctacgccttccaacatggaggaaacacagcagaagagcaatctcgagctgctaaggattagtctcttactcattgaatcttggctggaacccgtccggtttctgcggtctatgttcgcaaacaacctggtgtacgatacatccgactcagacgactatcacctactgaaggatctcgaggaaggtattcagacacttatgggagtacgcgttgctcccggagtgaccaatccgggaacgcccctcgcctccagagccgggggggagaaatactgctgccccctgtttagctcaaaagccctgacacaggagaacagtccttattcatccttccggttggtcaatccacccggcctcagcctccacccagaaggagagggcggtaaatggataaatgagcgcggacgcgagcagtgtccttccgcctggccgctgctcctgtttcttcacttcgccgaggctgggaggaggcaaccccccgactgggccgacccacaggcagacttgcagcaggtctag

SEQ ID NO: 112087 - DNA, 369 bp, synthetic construct
  misc_feature 1..369: note = Description of Artificial Sequence: Synthetic coding sequence
  source 1..369: mol_type = other DNA
atggcccctggaagcagaacttccctgctcctggcctttgcactgctgtgcctcccatggctgcaagaagccggcgccgttcagacggtgcccctttcacggctcttcgaccacgccatgctccaggcccaccgtgcgcatcagctggccattgatacctaccaggaatttcgccttgaggacggctcccgacggacgggtcaaattctaaaacagacatattccaagttcgatacgaattcacataatcatgacgccttgctgaagaattacggtctgctctattgcttcagaaaagacatggacaaggtggaaacgttcctcagaatggtacagtgcagaagtgtggagggctcttgcggcttttag

SEQ ID NO: 112088 - DNA, 552 bp, synthetic construct
  misc_feature 1..552: note = Description of Artificial Sequence: Synthetic coding sequence
  source 1..552: mol_type = other DNA
atggcccccggcagccgcacatcattgctccttgccttcgctctgctttgcctgccatggttacaggaggcagaaacatatattcctaaagatcagaaatactccttcctccatgattctcagaccagcttttgttttagcgatagcattccaacccctagcaatatggaggagactcagcagaagagcaaccttgaacttcttcgcatttctctcctacttattgaatcctggcttgaacccgtgcgttttctcaggagcatgttcgctaataatcttgtatatgacacctccgattccgacgactaccacctcctcaaagacctggaagaggggattcaaacgctcatgggtcgcttggaagacggctcaaggcgcacaggtcaaatcttgaaacagacctactccaagttcgatactaatagccacaatcatgacgccttattaaagaattacgggctgctgtattgttttcgaaaggatatggacaaggtcgagacgtttctgcgcatggtccagtgtaggtcggtagaggggtcttgtggattctag

SEQ ID NO: 112089 - DNA, 504 bp, synthetic construct
  misc_feature 1..504: note = Description of Artificial Sequence: Synthetic coding sequence
  source 1..504: mol_type = other DNA
atggccgcaggttccagaacctccctgctgcttgcgttcgccctgttgtgtctcccatggcttcaagaagccggggccgtccaaaccgttcctctgtcgagactgttcgaccatgctatgctgcaggcccatcgagcgcatcagctggccatcgacacctaccaggagtttgaggagacctacattcccaaagaccagaaatactcgtttctgcacgattcacagacctcgttctgcttttctgattcaatacctaccccctctaatatggaggaaacccaacagaagtccaatctggaattattgagaatttctctgctacttattgagagctggctcgaaccagtccggttcctgcggagcatgttcgccaacaacttagtgtacgacacatctgacagtgatgactatcatttgctcaaagaccttgaggagggaatccaaaccctgatgggcgttagagttgcgcccggagtggccaatcctggcaccccccttgcctag

SEQ ID NO: 112090 - DNA, 369 bp, synthetic construct
  misc_feature 1..369: note = Description of Artificial Sequence: Synthetic coding sequence
  source 1..369: mol_type = other DNA
atggccgctggttccaggacctcattacttctggctttcgccttgctttgcctgccctggctgcaggaggcaggagctgtgcagacagtccccctcagtaggctgtttgatcatgctatgctgcaggctcaccgcgctcatcagctagccatcgacacataccaagaattcaggctagaagacgggtcaagaagaactggtcagattctcaaacagacctatagtaagtttgacactaactcacacaaccatgacgccctgttgaagaactacggacttctttactgcttcagaaaggatatggacaaggtggaaacattcctccgaatggttcagtgccgcagcgtcgagggatcttgtgggttttag

SEQ ID NO: 112091 - DNA, 654 bp, synthetic construct
  misc_feature 1..654: note = Description of Artificial Sequence: Synthetic coding sequence
  source 1..654: mol_type = other DNA
atggctgctggtagtcgcacatcactgctgttagcatttgctctgttgtgtttgccttggcttcaagaagccggagccgtgcagaccgtgccgctgagtagattgttcgaccatgcaatgctccaggctcatagagcccatcagttggccattgatacatatcaggaattcgaagagacttatattccaaaggaccagaagtatagcttccttcacgacagccagactagcttctgcttctcggattctattcctacaccaagcaatatggaggaaacacagcagaaaagtaaccttgagctgctccggatctctcttctgctcattgagtcgtggctagagccagtcaggttcctgcggagtatgttcgctaacaacctcgtgtatgatacctcagatagtgatgattatcacctgttaaaggatctcgaagagggcatacagacactcatgggtcggctggaagacggatcgcgcaggaccggccaaatcctgaagcagacctactccaaatttgatactaactcccacaaccacgacgctctgctgaagaactacggcctcttatattgctttcgtaaagatatggacaaggtggagacatttctacggatggtgcagtgtcgttcagtggaaggctcctgcggattttag

SEQ ID NO: 112092 - DNA, 483 bp, synthetic construct
  misc_feature 1..483: note = Description of Artificial Sequence: Synthetic coding sequence
  source 1..483: mol_type = other DNA
atggctgctggcagccggacttctctgctcctggcattcgcactcttgtgcctgccttggttacaggaggccgactcaataccaaccccctctaatatggaagaaactcagcaaaagtccaacttggaactcctcaggatctctcttcttcttattgaatcatggttggaacccgtccgctttctccggtcgatgtttgcgaataacctagtttacgacaccagtgacagcgatgactatcatttgttgaaggatttagaggaaggcatccaaacgctgatggggcgcttggaagacggctcccgaaggaccgggcaaatacttaaacagacttactctaaatttgatacgaactctcataatcacgacgccctgcttaaaaactatgggctgctgtattgtttccgaaaggatatggataaggtggaaactttcctgaggatggtgcagtgtcgcagtgtcgaagggagctgtggattctag

SEQ ID NO: 112093 - DNA, 498 bp, synthetic construct
  misc_feature 1..498: note = Description of Artificial Sequence: Synthetic coding sequence
  source 1..498: mol_type = other DNA
tgaggcagccgcacatcactgctcctggcattcgctctgttgtgcctgccttggttacaggaggccggagcggtacagactgtccccctgtcacgtttgtttgaccatgcgatgctgcaggctcaccgggcgcaccagctcgccatagacacataccaggagttcgaggaaacatacattccgaaggatcaaaagtacagcttcttgcatgacagccagacctcattttgttttagtgactcgatcccaacccccagtaacatggaggaaactcagcagaagtcaaacttggagctgcttaggatcagcctcctgctcattgaatcttggcttgagccagtacgtttcctccgcagcatgttcgcaaacaatttggtgtacgatacctccgattccgatgactatcacctccttaaagatctggaagagggcattcagactctgatgggagtcagagtcgcgcctggagttgctaaccctggaaccccactggcctag

SEQ ID NO: 112094 - DNA, 669 bp, synthetic construct
  misc_feature 1..669: note = Description of Artificial Sequence: Synthetic coding sequence
  source 1..669: mol_type = other DNA
atggccgccggatccaggaccagccttctcttggcgttcgccctgctgtgtctgccatggcttcaggaggccggggctgttcagaccgttcctctgtccagattgttcaaagaagcaatgctccaggcacacagggctcaccaactagccatcgacacctaccaggagttcattagcagctgggggatggaagcatatattaccaaggagcagaaatattcattcctacacgatagtcagacatctttttgcttttcagattctatcccgacgtcctctaacatggaggaaacccagcaaaagtcaaatctggagcttctgcatatatccttactgctgattgaaagtcggttggaacctgtcaggttcctgagaagcacttttacaaacaacctcgtgtatgatacaagcgattcagatgattatcacctcctgaaagatctggaagaaggaatacagatgctcatggggaggctcgaagatggctcccacctgaccgggcaaacactaaagcagacctacagtaagttcgacacgaatagccacaaccatgacgccctcttgaagaactacggattgctgcactgtttccggaaagatatggacaaagtggagacatttttgaggatggtgcaatgcagatctgtcgagggctcatgcggcttttag

SEQ ID NO: 112095 - DNA, 387 bp, synthetic construct
  misc_feature 1..387: note = Description of Artificial Sequence: Synthetic coding sequence
  source 1..387: mol_type = other DNA
atggaggaaacacagcagaagtctaatctcgagttgcttcacatttccctgctattgattgagagccggctcgaacccgtgagattcctgcgcagcacctttactaataatcttgtatacgatacctcagactctgacgactatcatctgctgaaggatttagaggagggaattcagatgcttatgggccgcttagaggacggttcacatcttaccggccagacacttaaacagacctacagcaagttcgataccaacagtcacaaccacgatgctctgctaaaaaattacggcctactgcactgttttcggaaggacatggataaggtagaaaccttcctcagaatggtacaatgcagatcggtcgaggggtcatgtggattctag

SEQ ID NO: 112096 - DNA, 522 bp, synthetic construct
  misc_feature 1..522: note = Description of Artificial Sequence: Synthetic coding sequence
  source 1..522: mol_type = other DNA
atggccaccggctcacggacctctctgctgctagcatttgcgttattatgtctcccatggctccaggaagccggcgcggtgcagacagtgcccttgtctaggctctttaaggaagctatgcttcaggcccatcgagcccaccagctggcaattgatacctaccaggagtttatctcctcttgggggatgggggcaggacaaggctggcaagagggtgtgactttcccacattggggttctaatggaaggagattacggtctagcgggctgttctctgaggcaaagatgcaagccgatgagcaccgcctgagccaggtcccacgacgtgtcactgtcggtgccggcctgcagcacagaaagcagtggagctttctggttggcggtccctcacctcgcaagaaacctatttcccagagaaatcggtcaatccattcttgtatgacgccacggcccccctcagctagccagactctgttccggcatccaccgacctggcggaagaggtctcgaaacccgacctag

SEQ ID NO: 112097 - DNA, 420 bp, synthetic construct
  misc_feature 1..420: note = Description of Artificial Sequence: Synthetic coding sequence
  source 1..420: mol_type = other DNA
atggcagctgattccatcccaactagcagcaacatggaggaaacccagcagaagtctaatctggaactactccacatctcactgttgctgatcgaatcaaggctggagcctgtgcggttcctaagaagcacttttactaataatctagtgtacgacacctctgactcagatgactaccaccttcttaaggatctagaggaaggtatacagatgcttatgggaagattagaggacggatcccacctgactgggcagactctgaagcaaacatactcaaagtttgacacaaacagtcacaatcatgacgcattactgaagaactacgggttacttcattgtttcagaaaggatatggacaaggtggaaaccttccttaggatggttcagtgcaggtccgtggagggaagttgcggcttctag

SEQ ID NO: 112098 - DNA, 1962 bp, synthetic construct
  misc_feature 1..1962: note = Description of Artificial Sequence: Synthetic coding sequence
  source 1..1962: mol_type = other DNA
atggcggacactctccccagcgagttcgatgtgatcgttattggcaccggactccctgagtctattattgccgcggcatgtagtcggtcaggccggcgcgtgcttcatgtggattcaagaagctactacgggggcaactgggcgtcgttctcattctccggtttgctttcttggctcaaagaatatcaggagaattctgacattgtgtcagacagccccgtgtggcaagaccagattctcgaaaacgaagaggccatcgcactgtccagaaaagataagacaattcagcacgtagaagtcttttgttacgcttcacaggaccttcacgaagacgtggaagaagctggtgcccttcagaagaaccatgccttagtgacaagtgccaactcaacagaagcagcagacagtgcattcctgccaaccgaggatgaaagcctgtcgaccatgagttgcgagatgctgactgaacagactccgtcaagcgatccagaaaatgccctcgaagtgaatggagcggaggtgaccggcgaaaaggagaaccattgtgatgataagacatgtgtcccatccacaagcgctgaagacatgtcagaaaacgtccccatcgctgaggataccactgagcagcccaagaagaataggattacctacagtcagatcataaaggaaggaaggcgctttaatattgaccttgtctcaaaactgctgtattcacgagggttgctgattgatctcctgatcaaaagcaatgtgtctagatatgccgagttcaaaaacattacccgaattctggcctttagggaaggcagggtagagcaagtgccatgttcacgagcagatgtgtttaattccaagcaactgactatggtggaaaagcggatgcttatgaagttcttgaccttctgcatggagtatgaaaagtacccagatgagtacaaaggctatgaggaaatcactttctatgaatacctaaaaacacaaaagctaacccctaaccttcaatacatcgtgatgcatagtattgcgatgacgagcgagaccgcctcaagcactattgatgggctgaaagccactaagaacttcctccattgtcttggcaggtatggcaatactccgttcttatttcctctgtacggccagggagagctccctcagtgcttctgtcgaatgtgcgccgtcttcggaggcatctactgcctaaggcattccgttcagtgcctcgtagtggacaaagagagtcgaaaatgtaaagctatcatcgaccaattcggacagcgtatcatctccgaacactttttggtggaggactcttattttccagagaatatgtgctcgcgagtccagtacagacaaatttcccgtgcagtccttattactgatcggagcgtcctaaaaaccgactctgaccagcagatatctattctgaccgtgccggcagaagagcccggaacatttgccgtgcgcgttatcgaactatgctcctccactatgacatgcatgaaaggaacctatctcgtgcacctcacctgcacttcttccaagaccgcccgcgaagatttggaatcagtcgtgcaaaagcttttcgtgccatacacagagatggaaattgagaacgagcaggtcgagaaacctcgaattctgtgggccctgtacttcaatatgcgggactcctcagatatctcaagaagttgttacaacgatctgccaagtaatgtttacgtgtgttctggaccagactgcgggctgggaaacgataacgcagtgaaacaagctgaaacactctttcaggaaatatgccctaacgaagatttctgccctcccccacccaacccggaggatatcattctggatggggattccctccaaccagaagcctcagaatcatctgctatccccgaagccaattcagaaacgtttaaagaatccaccaatcttggaaatctggaagagtccagcgaatag

SEQ ID NO: 112099 - DNA, 333 bp, synthetic construct
  misc_feature 1..333: note = Description of Artificial Sequence: Synthetic coding sequence
  source 1..333: mol_type = other DNA
atggcagacacactgccttcagaatttgatgtgattgttataggtaccggcctacctgaatcgattatcgccgccgcttgcagtcgatccggcaggagagtcctgcacgtggatagcagatcctattacggcggcaactgggcctcctttagcttctcaggtctgctttcctggctcaaggagtaccaggaaaactcagatattgtttccgacagcccagtgtggcaggatcaaattctagaaaatgaggaagcaatcgctctgtctaggaaggataagaccattcagcacgtggaagtgttctgctacgcccgctctacccttctgctctag

SEQ ID NO: 112100 - DNA, 1518 bp, synthetic construct
  misc_feature 1..1518: note = Description of Artificial Sequence: Synthetic coding sequence
  source 1..1518: mol_type = other DNA
atgtcgtgtgaaatgctgactgagcagactccatctagcgatcccgaaaatgctctggaggtaaatggcgcagaggtcaccggggagaaggagaaccattgcgacgacaagacctgcgtgccgtcaacaagcgctgaagatatgtctgaaaacgtacccattgccgaggacaccaccgaacaaccaaagaaaaatcggattacatacagccagatcatcaaagaagggcggcgctttaatattgaccttgttagtaaactcctgtactcccgcggtctgctcatcgacctgttaataaagagcaacgtcagtcgttacgccgagtttaagaacatcactagaattcttgctttcagagagggacgcgtggaacaggttccttgctctagagccgatgtcttcaattccaagcagcttaccatggtggagaagcgtatgctcatgaagtttctcaccttttgtatggagtatgaaaaatacccagacgaatataaagggtatgaagaaataacgttctatgaatacttgaagacacagaagcttactcctaatctccagtacattgtgatgcactccattgctatgacatctgagacagcaagcagcaccattgatggactgaaggccacaaagaatttcctgcactgccttggtaggtacggaaatacgcctttcctctttccgctctacggtcaaggcgagcttccacagtgcttttgcagaatgtgtgcagtcttcggcggcatctattgcctccgtcatagcgtgcagtgcctggtggtcgataaagagtctagaaaatgtaaagccatcatcgaccaatttggacaacggattataagcgaacatttcttagttgaggactcctactttccagagaatatgtgcagtcgagtgcaatatcggcaaatttcaagggcggtgctgatcactgataggtcagtcctgaaaactgattccgaccaacaaatttcaattctgacggttcccgctgaagagcccgggaccttcgctgttagagtaatcgaactttgttcaagtactatgacttgcatgaagggaacctatttggtccacctgacctgcacttcgagtaagactgctagagaagacctagagagtgtggtgcagaaacttttcgtaccgtacactgaaatggagattgaaaatgaacaggtcgagaagccccggattctctgggccctctattttaatatgcgggactcttctgatatatctcgcagttgctacaacgacctcccatctaatgtctatgtttgtagcggccctgattgtggtcttggaaatgacaatgccgtgaagcaggcagagactttatttcaggaaatctgtcccaatgaggacttctgcccaccaccccctaatcccgaagatattatcctagatggtgactcccttcagcccgaagcgtccgagtctagtgcaattcccgaagcaaactccgaaacattcaaagaaagcaccaacctgggcaatctggaggagtctagcgagtag

SEQ ID NO: 112101 - DNA, 1971 bp, synthetic construct
  misc_feature 1..1971: note = Description of Artificial Sequence: Synthetic coding sequence
  source 1..1971: mol_type = other DNA
atggcagacaatttgcctacggaattcgacgtggttatcatcgggaccggcctccctgagtcaattctcgctgctgcctgctcacggtctggtcagagggtgctgcacatcgattccaggtcgtactacggcgggaactgggcatccttcagcttctccgggctgctgtcatggctgaaagaataccagcagaataatgatattggtgaggagagcacagtggtgtggcaggatctgatccacgagacagaggaagccattaccttgaggaagaaagacgagacaatccagcatacagaagctttttgctacgcatcccaggacatggaggacaacgtcgaggaaataggcgctttgcaaaagaatccatccctcggtgttagtaatacgtttaccgaggtgcttgatagcgctttacccgaagagagccaactttcatactttaatagcgatgagatgccagctaaacacacacaaaagagcgataccgaaatatcactggaagtcaccgatgtggaggaatccgttgaaaaggaaaagtattgtggtgacaaaacgtgtatgcacacagttagtgataaggatggcgacaaggatgagagtaaaagcaccgtggaagacaaggctgacgagcccattaggaaccgaatcacatactcccagatcgtgaaggaggggcgaagattcaatatcgacctggtatcaaaactcctatactctcagggcctgctaattgatcttctgattaaatctgatgtgtcaaggtacgtggaattcaagaatgtgacacgcatcttggccttccgagagggcaaggtcgagcaagtgccctgctccagagcggatgtattcaactctaaggagctcactatggttgagaaaagaatgctgatgaaatttctgacattctgtctggaatatgagcagcacccagatgaataccaggccttccgtcagtgcagcttctcggaatatcttaagaccaagaagttgacccccaatctgcagcattttgtcctgcattctatcgcaatgacctcagagagcagctgcacgacaatagacggtctgaatgcaactaagaatttcctgcagtgcctgggtagatttggcaacacaccattcctgttcccactgtacggacagggagaaatcccacaaggcttttgcagaatgtgtgcagtctttggcggtatttactgcctccgccataaggtccagtgctttgtagtagacaaggagagcggaagatgcaaagctatcatcgaccacttcggacagcggattaatgccaaatattttattgtcgaggattcctatctctcagaagaaacatgctccaacgtgcagtataagcagatctctcgcgctgtactgattactgatcagagtatcctgaagacagaccttgaccagcagacctcgatcctcattgtgcctcctgccgagccgggtgcttgcgctgtacgggtcacagagctgtgctcatcgacaatgacctgtatgaaggatacttacctggtgcacctgacttgttcctctagtaagactgcacgagaggatttagaatctgtggtcaagaagctgttcactccatacactgagacggagatcaatgaagaggaattgaccaagccaaggctcctctgggctctttatttcaacatgagggactcttccggaatctctcgcagcagctataatggactgccttcaaacgtgtacgtgtgttccggccccgattgcgggctgggaaatgaacacgccgtcaagcaggccgaaaccctcttccaggaaatttttccaaccgaagagttctgccccccacctcctaatccagaagatatcatcttcgacggagacgataaacagccggaggcccctggaactaacaacgtggtgatggccaaactcgagtctagcgaagagtcaaaaaacctggagagccccgagaaacacctccagaactag

SEQ ID NO: 112102 - DNA, 1641 bp, synthetic construct
  misc_feature 1..1641: note = Description of Artificial Sequence: Synthetic coding sequence
  source 1..1641: mol_type = other DNA
atggagcagcggcgggtgacagattttttcgctcggcgacgccctggtcctcctcgcatcgcgccaccgaaattggcctgcaggaccccatcacctgccagacctgcattgcgcgcccccgcaagcgctacgtccgggagcaggaagcgggcgaggccccctgccgctccgggacgggaccaggcacgcccacccgcccggcgaagacttcggctctcagtcgacgaagtctcttcgccgtctacccctgaagcccccgacattcctgcgtgcccatcccctggtcagaaaataaagaagtccaccccggctgctggccaaccgccacatcttaccagcgctcaggatcaggacaccatttccgagctggcctcctgcttgcagcgtgccagggaactgggcgcaagggtcagagcactaaaggcctccgctcaggatgctggcgaatcatgcacccccgaggccgagggccgtccggaggaaccctgcggagagaaggccccagcctatcagcggtttcacgcacttgcccaacctggactgcctggactcgtgctgccttataaataccaagtcctagctgagatgtttcggtctatggacaccatagttggaatgttacacaacaggtctgagacccccacttttgccaaagtgcagcgcggagttcaggatatgatgcgccggcgttttgaagaatgtaatgtgggacaaatcaagacggtgtaccccgcgtcttacaggtttcgtcaggagagatcagttccaacttttaaggacggcacacgacggtccgattaccagctgaccatagagccccttttagaacaggaggccgatggcgcagcaccccagctgaccgcctctagactgttgcaaaggcgccagatcttttcccaaaagctggtggagcacgttaaagagcatcataaagccttcctggccagcctgtccccagcaatggtcgttcctgaggaccagctgacacggtggcacccaagattcaatgtggatgaggtcccagatatcgagcctgcagccctgccccagccacccgctacggagaaactgacgacagcccaggaggtactggcacgcgcccgtaacttgatctcacctagaatggaaaaagctctgtctcagctggcactgaggagcgccgcacccagtagtcccggctccccccgacctgcactcccggccactcccccagccacaccccccgcagcatcaccctccgcactgaaaggtgtgagccaggacctcttggaacgtattcgcgccaaggaagcccagaaacaactggcccagatgacccggtgccccgaacaggaacagcgtctgcagcgcttagaacggctccctgaactcgctagagtgctgcggagtgtgtttgtatcggagcggaaaccagctctgtccatggaggtcgcctgcgcacgtatggtcggttcctgctgcaccattatgtcaccaggagaaatggaaaaacatcttctgctccttagcgaattgctccccgattggctcagcctgcataggatcagaaccgatacctatgttaagttggacaaagccgccgacctggcccatatcacggctcgattggcacatcaaacccgggcagaggaaggactgtag

SEQ ID NO: 112103 - DNA, 306 bp, synthetic construct
  misc_feature 1..306: note = Description of Artificial Sequence: Synthetic coding sequence
  source 1..306: mol_type = other DNA
atgcagcagcagcagcagttggcttccgcacgcaatcgcagactagcccagcagatggaaaaccgccctagtgtacaggccgcgcttaagctcaagcagaaatcactaaaacagcggctgggaaagtccaatatccaggcacggctaggtcgaccgattggcgcacttgcccgcggcgctatcggcggacgcggactcccaattatccagaggggactaccacgagggggactgcgcgggggacgagcgactcggacactcctgagaggggggatgagtctaagaggacagtgttgcgtgccctag

SEQ ID NO: 112104 - DNA, 672 bp, synthetic construct
  misc_feature 1..672: note = Description of Artificial Sequence: Synthetic coding sequence
  source 1..672: mol_type = other DNA
atgcttaaaaataagcagcccacgcccgtgaatattagggccagcatgcagcagcagcagcagctggcctcggcacgaaacagaaggctcgctcaacagatggagaacagaccctcagtccaggctgccttgaagctcaagcagagcctgaaacagcgcttggggaaatccaatatccaggctcgactaggtcgccctatcggagcccttgctaggggcgccataggaggtcgaggactgcctattattcagaggggactgcccaggggcggcctgcggggggggagggccacccgaactctcctgcgaggtggcatgtctctgagaggacagaatctcctaaggggcggccgagcagtggccccaaggatggggctacggagaggcggcgtgcgtggacgcggtgggccgggcagaggcggcctgggcagaggcgccatggggcgtgggggaatcggtggccgcggacgaggcatgattggcaggggtaggggcggctttgggggcaggggcagggggagaggcagaggccgtggggcccttgccaggcctgttttgacaaaggagcagctggataaccagttggacgcatatatgtccaaaacaaagggccacttggacgccgagctggatgcatatatggctcagactgaccccgagacaaatgattag

SEQ ID NO: 112105 - DNA, 609 bp, synthetic construct
  misc_feature 1..609: note = Description of Artificial Sequence: Synthetic coding sequence
  source 1..609: mol_type = other DNA
atggccgcacaaagtgcacctaaagtggtgctgaaaagtacaacgaagatgtcattgaacgaacgctttacaaatatgttaaaaaacaaacagcccacacctgtgaatatcagagcctcgatgcagcagcaacaacagctggcatccgcacgaaaccgccgcctggctcagcagatggaaaatagacctagtgtccaagcagctctcaaattaaagcagtccctcaaacagagactcggcaaatctaatatccaggccaggctgggtcgccccatcggcgcccttgccagaggtgccatcggcggccgagggctgcccatcatacagcgcgggctcccacgcggcggcctgcggggggggagagccacaaggacattgctgagagggggaatgagcttgaggggcaggggaatgatcggacgtgggcggggcggattcggcggacggggacggggacggggacgcggccggggagcccttgccaggccagtgttgactaaagaacagctagacaaccagctggacgcctacatgtcaaagacaaaagggcacttagatgctgaactggacgcttacatggctcagaccgatcccgaaacaaacgactag

SEQ ID NO: 112106 - DNA, 747 bp, synthetic construct
  misc_feature 1..747: note = Description of Artificial Sequence: Synthetic coding sequence
  source 1..747: mol_type = other DNA
atggctgctcagtcagcacctaaggttgtgctgaagagcaccaccaagatgagcctgaacgaacgctttaccaatatgttaaagaacaaacagcctactcctgtgaatatccgggctagcatgcagcagcagcagcagctcgcgtctgcaagaaaccggcggttggcccaacagatggaaaataggccgtccgtccaagccgcattaaagctgaaacagtcacttaaacagcgcttaggtaagtctaacattcaggcaagacttgggaggccaatcggtgccctcgcaagaggggccattgggggtcgcggcctgccaatcatccagcgtggactgcctcgaggcggcctcaggggggggagagcaactcggaccctgctccgaggtggaatgtccctcagaggccaaaatctgctgcgtggtggccgtgccgtggcccctcgaatgggcctgagaaggggcggagtaaggggcaggggcggccccggccggggtgggctagggaggggggccatgggccgagggggtattggagggagagggaggggcatgatcggccggggcagaggtggcttcggcggccgcggtcgcggccgggggagggggagaggggccctcgccaggcctgtcctgactaaagagcagctggataaccagttggacgcttacatgagcaagacaaaggggcatctggacgcagaacttgacgcctatatggcccagacggaccccgagaccaatgactag

SEQ ID NO: 112107 - DNA, 609 bp, synthetic construct
  misc_feature 1..609: note = Description of Artificial Sequence: Synthetic coding sequence
  source 1..609: mol_type = other DNA
atggctgctcagtctgccccaaaggtggtcctgaaatcaacaacaaagatgtcacttaacgaaagatttacgaacatgcttaagaacaaacaacccaccccagtcaatatccgtgccagcatgcagcaacagcagcagctcgccagcgcccgcaacagaagactggcccagcaaatggaaaacaggccgtccgtgcaggctgctctgaagctgaagcagtctctcaagcagcgcctcggtaagagcaatattcaggccagactggggagacccatcggtgcacttgccaggggagccatcggggggaggggcctgcctattattcagaggggactccctcgaggtggcctaagaggcggacgtgcgactcggacgttactgagggggggcatgagtctgcggggacgcggcatgatcgggaggggtcgaggcggtttcggcggacggggccgtgggagagggaggggacgcggagcactggctcgtcctgtgctgactaaggagcagttggacaatcagttagacgcatacatgtctaaaaccaaagggcacctcgatgccgagctggacgcttacatggctcagaccgatccagaaaccaacgactag

SEQ ID NO: 112108 - DNA, 636 bp, synthetic construct
  misc_feature 1..636: note = Description of Artificial Sequence: Synthetic coding sequence
  source 1..636: mol_type = other DNA
atggaagagctcagcagcgtgggcgaacaggttttcgctgccgaatgtattttgagcaagaggctgagaaaggggaaattggagtatctggtcaagtggagggggtggtctagtaagcacaatagttgggaaccagaggagaatatcctggatccacgcctgcttctggctttccagaagaaggagcatgagaaagaggtgcaaaaccgcaaacgcggtaagcgccctcgcggacgccccagaaagttaactgccatgtcttcttgttcccggcggtctaagctaaaggtaggaggttgtgctggctacgcggatcccacatcccagcaccctttgggagtcggcggcagacagagggagggacttggcccctccggacgcggatggcacttctgccagcagagtgtcccgctgctgggcaaacaagaacccccattttttctttcactctctttctgttgccagggtccccaaccggccgaaagttcctcaccccccttaccaggcgcaagctgcttctctttgagctgtactcctctgtgctgggtggccggctcaaactgttgtcgtcaggctcttttccctcctagaggcagcttgggtgacgggaaggagcaagaagcctgcgtgcaatag

SEQ ID NO: 112109 - DNA, 1599 bp, synthetic construct
  misc_feature 1..1599: note = Description of Artificial Sequence: Synthetic coding sequence
  source 1..1599: mol_type = other DNA
atggaagagctatccagcgtaggggagcaggtgttcgctgcagagtgcattctcagcaagcgtttgcgtaagggtaaacttgagtacttagttaagtggcggggctggtcgtccaaacacaatagctgggaacccgaggagaacatcctggatccccgcctactgctagcctttcaaaagaaagagcacgaaaaagaggtacagaacagaaaaaggggaaaacgtccaaggggcagaccccggaagctaactgccatgtcttcatgcagccggaggtcaaaacttaaggagcctgacgcacctagcaagagtaagtcaagcagctcttcctccagtagcacatcttctagtagctccagcgacgaagaagacgatagtgaccttgatgctaagcgaggcccgagaggccgcgagacccaccctgttcctcagaaaaaagctcagattctcgtggctaaacctgaactaaaggatcctatcagaaaaaaaagagggagaaagcccctgcctcccgagcagaaggccacaaggcgccctgtatctctggcaaaggtgctgaagaccgccaggaaggacctcggcgcccccgcctccaaacttcctccccctctatccgcccctgtggctggattagcagccctgaaagcccatgctaaagaagcttgcggagggcctagcgcaatggccacccctgagaacttagcctccctgatgaagggaatggcatcatctcctggacggggcgggatttcttggcagagctctatcgtacattacatgaacagaatgactcagagccaggctcaggccgcctcgcggttggcgctgaaagcccaagccaccaataaatgcggacttggcttggatctaaaagtccgtacccagaagggcgaactgggcatgtccccccccggatcaaaaattccaaaggcgccgagtggcggcgccgtggagcagaaggtgggcaatacagggggacctccacacactcatggagcatcgagggtgcctgccggctgtcccgggcctcagcccgctccaacccaagaactgtcgcttcaggtgttagacctccaatccgtgaagaacggtatgcccggagtagggctgttagccagacatgcgactgctactaagggagtacctgctacaaaccccgcccccgggaagggcaccggttcaggtctgatcggcgctagcggagcaactatgccgaccgacacttcaaaatccgaaaagctggctagcagggccgtggccccccctactccagcgtctaaacgcgactgtgtcaaggggagtgctaccccgtctggccaagaaagtcggaccgcccccggcgaggctcgaaaggcagcaaccctcccagagatgtcagccggggaggagagtagcagcagcgacagtgacccagattccgccagccccccttccaccggccagaatccgtctgtgagtgtccagacctctcaagactggaagccgacacgaagtctgatcgaacatgttttcgtgaccgacgtgactgccaatctgatcacggtcacagtgaaagaaagccctacctctgtgggattcttcaaccttcgtcactattag

SEQ ID NO: 112110 - DNA, 1935 bp, synthetic construct
  misc_feature 1..1935: note = Description of Artificial Sequence: Synthetic coding sequence
  source 1..1935: mol_type = other DNA
atggaagccgaacggggcccagagagaagacctgcagagaggtctagcccaggtcagactcccgaggagggcgcccaagcgcttgctgagtttgccgccttgcacggtcccgcgctgcgagcctctggagtacctgagaggtactggggccgcctgctgcacaaactcgaacatgaggtgttcgacgcgggcgaggtgtttgggattatgcaggtggaggaagtggaagaggaagaagatgaagctgctagagaagtgagaaagcagcagcccaaccccggcaatgagctatgctacaaggtgatcgtcacacgtgagtctgggctgcaagctgcgcatcctaattccattttcctgatcgatcacgcatggacctgccgcgtggaacacgctcggcagcaactgcagcaagtgccgggcctcttacataggatggcaaacttgatgggtatcgagttccacggcgaacttccaagtaccgaagctgtcgccctcgtccttgaggagatgtggaagtttaaccaaacttaccagctggcacacggtacagctgaggagaaaatgcccgtgtggtacatcatggacgaatttgggagccgtattcaacatgctgacgtacctagtttcgcaactgcccctttcttctacatgccacaacaggtggcctacaccttactgtggcctcttagagatcttgacacaggagaagaagttacacgcgacttcgcttatggggaaacagaccctctgatcaggaagtgcatgctgctgccctgggccccgactgatatgctggatctctcctcgtgcactccagaacctcctgcagagcactatcaggcaattttggaggagaataaagagaagcttccactggacattaaccccgtggtccacccccatggacacatttttaaagtgtacactgacgtccagcaggttgcgtcttcacttactcatccgcggttcactctgacacagtctgaagcggacgcggacatcttgtttaacttcagtcatttcaaggattatcgaaaactgtcccaggaacgacctggggttctcctgaaccaattcccctgcgaaaacctgctcacggtgaaagattgcctggcttcgattgccaggcgcgccggcgggccagaagggcccccttggttgcctcgaacctttaatttacgcacagagctgccacagtttgtatcctacttccagcagcgcgagaggtggggcgaagataaccactggatctgtaagccatggaatctggccagaagtctggatacccacgtcaccaagtcactgcacagcattataagacacagggaatccacccctaaagtggtcagtaagtatatcgagagccccgtgctgttccttagagaggacgtcggcaaagtgaaatttgacattaggtatattgtactccttcggagcgtccggccactgcgtctcttcgtatatgatgtcttttggctgagattcagcaatcgcgcgttcgcactcaatgatcttgacgattatgaaaagcacttcacagtgatgaactacgaccctgatgttgtgctgaagcaggtgcactgcgaggaatttatccctgagttcgagaaacagtatcctgaattcccctggaccgatgtgcaggcagaaatcttccgcgcctttaccgagttgttccaggtggcatgtgcaaagcctccccctctggggttgtgtgattatccatcaagcagagctatgtatgctgtggatctgatgttaaaatgggataacggcccagatgggagacgagtcatgcagccacaaatcctcgaggtcaacttcaatcctgactgcgaaagagcgtgtagatatcaccccacgttcttcaatgacgtcttttccactctgtttctcgatcagcccgggggatgccatgtgacctgcctcgtgtag

SEQ ID NO: 112111 - DNA, 477 bp, synthetic construct
  misc_feature 1..477: note = Description of Artificial Sequence: Synthetic coding sequence
  source 1..477: mol_type = other DNA
atggagctgtccgctattggagaacaggtctttgctgtagagtcaataagaaagaaaagagtgcggaaaggcaaagtcgagtatctggtgaagtggaaaggatggccacccaagtatagcacttgggaaccagaggagcacattcttgatccacgtctagtgatggcctatgaggaaaaagaagaacgcgacagagcctcagggtatagaaagcgagggccaaaacccaagcgtctgttactgcaggaacctcccgctccggacgtgcttcaagcagcaggagaatgggaacctgccgctcagcctcctgaggaggaagccgatgccgatctagctgaagggccgccaccttggacacccgcactgccatcctctgaggtcaccgtcacagacatcacagccaactccatcaccgtcacctttagagaggcacaggcagcagaagggttttttcgggatcgaagtggaaagttctag

SEQ ID NO: 112112 - DNA, 366 bp, synthetic construct
  misc_feature 1..366: note = Description of Artificial Sequence: Synthetic coding sequence
  source 1..366: mol_type = other DNA
atggagctgtcagcaatcggagaacaggtcttcgccgtcgaaagcatacgaaagaaacgggtgaggaagggcaaagtggagtatctggttaagtggaaaggttggccccccaaagaggaacgggacagagcctcgggataccggaagagaggcccaaaacccaaacggctgctcctccagagactttactctatggatctgaggagctctcataaggcaaagggcaaggagaaactctgctttagtctcacatgccctcttggctccggctccccagagggggtggtgaaagcaggtgctccagagctggtggacaagggaccattggtccccaccctgccttttcctcttcgcaagccgcgatag

SEQ ID NO: 112113 - DNA, 5133 bp, synthetic construct
  misc_feature 1..5133: note = Description of Artificial Sequence: Synthetic coding sequence
  source 1..5133: mol_type = other DNA
atgaatggccactctgatgaagagtctgttcgcaattccagcggcgagagttcacagagcgacgatgactcgggtagcgcaagcggtagcgggagcgggagcagctctggctcctccagcgacgggagttctagtcagagtggatcttcggactctgactccggatcagagtccggatcccaaagcgaatcggagtctgatacatctcgcgaaaataaggtgcaggcgaaacctccaaaggtcgacggggcggagttttggaaatcttccccctccatcctggctgtgcagaggtctgctatcttgaagaagcaacagcagcaacagcagcaacagcagcaccaagccagttccaatagtggcagcgaggaggatagtagttcctcagaagacagcgatgattccagctccgaggttaaaagaaagaagcacaaggacgaggactggcagatgagtggaagcggatctccatcacaatccggctctgacagtgagagcgaagaggagcgcgaaaaaagttcctgcgatgagaccgagtctgactacgaacccaaaaacaaggtgaagagtagaaagccccagaaccgttcaaagagtaagaacggcaaaaaaatcttaggccagaagaaacgccagattgactcaagcgaagaagacgatgacgaggaagactatgacaatgataagcgaagtagcagaagacaggctacggtgaacgtcagctacaaagaagacgaggagatgaaaacagatagtgacgacctcctggaggtttgcggagaagacgtgccccaaccggaggaagaagagtttgagactatcgagcgcttcatggattgtcgcatcgggcgaaagggtgccacaggagccaccaccactatttacgccgtcgaggccgacggggacccgaacgctggattcgagaagaacaaggaacccggggagattcagtacctcatcaagtggaagggatggtctcacatccacaacacttgggagactgaggagaccttgaaacagcagaatgtgcggggcatgaagaagctggacaactataagaagaaggaccaggagactaaacggtggttgaagaatgcctcccctgaagatgtggagtactacaactgccagcaggagctgacggacgatctgcacaagcagtatcagatagtggagcgtattatcgcccactcgaatcagaaatcagccgccggctacccagattactactgcaagtggcagggccttccctacagtgaatgttcttgggaggacggcgctctgatttccaagaagtttcaagcctgtatcgacgagtactttagtcgaaaccaatcgaagaccacccctttcaaagactgtaaggtgctcaaacagcggcctaggttcgtggcgttaaagaagcaacctagctatatagggggccatgaaggtctggaacttagagattaccagctgaatggcttaaattggctggcacatagctggtgtaaaggtaattcatgcatcctggcggacgagatggggcttgggaaaactattcagacaatctcatttttgaattatctgttccatgagcaccaactctacggacccttcctgctggtggtgccgctgtctaccctgacaagttggcagagagaaatccaaacatgggcttcccagatgaatgcagtcgtctacctgggagacatcaacagccgcaatatgatccgcacacatgagtggacacaccaccagactaagaggctgaagttcaacatcctcctgaccacgtacgaaatcctgcttaaagataaggcattcctcggcggcttgaactgggcatttattggtgtggatgaggcccaccggctgaaaaacgacgattcactcctttataagactctaatcgatttcaaatctaatcaccggctgttaattaccgggacgccactgcagaacagcctgaaggaactgtggtcgttactccacttcattatgcccgaaaagttctcttcttgggaggactttgaagaagagcatggcaaaggacgggagtatgggtatgcttcgctccataaagaactagagcctttcctgctccgccgggtcaaaaaagatgtggagaaaagcctacccgctaaggtggagcagattctgcgcatggagatgagtgcccttcaaaagcaatactataagtggatcctcacaagaaattataaggcactgtcaaagggatctaagggctcaacttctggattcctcaatattatgatggagctgaaaaagtgctgcaaccattgctacctcatcaagccacctgacaacaatgagttttacaacaagcaggaggcactacagcacttgattagaagttctggtaagctgattcttctggataaattgcttatccgcctccgggaaaggggaaaccgcgtgctgatcttctcccagatggttagaatgctggacatcctcgctgagtacctaaagtataggcagtttccttttcaacggttagacggttcgatcaagggagaactcaggaaacaggctcttgaccacttcaacgccgaaggcagcgaggatttttgctttttgctaagcaccagagcgggagggctgggaataaacctggccagcgccgacaccgtggtcatctttgactccgactggaatccacagaatgatctacaggcccaggcgagagctcacagaataggtcagaaaaaacaggtgaatatctataggttagtgactaagggaagtgtggaagaggacattctggagcgcgcgaagaagaagatggtgttagatcacctcgtgatccagcgcatggacacaactgggaaaacggtcctccataccgggtctgctccgtcctcgtccaccccattcaacaaagaagaactgtcagctatcttgaagttcggcgctgaggaattgtttaaggaacctgaaggcgaggaacaggagcctcaggaaatggacattgatgaaatcctgaaacgagcagagacccacgaaaacgaaccgggccccctgactgtcggcgatgaactgctgagccagtttaaagtcgcaaacttctcaaatatggacgaggatgatattgagctggaacctgaacgcaactcgaagaattgggaagaaatcataccggaagatcagcgccgtcggctggaggaggaggaacggcagaaggaactggaggaaatctatatgttgccccgcatgaggaattgcgcgaagcagatttcatttaatggctccgagggacgccgcagtcgcagtcgacgttactctggatcagatagcgattccataagtgagggcaaaaggcccaagaagcgcggccggcctaggactattccccgcgagaacatcaagggcttctccgacgccgaaatccggaggttcatcaagagctataaaaaatttggcggccctctggagagattggacgctattgccagagacgccgagctagtcgataagtcagagaccgatctacgacgtcttggtgaactggtccacaacggctgcattaaagctcttaaggactcgtcatccgggaccgagagaaccgggggccggttggggaaagtaaagggacccactttccggatttcgggggttcaggtcaacgccaagctggtgatttctcacgaggaggagcttattccactgcacaaatcaatccctagcgatccagaagagcggaagcagtatacaattccgtgtcacactaaagccgcccattttgacatcgactgggggaaggaggatgacagtaacctgctgatcggaatttacgaatacggatatggttcatgggagatgatcaagatggaccccgacctgagccttacgcataaaatcctgcctgatgatcccgacaagaagccacaggctaagcagttgcagacacgagcagactacctgattaagttgctgagcagagacctagctaaaaaggaggctctgtcgggcgcaggttcttctaaacgacggaaggcaagggctaagaagaacaaagccatgaagagcattaaggtaaaagaagaaatcaagagcgactctagcccattgccaagcgagaaaagtgacgaggatgatgataaactgtccgagtctaagagcgatggaagagagcgaagcaagaagtcatcagtttccgatgctcccgttcacattaccgcgagcggcgagccagttccaattagcgaagaatctgaagagctcgatcaaaagacgttctccatctgcaaggagcgaatgcggcctgtgaaagcagcattgaagcaactggataggccagagaagggactgagtgagcgagagcagctcgaacacacaagacagtgtcttattaagatcggtgatcacatcactgaatgtctgaaggaatacacaaacccagaacagattaagcaatggaggaagaacctatggatctttgtaagcaagtttacggagtttgatgctcggaaattgcacaagctgtataagcacgctatcaagaagcgacaggagagccagcagaacagcgatcagaacagtaatctgaatccccatgtgataagaaatccagacgtcgaacgtctgaaggagaacactaatcacgacgactcttccagagacagctactcttcagatagacatttaacacagtaccacgaccaccacaaagataggcatcagggggactcctacaagaagagcgactctagaaagcggccatattcctctttttctaacgggaaggaccaccgcgactgggaccattataagcaagactctcggtattattcagacagggagaaacataggaaactggatgaccatagaagcagggatcatcggagtaatctggagggctcacttaaggacaggagtcactctgatcaccgctcccattcagaccatcgcttgcatagtgatcatagatcctcttcagagtatactcaccacaagtcttctagagactatagataccactctgattggcagatggaccatagggcgtcatcctcaggcccacgctccccccttgaccagcgcagcccatacgggtcccgaagccctttcgagcattccgtcgagcacaagtccacacccgaacatacatggagcagccgaaagacctag

SEQ ID NO: 112114 - DNA, 903 bp, synthetic construct
  misc_feature 1..903: note = Description of Artificial Sequence: Synthetic coding sequence
  source 1..903: mol_type = other DNA
atgtttagcttcaccggagtgctagtgatttatgaggtcttaaaaaaatgtattggcaaactcatcagcctgcgtgtatgcagcatcgaggggtgcgtttgtgtgtacgtgttcgttcccggaggtaaggaattccatgagaagctgaacatctttcatcaaactaatctaatttgtctcttcctgaattcttcgcggaatctctggattttcgtatctaagttcacggaattcgatgcacggaaactgcacaagctgtataagcatgccatcaaaaagagacaggaatctcaacagaatagcgatcagaactcaaatctgaacccacacgtgattcggaatcccgatgtcgagcgtttgaaggagaacacgaaccacgacgatagctcaagagacagctattcaagcgacagacatcttacccagtatcatgaccatcataaggacaggcaccagggagacagctacaaaaaatccgattcacgcaaaagaccatattcctccttttccaacgggaaggaccaccgggactgggaccattacaagcaggactcacgatattactcagacagggagaaacatcggaaactcgacgaccatcggtcccgggatcatcggtccaatctcgaaggatccctgaaggatcggtcccacagcgaccaccgcagtcattccgatcaccgcttacactccgatcatcgcagcagctccgagtacactcatcataagtccagcagggattatcgataccacagcgactggcagatggaccaccgcgcgtctagcagcgggcccagatcccctcttgaccaaaggtcaccctacggatccaggtcaccgtttgaacattctgtcgaacacaagtccacacccgaacacacttggagctcccggaagacctag

SEQ ID NO: 112115 - DNA, 624 bp, synthetic construct
  misc_feature 1..624: note = Description of Artificial Sequence: Synthetic coding sequence
  source 1..624: mol_type = other DNA
atgaacggccactcagacgaagagtcagtgcgtaactctagcggagaatccagccaatccgatgacgactctggttctgcatctggaagcgggtccggttcaagtagtggatccagcagcgacggctcctcttcacagagtggttccagcgactccgactcaggctctgaatcaggctcacaatcagaatccgagtctgacacatctcgcgagaacaaggtccaggctaagccccctaaagtcgacggagccgaattttggaaaagctcaccgtccatcttagcagttcaacgcagtgctatcctgaaaaagcaacagcagcagcaacaacagcagcagcaccaagctagtagtaattcgggatccgaggaagacagcagcagctcagaagattcagatgactcctcatccgaagtgaagaggaaaaagcataaggacgaggactggcagatgtcgggctcgggcagcccttcccagagcggctcggactccgaaagcgaggaggaacgggagaagtcttcctgcgatgaaaccgaatccgactacgagcctaaaaacaaagtgaagtctagaaaaccacagaacagaagcaaaagtaagaatgagaagaagaaaaagaagtag

SEQ ID NO: 112116 - DNA, 660 bp, synthetic construct
  misc_feature 1..660: note = Description of Artificial Sequence: Synthetic coding sequence
  source 1..660: mol_type = other DNA
gtgggcgctgaccgagacagtcccacactcctgcctgccggagggtcaaactggctcgcccagcgatttcactgccagaacggatgcatcctcggggatgaaatgggcctcggaaagacctgccagacaatcgctctatttatctatctcgccgggcggctgaatgacgaggggccgtttctgattctatgcccacttagcgtcgagcagttagagcgacgtaacgccgagatttgttctaggtccttcctatgcaatatatgcggcgataaagaggagagagcctgtttgcagcaggatttaaaacaggaatctagattccacgtgctgcttaccacatatgagatctgtctcaaggacgcatcatttctcaagagctttccctggtctgtattggtggtcgacgaggcacacaggctgaagaatcaaagctctctcttacacaaaaccctgtccgagttctcagttgtgttcagccttttacttaccggtacccctattcagaactctctgcaggagctgtatagtttgctgtcatttgtcgaacccgatctgttttctaaggaggaatgggagatcttgtttaacgccacccggatactgcgaaagaatctttcgcagcaagtgaattgcaccaatagttgttcccacttctgctag

SEQ ID NO: 112117 - DNA, 1851 bp, synthetic construct
  misc_feature 1..1851: note = Description of Artificial Sequence: Synthetic coding sequence
  source 1..1851: mol_type = other DNA
atgtctgccctgcagaaaaaatactataaagcgatcctcatgaaggatctggatgcgtttgaaaacgagactgcaaaaaaggtgaagctgcagaatatcctgagccagttgaggaaatgtgtagatcatccatacctgtttgacggggttgaacctgagcctttcgaggtgggagatcacttgaccgaagcgtcaggcaaactgcacctgctagataaactccttgcattcctctatagtggcggacacagggtacttcttttctctcagatgacgcagatgctagacatcctacaggactacatggactatagaggatattcctatgagagagtggacggctctgttaggggggaagagcgccacctcgccattaagaattttggccagcagcccattttcgtcttccttctgagcactagagctggcggcgttggtatgaatcttaccgcggctgacactgtgatattcgtggattccgattttaaccctcagaacgacctgcaggctgctgcaagagcccatcgaatcgggcagaataaatcggtgaaggttattcggttgatcgggcgcgacactgtggaggaaattgtttacagaaaggccgcttccaagcttcaactcaccaatatgattattgaagggggccattttacactcggggctcagaagcctgcggctgatgcagatctgcagctgtcagaaatactaaaattcggtctggacaaactgctggcttcggagggatccacaatggacgagatagacctggagtccatcctgggcgagacaaaggatggtcagtgggtgagtgatgccctgccagctgcggaggggggatcccgcgatcaggaagaaggaaagaaccacatgtacctgtttgagggtaaggactactccaaggaaccctcaaaagaggacagaaaatcctttgaacaactggtgaacctccagaagactttattagagaaagcgtctcaggaaggaaggagcctgcgcaataaagggtctgtacttattcccggacttgtcgaggggagcactaaacgcaagcgagttctgagtcccgaggagctggaggatcggcagaagaagcgccaggaagccgcagcaaaaaggcgacggcttattgaagagaaaaagcggcaaaaagaagaggccgaacacaaaaaaaaaatggcttggtgggagagtaacaactaccagagtttctgcttacctagcgaggaaagcgagcctgaagacttagagaacggcgaagaaagttccgctgagctggattaccaggatcctgacgcaaccagcctaaagtacgtgagcggtgacgttactcaccctcaagcaggtgctgaagatgccctgattgttcattgtgttgacgacagtggccactggggccgagggggactctttaccgcactcgaaaaacgatctgccgagcccaggaagatttacgagttagctggcaagatgaaggatctctccctcggaggagtgctgctcttccccgtggacgacaaggagagccggaacaaagggcaagacctcctcgccctcattgtcgctcagcaccgcgatcgatccaacgttctgagcggtataaagatggccgccctggaagagggactgaaaaagatcttcctcgcagccaagaaaaagaaagccagtgtgcatctaccccgaattgggcatgcaactaagggctttaattggtacggaactgaaaggcttattcgcaaacacttggcagctcgaggtatacccacatacatttactacttcccgaggagtaagagcgcagtgctgcacgcccagagtagcagttcctcttcgcggcaactggtaccgtag

SEQ ID NO: 112118 - DNA, 2694 bp, synthetic construct
  misc_feature 1..2694: note = Description of Artificial Sequence: Synthetic coding sequence
  source 1..2694: mol_type = other DNA
atggagagggccggcgctaccagccggggaggccaggccccagggtttctgctgcggctccacacggaaggtcgggccgaagctgcaagggtgcaggaacaggatctgcgacagtgggggctcacaggtatccacctccggtcttaccagctggaaggcgtcaactggcttgctcaaaggttccattgccagaacggatgtatcctgggggacgagatgggattaggaaagacatgtcagactatcgccctgtttatctatctggccggtcgtctgaacgatgaggggcctttccttatactatgtcccttgagcgttcttagcaactggaaggaggagatgcagagatttgcgccagggctctcgtgcgttacctatgctggcgacaaggaagagagggcctgtctgcagcaggacctgaagcaagaaagtcgtttccatgtcctgctgacaacatacgagatttgcctcaaagatgcgagcttcctgaaaagtttcccgtggagcgtcctcgtcgtggatgaggctcacaggcttaaaaaccagagctccctgctgcataagacattgagtgagttctcagtcgtgttcagccttttgctgaccggcacacctatccagaattccctccaagagttatattccttactatcctttgtggagcctgacctatttagcaaagaggaagtgggggattttatccagaggtatcaggatatagaaaaagagtcagaatctgcgagtgagcttcacaaacttctgcagccctttctgttgagaagagtgaaggccgaagtggctacggagctgccgaagaagacggaagttgtgatttaccacgggatgtctgccttgcagaaaaagtactataaggctatcctgatgaaggacttagatgcttttgagaatgagacagcgaaaaaagtcaagcttcagaatatcctgtcccagcttagaaagtgcgtggatcatccatatcttttcgacggggtggagcccgagccattcgaggtgggagatcatctgaccgaggcttccggaaagctccacctgctggataaactcctggctttcctatacagcggaggacatagagttttgttgttctcacaaatgacccagatgctggacattcttcaggactacatggactacaggggctattcttatgaacgcgtggacggatcggtgaggggcgaggaaaggcaccttgcaatcaaaaatttcggacagcagccaatttttgtgtttctgttgtcgacgcgcgctggcggggttggtatgaacctgacggcagctgacaccgtcattttcgttgattcggactttaacccgcagaatgacctgcaggcagccgctagagcccacaggatcggccagaacaaaagtgtcaaagtgatacgactgatcgggagggacactgtagaagagatcgtgtaccgaaaagctgcatctaaactgcaactgactaatatgatcatagagggaggccattttaccctgggagcccagaaaccggcagccgacgctgatctgcagctgtctgagattctgaaattcgggctggacaaactcctcgcaagtgaaggcagcaccatggacgagattgatctcgagagcatcctcggagagactaaggacgggcagtgggtcagtgatgcacttcctgcggcagagggggggtcacgagatcaggaggaaggcaagaatcacatgtacttattcgaggggaaggattacagtaaggagccctcaaaggaggataggaagagcttcgagcagctcgtgaatctgcagaaaactttgttggaaaaggcctctcaggaaggacgctcattgaggaacaaaggctccgttctgatacccggcctagtggaggggtcaacaaagagaaagagggtcttatctcccgaagaactcgaagacagacagaaaaagagacaggaagcagctgcgaaaaggaggagactgatcgaagagaagaaacgccagaaggaagaagcagagcacaagaagaaaatggcttggtgggaaagcaataactaccagtctttctgcttaccaagcgaagagagcgaaccagaggacctggagaatggagaggagtcctcggctgagctggactaccaggaccccgacgccactagcctcaagtacgtgtcaggcgacgtgacacaccctcaggcaggagccgaagacgctcttatagtgcattgcgtcgacgactctggacattggggccgaggggggctttttaccgccctcgagaaacgctctgctgagccgagaaaaatctacgaactcgccggcaaaatgaaggatctgagcttgggcggcgtcctcttattccccgtagatgacaaagagagccgcaataagggccaggatctcttggcccttatcgttgcacagcatagggacagaagcaacgtgctgagcggcattaaaatggcagccctcgaagagggcctaaaaaaaatcttcctggccgcaaaaaagaagaaagcgtccgtccatttaccgagaatcgggcacgcaacaaagggcttcaactggtacggtaccgagaggctcatccggaagcatctggccgcaagaggcattcccacctatatctactactttccccggagcaaatcagctgtgttacacgcccagtccagcagttcttcctctcgacagctggtcccttag

SEQ ID NO: 112119 - DNA, 2082 bp, synthetic construct
  misc_feature 1..2082: note = Description of Artificial Sequence: Synthetic coding sequence
  source 1..2082: mol_type = other DNA
atggaaagagctggagcaacatcaagagggggccaggccccgggattcctgctcagactgcacaccgagggaagagccgaggccgcccgcgtgcaggaacaggacctgagacagtgggggctcaccgccagtgagctgcataagctgctccagccttttctgctgcggagggttaaagctgaggtagccaccgagctcccaaagaagaccgaagtggtgatctatcatgggatgtccgcacttcaaaagaagtactataaggcaattcttatgaaggacctggatgcgtttgaaaacgaaaccgcaaaaaaggtgaagctacaaaacatactgagtcagctccggaagtgcgtcgatcatccttatctcttcgacggagtggagccggagccttttgaggtcggggaccatctgaccgaggcctctggcaagcttcatctcttggacaaactgttggcttttctgtattctggcggccaccgcgtgttactcttctcacagatgactcagatgctagacatcctgcaggactacatggactaccggggttattcctatgaacgggtcgatggctctgtgagaggagaggaacggcatctagcaataaagaattttggacagcagcccatcttcgtgtttctgctctccaccagagccggaggggtaggaatgaacctaactgccgcagacactgtgatatttgtggattccgactttaaccctcagaatgacctccaagctgcagccagagctcacaggattggacagaacaagagcgtgaaagtgattcgacttatcggaagggacacggtggaagagatcgtgtataggaaggctgcctcgaaactgcagctcacaaatatgatcatcgaaggagggcactttacactcggggcgcagaaaccagctgccgacgccgatctgcagctgtctgaaattttgaaattcggtctcgacaagctgcttgcttcagagggaagtaccatggacgagatagatctcgagagcatactcggcgagactaaagatgggcagtgggtatctgacgctctcccagctgctgagggcggaagtcgcgatcaagaggagggcaaaaaccacatgtatctgttcgaaggcaaagattactctaaagaacccagcaaagaagatcgtaagtcctttgagcagctagttaacttgcagaaaactctcttggaaaaggctagccaggaaggcaggagcctgaggaataaagggagtgttcttatccctggcctcgtcgaaggtagtaccaagcggaaaagggtgctgtctccggaggaactggaagacagacagaagaaacggcaggaggctgcagccaaacggaggaggctcatcgaagagaaaaagagacaaaaggaggaggcggaacataagaagaaaatggcatggtgggagtcaaataactatcagagcttctgcctgccttccgaagaaagtgagcccgaagatctggaaaacggtgaggaaagttcagcagagctggactatcaggaccccgatgccactagcctgaagtatgtgagtggagatgtgacacacccacaagctggtgcggaagacgcacttatcgtccactgcgtggacgacagtggtcattggggtaggggaggtctatttactgcgctggagaagaggtcagccgaacctcgaaaaatatatgagttggcagggaagatgaaagacctgagtttaggcggagtgctgctgtttcccgtagacgacaaggaatcgcgaaacaaaggtcaagacctgctggccttaattgtcgcccagcatagggacagaagcaatgtgctctccggcataaaaatggccgcattagaggaggggctaaaaaagatatttctggccgccaaaaaaaagaaggcttcagtccacctgccacggattggccatgcaaccaaaggttttaactggtatggcactgagcggctgatacgaaagcacttggccgcccgcggaatccctacttacatctactacttccctagaagcaagtctgccgtgttgcacgcacaatcaagctcctccagctcaaggcaactggtgccctag

SEQ ID NO: 112120 - DNA, 2412 bp, synthetic construct
  misc_feature 1..2412: note = Description of Artificial Sequence: Synthetic coding sequence
  source 1..2412: mol_type = other DNA
atggagcgagccggcgcaacatctaggggaggacaggctcctggctttctgctgcgcctccatacagaaggtcgggctgaagccgccagggtacaagaacaggacctaaggcagtgggggttgacaggcatccacctgagatcatatcagctggaaggtgttaactggctagcacaacgattccattgtcagaacggctgtatactgggagacgaaatgggtcttggcaagacgtgtcaaaccattgccttgttcatttacctggcagggcgccttaatgacgaggggccatttcttatcctctgtcccctaagcgtgttgtccaattggaaagaggaaatgcagagattcgctccgggactgtcttgcgtgacgtatgccggagataaggaggagagagcatgcttacagcaggatctgaaacaagaatcaaggtttcatgtgctgctgaccacgtacgagatttgcctgaaagatgctagctttttgaaaagctttccctggtcagtgttggtagtcgacgaggcccaccgccttaagaaccaatcttcactgctgcacaagaccctgtctgaatttagcgtcgtcttttctcttctgttaaccggcaccccgatccagaactcacttcaggaactctattcactccttagcttcgtcgagcccgacctcttctcaaaggaggaagtgggcgactttatccagagatatcaagatatagaaaaggaaagtgaaagtgcctccgaactacataagctgctccagccgttcctgctgagaagagtgaaagctgaggtagcgacggaacttcccaaaaaaaccgaggtagtgatttatcacggcatgtctgccctgcaaaagaagtactataaggccattttgatgaaagacttagatgcgtttgagaatgaaaccgccaaaaaagtaaaattacagaatattctcagtcagcttcgcaaatgtgtcgatcacccttacctgttcgacggcggtgtgggtatgaatctcactgccgccgacaccgttatctttgttgattctgatttcaaccctcagaatgatctgcaggccgccgctcgagcacatcgcatcgggcaaaacaagagtgtgaaggtcattaggctgatcggccgggataccgtcgaggagatcgtctaccgtaaggccgcctctaaattgcagcttacaaacatgatcattgaaggcggccattttacactcggtgcccagaaacccgccgctgacgctgacctgcagttaagcgaaatcctgaagttcggattggataaactgcttgcctccgagggatctactatggatgaaatcgaccttgaaagcatcctgggagagactaaggatggccaatgggttagcgacgcgcttccagccgccgaaggtggatctcgagaccaggaggaaggtaagaatcacatgtacctgttcgaaggaaaagattacagtaaagagccgtccaaggaggatagaaagtccttcgagcaattggtcaacctccagaagaccttattagaaaaagcctcacaagaggggcgatctctccggaacaaaggctctgtgttgattccaggtctcgtggagggcagcacaaagaggaagcgagtcttgtcccctgaagagctggaagaccgacagaagaagcgccaggaggctgcagccaaaagaagacgccttatagaagagaaaaaacggcagaaggaggaggccgaacacaaaaaaaaaatggcctggtgggagagcaataactatcagtcgttttgtttgccaagcgaagagtccgaaccggaagatctggagaacggcgaggagagcagcgctgagctcgactatcaagatccggacgcgacaagtctgaagtacgtgagcggcgacgtcacacaccctcaggcaggtgccgaggacgctctgattgttcactgtgtggatgactctgggcattgggggagagggggcctgttcactgcactagaaaagaggtccgccgagcccaggaaaatttatgagttggccggcaagatgaaggatcttagcctcggaggagtgctgcttttccctgtggacgacaaggagtccaggaacaaggggcaggacttactggccttaattgtcgcccaacatcgagaccgcagtaacgttctaagcgggatcaaaatggctgcactggaagagggcttaaagaaaatcttccttgcggccaagaaaaagaaagcatcagtgcatctgcccagaattggccacgccaccaagggtttcaactggtatggtactgagcggctcatcagaaaacatctcgccgccaggggcattcctacttatatctactattttccccggtctaagtctgctgtcctccacgctcagtcaagctcttctagttcacggcagctcgtgccttag

SEQ ID NO: 112121 - DNA, 1305 bp, synthetic construct
  misc_feature 1..1305: note = Description of Artificial Sequence: Synthetic coding sequence
  source 1..1305: mol_type = other DNA
atggcggtttcctgggagatgcgctgggcatgggggcgacctgcaaggttcgcgccaggcctgtcttgcgtcacgtacgcaggggataaggaagaacgggcctgcctgcagcaggatttaaagcaggagtcccggtttcacgtgctactcaccacttatgagatttgccttaaagatgcatcttttttaaagtcatttccttggtccgtgctggtggttgacgaggcccatcgactgaagaatcaatcctcacttctccacaagactctgtccgagtttagtgtggtgttttccctcctgcttacaggaacacctatacagaactctctccaagagctctactcactgctcagctttgttgagcctgacctcttcagtaaagaggaggttggggatttcatccagcgatatcaggacattgaaaaggaatctgagtctgctagtgaacttcacaaactgctgcagccgttccttctcagacgagtgaaggcagaagtcgccactgaattgcccaagaaaaccgaagtcgtgatctaccatggcatgtccgccctccagaagaaatattataaagccatcctgatgaaggatctggacgctttcgagaacgagacggcaaagaaggtgaaactccagaacatattgtcccagttgagaaagtgcgtcgaccacccctacttgttcgacggagtggaacccgaaccattcgaagtcggtgatcacctgacagaagcaagcgggaaactacatctgctggacaagctgctggcctttctgtactccggaggacaccgtgttttgctgttcagccagatgacccagatgctcgacattctccaagattacatggactacaggggctacagctacgaacgagtggatggaagcgtgcgcggcgaagagcggcatctggccattaaaaacttcggacagcagccaatcttcgtgtttcttctctccactcgagctgggggcgttggaatgaatctgacagctgcggacacagtgatcttcgtcgactcagattttaacccacagaacgatctgcaggctgccgcccgtgcccacagaattggccaaaataaaagtgttaaagtcatccgcctgattggtagggacacagttgaggaaatagtataccgcaaagccgctagcaagcttcagcttaccaacatgatcatcgaaggcggccacttcaccctgggcgcgcagaagccagctgctgacgccgaccttcaggtgcggtacagtaacctggtctggattaattgctggcccctgaggggcgccccatggatgaagtag

SEQ ID NO: 112122 - DNA, 5487 bp, synthetic construct
  misc_feature 1..5487: note = Description of Artificial Sequence: Synthetic coding sequence
  source 1..5487: mol_type = other DNA
atgatgcggaacaaggataaatcccaggaggaagacagcagcctgcacagtaacgcttctagtcactcggcttccgaagaagcgtccgggagtgactcaggctcgcagtccgagagtgagcaagggtcggatccgggaagcgggcatggatccgagtctaacagctcttccgagtcgtctgagtcccagtcagagtccgagagcgagagcgctggatcaaaatctcaaccagtgctgcccgaagcaaaggagaaaccggctagtaaaaaggagcgcatcgctgacgtgaagaaaatgtgggaggaataccccgacgtctatggcgtccgtcgctctaaccggtctcgacaagagccgtctcgcttcaacatcaaggaagaggctagctccggctcagagtctggcagtccaaaacgccgaggacagagacagctcaagaagcaggaaaagtggaaacaggagcctagcgaggacgaacaggagcagggcacttccgctgaaagcgagcccgaacagaaaaaagtgaaggctaggagaccggtgcccaggagaaccgtgcctaagcctcgggtgaaaaaacagccaaagacgcagagagggaagaggaaaaagcaggacagcagcgatgaggatgacgacgatgatgaagccccaaaacggcagaccagaagacgcgccgccaaaaatgtttcatataaagaggacgatgacttcgaaaccgactcagatgacctgatcgaaatgacaggagaaggagtggacgaacagcaggacaattcagaaacaattgagaaagtgcttgatagtcgcttggggaagaaaggcgcgactggcgccagtaccactgtgtacgccatagaagcaaatggggatccgagcggcgacttcgataccgagaaagatgaaggggagatccagtatctgatcaagtggaagggctggagttacatccattcaacctgggaatcagaagagagcctgcaacagcagaaagtgaagggtctgaaaaaactggaaaattttaagaagaaggaggacgagattaaacaatggctggggaaagtatcacctgaggacgtggagtactttaactgtcaacaggagctagcaagtgagcttaacaagcaatatcagatcgtggaacgagtgattgcggtgaaaactagcaagtctaccctaggacagacagactttccagcccatagcaggaagccagcaccatcgaatgaaccggagtatctgtgcaaatggatggggctgccatattctgagtgtagttgggaggacgaagccctgatcggaaagaagttccagaattgtattgactcctttcatagtagaaataatagtaagaccatccctacgagggaatgcaaggcgttaaaacagcggccacggtttgtggctctgaagaaacaacctgcctacctgggaggagagaacttggagctacgtgattaccaattagaaggactcaattggctggctcactcgtggtgcaaaaacaattccgttatccttgctgatgagatgggacttggcaagaccatacaaacaatatccttcctatcttacctctttcaccagcaccaattatacggccctttcctgatcgtggtcccactttcgactttgacctcctggcagagggaatttgaaatttgggcacccgagattaatgtggttgtgtatatcggggatttaatgagtcggaacaccattcgcgaatacgagtggattcacagtcagactaagagattaaaatttaatgccctgattacgacctacgagatcctgttgaaggacaaaactgttctgggatcaattaactgggcgttcctcggagttgatgaagcgcatcggctcaagaatgacgatagcctgctttataaaacactgatagacttcaagtcaaaccatagactgctgataactgggacgcctctacagaactccctgaaggaactctggtctctgctccacttcatcatgccagaaaaattcgagttctgggaggacttcgaagaggatcacggaaaaggtcgagagaacggatatcaaagcctccataaggtgttggaaccattcctccttcgtcgggtaaagaaagatgtcgagaaatccctgccggctaaagtcgagcagatccttcgggttgaaatgtccgcactgcagaagcagtactacaagtggatccttacgcggaattataaggccctcgcaaaagggacacggggaagcacaagcgggttcctgaacattgtaatggagttaaaaaagtgttgtaatcattgctatttaataaaacccccagaggagaatgaaagagagaacgggcaggaaatcctgctgtctctgatccggtccagtgggaagcttatcttgctcgataaattactgactcgtctgcgcgagaggggcaatcgggtcttaatcttcagccagatggtaagaatgctggatatccttgcagagtatcttactattaaacattatccttttcagaggttagatggctccatcaagggcgaaatcagaaagcaagccctagaccatttcaatgccgatggcagcgaagacttctgcttcttgctctctactagggccgggggactgggcatcaatctggctagcgccgataccgtggtgatcttcgactccgattggaaccctcagaacgacctgcaggctcaggctcgcgctcataggattgggcagaagaaacaggtgaacatttacaggcttgtgactaaagggaccgtcgaagaagaaataatcgagagggcaaagaaaaagatggtattagaccatctagtgatccagcggatggacactacaggtaggacaatcctggaaaacaattccgggcggagtaacagtaacccattcaacaaagaagagttgactgctatcctgaaattcggcgctgaggacctgttcaaagaattggaaggtgaagaatctgaaccccaggaaatggatatcgatgagatcttaaggttggcagagacccgagagaatgaggtctccacctccgccaccgatgaactcttgagtcagtttaaagtggccaatttcgccaccatggaagacgaggaggaacttgaagagaggccccataaggactgggatgagatcatccccgaggagcagaggaagaaagtcgaggaggaagagcggcagaaggaactggaggaaatttacatgctgcctcggatcaggagctcaacaaagaaggcccaaacgaacgactctgactccgacactgaatcaaaaagacaggcacaacgcagttccgcaagcgagtctgaaaccgaagatagcgacgatgacaaaaaacctaaacggagaggccgccctcggtccgtgcgcaaagacctagtggaggggtttaccgacgctgagatcaggcggttcataaaagcttacaagaaatttggacttccattggaacgcctggagtgtatcgccagagatgcagagcttgtggacaagagtgtcgcggacctgaagcgtctaggtgaattaatccacaattcatgcgtgtccgccatgcaggagtatgaagaacagctcaaagaaaatgctagcgaaggaaaagggcctggcaagcgccgaggacctacaattaagatttcaggcgtacaagtaaacgtaaagagcataatccagcacgaggaggaatttgagatgctacataagtccataccggtggatcccgaggagaaaaaaaagtattgtctgacttgtagagttaaggcggcccacttcgacgtagaatggggagtagaagatgatagccgacttctgcttggcatttatgagcacggctacggtaattgggagcttatcaaaactgatccagaattaaagctgacagacaagattctgccagtggagacagacaagaaacctcagggaaaacaacttcagacgcgcgccgactacttgttaaagttgctgaggaaaggtctggagaagaagggggcggtgaccggaggggaggaagctaagttgaagaaacgcaaaccacgcgtgaagaaagagaataaggtgccccgattgaaggaagaacacggcattgaactctcctccccacgacatagcgataatccaagtgaggagggcgaagtgaaagatgacggcctcgagaagagccccatgaagaaaaagcagaaaaaaaaggagaacaaagagaataaggagaaacagatgtctagcagaaaggataaggagggggacaaggagagaaagaagagcaaggacaagaaggagaaacccaagagtggtgacgctaagagttcctccaaaagcaaacgctcacaaggccccgtccatatcactgcgggcagtgaaccagtgcccatcggtgaggatgaggatgatgacctcgatcaggagactttttcaatctgcaaggaaaggatgaggcctgtgaagaaagccctgaagcagctggataaaccagataaaggcttaaacgttcaagagcagctcgaacacacacgcaattgccttctcaaaatcggggaccgcatcgcagaatgccttaaagcatacagtgatcaggagcacataaaactgtggcggcgcaacctatggattttcgtctccaagtttactgagttcgacgcacggaagctgcacaaactttacaaaatggctcacaagaagaggagtcaggaggaagaggaacagaagaaaaaggacgacgtaacaggtggtaagaagccctttagacccgaggccagcggttctagtcgggatagccttattagtcagtctcatacatcccacaacctgcacccacagaaacctcaccttccggccagccacggtccacagatgcatggtcatccccgagacaactataaccatccgaacaagcggcacttctcgaatgccgacagaggagattggcagagagaacgcaaattcaattacggtggagggaataacaatccaccctggggtagtgaccggcatcaccagtatgagcagcactggtataaagaccaccactatggagatcgccgacacatggacgcacacaggagcggctcctataggccaaacaacatgagtagaaaaagaccatatgatcagtactcgtcagatcgtgaccacagagggcaccgggattactatgatagacatcatcatgattccaaacggaggaggagtgacgagttccggccacagaactaccaccaacaagactttcgcagaatgagtgaccatcgcccagctatgggctaccatggacaaggcccaagcgaccattacagatcctttcatactgataaattgggcgagtacaaacaacctctgcctcctctccaccccgcagtgtcggatccaagatcgccaccctcccagaaatcccctcacgactcaaagtcacctctcgatcatcgcagtcctctggagcggtctctagaacagaagaataacccagactataattggaatgtgcgcaagacctag

SEQ ID NO: 112123 - DNA, 1506 bp, synthetic construct
  misc_feature 1..1506: note = Description of Artificial Sequence: Synthetic coding sequence
  source 1..1506: mol_type = other DNA
atgatgcgcaacaaggataaaagtcaggaagaggactccagcctccatagcaacgctagctcgcattctgcatctgaggaagctagcggcagtgattctggatctcagagcgagtccgaacagggcagcgatccaggctcaggccacggatctgagagcaattcgtcttcagaatccagcgagtctcagagtgagagcgaaagcgaaagcgctggctctaaatcccagcccgtgctcccagaagcgaaggaaaaaccagcatctaagaaggagaggatcgctgacgtcaagaagatgtgggaggagtatccagacgtatatggagtaaggcggtcgaatcggagcagacaagaacctagccgcttcaatatcaaggaagaagcgtcaagcggctcggagtccggctccccaaaaagacggggtcaacggcagttaaaaaagcaggagaaatggaaacaggaacccagcgaagatgagcaggagcaaggcacatctgccgagagtgagccagagcaaaaaaaggtgaaagcacggagacccgtaccgcgccgcactgtacccaaaccccgtgtcaaaaagcagcccaagactcagcgaggcaaaaggaaaaaacaggacagcagtgacgaagacgatgatgacgatgaggcacctaagcgccagacccgacggagggctgccaagaacgtgtcctataaggaagatgacgactttgaaaccgattcggacgatcttattgagatgaccggcgaaggagtcgatgagcagcaggacaactctgaaacgattgaaaaggttctggatagtcgcctgggcaagaaaggcgctacgggcgcatccacaaccgtttacgccatagaagcgaatggagatccttcaggcgactttgatacagaaaaggacgagggggagattcagtatcttataaagtggaagggatggtcatatatacacagcacttgggaaagtgaagagtccttacagcagcagaaggtgaaggggctcaaaaaacttgaaaattttaagaaaaaggaagacgagattaagcagtggcttggtaaggtgtccccagaagacgtggaatacttcaactgccagcaggaacttgcctcggaactaaacaagcagtaccagatcgtcgaacgagtgatagccgtgaagacatcaaagagcacactcgggcagacagacttcccagcacactcaagaaaacctgctcccagcaacgagccagaatacctatgcaaatggatgggcttgccatatagtgaatgtagttgggaagatgaagctctgataggaaagaagtttcagaattgcatcgactccttccactcccgaaataacagtaagaccattcctactcgagagtgcaaggccctgaaacagcgaccgcgtttcgtggccctgaaaaaacagcccgcctaccttgggggagagaacctggaactaagggactatcagctggaaggcctcaactggctcgctcattcctggtgcaaatag

SEQ ID NO: 112124 - DNA, 1545 bp, synthetic construct
  misc_feature 1..1545: note = Description of Artificial Sequence: Synthetic coding sequence
  source 1..1545: mol_type = other DNA
atggcccataagcagagagaggattacttgaatctgagcccctgtgttttcacctggtaccgtaccttctcacagcttgctttcgacggcgagaagctgtctcacagcgcatctgaggaggcaagcggaagtgactcagggagccaaagcgaatcagagcaggggtcggacccgggtagcggtcatggcagcgaaagcaacagctcttctgagagcagcgagtcgcagtccgaaagtgaatctgaatcggcaggtagcaagagccagcctgtgctgcccgaagcaaaggaaaagcctgcctctaaaaaagagcggatcgcggacgtgaaaaagatgtgggaggaataccccgacgtgtacggcgtgcggcggagtaaccgaagccggcaggagccaagcaggtttaacataaaggaggaggcttctagcggctctgaaagcgggtctcccaagcgtaggggccagagacagctgaagaagcaggagaagtggaagcaagaaccctccgaggatgagcaggaacaaggtacatcggcagaatctgaacctgagcagaagaaagttaaggctagacgcccagtcccgcgccgaacagtgcctaagcctagggttaagaaacagcccaagactcagcgggggaagcgtaagaaacaggactcaagcgacgaagacgatgatgacgacgaggcaccgaagaggcaaactaggcgcagggctgcgaagaatgtctcctataaggaagatgacgacttcgagacagacagtgacgacttgatagagatgactggcgagggcgtggacgaacaacaggacaattctgaaaccatcgaaaaagtgttagactcccgactgggtaagaagggcgccaccggggcttccacaaccgtctatgctattgaagccaatggagacccatcaggagattttgacacggagaaggatgaaggggagatacagtatttaatcaaatggaaaggctggtcatatatccactctacatgggagtcagaagaaagtctgcagcaacagaaggtcaaaggcttgaaaaagctggaaaactttaaaaagaaggaagatgagattaaacagtggctgggcaaggtgtcaccagaggacgtggagtacttcaactgtcagcaagagctggcaagtgagctcaacaaacagtatcaaatcgtcgagagggtgatcgctgtaaagacaagcaagagcacgcttggccagacagactttcccgcacacagccgaaaacctgcacccagtaatgaaccggagtatctgtgcaagtggatgggtttgccgtattccgagtgtagttgggaggacgaggctctcatcggcaaaaagttccagaattgtattgattcctttcactcaagaaacaacagtaaaacgatacctacccgagaatgcaaagcattgaagcagcgccctcgatttgtagctcttaagaagcagccagcgtacttgggcggtgagaatctcgaattacgcgattaccagctcgaaggcctaaattggctcgcccacagctggtgcaaatag

SEQ ID NO: 112125 - DNA, 552 bp, synthetic construct
  misc_feature 1..552: note = Description of Artificial Sequence: Synthetic coding sequence
  source 1..552: mol_type = other DNA
atgatgcgaaacaaggacaagtcacaggaagaggatagctccttacacagcaacgcaagcagccactctgcctctgaagaggcctcaggtagtgattccggtagtcagtcagagagcgagcagggttcagatccaggatctggccatggatctgaaagcaattctagctcagaatcctccgagagccagtccgagagcgagtctgaatctgctggtagtaaatcgcaacccgtgctgcctgaagctaaagagaagccagcctcaaagaaagaacgaatcgccgatgtaaagaagatgtgggaggaatacccagatgtctatggcgttcggaggtcaaaccgatcccggcaggagcccagtcggttcaatatcaaggaggaagcctcaagcggatccgaatcagggtcaccaaagaggagggggcagcggcagcttaagaaacaggagaaatggaaacaggaaccatccgaggacgagcaggagcagggaaccagcgccgagtctgagccggagcagaagaaagtgaaggcaagaaggcctgtgccccggtag

SEQ ID NO: 112126 - DNA, 5220 bp, synthetic construct
  misc_feature 1..5220: note = Description of Artificial Sequence: Synthetic coding sequence
  source 1..5220: mol_type = other DNA
atgatgcggaacaaagacaagagtcaggaagaggactcctcattacacagcaatgcttcatcacatagcgcctcagaagaagccagtggatctgatagtggcagccaaagcgaaagcgagcagggatccgaccctgggagtggccatggatcggagtctaatagttcgagtgagtcctcagagagccagtccgaaagcgaatccgaaagtgccggatcaaagtcacaaccagttctcccagaagcgaaagaaaaaccagcatccaaaaaagaaaggattgcagatgtgaagaagatgtgggaagagtaccccgatgtgtatggggtgagacggagtaatcggagtagacaggagccgagtagatttaacataaaagaagaagcatccagtgggtcagaaagtggttcgcctaagcggaggggtcagcgccaattgaaaaaacaggagaaatggaagcaggaaccatctgaggacgaacaagagcaaggcacctccgccgaatcagagccagaacaaaagaaggtgaaggcacggcgacctgtcccccgccgaacggtaccaaagccacgagtgaagaaacagccaaagacgcaacggggaaagcgcaaaaaacaggacagctcagacgaggacgatgacgatgatgaggctccaaaacggcagacgcggagaagagctgccaaaaatgtcagctataaggaggacgacgactttgaaaccgacagcgacgaccttatcgaaatgacaggcgaaggtgtcgacgaacagcaggataattcggaaacgatcgaaaaagtgttagatagcaggttgggcaagaaaggggccactggcgcttctactaccgtgtatgccatcgaggctaacggagatccctctggagacttcgacactgaaaaggacgaaggggagatccagtacctcattaagtggaagggatggagttatattcattctacctgggagagcgaagagagtctccagcaacagaaggtaaaaggattgaaaaaacttgagaactttaaaaagaaggaagacgagatcaagcaatggctgggcaaggtatccccggaagacgtggagtatttcaactgtcagcaggagctggccagcgagttaaacaagcaataccagatagtggagcgtgtcattgccgttaaaacctccaaatccaccctgggccagaccgattttccggcccactcgcgtaagccagccccaagtaacgaacccgagtatctctgcaagtggatggggcttccgtactcggaatgttcttgggaggatgaagcgttaataggcaaaaagtttcagaattgtatcgattctttccatagcaggaacaactccaagaccatcccgacccgagagtgtaaagctctcaaacagcgcccccgtttcgtggcactgaagaaacaacccgcctacctgggcggggaaaatctggaactacgcgactaccagcttgaaggactgaactggctggcacattcgtggtgtaagaacaactcagtgattctggcggacgagatgggactgggtaaaacaattcagaccattagttttctgtcctatctgttccatcagcaccagttgtacggcccttttctgattgtcgtgccacttagcactctgacctcttggcaacgggagttcgagatctgggcccccgaaataaatgtcgttgtttacataggtgatctaatgtctaggaataccataagagaatatgaatggatccacagccagaccaagaggctgaaatttaacgctctgattaccacatacgaaatactgctcaaggacaaaacagtcctcggatccattaattgggcctttctgggcgtcgatgaagcccaccgcctgaagaatgatgactcgctgctgtacaaaactctgatagattttaagtccaaccacaggctgctgatcacgggtactcccctgcaaaatagtctgaaggaactttggtccctcctgcacttcatcatgcccgagaagttcgaattctgggaagatttcgaggaggaccacggcaagggaagagagaacggctaccagtctctccataaagtgctggaaccttttctcttgcggagagtaaagaaagacgtggagaaatctctacctgcaaaagtggaacagatcctgcgagtcgaaatgtccgccctacagaaacagtactataagtggattcttacgaggaattacaaggccctggctaaaggcacacgcggctccacatccggtttcctgaatattgttatggaactgaagaagtgttgcaatcattgctacctgatcaagccgcctgaggaaaatgagcgcgaaaatggccaggagattctactgagcctcattcgttcttccgggaagctgattctgctcgataagctgttaacccgcctgagggaacgtggaaatagggtgctgatctttagccagatggtaagaatgctagacatcttggcagagtacctcactatcaaacactatccgtttcagcggctcgatggcagtatcaaaggcgaaatcagaaagcaggccttagaccacttcaatgcagacgggagtgaagacttttgttttttgctgtccactagggcgggcggtcttggaattaatctggcatctgccgatactgttgtcattttcgactctgattggaatcctcaaaatgaccttcaggcccaagccagggctcacagaattggccagaaaaagcaagtgaacatatatcgcctggtgacaaagggaactgtggaagaagaaataatagaaagagccaagaagaaaatggttctggaccacctcgtgatacagcgcatggacacaaccggaagaactattcttgaaaacaactccggcaggtccaattctaatcccttcaacaaggaagaactgactgctattctcaagttcggtgcggaagatctgtttaaagagctagagggagaggaatccgagcctcaggagatggacatcgatgaaatcctgagactggctgagacacgagaaaatgaggtcagcacctcagcaacagacgagctgctgtctcagtttaaggtggcaaacttcgcaacaatggaggatgaagaagagctggaggagcgtccccacaaggactgggatgaaatcatccctgaggagcagcgtaaaaaggtggaggaagaggagaggcagaaggaacttgaggaaatatacatgctgcccagaattcgaagctctacaaagaaagcacagaccaacgacagcgatagcgataccgaatcaaaacggcaggcccagcgaagctctgcctcagagtcggagaccgaggatagcgatgatgacaagaaaccgaagcgtcggggcagaccacggagcgtccgcaaggatctggtggaaggatttacggacgcagaaatacgacgcttcattaaagcatataaaaagttcgggctccccctcgagagactggaatgcattgcccgggatgccgagctcgtggacaaaagcgtagctgacctcaagagacttggtgagcttattcataactcctgcgtctccgccatgcaggagtacgaggagcagttgaaggaaaacgcctcagaaggcaaggggcccggcaaaaggcgaggacctaccatcaaaatcagtggtgttcaggtgaatgtgaaaagtataatacagcatgaggaggagtttgaaatgttgcacaagtctatccctgtcgatccagaagagaagaagaagtactgcctcacatgccgggtgaaagccgcccacttcgacgtcgaatggggggtcgaggatgactcacgtctcctgcttggcatatatgagcatggatacggaaactgggagctaatcaagaccgacccagaactcaaactgacggacaaaatactgcccgtggaaacggacaaaaaaccccagggcaagcagcttcagactcgagctgactatctcttaaagcttcttagaaaaggactcgagaagaaaggggcagtgaccgggggcgaggaagccaagctcaaaaaaagaaaaccacgtgttaaaaaggagaacaaagtgccacgattgaaagaggagcatggcatagaactgtctagcccacggcatagcgataacccctccgaagaaggtgaagttaaggacgatggcctggaaaagtccccaatgaagaaaaaacaaaaaaaaaaagaaaataaagaaaacaaggagaagcagatgagttcgcgaaaagataaagagggggacaaagagagaaagaagtcaaaagacaaaaaggaaaagccaaagtccggagatgcgaaaagtagtagcaaatctaagcgctcccagggcccagtgcatattactgcaggctctgagcctgtccccatcggagaggatgaagacgacgacctagaccaagaaactttcagcatttgcaaagagaggatgaggcctgtgaagaaagcactgaagcagttggacaagcccgataaaggtctgaatgttcaggaacagctggagcacaccaggaactgcctgctgaaaatcggggaccggattgccgagtgtctgaaagcctattctgaccaggaacacatcaagctgtggaggcggaacttgtggatctttgtcagtaagttcaccgagtttgatgcccggaagctccacaagctgtataagatggcccataagaaacgatcccaggaagaggaggaacagaagaagaaagatgacgttactggaggcaagaagccttttagaccagaagcctccggctccagccgggactcactgattagtcagtcccacactagtcacaatctgcaccctcagaaaccgcacctccccgcttcccatggtccacaaatgcacggccaccctcgggataattacaaccaccccaataagagacattttagcaatgcagaccgcggggactggcaacgcgagaggaaattcaattatgggggtgggaacaataatcctccatggggttctgataggcaccatcaatatgaacagcactggtacaaagatcaccactatggagaccgcagacacatggacgcacacaggtcaggcagctacaggcctaacaacatgtcccgcaagcgaccttatgatcagtattcctccgaccgggatcatcgaggacaccgcgactactatgatagatatgcgaagggatgtgaaacgcccggggcaaatctttgtcaggaactcttcctgggccggaagtag

SEQ ID NO: 112127 - DNA, 6003 bp, synthetic construct
  misc_feature 1..6003: note = Description of Artificial Sequence: Synthetic coding sequence
  source 1..6003: mol_type = other DNA
atgaaggccgcagatactgtgattttgtgggcacgttctaagaatgatcagctgagaatcagtttccctcctggcctctgttggggtgatcggatgcctgataaagatgacattagactcctgccctcggctctgggggttaagaagcggaaacgtgggcccaagaaacagaaggaaaataagcccgggaagcccagaaagaggaagaaaagagacagcgaggaagagttcgggagcgagcgggacgaatacagagagaagtcagaatccggcggttcagagtacggaaccggccctggcagaaagagaaggaggaagcatcgcgagaaaaaggaaaagaagaccaaacgccgcaaaaaaggtgaaggtgacgggggccagaagcaagtggaacaaaaatcttccgcgaccctcctgctgacgtggggactcgaagacgtggagcatgttttctccgaagaagactatcacaccctcaccaattacaaggcttttagtcagttcatgaggccactcatagcaaagaaaaatcctaaaataccaatgagtaaaatgatgacaattcttggcgccaaatggagggagttcagcgccaataatcctttcaagggaagtgctgcggccgtcgccgctgccgccgccgcagcagccgccgcagtggctgagcaggtgtccgcggcagtcagttcggctaccccgatagccccttccggacctccagcccttcctccaccacctgccgccgacatccagccaccccctattaggcgcgcaaagacgaaagaaggaaaggggccgggccacaaacggcgctcaaaatcgcctagggtccccgatggtcgtaagaaactaagaggtaaaaagatggccccacttaagatcaagttagggctcctaggcggcaaacggaagaagggtggttcttatgtgtttcagagtgatgagggtccggaacccgaggcagaagagtccgatctggattcaggatccgttcactcggcaagcggtcgcccggacggtcccgtcaggacaaagaaactcaaaaggggaagaccaggtagaaagaaaaagaaggtgttaggatgccccgctgtagcaggcgaggaggaggttgacgggtatgagacggaccatcaggattactgcgaagtctgtcaacaggggggcgaaatcatcctctgtgacacctgccctagagcatatcatttggtgtgcctggacccagaactggatcgcgccccagaaggcaaatggtcctgccctcactgcgaaaaagaaggggtccagtgggaggccaaggaagaagaagaagagtacgaggaagagggggaggaagagggtgagaaggaagaggaagacgaccacatggaatactgtcgggtttgcaaagatggaggcgagctcctttgctgcgacgcatgtattagctcataccatattcattgtctgaacccacctcttcctgacatacctaacggcgagtggctgtgccctcgttgcacctgcccagtgctgaagggccgtgttcagaagatccttcattggcgatggggggagccacctgtcgcagtgcccgccccccagcaggctgatgggaaccccgacgtgcctcccccacgaccacttcaagggcgaagcgagcgggagttttttgtgaagtgggtcgggttaagttactggcattgtagctgggctaaggagctccagctggagatatttcatcttgttatgtatcgaaattaccagaggaaaaatgacatggacgagccacccccactcgactacggctccggagaagacgatggcaagtcagacaaaagaaaagtaaaagatccgcattacgcagagatggaggaaaaatactaccgattcggcataaagccggaatggatgaccgttcataggatcataaaccattctgttgataagaagggtaattatcattaccttgtgaaatggcgtgatcttccatacgaccagtcaacgtgggaagaagacgaaatgaacattccagagtatgaggaacacaagcagtcttactggcgccatagagagctgattatgggggaggatcccgcccagccaaggaagtataagaagaagaagaaggagctccagggcgatggtccccctagctcaccaaccaatgaccctacggtaaagtacgaaacccagccaaggttcattaccgccaccggcggcaccttacatatgtatcaactggagggtctcaactggcttcggttctcgtgggcccagggtaccgataccatcctggctgacgaaatggggctcggcaaaacaatccagaccatagtattcctttattcactgtacaaggaaggccacactaaaggaccgttcctcgtgtctgctcctctcagcactatcatcaattgggagcgagagtttcagatgtgggccccaaaattctatgtcgtcacatatacaggcgacaaggacagtcgggccataattcgggagaacgagttctctttcgaagacaatgccattaaaggcgggaagaaggcattcaaaatgaaacgtgaggcccaggtgaagttccatgtcctcctcacaagctacgagctcattaccatcgatcaagccgccctcggaagtattcgctgggcttgcctggtcgtggatgaagcccatcgcttgaagaataatcagagtaagttcttcagagtacttaacgggtataaaattgaccacaagcttttgctgaccggaacacctctacagaacaacctggaagaactttttcatctgctcaacttcctaacccctgagcgtttcaacaatctcgaagggtttcttgaggaatttgccgacatctcaaaagaggatcagatcaagaaactccatgatctgctcgggccacacatgctccgccgactgaaggccgacgtgtttaagaacatgcccgctaagacagagttaatcgtgagagttgaactgagcccaatgcagaagaaatactacaagtacatcctgactaggaattttgaggctcttaattcgaggggcggaggcaaccaggtgtcgctgttgaacattatgatggacctaaaaaagtgctgtaatcatccttatttgttcccagtggccgctatggaaagcccaaaactgccttcgggggcctatgagggaggagccctgatcaaaagcagcggaaagctgatgctcctgcagaaaatgcttagaaagctgaaagaacagggccaccgagtcctcatcttctctcagatgaccaagatgctggacttgctggaggattttctggattacgagggttacaaatatgagagaatcgatggcggcattactggggcccttcgacaggaagccatagataggttcaacgcacctggagcacaacagttttgcttcctgctgtctaccagggccggtggactggggatcaacctggcaactgctgacacggtgataatcttcgactcagactggaatccccacaatgatattcaagcattctcgcgggctcacaggataggacaggccaacaaggtgatgatctacagattcgtcacccgcgccagtgtagaagaaaggataacccaagtcgctaagaggaaaatgatgctcacacatttggtggttagaccaggtcttggctccaaagccgggtccatgagcaaacaggagttggatgacattttgaaattcgggaccgaagagttgttcaaagacgaaaatgaaggagaaaacaaggaagaggacagctccgtcattcattacgacaacgaagcgatcgcgagactcctcgatagaaaccaggacgccactgaagacaccgacgtccagaacatgaacgaatatttgtctagcttcaaggtagcccagtatgttgtccgcgaagaggacaaaattgaagagatagagcgagaaatcataaagcaggaagaaaacgtcgatccggactattgggagaaactgctacggcaccactatgaacagcaacaggaagacttagctaggaacctgggcaaagggaagagagtccggaagcaggtgaattacaacgatgctgctcaggaggaccaggataatcaaagcgagtacagtgttggcagtgaggaggaagacgaagattttgacgagcggcctgaggggcggcggcagtctaagagacagctcaggaacgaaaaggataagcccttaccccctctgctcgcccgggtcgggggcaatatcgaggtcctgggcttcaacacgcgccagagaaaggcctttctgaatgctgtgatgagatgggggatgccccctcaggatgctttcacgacccagtggctcgtgagagacctgagaggcaaaacagagaaagagttcaaagcgtacgtcagccttttcatgcggcacctttgtgagccaggagccgatggttccgagactttcgcggacggggttccgcgtgaagggctgagtcggcagcaggtactaacccgaataggtgtgatgagcttagtgaaaaagaaggtccaggaatttgagcatataaatggcagatggtctatgcctgagttgatgccggaccctagtgcggattctaagcgctcttcccgagcttccagcccgactaagacttcacctaccacaccagaagctagcgccaccaatagcccctgcacttctaagccagccacgccagcgccttcggagaagggtgaaggcattaggacaccgcttgagaaggaagaagccgagaatcaagaggaaaaaccagagaaaaactcccgtatcggagaaaagatggaaacagaggccgacgcaccttcacccgccccttcattgggagagcgccttgagcctaggaaaatccctctggaggacgaagtaccaggcgttccgggggaaatggagcccgagcccggatatcgcggcgaccgagaaaaaagtgcaacagaatctacacctggcgagagaggagaggagaagcccctagacggtcaggagcatcgggaacgccccgagggggagaccggcgacctgggaaaaagggaggacgttaaaggcgacagggaactccgacccgggccaagggatgagccccgcagcaatggcaggcgggaggaaaagacggagaagcctaggtttatgttcaatatagcggatgggggcttcacagagctgcacactttgtggcagaatgaggagcgggctgcgatcagcagtggtaaactgaacgaaatttggcataggcgccacgattactggctcctggccggtatcgtgctccacggttatgctcgatggcaggatatccagaacgacgctcaatttgccatcattaatgaaccattcaagactgaggctaacaaaggtaactttctggaaatgaaaaacaagtttctagcgaggcgatttaagctcctggaacaggccctggtaatcgaagaacagctgagaagggctgcctatctcaatctctcgcaggaacctgcccatcctgctatggccctgcatgccagatttgctgaagctgagtgtctcgcagaatcccaccagcacttaagtaaagaatctctcgcaggcaataaaccagcaaatgctgtgcttcataaggtcctgaaccaattagaagagctcctgtctgatatgaaagctgacgtgaccagactcccagccacgttgtccagaattcctccgatcgccgctaggctgcagatgtctgagagatctatactctcgcgcctcgcctcaaagggcaccgagccccacccgacccccgcatatccccccggcccatatgccacgccccctggttatggtgcagcattctcggccgccccagttggggcgctcgccgccgcaggggccaattatagccagatgcccgcggggagttttataacggccgccacaaatggtcccccagtgctcgtgaaaaaggaaaaagaaatggtgggggctctggtgtccgatggactggacagaaaggagccgcgggcaggcgaagtgatctgcatcgacgattag

SEQ ID NO: 112128 - DNA, 5901 bp, synthetic construct
  misc_feature 1..5901: note = Description of Artificial Sequence: Synthetic coding sequence
  source 1..5901: mol_type = other DNA
atgaaggcggccgacacggtcattctttgggcgcgtagcaagaacgaccagttgcgaataagctttccaccagggctgtgttggggcgatagaatgcctgataaagacgatatacgtctgttaccgtccgcactaggcgttaagaagcgcaagcggggcccgaaaaaacaaaaagaaaacaaacccggaaagcccagaaaaagaaagaaacgcgattcagaggaggagtttggttccgagagagacgaataccgagaaaaatcagagagtggcggttctgagtacgggacaggaccagggcgcaagcgccgccggaagcaccgtgagaaaaaggagaaaaagaccaagaggcgtaagaagggggagggggacggcggccaaaagcaggtggagcagaagtctagcgccactctgctgttaacatggggtttagaagatgtggaacacgttttctcggaagaggattaccacacactcaccaattacaaggccttctcccagttcatgaggcctttgatcgctaaaaagaacccaaaaatacctatgtctaagatgatgactattctcggcgccaaatggagggagttctctgctaataacccctttaagggctctgcagcagccgtggccgcagcagcggcggccgcagccgccgctgtggccgagcaagttagcgccgccgtgagttctgctacacctattgctcctagcggtcctcctgcactccctccaccccctgctgccgatattcagccccctcccatccggcgagctaagaccaaggagggtaagggtccaggacataagagacggtctaagtcccccagggtccctgacggcaggaagaagttgagaggaaaaaagatggcaccattgaagatcaagctcggcttactgggcgggaaaagaaagaagggcggctcctatgtgtttcagagcgatgagggccctgaacccgaggcagaagagtcagatcttgacagtggctctgtccattctgcctcagggcgccctgacggtccggtgcggactaaaaagctgaagcgagggagacctggcaggaagaaaaaaaaggttctggggtgccctgccgtggctggagaagaggaagtcgatggatatgagaccgatcaccaggattattgcgaggtatgccagcaggggggagagatcatactgtgcgatacatgtcctcgagcataccaccttgtatgcctggatcctgagctggatcgcgcaccagagggcaaatggtcatgcccacactgcgagaaggaaggagtgcagtgggaggctaaggaagaggaggaagaatacgaggaggagggcgaagaggaaggcgagaaggaagaggaggacgaccacatggagtattgtcgcgtgtgcaaggacggcggggagttgctttgttgcgacgcctgcattagctcctatcacatacattgcttgaaccctccactacctgatattccgaatggcgaatggctgtgcccgaggtgtacatgccctgtgttgaagggtcgagtacaaaagattctccactggcgctggggagaaccccccgtggctgtgcccgcccctcagcaggctgacggcaaccccgatgtgccgcctccaaggcccctgcagggaaggtcggaacgggaattcttcgttaagtgggttggtctgtcctactggcactgttcttgggccaaagagctgcaactcgagatcttccatcttgtaatgtataggaattaccagaggaagaacgatatggacgagccgcctccacttgattacggatctggcgaagacgatggaaaatcggataagaggaaagttaaggaccctcattatgctgagatggaagagaaatactaccggttcggcattaaaccagaatggatgactgtacatagaataatcaatcactctgtggacaaaaagggtaactatcactaccttgtgaagtggcgcgacctgccctatgaccagagcacctgggaagaggatgagatgaacattcccgagtatgaggaacacaaacagtcttattggagacatcgggagctaattatgggcgaagatccggcgcagcctcgaaagtataaaaagaaaaagaaagagttacagggggatggaccccctagtagtcctactaatgaccctacagttaaatatgagacccagccaagatttatcactgcaacagggggtactttgcacatgtaccagctcgagggactgaactggcttcgcttctcctgggcacaaggcaccgataccatactcgctgacgagatggggctgggtaagacaattcagactatcgtgttcctgtactcattgtacaaggaaggacacactaaaggcccctttctcgttagcgccccattgtccaccatcatcaactgggaacgggagtttcaaatgtgggctccgaagttttacgtcgtgacatataccggcgataaagatagcagggctatcatccgtgaaaatgagttctcttttgaggacaatgccattaaagggggtaagaaagccttcaaaatgaagagagaggcccaggttaaattccatgttcttctaacctcgtacgagttaatcactatcgatcaagcagctctgggatcaattagatgggcgtgtcttgttgtggatgaggctcacaggctaaagaacaatcagtccaagttttttcgagtgttaaatggatacaagatcgaccacaagctactactgaccgggaccccattacagaacaacctggaagagctgtttcatctcttaaactttctcacacccgagagatttaataacctggaaggattcctggaagagttcgctgacataagcaaggaggaccaaattaagaagctgcacgacctcttggggccccacatgttgagacggctgaaggcagatgtgtttaaaaacatgcctgcaaagaccgagcttattgttcgagtggagcttagtcccatgcagaaaaagtactacaagtacattctaacgagaaatttcgaagctctgaattcacggggcgggggcaatcaagtaagcttgcttaacataatgatggacctcaagaaatgttgtaatcacccgtatctctttcctgtggctgccatggagagccctaaattgccaagtggggcctatgaagggggagctctcatcaaaagtagcgggaagttaatgctcttacagaagatgcttcgcaaattgaaggagcagggacatagagtactgatcttctctcagatgacaaaaatgctggacctgcttgaagatttcctagattacgaaggatacaagtacgagcgcatcgatggtggtatcaccggcgctctgcggcaagaggcaatcgacaggtttaatgccccgggggcacagcagttctgctttcttctttcaactcgggccggaggcctcggaataaacctcgcaaccgctgacacggtcatcatcttcgacagcgactggaatccccataatgacatccaagcttttagtagggcccacagaatcggccaggcaaacaaagtcatgatttatcgctttgttacccgcgccagtgttgaagaacgcataacccaggtcgcgaagcgaaagatgatgctcactcatcttgtggtgaggccaggtctagggagcaaagcgggctctatgagcaagcaagagcttgatgatatactgaaattcggcacagaagaattgttcaaggacgaaaatgaaggtgagaataaagaagaggacagctcagtcatccactacgacaacgaagccatcgccaggcttctggacagaaatcaagatgcaaccgaggatacagacgtgcagaatatgaatgaatatctcagctcattcaaagtggctcaatacgtggtacgcgaggaagataagattgaggaaatcgaaagagagatcattaaacaggaagaaaacgtagatcctgattattgggaaaagctcctgagacatcactatgagcagcagcaggaagacctggcccgtaatcttggaaagggaaagcgggtaagaaagcaagtcaactacaacgatgccgctcaggaagaccaagataatcagagtgagtacagcgtcggtagcgaagaggaggacgaggattttgatgagagaccggaaggccgtcgccagagtaagcgccagctgaggaacgaaaaggacaaaccactgccaccactcctagccagagtaggcggaaacattgaggtgctcggtttcaatactagacagcgtaaagctttcctaaatgccgtgatgcgttggggaatgccacctcaagatgcatttaccacacagtggcttgtccgcgacctgcgtgggaaaaccgagaaggaattcaaggcttacgtgtcccttttcatgaggcatctttgtgagcccggagccgatggcagtgaaactttcgcagatggagtaccacgcgaaggactttcgcggcagcaagtgttgacacgtattggtgtcatgtccctcgtaaaaaagaaagttcaggagttcgaacacattaatggtcggtggagcatgcccgagctgatgcccgatccgtccgccgatagtaaaagaagttcccgtgcctccagtcccacaaaaacaagccccactacccccgaagcctctgcgaccaactctccatgtacatccaagccagctaccccggcaccgtccgaaaagggtgaaggaattagaaccccactggagaaggaggaagccgaaaatcaggaagagaagccagagaagaattccagaattggagagaaaatggaaacagaagcagatgcaccatccccagcccctagcctgggtgagcgtctcgagcctaggaaaatccccttggaggacgaggtgccaggcgtcccaggagaaatggagccggagccgggctacagaggcgatagagaaaagtctgaagacgtgaaaggagaccgagagctcaggcctgggccccgggatgagcctcgatctaacggccgcagggaagagaagaccgagaagccacggttcatgtttaatatcgccgacggtggttttaccgaactgcacacgctttggcagaacgaggagcgggcggcgatcagtagtggaaagttaaacgagatttggcataggcgccacgattattggctgctggccggtatcgtgctgcacggttatgcgaggtggcaggatatccagaatgacgcccaatttgcaattattaatgagcccttcaaaaccgaggccaacaagggaaacttcctcgaaatgaagaataagtttctggctcgccggttcaagctgctcgaacaggcattagtcattgaagagcagctccgcagagccgcgtacctgaacttgtcacaggagcctgcccatcccgccatggcattgcatgctcgctttgccgaggcggaatgtctcgctgagagccaccagcacttaagtaaagagagcctcgcaggaaataagccagctaacgcagtgctgcataaggtgctgaatcagctggaggagctcttatcagatatgaaagcagatgtgaccagattgcccgccactctttctcgcatacccccaatcgccgctaggttgcagatgagtgagcgctcgatcctgtctagacttgcgtccaagggcactgagcctcatccgactcccgcttacccacctggcccatacgccacaccgccaggttatggtgctgcttttagtgcagcccctgttggtgctctcgcggccgcgggtgccaattatagtcagatgcccgccggcagtttcattacagctgcgaccaacggtccacccgttctggtgaagaaggagaaggagatggtcggggcgctggtgtcagacggacttgatcgcaaggagccacgcgctggcgaagtgatctgtattgatgactag

SEQ ID NO: 112129 - DNA, 6180 bp, synthetic construct
  misc_feature 1..6180: note = Description of Artificial Sequence: Synthetic coding sequence
  source 1..6180: mol_type = other DNA
atggcatctcctctgcgggacgaggaagaggaggaagaggagatggtggtgtccgaggaagaagaggaggaggaggaggaaggtgatgaggaggaggaagaggaggttgaagccgcagatgaggacgacgaagaggatgacgacgaaggagtgctcggtagaggcccagggcacgatcggggtagagacagacatagcccgcctggctgccacctcttccccccacccccaccacctccgccccccctgcctccccctccacctcctccaccgccggataaggacgatatcagactcctgcccagcgcacttggcgtgaagaaaagaaagcgaggccctaagaagcagaaagaaaacaagccgggtaagccaagaaagcgtaagaagcgcgattccgaagaagaattcggcagcgagagagacgaatatcgagaaaagagtgagtctggaggcagtgagtacggcaccgggcctggacggaaacgaaggagaaagcaccgcgagaaaaaagagaagaaaaccaagcgccgtaagaagggcgagggcgacggagggcagaaacaggttgaacagaagtcatccgccacactactgctcacttggggtctcgaggatgtggagcatgttttttcggaggaagattaccatacactgactaattacaaagcattctctcaatttatgcgcccccttatcgccaaaaaaaacccgaaaattcctatgtcaaagatgatgaccattcttggagctaagtggcgggaattctcagccaacaatccctttaaagggtccgccgctgcagttgcagccgcagcagccgcagctgctgcagctgtcgccgaacaggtcagcgctgccgtgagtagtgctaccccaattgctccatctgggcctcccgctctccccccgcctcctgccgcggacattcagcctccccccatcagaagagccaagaccaaggagggtaagggacctgggcataaacggagaagtaaaagtccaagagtcccggatggtagaaaaaagctaagaggcaagaaaatggcgcccctgaagatcaagcttggtctgctgggtggcaaacggaagaaagggggcagttacgtgtttcagagtgacgagggccctgaaccagaggccgaggaaagtgatctcgactccggttctgtgcactccgcctcgggaaggccagacggtccagtgcggaccaaaaaactaaaaagaggacgccctggaagaaaaaaaaagaaagtcctgggctgcccggcagtcgcgggggaagaggaggtagatggttacgagacagaccaccaggactactgcgaggtttgccagcaaggaggggagataattctgtgcgatacctgtccccgagcctaccacttggtctgcctggatccagagctcgatcgggcgcccgagggcaagtggtcttgtccacactgcgagaaagaaggtgttcaatgggaggctaaggaggaagaggaagaatacgaggaagagggcgaagaagaaggagaaaaagaggaagaggatgaccatatggaatattgtagagtgtgcaaggacggaggcgaactgctgtgctgcgatgcatgtatcagctcttatcacattcactgtctgaatccgcccctgcccgacatccccaacggagagtggctgtgtccacgttgcacatgccccgtgctcaagggccgggtccagaagattcttcattggcggtggggtgaacctccagtcgcggtccctgctccacagcaagcggatggcaatcctgacgtccctcctccaaggccattgcaaggtcgcagcgagcgcgagttcttcgtcaagtgggtcggcctgagctattggcattgctcttgggccaaagagctgcaactcgagatattccacttggtgatgtatagaaattaccaaaggaaaaacgacatggacgaacctcccccgcttgattatggatctggtgaggacgacggcaagtctgataagcggaaagtgaaggatcctcattacgcagagatggaggagaaatactaccgatttggaatcaaaccggagtggatgaccgtccataggatcataaatcactcagtggataagaagggcaactaccattatcttgtcaagtggagggacctcccttatgatcaaagcacctgggaagaggacgagatgaatattccagaatacgaggaacacaaacaatcttactggcgacaccgggaacttattatgggggaagacccggcgcaacctcgcaagtacaaaaagaagaaaaaagagctgcaaggagacgggcccccttcgtcccctacaaatgatcctacggttaaatacgagacccagcctcgatttataaccgctactggcgggacccttcacatgtatcagttggagggattgaattggctgaggtttagctgggctcagggtaccgatacgatccttgcagacgagatgggactcgggaagacgattcagacaattgtgttcctctactctctctacaaggaaggccacactaagggaccctttctcgtgtcagcccccctttctaccataataaattgggagagggaattccagatgtgggcccccaaattttacgtcgtgacatacactggcgataaggacagcagagctataattcgggaaaacgaattttctttcgaggataacgctatcaaaggcggcaaaaaagcttttaagatgaaaagagaagcccaagtgaaatttcacgtgttactgacctcatacgagctgataaccatcgatcaggctgcactgggaagcatccggtgggcatgtctggttgtcgacgaggcacacaggctgaagaacaatcagtcaaaattttttagagtgctgaacggctacaaaattgaccacaagctgttgctaaccggaaccccacttcagaacaatctggaggaactgttccatctcctgaatttcttgacacccgaacgattcaataatctcgagggcttcctggaggaatttgctgacatttcaaaggaggatcaaattaagaagctacacgaccttctaggccctcatatgctaaggaggctgaaggccgatgtcttcaaaaacatgcccgcaaaaacagaactgattgtccgcgtggagctgagcccaatgcagaagaagtactataagtacatcttgacacgcaatttcgaagctcttaactccaggggaggtggcaaccaggtgtccttactcaatattatgatggatctgaaaaaatgttgcaatcacccctaccttttccctgtcgcagccatggagagccccaagcttccgtctggagcctatgagggtggagctctcattaagtcaagcggcaagctgatgctacttcagaagatgttgaggaaactgaaagaacaaggccaccgagtgctaatattctcacagatgaccaagatgctggatcttttggaagactttctggattacgagggctataagtacgagcgcattgacggaggcataactggagctctgcgtcaagaggccattgaccggttcaacgccccaggagctcagcagttttgctttctactttctactcgcgcaggtggtctaggaataaatttagctaccgctgacaccgtgataatctttgattctgactggaacccccacaatgatatccaagccttcagccgggcgcaccgcatcggacaggccaataaagtgatgatctacaggttcgtaacaagagcttccgttgaagagcggattactcaggtcgctaaaagaaagatgatgcttactcatctggtggtgagacccggcctgggctccaaggcagggtctatgtcgaagcaggaactcgacgacatattaaagtttggcacagaagagctctttaaagatgaaaacgagggtgaaaataaagaggaggactcatctgtcattcactacgataacgaagcaatcgctagattgctggaccgcaaccaggacgctaccgaggataccgacgttcagaatatgaacgagtacttaagttcctttaaggttgcccagtatgtcgtcagggaagaggacaaaattgaggaaatcgaacgcgaaatcatcaaacaggaggaaaatgtggatcctgactattgggagaagttgctccgacatcattatgagcaacaacaggaggacctcgctaggaatcttggcaagggtaaacgtgtccgcaaacaagtgaactacaacgacgcagctcaagaggaccaagataaccaaagcgagtacagtgtggggtccgaggaggaggacgaagattttgacgagaggccagagggaaggcgccagagcaagcgccagctgaggaatgagaaggataagcccctcccacctctcttggcgagggtcggtggcaacatcgaggttttgggttttaacacccgacagaggaaggccttcctaaacgcagtcatgcgctgggggatgccaccgcaggacgcttttacaactcagtggttagtaagagatctccgggggaaaacggaaaaggaatttaaagcctatgtgtcattgtttatgaggcacctctgtgagccaggcgcagacggttcagaaaccttcgccgatggagttccacgggagggcttgtctcggcaacaagtacttaccagaatcggggtgatgagtctggtcaagaaaaaggtccaggagttcgagcacataaatgggaggtggagtatgccggaactaatgcctgacccaagtgccgatagcaaacggagctctcgcgcttcttctcccacgaagacgagcccaaccacccctgaggcctcagcgacaaacagcccctgcacctccaagccagccactccagctcccagtgagaaaggtgaaggcataagaactcctctggaaaaggaagaggccgagaatcaggaggaaaagcccgagaaaaacagtcgcataggggagaaaatggagaccgaagccgatgccccttccccggccccaagcctaggggagcgactggagccccggaaaatcccactggaagacgaagtgccgggagtgccaggggaaatggagcccgagcccggataccgcggcgatcgagagaaaagtgcaaccgaatccaccccgggtgagaggggtgaagagaagccccttgacggccaagagcacagggagcgccccgaaggcgaaactggtgacctaggcaagagagaagatgtgaaaggcgatcgtgagttgcgccccggacctagagacgaacctcgttccaatgggagacgggaagagaaaacggagaaacctagatttatgttcaatatcgctgacgggggcttcactgaattacacaccctttggcagaacgaggagcgggcggcaatttcctccggcaagcttaacgagatttggcataggcggcatgactactggctcctggctggaatagttctccatgggtatgccagatggcaggacatacaaaatgacgcacagtttgcgattatcaatgagccattcaaaacagaggccaataagggtaatttcctggagatgaagaacaagtttctggcgaggaggtttaagctcctggagcaagctctggttattgaggagcagctgcgacgagccgcctatttaaatttgagccaggagcctgcccaccccgccatggcgctccatgcacgctttgcagaggcagagtgtctggccgagagccatcagcacctaagcaaggagagccttgcaggtaacaagccggctaacgcagtgttgcacaaggtcttgaaccagctggaggagctcctcagcgatatgaaggccgacgtgactcggttgcccgctacgctgagtaggattcctcccatagctgcacggttgcagatgagcgaaagatctattctgtcacgactggcatcgaaggggacagaaccccacccaacaccagcctacccgcctggtccttatgctacccctcccgggtatggcgccgccttttctgctgcacctgtgggggccctcgccgctgcaggagcaaattattcccagatgccagccgggtcctttattactgccgccacaaatggcccgccggttctcgtgaagaaagagaaagaaatggttggcgcacttgtcagcgacggcctggaccgcaaggaaccgcgggccggggaggtgatctgcatcgatgactag

SEQ ID NO: 112130 - DNA, 5865 bp, synthetic construct
  misc_feature 1..5865: note = Description of Artificial Sequence: Synthetic coding sequence
  source 1..5865: mol_type = other DNA
atgcgaggaccagtggggaccgaggaggagttacctcgcttgttcgcagaagaaatggagaacgaggatgagatgagcgaggaagaggatggaggccttgaggcctttgacgatttctttcctgtagaaccagttagcttgccaaagaagaaaaagcccaaaaagctcaaggagaataaatgtaagggtaaacggaaaaagaaggaggggagcaacgatgagctgagcgaaaatgaagaggatcttgaggagaagtccgaatccgaaggcagcgactactcacccaacaagaagaaaaaaaagaagctgaaggacaaaaaggagaaaaaagccaagaggaagaagaaagatgaggacgaggatgataatgatgatgggtgcctcaaagagccaaagtcaagcgggcagctgatggccgaatgggggctcgatgacgtggattacttgttcagcgaagaagattaccatacccttaccaactataaggccttcagccagttccttaggccattaatcgccaagaaaaatcccaaaattcctatgtccaaaatgatgacagtgctcggcgccaagtggcgcgaattctcagccaacaacccgtttaaggggtctagtgctgccgccgctgcagccgcagttgccgcagccgtggagacagtcaccatctccccccccctggcagtgtcacctcctcaggttccccaacctgtgcccatcagaaaagctaagaccaaagaggggaaggggcccggggttcgcaagaaaatcaagggatcaaaagacggtaaaaaaaaaggaaagggtaagaagacagctgggctcaagttcagatttgggggaatatccaataagagaaagaagggatccagcagcgaggaggacgaaagggaggagtcggatttcgactccgcgtctattcactctgcaagcgttaggtcagaatgcagtgccgccctcggcaaaaaaagtaagagacgcagaaagaaaaagcggattgatgacggggacggctatgaaacagatcatcaagattactgcgaagtgtgtcaacaaggaggagagattatcctctgtgacacatgtccccgcgcctatcatcttgtgtgtctggacccagaactcgaaaaggctccagaggggaaatggtcatgcccacactgcgaaaaggaaggaatccagtgggaaccgaaagatgatgacgacgaagaagaagagggcggctgcgaagaagaagaagatgaccatatggaattctgtcgagtgtgcaaagacggcggcgagcttctttgctgtgacgcgtgtccaagctcatatcatctacactgtctgaatcccccattacctgagatccccaacggtgagtggctgtgcccccgctgcacttgcccacccttaaagggaaaggtgcagcggatcctgcactggcgatggaccgagccacctgctccatttatggtaggtcttccagggcctgacgtggaacctagccttcctccccccaaacctttagaagggattccagagagggaattctttgtaaaatgggcagggctgtcttattggcactgcagctgggtgaaggagctgcaactggaactgtaccataccgtaatgtacagaaactaccagcgcaagaatgacatggacgaacctcccccattcgactatgggtccggggacgaggacggaaagagcgaaaaacgcaaaaacaaggacccattgtacgcgaaaatggaagagaggttttaccgctatgggataaagccagagtggatgatgattcacagaatcctaaaccacagctttgataagaaaggggacgtgcactatctaattaagtggaaggatctgccctatgatcagtgcacatgggagatcgatgacatcgatattccatattacgacaacctgaaacaggcctattggggtcatagggaacttatgttaggtgaagacactaggctgcctaaaagactgctcaaaaagggaaaaaaattgcgggacgacaaacaggagaagccacctgataccccaatcgtggatcccactgtgaaatttgacaagcagccatggtacattgatagtactggcggaacccttcacccgtatcagctggagggcttaaattggctgcggttttcatgggcccaggggaccgacacaatcctagcggatgaaatgggcctgggtaaaactgtgcagacaatcgttttcctgtactcgttgtataaggaagggcattcaaagggcccctacctggtgagcgctccgttatccacaatcattaattgggaaagagagttcgagatgtgggcccctgacttctacgtcgtcacctatactggagataaagagtccagaagcgtgattagagaaaacgagtttagctttgaagataacgccattcgcagtggcaagaaagtgtttcgtatgaaaaaggaggtacagattaagttccacgtgttactgacgtcttatgaacttattacgatcgaccaggcaatcctaggttccattgagtgggcatgtctagtggtcgacgaggctcatcggctgaagaacaatcagtccaaatttttccgcgtactgaattcatacaagatcgattataagttgctgctgaccggcactcccctccagaacaatctcgaggagctattccacctgctcaatttcctgactccagagcgattcaataatctagaaggcttcctggaggaattcgccgatatctcaaaggaggaccagattaaaaagctgcacgatctgttagggccacacatgcttagaagacttaaggccgatgtgtttaagaatatgccggccaaaactgaactgatcgtacgggttgagttgagccaaatgcagaagaagtattataagttcatactcacccgcaatttcgaggccctgaatagcaagggcggcggtaaccaagtgagcctactgaatattatgatggaccttaaaaagtgttgcaatcatccatacctcttccctgttgccgccgtggaggcgcctgtgctacctaacggaagttacgacggatcatccctcgtgaaatcttctggcaaacttatgctacttcagaaaatgctaaaaaaacttcgggacgaggggcatagggtcctgatttttagccagatgacaaagatgctagacctgctcgaagattttcttgagtacgaaggatacaaatacgagcggatagatggcggcatcactggtggactcagacaggaggctatcgatcgcttcaacgcaccaggtgcgcagcaattttgttttctgctgtctacaagagccgggggcttaggcattaatttagctaccgcggacaccgttataatctatgactcagactggaacccacacaatgatatccaagcttttagtagagctcatcggattggacagaataaaaaagtcatgatctatcgcttcgtgaccagagcttccgttgaggagcgaattactcaggtagccaagagaaagatgatgttaacacatttagtggttcgccccggacttggctccaagtcaggaagtatgacgaagcaagagttagacgatatcctgaagtttgggacggaggagcttttcaaggatgacgtggagggcatgatgagtcagggacagagacctgtgacacctattcccgacgtgcagtccagcaagggcggcaatctagcagctagcgctaaaaaaaaacacggctcgactcccccgggcgacaacaaggatgtagaggacagttcagtaatccactatgatgatgccgccatttccaaacttttagaccgcaatcaggatgccactgacgacacagagttgcaaaatatgaatgaatacctgtccagcttcaaagtggctcagtatgtcgttagggaggaggacggggtagaagaggtggagcgtgaaataattaagcaagaggaaaacgttgacccagactactgggagaaactgctcagacaccattacgaacagcagcaggaagaccttgctagaaatctgggtaagggcaaacgcatcagaaagcaggtcaactacaatgacgcctcccaggaggatcaagagtggcaggacgaattaagcgataatcaatcggaatattctattggatcagaagatgaagacgaggattttgaggagagaccagaggggcagtctggacgccgccaatcccgcaggcagctcaaaagcgacagagataagcctttacccccactgctcgcccgggtgggtggcaacattgaagtgttgggatttaacgcccggcagcgaaaggcatttctaaatgccataatgcgctggggcatgccgccacaggacgcttttaactctcattggctggtgagagatctgcggggcaagtccgagaaagaatttcgtgcatatgtgagtctttttatgcgacacctttgcgagcctggggcagatggtgcagagacttttgccgacggagtgcctcgtgagggcctttcgcggcagcacgttctgactaggatcggggtgatgtccttagtaagaaagaaggtccaagagttcgagcatgttaatggtaagtactcaactcccgacctgattcctgaaggacctgagggcaaaaaatcgggggaggtgatcagtagtgaccccaatacacctgtccctgcaagccccgcccacctgctgccagccccgttggggctccctgacaagatggaggcccagctggggtatatggacgagaaagacccaggcgcccagaaaccgaggcagcctctggaggtgcaggcactcccagccgcacttgatcgcgtcgagagtgaagataagcacgaatccccagccagtaaagagcgggcgagggaagaaagaccagaggagaccgagaaggcaccgcctagccccgaacagctgccaagagaagaggtgctgccagagaaagagaagatcctcgacaaactggagctcagtttgattcacagtcggggcgatagctccgaactgagaccagatgacacaaaagcagaggaaaaggagcccattgagacccaacagaacggggacaaggaggaggacgatgaaggcaagaaggaggacaagaaaggtaaattcaaatttatgttcaacattgccgatggcgggttcaccgagctgcatactctgtggcagaacgaggaaagagctgctgtcagttctggcaaaatctacgacatttggcacaggagacacgattattggctgcttgccggcatcgtgactcacggctacgcccggtggcaggacatccaaaatgacccacgatatatgattctgaacgagccatttaaatctgaggtgcacaagggaaactacttggaaatgaagaacaaattccttgccagaaggtttaaactcctcgaacaggcgctcgtgatagaggaacagttacgccgcgcagcttacttgaacatgactcaggatcccaaccatcccgcaatggccctgaacgcccggcttgccgaagtggagtgcttagcagagtctcatcagcatttgtcaaaagagtccttggcggggaacaagccggcgaacgctgtcctccacaaggtgctcaatcaactggaggaactgctcagcgacatgaaagcagacgtgaccaggctaccttcaatgctatccaggatacctcccgtggctgctcggctgcagatgagcgagcggtctatactttcccggcttaccaatcgggccggcgatcctaccatacagcagggggcctttggatcttcgcaaatgtattctaataattttggacccaactttcggggacccgggcctggaggcatagtcaactacaaccagatgcccctgggcccctatgtgactgatatttag

SEQ ID NO: 112131 - DNA, 2427 bp, synthetic construct
  misc_feature 1..2427: note = Description of Artificial Sequence: Synthetic coding sequence
  source 1..2427: mol_type = other DNA
atgatctaccggtttgttacaagagcgagcgtagaggagagaattacacaggtggcaaagagaaagatgatgctgacacacctggtggtgcgccccggacttgggagcaaatctggaagcatgacgaagcaggagctggacgatatcttgaaatttggaaccgaagagctttttaaggatgacgttgaaggaatgatgtcccaaggccagcggcctgtgaccccaataccggacgttcagagttcgaagggcggaaatttagccgcgtccgcaaaaaagaaacatgggtcgactccacccggggacaacaaagacgtggaggatagtagtgtcatacactatgatgatgctgctatcagcaagttgttagatagaaatcaagatgccaccgacgacactgaactgcagaatatgaacgaatatctctcctcgttcaaagtggcccagtacgtcgtacgagaagaggacggagtagaggaagtggagagggagattattaaacaggaggagaatgttgaccctgactattgggagaaactacttcgtcaccattacgagcagcagcaggaggacctggctagaaatcttggcaaggggaagcgcatacgcaagcaggtgaactacaatgacgcttctcaggaggaccaggagtggcaagatgaattgtctgacaaccagtctgagtatagcatcggctctgaagatgaagatgaggacttcgaggagagacctgaaggtcagtctggtagaaggcagtcaagaaggcagctcaagtctgacagggacaaaccgctgccccccctgttagcaagggtcggtggcaatattgaagtgctggggtttaatgcccggcaacgcaaagcgtttctgaacgctattatgcgctggggaatgcccccacaagacgcttttaatagtcattggttggtccgggacttgcgcggtaaatccgaaaaggaatttagggcgtacgtgagccttttcatgcggcatttgtgcgagcctggggcagacggggcagaaacttttgctgatggcgtgcctagagagggactcagtcgacagcatgttttaactagaattggagtcatgtcattggtacgcaaaaaggttcaagagttcgagcatgtcaacggtaaatacagcactccagatctgatcccagagggcccagagggtaaaaagagcggggaggtcatctcgtcagatcccaacacaccagttcccgcatcacctgcgcatctgctgccagctccgctgggattacccgacaaaatggaggcacagctgggttatatggatgaaaaagacccgggggcacaaaaacccaggcagcctctagaagtccaggcactgccagcggccctggacagagtcgagtctgaggataagcacgagagcccggccagtaaggagagagcacgggaagaacggcccgaggagacggaaaaagccccaccatcgcccgaacagttgccccgagaagaagtcctgccggaaaaagagaagatcctggataagctggaactgagtctgatccacagccggggggatagctctgagctgagacccgacgacacaaaggccgaagagaaggagccgatcgaaacccaacagaacggagataaagaggaagacgacgagggaaaaaaggaggataagaagggaaagttcaagtttatgtttaacatagccgatggcggctttacagaactgcacaccctttggcagaatgaggagcgcgcggccgtgtcttccggcaagatctatgacatctggcataggcggcacgactattggttgctggccgggatagtgacccatggctacgcccgatggcaggatatccaaaatgaccctcgctatatgatcctgaatgagccattcaagagcgaagtgcataagggaaactatttagaaatgaaaaacaaattcctggccagacgatttaagctgctagagcaagcgctggtaatcgaagagcaactgcgtagagctgcctatcttaatatgacgcaggaccccaaccatcccgcgatggccctgaacgcacgcttggccgaagtcgagtgcctcgccgagagccatcaacatctatctaaagaatcattagcgggaaataagcccgcaaatgcagtgctccacaaggtccttaaccagctggaggaactgcttagcgacatgaaggccgacgtgactagactgccatcaatgctctcacgaataccgcctgtggcagcacgtctacagatgagtgagagaagtattctcagtcgcctcacaaaccgggcaggagatcccacaatccagcagatctcctcccgtccacgcgactttcctgttttacagcgatcattcccagccgagccacgccttcccggccacctgcctgatccacacggacgcgagaagctcccacccttctag

SEQ ID NO: 112132 - DNA, 3588 bp, synthetic construct
  misc_feature 1..3588: note = Description of Artificial Sequence: Synthetic coding sequence
  source 1..3588: mol_type = other DNA
atggttggactgccgggccctgatgtggagcctagtcttcccccccccaagcccctcgaagggatacctgagcgggaattcttcgtgaagtgggccggcttgagctattggcactgcagttgggtgaaggagcttcaactggaactttaccacaccgtcatgtatcgcaattaccagcgtaagaacgacatggatgagccgccaccgttcgattacggatctggcgacgaagacggcaaaagtgagaaaaggaaaaacaaagaccctctttacgcaaagatggaagaacgcttctaccgttacggcatcaagccagagtggatgatgattcatcgaattctgaatcatagcttcgataagaagggagatgtgcactatctgataaagtggaaagatctgccatatgaccagtgtacttgggaaatcgatgacattgatataccttactacgataatctcaagcaagcgtactggggccatcgcgagctgatgctgggagaggatacaagattgcccaagcggctcctgaagaagggcaaaaaacttcgagatgacaagcaagagaaaccacctgacacacctatcgtggacccgacggtgaagtttgataaacagccttggtacatcgactctactggtggtacgcttcatccatatcagttagaaggcctgaactggctaagattttcctgggcccagggcacagacaccatattagcggatgagatgggactgggaaaaacagtgcagacaatcgtctttctctacagtctctacaaggagggccactctaagggcccgtatctcgtgtcggcacccctgtctaccattattaattgggagcgggaatttgaaatgtgggctcccgacttttatgtcgttacttatactggggataaagaaagtcggtcggtcattagggagaatgaattctcctttgaggacaatgcaattcggtccggtaaaaaggtgttccggatgaagaaagaggtgcagatcaagttccacgtactgctgacatcgtacgaactcataacaatagatcaggctattcttggatctatcgagtgggcctgtcttgtggtcgacgaagcacaccgccttaaaaataaccaatcaaaattttttcgggtccttaattcgtataaaatcgactataagttgctgcttaccggaacgcccttacagaacaacctggaggaactctttcacctgctgaatttcctcacaccggagaggtttaataatttggaggggttcctggaggagttcgccgacatctcgaaagaggaccagattaaaaagttgcacgatctgctgggcccccatatgcttagacggcttaaggccgatgtgtttaagaacatgcctgccaaaacagaattaatcgtgcgtgtggaattaagccaaatgcagaagaagtactataaattcattcttactcgaaatttcgaggcactcaactcgaagggaggtggaaatcaggtcagcctgctcaatattatgatggatcttaaaaagtgttgtaatcatccttacctgtttcccgtggcagcggtcgaggcacctgtgcttcctaacgggtcatacgacggctcttccctcgttaaatccagtgggaaactgatgctgcttcaaaaaatgctcaagaagctgcgcgacgaagggcaccgtgtccttatcttttcccagatgacaaagatgctggatctgcttgaggattttttggagtacgaaggatacaaatatgaacgaattgatggaggcatcacagggggactgaggcaggaagcaatagaccgatttaacgccccaggggcgcagcagttttgtttcctgctgtccacaagagccggagggctgggcataaacctggccacagcagataccgtgatcatttatgattctgattggaacccccataatgatattcaagctttcagcagggcccaccgaataggacaaaacaagaaggtgatgatatacaggttcgttacccgcgccagcgtggaagagcgcattacccaggttgctaagaggaaaatgatgctgacccacctcgtggtgagacctggtctgggttccaaatccggtagcatgaccaaacaggagctggacgatattctcaagttcggtacagaagagctattcaaagatgacgtagaaggcatgatgtcacaaggacagcgtcccgttactccaataccagacgtgcagagtagtaaaggtggtaatttagccgctagtgccaagaagaagcatggcagtacccctcccggtgataacaaagacgttgaagactcatctgtcattcattacgacgatgcagccatttccaagcttttagatcggaaccaggacgccaccgatgacaccgagctgcagaatatgaacgaatatctgagttccttcaaggtcgcccagtacgtggtgagggaggaggacggcgtggaggaggtagaacgggaaatcattaaacaggaggagaacgtcgacccggattactgggagaaactcctgagacatcattatgagcagcagcaggaggacctggcccgtaacctcggcaagggaaaacgcatcaggaaacaagtcaactataatgatgcttcccaggaggaccaagagtggcaggacgagttgagtgataaccagtcagagtactccatcggttctgaagatgaggatgaagacttcgaggagagacccgaaggccaatctggtcggcgacagagcagaagacagctgaagagtgatagagataagcctctgccccctctcttggctagggtaggcgggaatattgaagtgctgggatttaatgcacgccagcggaaagccttcctgaatgctataatgcgatggggaatgcctccacaggatgcttttaattcccactggctggtccgggatttgcgaggcaaatcggaaaaggagttcagagcctatgttagcctgttcatgcgccacctatgcgaacctggggccgatggcgcagaaacattcgccgacggtgttcctagggagggcttgtcccggcaacatgttctaacccgtatcggtgtcatgagcctcgtcaggaaaaaggtgcaggaattcgaacacgtgaatggaaaatactcaactcctgacttgatcccagaaggcccagaaggtaaaaagtcgggcgaagtcatctcttctgaccctaatacacccgtccctgctagcccggctcacctcctaccagcccccttaggcctgcctgacaaaatggaggcacagctgggttacatggacgagaaagaccccggtgcccaaaaacccaggcagccgctggaggttcaggctcttccagcggcactagatcgggttgaatcagaggacaagcacgaaagccccgcctccaaggagagagctcgcgaagagcgccccgaacagaccccgcctgctcaggcgcaactgaggggggggcggcccctgtccccaggaaccgcacctgggtggcagagggaaggaccggggcttggggccaggagagctcgcagtccatctcagggcgggcctggcggaggcgggtcttcctttggatctcaggcacctctttag

SEQ ID NO: 112133 - DNA, 2427 bp, synthetic construct
  misc_feature 1..2427: note = Description of Artificial Sequence: Synthetic coding sequence
  source 1..2427: mol_type = other DNA
atgatctatcggtttgtgacgcgagcatccgtagaggagagaataacacaggtggctaaaaggaaaatgatgttaactcacctggtcgtcaggcccgggctgggctctaaatccggatcaatgacaaaacaggagttggatgatattttgaagttcggtacggaagagctgttcaaagacgacgtcgaaggcatgatgagccagggtcaacggccggtgacgccgatccccgatgtgcagagttcaaagggaggcaatttagccgcgagtgcaaagaaaaaacacggctctacacctcccggcgacaataaggacgtggaagatagctccgtgatacattatgatgacgctgctattagtaaactgctggatagaaaccaggatgccacagacgacaccgagctgcagaacatgaacgaatacctgtcctcttttaaggtggcccagtatgttgtgagggaagaagatggggtcgaggaggtagagcgggaaataattaaacaggaggaaaatgtcgaccctgactactgggagaaactcctaagacaccactatgagcagcagcaggaagacctagctaggaaccttgggaagggtaagcgaattcgtaaacaggtaaactacaatgacgccagccaggaggaccaggagtggcaggacgagctcagtgataatcagtcagaatacagcattgggagcgaggacgaagacgaagatttcgaagagcgacccgaaggccagtcaggtagacgccagagcaggcggcagctgaagagcgaccgcgacaaaccgctcccacccttattagcccgagtcggaggcaacatcgaggtgctgggcttcaatgcacgacagagaaaggcttttttgaacgctattatgcggtgggggatgccaccacaagatgcattcaacagccattggctggtgcgagaccttagaggaaagagcgagaaggagtttagagcctatgttagtctgttcatgagacatttgtgtgagcctggagcagacggggcagaaaccttcgcagatggcgtccctagagaaggcctaagccgacaacacgtgctgacaagaattggcgtgatgagcctcgtgcggaaaaaggtccaggagtttgaacatgtcaatggcaagtatagcactccagatttaatacccgaagggccagaagggaagaagagcggcgaggtgatcagctctgaccccaatactcccgttcctgcctctccggcacacctcttgcccgcccctctgggccttccagacaagatggaggcccagctgggctacatggacgagaaggatcctggcgcacagaagcccaggcaacctcttgaggttcaggccctgcccgctgccctagacagggtcgagtctgaagacaaacatgagtcccctgccagtaaggaacgagcaagagaggaacgaccagaggaaacagagaaggccccaccatcgcctgagcaactaccgcgagaggaagtgctccccgaaaaagagaagatattggataagctggaactttcactcatccacagtcggggagacagttccgaattgaggccagatgacaccaaggctgaagagaaagaacctatcgaaacccagcaaaacggtgataaggaggaggacgatgaaggaaaaaaggaagacaaaaaagggaaattcaagttcatgtttaatattgctgacggcgggttcaccgagctccacacactctggcagaacgaagaacgggcagctgtctcttccgggaaaatttatgatatttggcacagaagacacgactattggctcctggccggcatcgtgacgcacggatatgctcgttggcaggatatccagaacgatccaaggtatatgatattaaatgagccgttcaaatctgaagttcataagggcaactatctggaaatgaaaaacaagtttttagctcggcggtttaagctcttggaacaggcgctggtgattgaggaacaactgcgccgcgctgcctacctcaacatgacacaggatcccaatcaccctgctatggctctgaatgccagactggccgaagtcgaatgtttagctgaatctcatcagcacctgagcaaagaatccctggccgggaataagcccgccaacgcagtcctgcacaaagtactaaatcagcttgaggagttactctctgatatgaaggcagacgtgactagattaccctctatgctgagccgaatcccaccagtcgccgccagactacagatgtccgaacgtagcattctcagccgtttgaccaaccgggcaggcgatccaacaattcagcagatctcctccagacctagagattttcccgttttgcagcggagtttccctgccgagcctaggctacctgggcacttaccagacccccatggtagagagaagttgcctccattctag

SEQ ID NO: 112134 - DNA, 3288 bp, synthetic construct
  misc_feature 1..3288: note = Description of Artificial Sequence: Synthetic coding sequence
  source 1..3288: mol_type = other DNA
atgattcatcgtatcctgaatcacagttttgacaagaagggggacgtgcactacctgattaagtggaaggatctaccgtacgaccagtgcacttgggagatcgatgatatagacattccgtactacgacaacctgaaacaggcctactggggacacagagagctcatgctcggcgaggataccagactgcctaaaagacttttgaagaaaggcaagaagctgagagacgataagcaggaaaaaccgccggacacccccatagtggatcctactgttaagtttgataaacagccatggtacatagatagtactgggggcacactgcacccttatcagcttgaaggcctgaactggctgcgattttcatgggcccagggaactgatacaattctagcagatgaaatggggttgggcaaaaccgtgcagacaattgtcttcctttattcactgtataaagagggccacagcaaggggccctatcttgtgtccgcccctttgtccacaatcataaattgggagagggaatttgaaatgtgggcaccagacttttatgtagtgacctacactggcgataaggaatctcggtcagtaattcgcgaaaatgagttctcttttgaagacaacgctatccgatccggcaagaaggtgtttagaatgaagaaggaagtccagataaaattccacgtgcttctgacgagctacgagctgattactatcgatcaggccatcctaggatccatcgaatgggcctgcttggtcgtcgacgaggcccatcgcctgaagaataatcagagtaaattcttcagagtactcaattcctataaaatcgattacaaattgttacttaccggaaccccgttacaaaacaaccttgaagagttattccatctgctgaacttcctgacaccagaacggtttaacaatctcgagggatttctggaggaatttgctgatatcagcaaagaagaccaaattaagaagctgcacgacctactgggaccgcatatgctgagacgactgaaggccgacgtattcaaaaatatgccagccaagactgaactgatcgtgcgagtggagctttcccaaatgcagaagaaatactacaagtttatcctgactcggaatttcgaagctttgaacagcaagggtggggggaaccaggttagcctgctgaatattatgatggatctgaaaaagtgctgtaatcatccttatctctttccagtggcagctgtcgaggctccagtcctgcctaacggctcatacgacggctctagcttagtgaaaagctccgggaagttgatgctgttgcagaaaatgcttaagaagctgcgcgatgagggtcacagagtgctcatttttagccagatgaccaaaatgttagatcttcttgaggactttctggaatacgaaggttacaagtacgaaagaatagatggcggaatcaccggggggcttcgacaggaggccatcgatagattcaacgcgcccggagcacagcagttctgctttctgctctccacacgagccggtggcctaggaataaatctggccaccgccgatacagtgatcatatatgattcagattggaatccccacaacgatattcaggcattctctagagcacatcgtatcggacagaataagaaagtaatgatctatcgattcgttacacgagcctccgttgaggagcgcattactcaggttgcaaaaaggaagatgatgttaacccaccttgttgttaggccaggtctcggctccaagagcggatcaatgacaaaacaagaactcgacgacattctgaagttcggtactgaggagctctttaaagacgatgtggagggcatgatgagccaagggcaacgccctgtcactcccatccctgatgtgcagagtagcaagggtggcaatttagccgcatcggccaaaaagaaacacgggagtacaccacccggggacaacaaagatgttgaggattcgagtgttatccactatgacgacgccgcgatcagcaagctgctggatagaaatcaggatgctaccgatgatacagagctccagaacatgaatgaatatctctcgagcttcaaggttgcccaatatgtagttagagaggaggatggagtagaagaagtggagagggaaatcattaagcaggaggaaaacgtggatcccgattattgggaaaagctgctgcggcatcattatgagcagcaacaggaggatttggcgagaaacctgggcaaaggcaaacggattcgcaagcaggtcaattacaacgacgccagccaggaggatcaggagtggcaggatgagttatctgataaccagtcggagtacagcattggaagtgaagatgaagatgaggacttcgaagagagacccgaaggacaaagtgggagaagacagagtcggaggcaactgaagagtgaccgggacaaacccctccctcctttacttgcccgcgtcgggggcaatatcgaagttctcgggttcaacgcacggcagagaaaggcctttttgaatgccattatgcgttggggtatgcctccacaggacgccttcaactcacattggctggtcagagacctgagaggcaaatccgaaaaagagttcagagcctacgtcagtctctttatgcgccatttatgtgagcctggagccgacggggccgaaacatttgctgatggtgtgcctcgcgaggggttgtcacggcaacacgtgttaacgcgcataggcgtgatgtcactggtccgcaaaaaggtccaagagtttgaacacgttaatggtaaatactccaccccagatctaatcccagaaggacccgaaggcaagaagagtggagaggtgatatcctctgaccccaatacgcccgtaccagcatctccagcccaccttctgcctgctcctctcggcctaccggacaagatggaagcacaacttgggtatatggacgaaaaagaccccggagcacagaagcctagacagcccctggaagtgcaagctctacccgctgctctggacagggtggagtccgaagataaacatgaatcaccagcgtccaaagaacgcgcccgcgaggaacgcccagaagagaccgaaaaagcccccccctctccggagcagcttcctagagccagctgttccgtaactcaggctggggtgcagtggcggcaccgcttgatgggagctttcatctcatcggcccaggctaccctgccaccacagctgcccgagcagagaagatgctttctcaggcggaggcggtcttggacatcgtggagttag

SEQ ID NO: 112135 - DNA, 3258 bp, synthetic construct
  misc_feature 1..3258: note = Description of Artificial Sequence: Synthetic coding sequence
  source 1..3258: mol_type = other DNA
atgatccatcgcattctgaatcactctttcgataagaagggagacgtgcactacttgatcaagtggaaggacctgccgtatgatcagtgtacttgggagattgacgacatcgatataccatactatgataatctgaaacaggcgtactggggtcaccgcgaactgatgttgggggaggatacccgacttcccaagcgattactcaagaaggggaagaagctccgggatgataagcaggagaagcctccagacacgcctattgtagaccccaccgtcaagttcgataagcaaccttggtacatcgacagtaccggcggcaccctgcatccatatcagctcgaagggctgaattggctgcgcttttcctgggcacagggaacagacacaatactagccgatgaaatggggcttggcaaaaccgttcagactattgtgttcctctacagcctctacaaggagggtcattcgaagggtccttacttagtgtctgcccccctgagcacgattataaactgggaacgcgagtttgaaatgtgggctcccgacttttatgtagtgacatataccggagataaggaatccagatccgtgattcgcgagaacgagttttccttcgaggacaacgctattcggtccgggaagaaagtgttccgcatgaagaaggaggtccaaattaagttccatgtgcttctgacaagctatgaactgataacaatagatcaggccatcctgggaagcatcgagtgggcatgccttgtggtggacgaggctcacagactgaagaacaaccagtctaaattctttcgagttctcaactcctataagattgactacaagctgttgctgacaggcacgccgcttcaaaacaatctggaagagttgtttcaccttctaaacttcctgaccccagaaagatttaataatctggaaggctttttggaagagttcgccgatatctccaaagaggaccagatcaagaaactgcacgatctgttgggtcctcacatgctgcgacggcttaaagctgacgtctttaagaacatgcccgcaaagactgaacttattgtgcgcgtcgaattgagccagatgcagaaaaaatactataaatttattctaacacggaatttcgaggctttaaatagcaagggtggtgggaaccaggtgagcctcctcaacatcatgatggacctgaaaaagtgctgtaatcatccttacctgttccccgtcgccgcggtcgaggctccagtgctgccaaacggaagctacgatggtagctcactggtgaaaagctccggtaaattaatgctgctgcaaaaaatgctcaaaaagctcagggacgagggacaccgcgtcctaatcttttcacagatgacaaaaatgcttgatttattggaggacttcctagagtatgagggatacaagtacgaaaggatcgacggtggcatcactggaggcctgcgtcaggaggcaattgataggtttaacgctccaggcgcccagcagttttgctttctgctgagtacgcgcgccggtgggctgggaatcaatctcgccactgccgacacagtcatcatctatgactccgattggaaccctcacaatgacatccaggctttctccagggctcaccgcatcggacagaacaaaaaagtgatgatttaccgattcgtgacacgagcttccgtggaagagagaattacacaggtcgcgaaacggaagatgatgcttacccatctggtggtcaggcctggtcttggcagtaagagcgggagcatgaccaaacaagaactggatgacattttaaagtttgggacagaagaactctttaaagatgacgtggagggcatgatgtctcagggccagcggccagtgacacccattcccgacgtgcaatcatcgaaaggtgggaacctagctgccagtgccaagaagaagcacggcagcactccccccggcgataataaggacgtggaggactcttctgtgattcactatgatgacgctgctatatcaaaactgctggaccgaaaccaggacgcgactgatgatactgagttgcaaaatatgaatgaatacctgtccagctttaaggtggcccagtatgtagtgagagaggaggatggtgttgaggaggtagagcgtgagatcattaaacaggaagagaacgtagacccagattactgggaaaagcttctgaggcatcactacgaacagcagcaggaggacctggcccgcaacctgggcaagggcaagcgcatcagaaagcaagtgaattataacgatgcatcccaagaagaccaggagtggcaagacgaactgagcgacaatcagtctgagtacagtattggatcagaggacgaggatgaagattttgaggaacggcctgaggggcagagtggccgccggcagtccagaaggcagctgaagagcgaccgtgataagcccctacccccattactagcccgggttggcggcaacatagaggtgcttggcttcaacgccagacagcgaaaagcctttctaaatgcgatcatgcggtggggaatgcccccccaagatgcattcaattcacattggttggtgcgcgatcttagagggaagtctgagaaggaattccgcgcatacgtgagcctgtttatgaggcatctgtgtgagccaggggccgatggtgctgaaacttttgctgacggtgtgccacgcgaaggtttgtcacggcagcacgtgttgaccaggataggagtcatgagtttggtaaggaagaaagtccaggaattcgagcacgtcaatggaaaatactccacacccgacttaatcccagagggccccgaggggaaaaaaagtggagaagtgatttcaagtgatcccaacacacctgtccccgctagcccagctcacctcttacctgctcccctcggtttacctgataagatggaggcccagctggggtatatggatgagaaggatccaggggctcagaagcctagacagccacttgaggtccaagccctgccagctgcgctggatagggttgagtccgaagacaagcacgagtcgccagctagcaaagaaagggctagagaggagagaccagaggagacggagaaggcccccccttctcccgaacagctcccgcgggccagttgttccgtaacgcaagccggggtgcagtggaggcacctgggatcctgggaacccctgtcaccccgactcaagcgccctagtcacctttcgttcctcaatagagggggggcatcgtag

SEQ ID NO: 112136 - DNA, 8994 bp, synthetic construct
  misc_feature 1..8994: note = Description of Artificial Sequence: Synthetic coding sequence
  source 1..8994: mol_type = other DNA
atggccgaccctggaatgatgtccttgtttggcgaagacgggaacatcttctccgaaggcctcgaaggcttaggggagtgcggctatcctgagaatcccgttaatcctatgggccagcaaatgcctattgaccaggggtttgcctcccttcagcctagcctacaccatccttcaacaaatcagaatcagacgaagcttacccacttcgaccactacaaccaatatgagcaacaaaagatgcaccttatggaccaacctaatcgtatgatgtccaacaccccgggcaatggacttgcgagtccacatagccagtatcacaccccccctgtgccgcaggtgccccatgggggctcaggcggaggacaaatgggcgtgtacccaggtatgcagaacgagagacacgggcagtcatttgtcgatagctctagcatgtggggccctagggcagttcaagtgcccgaccagatccgggcaccatatcaacagcaacaacctcagccccagccgccacagcccgcgccttccggaccaccagcacagggacaccctcagcatatgcagcagatgggatcatatatggcccgcggggacttcagtatgcaacaacacggacagcctcagcaaagaatgtcccaattttcgcagggccaggaagggctcaaccagggaaacccatttatcgccacgagcggccctggccatctgagtcacgtgccccagcaatcaccctctatggctccctctctaaggcattccgtgcagcaattccatcaccacccatcaacagcactgcatggggagtctgtcgcacacagtccccgcttttcacctaatcctcctcaacagggggctgtgagaccacaaacccttaatttttcctctcggtcacaaacggtgccttctcccaccattaacaactcggggcaatactctcgatatccgtattcaaaccttaaccagggtctagtcaacaacactggtatgaaccagaatctgggtctcacaaataacacacctatgaatcagtctgtccctcgctatccgaacgctgtgggctttccttccaattccggtcagggtctcatgcatcaacaacctatccacccgtcagggagcttgaatcagatgaacacacaaacaatgcacccctcccagccccagggcacttacgcctcgcctcctcccatgtcccccatgaaagcgatgtcaaatccggccggcactcccccacctcaggtgagacccggctcagcaggtatccctatggaagtgggttcatatccaaatatgccacatccgcagcccagtcaccaaccccccggcgctatgggtattgggcagcgtaacatggggccaagaaatatgcagcaaagcaggccgttcattgggatgagtagtgcacccagagagctcacaggccatatgagaccaaatggttgtcctggtgtcggactgggggacccccaggcaatccaggagcggctcatccccgggcagcagcaccctgggcagcagcctagctttcagcagctaccaacatgtccaccactgcagccccatcctgggctccaccaccagtcctctcctccacacccacatcatcagccctgggcccagctccatcccagcccccaaaatacccctcaaaaggttcccgtgcatcagcactcgcctagcgaaccgtttctggaaaaacccgtgccagacatgacccaggtatcgggccctaatgcccagttggtaaagtccgacgattacctcccaagtatcgaacagcagcctcagcagaaaaaaaaaaagaagaagaacaaccacattgttgcggaagatcccagtaagggattcgggaaggatgacttccctggcggcgttgacaatcaagagctaaatagaaattcgttagacgggtcacaggaagagaagaagaaaaaaaagagaagcaaggccaagaaggaccccaaggagccaaaagaaccaaaagaaaaaaaggaacccaaagaaccaaaaactccaaaggcccctaagattcctaaagagcctaaagagaaaaaagcaaagaccgccacccccaaacctaaatcgtcaaagaagtcctccaacaaaaagcctgattcggaagcgtctgcgttaaagaaaaaagtgaataaaggtaagacagagggtagcgagaactctgatctggacaaaaccccgcccccctcaccaccccctgaagaagacgaggacccgggtgtgcagaagcgtcgctcgtctcggcaggtgaagagaaagcggtacacggaggatctagaattcaagatcagcgacgaggaggcagatgacgccgatgcagcaggcagagactccccgtcaaacacttcacagagtgaacaacaggaaagtgtggacgcggaaggccccgtggtcgagaagatcatgagttctcgatctgttaaaaaacagaaagagagcggcgaggaagtggaaatcgaggagttttacgttaaatataagaacttttcttacctgcactgccagtgggcctctatagaggaccttgaaaaagataaaagaattcagcaaaagattaagaggttcaaggccaaacagggacagaacaagtttctctcagagatcgaggatgagttattcaaccctgattatgtggaggtcgacagaattatggacttcgcccgatcaacagacgatcgcggagagcctgttacccactatcttgtgaaatggtgcagtctgccatacgaggattccacgtgggagcggagacaagatattgatcaagctaagatagaggagttcgaaaagttgatgtctagagaacccgaaaccgaaagggtggagcgtcctcccgcagatgattggaaaaagtctgagtccagtagagagtataagaataacaataaactgcgcgaataccaactagagggggttaattggcttctgttcaattggtacaacatgagaaactgcatcctggcagatgaaatgggcctggggaaaactatccagagcataactttcctgtacgaaatttaccttaaggggatccatggcccattcttagtgatcgctccccttagcaccatcccaaactgggagagagaatttcgcacctggactgaacttaatgtagttgtgtaccacggcagccaggctagccggcggacgatccagctatatgagatgtattttaaagatcctcagggcagagtcattaagggttcttataagttccacgccattatcaccactttcgaaatgatactcacagactgccccgaactgaggaatattccctggcgctgcgtggtgatcgatgaggctcatagattaaaaaacagaaattgtaaactcctagagggacttaagatgatggatctcgagcacaaggtgctcctgaccggcaccccactgcagaataccgtagaggagctgtttagccttcttcacttcctggaacccagtcgcttcccatccgaaaccacttttatgcaggaatttggagacctgaagaccgaagagcaggtccagaaactccaggccattttgaagccaatgatgctccgaagattgaaagaggacgtagagaaaaaccttgctccaaaagaagagacaatcatcgaagtggagctcaccaacattcagaagaagtactacagagccattttggagaagaactttacattcttgagtaaaggtgggggccaggcgaatgtcccaaacctgctaaacaccatgatggaattgagaaaatgttgtaaccatccatacttgatcaacggagccgaggagaagatccttgaggagttcaaagagacacataatgctgagtctcctgactttcagctgcaagccatgattcaggccgcagggaaattggtcctaatcgacaaactgctccccaagctgaaggcggggggacatagggtactgatctttagccagatggttcggtgcttggatatcctggaggactacctaattcagaggcgctacccttatgagcggattgacggccgcgtgcggggcaacttaaggcaagccgctattgatcgcttctcgaaacccgattccgaccgcttcgtatttctgctgtgcacccgggctggtggcctgggaatcaatctgactgctgccgacacatgtataatcttcgacagcgactggaatccccagaacgacctgcaggcacaggcaagatgtcaccggattggacagagtaagagtgtgaagatctacagactcatcaccaggaatagttatgagcgtgagatgttcgacaaagcctctctgaagctaggactcgataaagccgtgctgcagagcatgagtggaagggagaatgctaccaacggcgtccagcagttgtcgaaaaaggaaatcgaggatctgctgcgaaagggagcttatggtgcgctgatggacgaagaagacgaggggagtaaattctgcgaagaagatattgatcagattctactcagacgcacacacacgataacaattgagtcggaagggaaaggtagcacttttgccaaggcctcatttgtggccagtggcaataggactgatatctccctggacgaccccaatttctggcagaaatgggccaagaaggccgaattggacattgacgctttgaacggacggaacaatctggtgatagacaccccgagggtgcgcaaacagaccaggctatattccgctgttaaagaagatgagctgatggagttttctgatttggagtctgattctgaggaaaagccctgcgctaagccccgaaggcctcaggataagagccagggctacgccaggtctgaatgcttcagagtggaaaaaaacttactggtctacggctggggccggtggactgatatactgagccacggaagatacaagcgccagctaacagaacaggacgtggaaacaatatgtcgcaccatcctggtgtattgcctcaaccactacaagggggacgagaacatcaaatcgtttatttgggacctgatcactcccaccgcagatggccagacaagagcacttgtcaatcactcaggtctgagtgcccccgttcctcggggtcggaagggaaaaaaagtcaaggcacaatccactcagcctgtggtccaggatgctgactggctcgcaagctgtaatccggacgctctgtttcaggaagacagttacaagaaacatctgaaacatcactgcaacaaagttttgttgagagtgcgaatgctctactatctcaggcaagaggtcatcggcgaccaggctgataaaatcttggaaggagctgacagctcagaggccgatgtgtggatcccagagccgttccacgcagaggtgccagctgattggtgggacaaggaggcagacaagagtttgctgattggggtttttaagcatggatatgagaagtataattccatgcgtgccgacccagctctgtgctttctggaaagagtaggtatgcccgatgctaaggccatcgctgcggagcagcgggggacagatatgctggccgacggcggcgacggcggagagtttgatcgagaagatgaagatcctgaatataaacctactaggacgccctttaaagatgaaatagacgaatttgccaattcaccgagcgaggataaggaggagtccatggagatccatgctactggcaagcattctgagagcaatgctgaattgggccaactgtattggccaaatacctctaccctgactacccgactccggcgcctcattacagcctaccagcggagctacaaacgacagcagatgcggcaagaagcacttatgaagactgaccggaggcgtcgcaggccacgcgaagaggttcgagctctggaggctgagcgcgaagccattataagcgaaaaacgccagaagtggactagacgagaggaagcagacttctaccgagtagtgtcaaccttcggagttatattcgatccggtgaagcagcagtttgattggaaccagttccgggcctttgcacgactggataaaaagtcagatgaatccctcgagaaatatttcagttgtttcgtggccatgtgccgccgagtctgtcggatgcccgtgaaaccagacgacgaaccacccgatctgagcagcattatcgagccaattactgaggagcgggcatctcgcaccctctacaggattgagctcctgcggaagatccgcgagcaggtgctgcatcatccgcagctgggtgaaagactaaaactgtgccaacccagtctcgacttacccgaatggtgggagtgtggcagacatgaccgcgacctgttggtcggtgcagctaagcacggtgttagtaggactgattatcatattctgaacgaccctgaactgtcttttctggatgctcataagaattttgcacagaataggggcgcgggaaatacgagctccctgaatccactggccgttgggttcgtccagaccccccccgtgatttccagcgcacatatccaagacgagcgcgttcttgaacaggctgagggtaaagtggaggagcccgagaatccagcagcaaaggagaaatgtgaagggaaggaagaggaggaagagacagatggctcagggaaggagagtaagcaggagtgcgaggctgaggcaagctcagtgaagaacgaactcaaaggggtagaggtgggggcggacaccggttccaagagcattagcgaaaaaggctccgaagaagacgaggaagaaaaactcgaggacgatgacaagtctgaggagtctagtcagccagaagctggggctgtaagccgtgggaaaaacttcgatgaagaaagtaatgcgtccatgtcgacagccagggatgaaacacgtgacgggttctatatggaagatggagatccaagcgttgcacagcttctgcacgagcggaccttcgcttttagcttttggccaaaggaccgtgtcatgattaatcgactggacaatatttgcgaggccgtgctcaagggaaaatggccagtgaatagacgccaaatgttcgatttccaaggccttatccctggatatactcccacaaccgtggattctcctctccagaagcgttctttcgccgagctctcaatggtaggacaggcttctatcagcggcagcgaggatattaccacatctccacagctctctaaagaggatgccctgaatctgagcgttccccgccagaggaggaggcgccgccggaaaattgagatcgaagcggaacgtgccgctaagcgccggaatctcatggagatggtggcgcagttgcgcgaatctcaggtagtgagtgagaacggtcaagaaaaagtggtggacctgtccaaggcctctagagaagcaactagttcaacctctaacttctcttccctgagcagcaaattcattcttcctaacgtgagcacacccgtctccgacgcttttaaaacccaaatggagctcttgcaggccggtctgtcgcggactccaacgcggcatctcctaaatggttctctggtcgatggagagccacctatgaagaggcggcgcgggcgcaggaagaacgtggagggcctggacttattatttatgagtcacaagaggacttccctgagcgcggaagacgcagaggtgacgaaggcttttgaagaggacatcgaaacacccccaactcgaaacatccccagtcccgggcaacttgatcctgacacccggattcccgtcatcaacctagaagacgggaccagactggtgggtgaggatgcccccaagaataaggatttagtggagtggttgaaactgcatcctacctatactgtagacatgccatcatatgtaccaaaaaacgcagacgtattattcagctcctttcagaagcccaagcagaaaaggcatcggtgcagaaatcccaataagcttgatatcaatacactgacaggcgaggaaagggttccagtggtgaataaacgcaacggcaaaaaaatggggggggcaatggctcctcccatgaaggatttgcctagatggttggaggaaaatccagagttcgcagttgctcccgactggacagatattgtcaaacagtccggtttcgtgcctgagagtatgttcgaccgactcctcacagggcccgtggtacgtggtgaaggcgcgagccgtagaggtaggcgacccaagtccgaaatcgctcgcgcagccgctgcggctgctgcagtggcctctactagtggtatcaacccactcctggtcaatagcctattcgcagggatggacttgacatcactgcagaatctgcaaaacctacagagcttgcagctggcgggattgatgggctttccgccaggcctggccaccgccgctacagccggtggtgatgcgaagaatcccgcggccgtgttaccacttatgcttcccggcatggccggactcccaaacgtgttcggcctcgggggacttctgaataaccccctgagtgctgccaccggtaatacaacaactgcatcgagccagggcgagcctgaggactccacttcgaagggtgaggagaaagggaacgagaacgaagacgaaaacaaggacagcgagaagagcactgacgccgtctctgctgctgacagcgctaatgggtccgtaggggcagccacggcccctgccggactgccgagtaaccctttggcattcaatcctttcctgctttccaccatggcaccaggcctgttttatccaagcatgtttctaccaccggggctgggaggactcacgctcccggggtttcccgccctggctggcctgcagaatgccgtcggttcttccgaggagaaggccgcagacaaagctgagggcgggcctttcaaagacggagagacccttgaggggtcagatgcggaagaatccctcgacaaaacggcggagagctccctgctggaggatgaaatagctcagggcgaagaactggactcacttgacggcggagatgagatcgaaaacaacgaaaatgatgagtag

SEQ ID NO: 112137 - DNA, 8994 bp, synthetic construct
  misc_feature 1..8994: note = Description of Artificial Sequence: Synthetic coding sequence
  source 1..8994: mol_type = other DNA
atggcagatccagggatgatgtcgctttttggtgaagatggcaatatcttttccgaagggctcgagggcttaggagagtgcgggtatcccgagaacccagtgaatcccatgggccagcagatgcctattgatcaggggttcgccagtctgcaacctagccttcatcatccctctactaatcaaaatcagacaaagttgacacattttgaccattacaaccagtatgagcaacagaaaatgcatctgatggatcagccgaacagaatgatgtctaatactccagggaacggtcttgcaagcccccatagccagtatcacacccctcccgtgccacaggtacctcacggtggcagtggcgggggccagatgggggtgtaccccggtatgcagaacgaaagacacgggcagtccttcgtcgattctagctctatgtggggcccccgagccgtgcaggtgcccgaccaaatcagggctccatatcaacagcagcagccccaaccacaaccaccacagcctgcacctagcggacctcctgcccaggggcatccccagcatatgcagcagatgggcagctatatggcaagaggagactttagtatgcagcagcatgggcagcctcagcaacgaatgagtcagttttctcagggccaggagggtcttaaccagggaaatcctttcattgctacctctgggcctgggcacctttcacatgtacctcagcagtcccccagtatggctccctctctccggcactctgtgcagcagttccatcaccatccatcaactgctctccacggcgaaagcgtggcgcacagtccccgattctctcccaatccccctcagcagggggctgtgcggccgcagacgctgaacttcagcagccgatcccaaaccgtgccgagcccaacaattaataattccggccagtactccaggtatccctatagtaatttaaatcaggggctcgtgaataatacagggatgaatcagaatctgggtctgactaacaacacccctatgaaccaaagcgtccctaggtatccgaacgccgtaggatttccatccaacagcggacagggactgatgcatcaacagcccatacatccgtcggggagtctgaaccagatgaatacacaaaccatgcatcccagccagcctcaggggacatacgcctctcccccccccatgtcgcccatgaaagcgatgagcaatcccgccggcacaccccctccgcaggtgagacccggatctgccgggatccccatggaggtcggcagctaccccaatatgccccacccccaaccaagccatcagccaccgggcgcaatgggcattggccaacgcaacatgggcccccgcaatatgcagcaatctaggcctttcatcggcatgagttctgcaccacgagaattgactggccacatgagacccaatggctgtccaggcgtgggtctgggtgatccccaggccatacaagaacgactaattccgggacagcagcaccctggccagcagcctagctttcagcaactccccacgtgcccaccactccagccccaccccgggctgcaccaccaatctagccccccccatcctcaccaccagccatgggcgcaactccacccctctccgcaaaacactccacagaaagtacccgttcaccagcatagcccttcggagcccttcttagaaaaacccgttccagatatgacccaggtatctggacccaatgcccagcttgtgaagtccgacgattaccttccctctatcgaacagcaacctcagcagaagaagaaaaagaagaaaaacaatcatatcgtcgctgaggacccctcaaaaggcttcggcaaggacgatttccccggaggggtggataatcaggagttaaatcggaactccctggatgggagccaggaagagaagaaaaagaagaaacggtcaaaagccaagaaggaccccaaggagcccaaggaacctaaggagaagaaggagccgaaagagccgaaaactcctaaggctccaaaaattcccaaggagcccaaggagaaaaaggcaaaaaccgccacacctaaaccaaagagtagtaaaaaatccagtaacaaaaagcccgactccgaggcgagcgccctcaagaaaaaagtcaacaagggcaaaaccgaggggtcagagaactcagatctcgataagactccccccccctcaccacccccagaagaggatgaggaccccggggtgcagaaacggcgcagtagtcgccaagttaaacggaagcgctacacagaggatctggagttcaaaatctccgatgaggaagctgacgatgccgacgccgctgggagggactccccgtcaaatacgagccaaagcgagcagcaggagtcggtggatgccgaaggcccagtggtggaaaagattatgtcatctagatctgtgaagaagcagaaagagagtggtgaagaagtggagatcgaggaattctatgttaagtataagaacttctcatacctccattgccagtgggcaagcatcgaagatcttgagaaggataaacggattcagcagaagattaaacgctttaaggccaaacaaggccaaaacaaattcctatctgaaattgaagatgagttatttaacccggattacgtggaggtcgacaggatcatggatttcgcccgttcaacagacgatcgcggcgaaccggtcacacattatctggtgaaatggtgtagcctaccatacgaagatagcacttgggagaggaggcaggacatcgatcaggccaaaatcgaagagttcgaaaaactcatgtcgcgggagccagagacagaaagggtggaacggcctcccgctgatgattggaagaaaagcgagtcaagccgagagtacaagaacaataacaagctgagagaatatcagctggagggggtgaactggcttcttttcaactggtataatatgcgaaattgtatacttgctgacgagatgggactggggaaaacgatccagtcaataacgttcctatatgaaatctatctcaaagggatccacggaccatttctcgtaatagccccacttagcacaataccgaactgggagagggaatttcggacgtggactgagctgaacgtcgttgtctatcatggcagccaggccagccgaagaacaatccagctctacgaaatgtattttaaggatcctcagggtagagttattaaggggtcttacaagtttcacgcaatcatcactaccttcgagatgatacttaccgattgtcctgagctgcggaacatcccttggaggtgtgtggtgatagatgaggctcacagactgaagaatcggaactgcaagctgctggagggcctcaagatgatggatctggagcataaagttctgctcacggggacccctcttcagaacacagtggaagagctcttcagcctgttgcactttctggaaccctcaagattcccatctgagaccacattcatgcaagagttcggagacctgaagacagaggagcaagtgcagaaactccaggctatcctgaaacctatgatgcttcggaggttaaaggaggatgtggaaaagaatttagctcctaaagaggaaacgatcattgaagtcgagctgacgaacatccagaaaaagtactaccgcgccatcttagaaaaaaactttacatttctatctaagggaggtggtcaggcaaatgtacccaacctcctcaacacaatgatggagctgcgaaagtgctgcaatcacccttatttgatcaacggggctgaggagaaaatcctggaggaatttaaagaaactcataacgccgaaagccccgattttcagctgcaggcgatgatccaggccgccggcaaactggtgctcatcgacaagctgctgcctaaattaaaagccggcggacacagggtcctcattttcagtcagatggttaggtgtctggacattctcgaagattacctgatccagagacggtacccatatgagcgtatcgacgggagagtcaggggaaatcttaggcaggccgctattgatcggttctctaaacctgactccgatagattcgtgtttctactttgtaccagagctggagggttgggcattaacctcactgctgctgacacatgtattatctttgactccgactggaaccctcagaacgatctgcaagctcaggcaaggtgtcatcgtattggacagtctaagtccgtcaaaatttatcgcctcattacccgcaacagttatgagagggagatgtttgacaaagctagccttaaactgggactggataaggccgtactccagtctatgagcgggcgagaaaacgccacaaatggggtgcagcagctgagcaagaaggagatcgaggatctattacggaagggtgcatacggagccctgatggatgaggaggacgaaggatcaaagttttgcgaagaggacattgatcagattctcctgaggcggactcacacaatcaccatagagtcagagggcaaaggttcaacttttgcaaaagcaagctttgttgcttcagggaacagaaccgatatcagcctggatgacccaaatttttggcagaagtgggctaaaaaagcggaactggacatcgatgccctgaacggaagaaacaatctggtgatcgacaccccccgagtccgaaagcaaactcgattgtacagtgcggttaaagaagatgaacttatggagttcagcgatttggaaagcgatagcgaagagaaaccatgcgctaaaccccgcagaccccaagataagtcacaaggctacgcaaggtccgaatgctttcgcgtcgaaaagaatctcttggtgtacgggtggggtcgatggaccgatatactgtctcacggccggtataaacggcaactgaccgagcaagacgtggagaccatttgtcggactattctcgtgtactgtctgaaccactataagggcgacgagaatattaaaagctttatctgggatttgattactccgactgcggacggccagaccagggccctagttaaccatagtgggctgtccgcacccgtaccacggggacggaaagggaaaaaagtgaaagcgcagtccacccaacctgtggttcaggacgctgattggctggcaagctgtaatcccgatgctctttttcaagaggactcatataagaaacatctgaaacaccactgcaacaaggtgctgcttagggtgcgcatgctttactatttgaggcaggaagtgattggagaccaggctgataagatcctcgagggagcggattcaagtgaagctgacgtctggatccccgaacctttccatgctgaagtccctgccgattggtgggataaagaggcagacaaaagtttgctgatcggcgtttttaagcacggatatgagaagtacaactcgatgcgagccgatcccgccctgtgttttctcgagagggttgggatgccagatgctaaggctattgctgctgagcagcgcgggacagacatgctcgcagatggcggggacgggggggagtttgaccgtgaggacgaggatccagagtataagcctacccgcactcccttcaaggatgagatcgatgaatttgccaattcaccctccgaggacaaagaagaaagcatggaaattcacgccactggcaagcattcagagtctaatgccgaactgggccagctgtattggccgaatacctctacactcaccacccggctgcgacgtctgattacagcataccagagaagctacaagcgacaacagatgcggcaggaggccctgatgaaaaccgacagacggaggcggcgtcctagggaagaagtaagagcactggaagcggagcgcgaggctatcatatccgagaaacgccaaaaatggaccaggagagaagaagctgatttttacagagtagtatcaactttcggggtgatctttgatcccgttaaacaacaattcgattggaaccagtttagggccttcgccagattggacaagaaaagcgacgagagtctggaaaagtacttcagttgctttgtggcaatgtgtaggcgggtttgtcgaatgccagtgaagcccgacgatgagccccctgatctgtcttcaataattgagccgattacagaagagcgcgctagccggacactgtaccgcattgagttgctaaggaaaatcagagaacaggtactgcatcatccgcagctcggggagcgtctgaagctttgccagcccagcctcgacttgcctgagtggtgggagtgcggaagacacgatagagatctcctggttggcgcagcgaagcatggtgtttccagaaccgattaccacatcctcaacgacccagaactgagcttccttgatgcacataaaaacttcgcccagaacaggggagccggtaacactagctctctgaaccccctcgccgttgggtttgtgcaaacgcctccagtcatcagctccgctcacatccaggatgagagagtgctggagcaggctgagggaaaagtcgaggaacccgaaaacccagccgctaaagaaaagtgtgagggaaaagaggaggaagaagaaactgacggctcggggaaggagtcaaagcaagaatgtgaggcagaggcctctagtgtcaagaatgagctcaagggagtggaggtgggcgcagacacaggatcgaaatcaatctctgagaagggtagcgaggaagacgaggaggaaaagctagaagacgacgacaagtccgaggagtcatctcagcccgaagctggcgcagtgagccgtggaaagaacttcgacgaagaatctaacgcgtcaatgagtaccgctagggacgagacccgcgatggcttctatatggaagacggcgatccaagtgtcgcccagttacttcacgagagaacttttgcattttcgttttggccgaaagatcgggttatgattaataggctcgacaacatttgcgaagcggtgctgaaaggcaagtggccggtgaataggaggcagatgttcgactttcaaggtctcatacctggctataccccaaccaccgtcgacagccctctgcagaaaagaagtttcgccgaactgtctatggtgggccaggcttcaatttcgggaagtgaggacattacgaccagtcctcagttgtctaaggaagatgcgctgaacctctcagtgccgagacagagacgacggagacgtcgcaaaatcgagatcgaggccgagcgggccgcaaagagacgtaatttaatggaaatggtggcccagctccgcgagtctcaggtggtgagcgaaaatgggcaggaaaaggttgtggatttatcaaaagctagccgtgaggccacatcttcaacatcgaacttttcctcgctatccagcaagttcattcttcccaatgtcagtacacctgtgtcggatgcttttaaaacccagatggagctgctgcaggccggattgtctcgcactcccactcgccatctcttgaatgggagcctggttgacggggaaccacccatgaagcgaaggaggggaaggcgaaaaaatgtggagggactggacttacttttcatgagtcacaagcggacatcattgtccgcagaggacgccgaggttaccaaggcatttgaagaagacatcgagaccccaccgacaagaaatatcccatcacctggtcagttggacccagataccaggattcccgtgattaatttagaggatggtacccggctggttggggaagacgctcctaagaataaggacctcgtggagtggctcaagttgcacccaacgtacaccgtcgatatgcccagctacgtcccgaaaaacgccgacgtcctcttcagttcctttcagaaacctaagcaaaagagacatcggtgccggaatcccaacaagctggacataaataccttgactggggaggagcgcgtgccagtggtgaacaagagaaacggaaagaaaatgggaggagccatggccccgccaatgaaagacctccccagatggttggaggaaaatcctgagttcgcagtggcccccgactggaccgacatcgttaaacaatcggggttcgtcccagagagcatgttcgaccgattgcttaccggacccgtggttagaggtgaaggcgccagtcggcgcggcagacgacccaagtcagagatcgctagagcagcagccgcagctgcagccgtggcgtccacctccggaataaacccccttttggttaactctctgttcgctggcatggatctgacaagtctgcagaatctgcagaatttgcaatccctccaactcgccggcctgatggggttcccccctgggttggccacggctgcaactgccggtggagacgcaaaaaaccccgcagctgtgctgcctctcatgctgcccgggatggccggcctccctaacgtgttcgggctgggaggacttcttaataatcccctatctgcagccaccggcaacaccaccacagcctcctctcagggcgagcccgaggactctacttccaagggcgaggaaaaggggaacgaaaacgaagacgagaataaagatagcgagaaatccacggatgccgtaagcgctgccgactcagccaatggcagcgtgggcgccgccacggcgccagccggtcttccctctaatccattggccttcaacccattcctcctatccaccatggctcctggcttgttctatccatcaatgttccttcctcccggcttgggggggctaacgttgcccggctttcccgcattagctgggctccagaatgctgtaggatcctccgaagagaaggccgcagataaggcagaagggggaccctttaaggatggagagaccctggaggggagcgatgcagaggagtccctggacaaaaccgctgagagctcactcctggaagacgagatcgcacagggagaagagttagattcattggacggaggagacgagatagagaataacgaaaatgatgagtag

SEQ ID NO: 112138 - DNA, 102 bp, synthetic construct
  misc_feature 1..102: note = Description of Artificial Sequence: Synthetic coding sequence
  source 1..102: mol_type = other DNA
atggccgatcctggaatgatgtccttgttcggagaggacgggaatatcttctcggagggactggagggcttgggagaatgtgggtacccggagaacccatag

SEQ ID NO: 112139 - DNA, 6906 bp, synthetic construct
  misc_feature 1..6906: note = Description of Artificial Sequence: Synthetic coding sequence
  source 1..6906: mol_type = other DNA
aaaggagagtctaaaaggattacattggtgctgcaacagccacaaagtggcggcccacaagggcaccgacacgtagtcctgggctccctgcccggtaagatcgtcctacaaggtaaccagctggcagccctcacacaggcgaaaaatgcccaggggcagccagctaaagttgtaactattcagctccaggttcaacagccacagcagaaaatccagatcgtcccccaacctccaagcagtcagccccagccccagcagccaccatccacccagccagtgaccctatctagtgtccagcaagctcagattatgggcccaggccagtctcccggacaacggcttagcgtgcctgtcaaggtggtactgcagccccaggctggtagctcccagggcgcctctagtggattgagcgtggttaaggtcctgtctgcctccgaggtagcagctctttccagccccgctagctccgccccacatagcggagggaaaacagggatggaagaaaaccgccgtctcgagcatcaaaagaagcaggagaaagccaatcgcattgtcgccgaggctatcgcccgcgccagggccaggggggaacagaatatcccgagagtgctaaatgaggatgagttgcctagcgttcgaccagaggaggaaggagaaaagaagcgcagaaaaaaatccgccggagagcgcctgaaggaagagaagccaaaaaaatctaagaccagcggagcttcaaagaccaagggcaaatctaagcttaacacgattactcccgttgtgggcaaaaaacgaaaacggaacacctcttccgacaactcagatgtcgaggtgatgcctgcccagtcccctagggaggatgaggaaagttctattcagaaacgtcgctctaacagacaagtcaaacgcaaaaaatacaccgaggatctcgatataaagattactgacgatgaagaagaagaagaggtagacgtcacagggcctattaagcctgagccaatcctgccggagcctgtgcaggagcctgacggcgaaaccctgccaagcatgcaattcttcgtggagaatcctagcgaagaggatgctgccattgtggacaaggtattatcaatgcgaatcgtaaaaaaggaactcccatcaggccagtataccgaggccgaggaattcttcgtcaaatataaaaactacagctacctgcactgcgagtgggccaccatctcccaacttgaaaaagataagagaatccaccagaaactcaagcgattcaagaccaagatggctcaaatgagacattttttccatgaggatgaagaacccttcaatccagattatgtagaagtggatcgcattctggatgagtctcacagcatcgacaaggacaatggtgagccagtgatttactatctggtgaagtggtgctcccttccctatgaagattctacatgggagctcaaagaagatgtcgacgaagggaagattagagaattcaaacggatccagagccggcacccagagttgaaacgcgttaaccggcctcaggcaagcgcctggaaaaaattggaactctcccatgagtataagaaccgaaaccaactgagagagtaccagctcgaaggggtgaactggttgctgttcaattggtataacaggcagaactgcatcctcgcggatgagatggggctgggcaaaaccattcagagcatcgcctttctgcaggaggtttataacgtcggaattcacggccccttcctcgtcatagcacccttgtctaccatcacaaactgggagagagaattcaacacttggactgaaatgaataccatcgtgtaccatggctccttggccagcaggcaaatgattcagcagtacgagatgtactgtaaggattctagagggcgcctgattcccggtgcatataaatttgatgcactgattaccacctttgaaatgatcctgagcgactgtccagagttacgggagattgagtggagatgcgtcattatcgacgaggctcaccgactcaaaaacagaaattgtaagttgctggacagcctgaagcacatggacctagagcataaggtactgttgacgggcacaccactccagaacacagtggaggaattattcagcttgcttcactttctggaaccgagccagttcccgtccgagtctgagtttcttaaggactttggagaccttaaaactgaggagcaggtgcagaagctccaggctatcctcaaacccatgatgcttcgaaggctgaaggaggacgttgagaaaaatctggccccaaaacaggagactattattgaagtagagctgacaaatatccagaaaaagtactaccgtgcaattctggaaaagaatttcagctttctcagcaaaggcgcaggccatacaaacatgccaaacctgctgaatacaatgatggaactcaggaagtgctgcaaccatccctacctgatcaacggggccgaggaaaagattctgaccgagtttagagaggcgtgccacatcatcccacatgattttcacctgcaggcaatggtgcggagtgctgggaaactcgtactgattgacaagctgctcccaaagttgaaggcaggggggcacaaagttctcatattttcccaaatggtgagatgtcttgatattctggaggactacctcattcagaggcggtacttatacgaaaggatcgacggaagagttcgtggtaatttgagacaagccgcgatagaccgcttctcgaagcctgattccgacagattcgttttcttgctatgcacaagagctggggggctggggataaacctaaccgccgctgatacatgtattatcttcgactctgactggaacccccagaatgacttgcaggcacaggctcgctgccacaggattgggcagtccaaggctgttaaggtgtataggctgatcactagaaactcatatgaaagagaaatgttcgataaggcctcactgaaactgggactcgacaaggcggtgctccagagtatgagcggtcgtgatggaaacatcacggggatccagcagttttccaaaaaggagatcgaagacctgcttagaaaaggagcttatgccgccatcatggaagaggatgacgaaggcagtaagttctgcgaagaggatattgatcaaattctcctgcggaggacaactacaatcacaatcgaaagcgaaggtaaggggagcacttttgccaaggccagttttgtggcatcagaaaaccgcaccgacatttcactagacgaccctaacttttggcaaaaatgggctaagaaagctgacctggacatggacctcctgaattccaaaaataatctcgtcattgacacaccacgggtgcgtaaacaaacccggcacttctcaaccttaaaagacgacgatctcgtcgagttcagcgacctggagtccgaggacgatgagaggccacgcagcagacgacacgaccggcaccacgcttacggcaggaccgactgctttcgcgtcgagaagcacctgctcgtatatggctgggggaggtggcgcgacatcctgtcacatggccgcttcaaacgaagaatgactgagcgggatgtggagacaatttgcagggctattttagtgtactgcctactgcactaccggggggacgaaaatattaagggatttatttgggacctcatctcgcccgcagagaatggcaaaaccaaagaacttcagaatcattccgggctttctatccccgttccacggggtagaaaaggaaaaaaggtgaaaagccagagtacgtttgatatacataaggccgattggatccggaaatacaatccagacacactgtttcaggatgagtcatacaagaaacacttaaaacaccagtgcaacaaagtcctattaagagtccggatgctatactatctaaggcaagaagtaattggggaccaggcagaaaaagtgctgggtggggccattgcgtccgagatagatatttggttccctgtggttgatcagcttgaggtcccaacaacctggtgggattcagaggcagacaagtctctcttgatcggcgtgtttaaacacggttatgagaagtataatactatgagggctgatcccgccctgtgctttctcgaaaaggcagggcggcctgacgacaaagccatagctgctgaacaccgggtcctggataacttttctgacatagtggaaggcgtcgactttgacaaagactgtgaggatcccgagtacaaaccactccagggaccccctaaggaccaggatgacgagggcgacccgctgatgatgatggatgaagagatatctgtgatcgacggggacgaggctcaggtgacccaacagcctgggcacctattttggccacctgggagcgccctcacagcccgcctcagacggctggtgactgcctatcagcgaagctataagagggagcagatgaagatcgaggcagcagagcgaggcgataggcgccggagaaggtgtgaggccgctttcaagctgaaggaaattgctcgccgggaaaagcagcagcgttggaccagacgtgagcagaccgatttttatcgcgtggtttcaacatttggggtggaatacgaccccgataccatgcagtttcactgggataggttcaggactttcgcacggctggacaagaaaacggacgagtccctcactaaatatttccacggatttgttgctatgtgtcgccaggtatgcaggttgcctccagcagcgggagacgaacctccggatcctaacctgtttatagagcctattaccgaggaaagagcgagtcggaccttatatcgcattgagttactcaggcgtctccgcgaacaggttctatgtcatccattgctggaggatagactggcactgtgtcagccacccggccctgagctcccaaagtggtgggaacccgtgcggcacgatggcgaactgctcaggggcgccgccagacacggagtcagccagactgattgtaatattatgcaggacccggacttttccttccttgctgcacgaatgaactatatgcagaatcatcaagctggggcgccggcgcccagcctgtcaagatgttcaacgccactgcttcaccagcaatatacctcccggaccgcctcgccactgccccttaggcccgacgcccctgtggaaaaatctcctgaagagaccgcaacgcaggtcccatcactcgagtctttgacacttaaacttgagcatgaggtggtggccagatctagacccaccccccaggactacgagatgagggtaagcccctctgacacgacgccactcgtctcccggtcggtgccccctgtgaagttagaggatgaggatgacagcgacagtgagttggacctgtccaagctgagtccttctagctcttcttcatcaagcagctctagctcatcgtctagcactgatgagtcagaagatgagaaggaagaaaagctcaccgaccaaagccgcagcaagctgtacgatgaggagtcgttgctgtccctgactatgtcgcaggacgggttccctaatgaggacggagagcagatgacacctgaactgttgttattgcaagaacggcagcgggcttcggaatggcctaaagaccgggtcttaattaacaggattgatttggtttgtcaagccgtgctgtccggtaaatggcctagttcacgccgctcccaggagatggtgaccggcggcatccttggaccgggcaaccatcttctggactctccgtccctaaccccgggagaatacggcgacagcccggtgccaaccccaagatcatcttccgccgcttccatggctgaggaagaagcctccgccgtgtctacggccgctgcacaattcactaagctaagaagggggatggacgaaaaggagttcacagtgcaaatcaaggacgaagagggtctgaaattgacattccaaaagcacaagctgatggcaaatggggtaatgggagatggacaccctctgtttcacaagaaaaaggggaaccgaaagaaactggttgagttggaagtggaatgcatggaggagcctaaccacctggatgtggacctggagaccagaatcccggtgataaataaggtggatggtacattgttggtgggtgaggacgctcccagacgggccgagcttgagatgtggctacagggccaccccgaatttgcagtggaccccagatttcttgcctatatggaggaccgtcgcaaacagaagtggcagcgctgcaagaaaaataacaaggctgagttgaattgcttgggtatggaaccagtccagactgcgaattcgagaaacggaaagaaaggccaccacacagagaccgttttcaaccgagtgctccctggtccaatagccccagaatccagcaagaaacgtgcccgccgcatgaggccagacctgagcaaaatgatggcgttgatgcaaggcggcagtacaggatctttgtccttacataatacatttcagcattcatcctcagggttgcagagcgtatcctctcttggacatagctctgctacttcggcaagcttaccctttatgccattcgtgatgggtggagccccatcttcaccccacgtcgattcctccacaatgctgcatcatcaccaccaccatccccatccacatcatcaccatcaccatcacccaggcctcagggcccctggatatccctccagccctgtgaccactgcctccggcacgaccttgcggctgccccctctgcagcctgaggaggacgacgatgaagacgaagaagatgatgatgacctgagccagggatatgattcttccgaacgtgacttctcgttgatagatgatccaatgatgccggccaatagcgattccagcgaagacgcagacgactag

SEQ ID NO: 112140 - DNA, 7746 bp, synthetic construct
  misc_feature 1..7746: note = Description of Artificial Sequence: Synthetic coding sequence
  source 1..7746: mol_type = other DNA
atggcggatcccattatggacctgttcgatgatcccaacctgtttgggttggacagcttgaccgacgattcctttaatcaggttacccaggacccaatcgaggaggcactcggtctgccatccagtctggactccttggaccagatgaatcaggacggcggggggggcgatgtgggcaactcttccgcgagtgagttggtcccgcccccagaagagactgcaccgaccgagcttagcaaagagagtacagccccagccccagaaagcatcaccttgcacgactacaccactcaacctgcctctcaagagcagccagcgcaacctgtgctccagacatcgacacctacctctggcttgctccaggtcagtaaatcacaggagattctttcacaagggaacccttttatgggagtttccgcgactgcagttagtagctcttccgccggcgggcagcccccccaatctgcaccaaagatcgtaatccttaaggcccccccaagcagctctgtcaccggggcccatgttgcccagattcaggcccaaggcatcaccagcacagcccagcccctcgtagcaggtaccgcaaacggagggaaggtgaccttcacaaaggtattgacagggacccctttgaggcctggcgtgagcattgtctcagggaatactgtgttggccgccaaggtcccaggtaatcaggcagctgttcagcgcatcgtccagcccagtcgccctgtcaagcagctcgttctacagcccgtcaaagggagtgctcctgccggtaaccctggcgctacagggccacccttgaagccggcagtgacactgacatcaacgcctacgcagggagaatccaagcgaattacgctcgtgctccaacagccacagagcggaggaccccagggacatagacacgtggttctggggagtctcccaggcaagatagtgctgcaggggaatcagttggccgctctgactcaggccaaaaacgctcagggccagcccgctaaagttgtcaccatccagctgcaggtgcagcaaccacagcaaaaaatccagatagtgcctcagccaccctcttcccagccacaaccccaacagccgccgagtactcagccagtcacgctgtcatcagtccagcaggcccagattatgggccccgggcagagtccgggtcagagactgtccgttccagtgaaggtggtgctacaaccccaggccgggagctcccagggcgccagctctggtctttctgttgtgaaggtgctgagtgcttcggaggtcgcagcactctcatctcccgcatcttccgcaccacatagtggcggtaagaccggaatggaggagaaccgtaggctggaacatcagaagaaacaagagaaagctaacaggatagtagcagaggctatcgcccgggcccgggcccgtggcgagcagaacatccctcgggtcctgaatgaggacgaattgccctcggtccggccagaagaggagggtgaaaagaaaagacgaaagaaatctgccggagagcgcctcaaggaggagaaacctaagaagtctaagaccagtggcgctagcaaaaccaaagggaaatctaaactcaacacaataacgcctgtggtgggtaagaaacggaagcggaatacctcttcagacaatagcgatgtagaagtaatgccagctcagtcaccccgcgaggacgaagaatcttccattcagaaacgaaggtcaaatcggcaggtgaaaaggaaaaaatatacagaagatctggacattaagatcacagatgacgaagaggaggaggaggtcgacgttactggccctatcaaaccagagccgatcctccccgagcccgtgcaagagcctgacggggagacactaccatctatgcagttcttcgtggagaacccctccgaggaagatgctgcgattgtggacaaggtgctgtcgatgaggattgtcaagaaggagctaccatctggacagtacaccgaggcagaggagttcttcgtgaagtataagaactattcctatctgcattgtgagtgggctaccattagtcagctcgagaaggacaaaagaattcaccagaagctgaagcggttcaagactaaaatggcccaaatgaggcactttttccatgaggatgaagagcccttcaaccctgattatgtagaagtggaccggattcttgacgaaagccatagcatcgacaaggataacggcgaaccagtgatctactacctagttaaatggtgttctttaccttatgaagacagcacctgggagcttaaagaggatgtggacgaggggaagattcgtgagtttaaaaggattcagtcacgccatccagaacttaaaagagtaaaccggccccaggcttccgcctggaagaaacttgagctgagccatgagtataagaaccggaaccagttgcgcgagtaccaactcgaaggcgtcaattggctcctcttcaactggtataatagacagaattgcatactggctgatgagatgggactgggcaagaccatccaatctattgcctttctgcaggaggtttataatgtcggtatccatgggccctttctcgtgatagctcctttgtcaacgatcaccaattgggaacgggaatttaacacctggacagaaatgaataccatagtgtaccacggatccctcgccagccgccagatgatccagcagtatgaaatgtattgtaaagattcacgtggaagattaattccaggcgcttataagtttgacgcactgatcaccacattcgagatgatcctgtcagactgtcccgagctgcgcgaaatcgaatggcggtgcgtgattattgacgaggctcaccgcctgaagaaccggaactgtaaactgctcgacagtctgaagcacatggacctggagcacaaggtgctgctgactggcacgccactccaaaataccgttgaagagctgttttcccttctgcactttctggaaccatcgcaattcccctccgaatccgagttcctcaaggactttggcgatctaaagactgaagaacaggtacagaagctgcaggccatcctaaagccgatgatgctgcgacgtttgaaggaggatgtggagaagaacttggccccaaagcaggagactataatcgaagtggagctgactaatattcaaaaaaaatactatcgcgccatcctggaaaagaatttcagcttcttgtcgaagggagccggccacacaaacatgcccaatctgctgaatactatgatggaactgcgcaagtgctgcaaccacccctatctaattaacggagctgaagagaaaatactgactgagttcagagaggcctgccacattattccacatgatttccatctgcaggccatggtgagaagcgcgggaaagctagtcctaattgataagctccttcctaagctcaaggccgggggtcacaaagttctgatattcagccagatggtgagatgtctggacatcctggaagattatctgattcaaaggcggtatctatacgagcgaattgacggacgggtgagaggaaacttaaggcaggcggccattgacagattctcaaaacccgacagcgaccgcttcgtcttcctgctctgcacacgggccggagggctggggataaatctgaccgccgccgatacctgcattatttttgatagcgattggaaccctcagaacgatcttcaggcacaggcacggtgtcacaggatcggccagtccaaagccgtgaaggtgtatagactgatcacgcggaactcctatgaacgtgaaatgtttgacaaggcctccctgaagcttgggcttgataaagctgtgctccagagcatgagcggccgcgacggaaacattaccggtatccagcagttttctaaaaaggaaattgaggatctattacgaaagggagcctatgccgcgatcatggaagaagacgacgagggttctaaattttgcgaggaagacattgatcagattctactgcgccggaccactaccatcacaatcgaatccgaaggaaagggctctacattcgccaaggcatctttcgttgccagtgaaaacaggacagacatctcactcgatgaccctaatttctggcaaaaatgggctaagaaggctgatctggatatggacctgctcaatagcaaaaacaatcttgtgatcgatacaccccgggtgcggaaacagacgcgccacttcagcaccttgaaggatgacgatctagtggaattctccgatctggaaagcgaggacgacgaaaggccacgcagccgaaggcacgaccggcaccacgcctacggtcgcacagactgtttccgggtggagaaacacctgcttgtgtacggatggggacgatggagggatattttaagccatgggcgattcaagcgacgcatgaccgagagagatgtggaaacgatctgccgggctattctcgtgtactgtctgctacattatagaggggatgagaacattaaaggtttcatatgggatctcatttccccagccgagaacggaaaaaccaaagagctccagaatcacagcggactgtctatcccagttccgagaggtcggaagggaaaaaaggtcaagtcacagtccactttcgatatccacaaggcggactggatcaggaagtacaacccagatacactcttccaagacgaatcatataagaaacatcttaagcaccagtgtaataaggtgctgctccgagttcggatgttgtactacttacggcaagaggtgatcggggaccaggccgagaaggtactgggaggcgcaatcgccagcgaaattgacatctggttccctgttgtggatcagttggaggtgccaacaacatggtgggactctgaagctgacaagtcgcttttaataggcgtatttaaacatggatacgagaaatacaatacaatgagggctgatccagccctttgtttcctggagaaggcaggcagacccgacgacaaggctattgcggccgagcaccgtgtcctagataatttttccgatattgtagaaggagtcgattttgacaaagactgcgaagacccagaatacaagcccctgcagggccctccgaaggaccaggatgacgagggagatcccctcatgatgatggatgaggagatttcagtgatagatggggatgaagcacaggtgacccagcagcctggccatctgttctggccacccggaagcgccctgaccgcgcgtctgcggcggctggtcaccgcttaccagcggtcttacaagcgggagcagatgaaaattgaagcagcagaaagaggagacaggcggcgacgcagatgtgaggcggccttcaagctgaaagagatcgcacgtcgggaaaagcagcaaagatggacccgtcgggagcaaacagatttctatagagtcgtgtccacattcggggtggaatatgatccggacacgatgcaattccattgggatcgcttccgaaccttcgctcgacttgataaaaagaccgatgagtccctgacgaagtacttccatggcttcgtggcaatgtgtcgccaggtatgtcgacttccccccgctgctggggatgagccccctgacccgaatctctttatcgagccgatcactgaagagagggcttctcgtacgctgtatcggattgaactgcttaggcggctgcgcgaacaggtactgtgtcatccattgttagaggatcggctcgcactgtgtcaacctccgggaccggagcttcctaagtggtgggagcccgtccgtcacgatggggaactcctccggggagctgctaggcacggcgtgtcccagactgattgcaacattatgcaggacccggacttctcatttctcgctgcacggatgaactatatgcagaaccaccaggcaggggcgcctgcaccttctttaagtagatgttctactccactgctccaccaacaatacacttcgaggacagcgtctcctctccctctccgccctgacgctcctgtagaaaagagccccgaggaaacggctacacaagtaccctctcttgagagtctcactctgaagcttgaacacgaggttgtcgcaagaagtagaccgactccgcaagactacgaaatgagggtctctcccagtgataccacaccactggtctcacgctccgtgccccccgtgaagcttgaggatgaggacgatagtgacagcgagctggatctttccaaactctctccctcctccagcagctcctcttccagctcttcaagttcatcctctacagatgaatcagaggacgagaaggaagaaaaattgacagaccaaagcaggtctaagctttacgacgaggagtcgctgctatccctcaccatgtcccaggacggcttcccaaacgaggacggagagcagatgacaccagaactgcttctgctgcaggagaggcagcgtgcatctgaatggcctaaggacagagttctgataaacagaatcgatctggtatgtcaagccgttctaagcggcaagtggccaagttctcggcgttctcaggagatggtcacagggggtatccttgggcccggcaatcatcttctggactcgccctcccttactccaggggaatacggcgactctccagtgcccactccacggtcctcctctgccgcgtccatggctgaggaggaggcaagtgctgtgagcactgccgccgcccagttcacaaagctaaggaggggcatggatgagaaagaatttactgtccagatcaaggatgaagagggtctcaaactgaccttccaaaaacacaaacttatggctaacggtgtcatgggggacgggcaccctctcttccataaaaagaaaggaaacagaaaaaagctggtcgaattagaggtggaatgtatggaggagcccaatcaccttgacgtggatctcgaaactaggatcccagtgatcaacaaagttgacggcaccctgttggtgggagaggatgccccacgacgcgccgaattggaaatgtggctgcaaggccatcctgagtttgccgtcgaccctcggttccttgcctatatggaggatcggcgcaaacagaagtggcagagatgcaagaaaaacaacaaagcggagcttaactgcttgggaatggaaccagtgcaaacagctaactcgaggaacggaaagaaggggcatcataccgagacagtgttcaatcgtgtattgcctggaccgatcgccccagagtcgtcgaaaaagagagcccgcaggatgcgaccagacctctctaagatgatggccttgatgcaaggaggatctaccggtagcctgagtttgcataatacgtttcagcacagctctagcgggctccagagcgtctcgtcacttggccacagtagcgcaacttctgcctccttgcccttcatgcctttcgttatgggcggagcgccctcaagcccgcacgtcgatagttctactatgctgcaccatcaccatcaccaccctcatcctcaccaccaccatcaccaccacccaggattacgggccccaggttatccatctagccctgttaccaccgcttctggcaccacattacgtctgcctcccctccaacccgaggaggatgacgacgaggacgaggaggacgacgatgatttatcccagggctatgactcgtccgaaagggactttagcctgatcgacgatcctatgatgccggctaattcagacagtagcgaagacgctgacgactag

SEQ ID NO: 112141 - DNA, 6909 bp, synthetic construct
  misc_feature 1..6909: note = Description of Artificial Sequence: Synthetic coding sequence
  source 1..6909: mol_type = other DNA
atgaagggggagtctaaacgcatcacacttgtccttcaacaaccgcagagcgggggcccccagggccatcgtcacgtcgtcctcgggagcctccccggtaagattgttctgcagggcaatcagctggctgctcttacccaggctaaaaacgcgcaaggacaacccgctaaagttgtcacaatacagctgcaagtgcaacagccccagcagaagatacagatcgtgccacagccccctagctctcaaccccagccacagcagcctcctagcacccagcccgtcactctgagtagtgtgcagcaggcccaaatcatgggtcccgggcagagccctggacagaggctcagcgttcctgtgaaagtagttctgcagccgcaagcaggctcgtcacaaggtgcctccagcggtttgtcagtcgtgaaagtactgtccgctagcgaagtggctgccctttcgtcccccgcctcgtccgccccccactctggcggcaaaactggaatggaggagaaccgacggctcgagcaccagaaaaagcaggaaaaggccaatcgcatcgttgcagaggcaatcgccagagcccgcgccagaggggaacagaatataccgcgggtgctgaacgaggacgagcttccttccgtgagacctgaagaagagggtgagaaaaaacggagaaagaagtcagccggcgagcggctgaaggaagagaaaccgaaaaaaagcaaaacttcaggggcttctaaaaccaaaggcaagagcaagctgaacaccatcaccccagtggtagggaaaaagagaaaaagaaacacaagttcagataactccgacgtggaagttatgcccgcacaaagcccacgcgaagacgaggaatccagtatacagaagcggcgctctaatagacaagtgaaacgcaagaagtataccgaggacctggacatcaagatcaccgacgatgaggaggaggaggaagtggacgtgacgggaccaatcaaaccggaacctatcctgcccgagcctgtgcaggagcccgacggcgaaaccctgccatccatgcagttcttcgtggaaaacccaagcgaagaggacgccgctattgtggacaaagtactttctatgcgcatcgtgaaaaaggaactgccatctggacagtatacagaggccgaggagttttttgtcaagtacaagaattattcttacctccactgtgaatgggccacaatcagtcagctggaaaaagataagcggatccaccagaaactaaagagatttaagactaagatggcgcagatgagacacttcttccacgaagacgaagagccttttaaccccgactatgttgaagttgacaggatactggacgaaagccactccatcgacaaggacaatggtgagccagtcatctattatcttgtgaagtggtgttcccttccttacgaggacagcacttgggaactcaaggaagatgtagatgaaggaaaaattcgggagttcaaaaggatccaatccaggcaccctgagctcaagcgtgtcaaccggcctcaggcctccgcctggaaaaaactggaactctctcacgagtataaaaaccggaaccagcttcgcgagtaccaattggaaggggtgaattggctcctgtttaattggtacaatagacagaattgcatcttggctgatgagatgggcctcggaaagaccatccaaagtatagcctttctccaggaagtgtataatgtggggatccatggcccctttctggtgattgcgcccctgtccacaatcactaactgggaacgagagttcaatacctggactgagatgaacaccatagtttaccatggttcgctggcttcacggcaaatgattcaacagtacgaaatgtattgtaaagactcgcgtggccgcctcatacccggtgcctacaaattcgacgcgctaattacaacattcgagatgattctgagcgattgccctgagctgcgagagatcgagtggaggtgtgtgataattgacgaggcacaccgccttaagaatcgaaactgtaaacttttggactctctcaaacatatggacctggaacataaggtcctgctgacaggcacgcccctacagaacacagtggaggagctcttcagcttactgcacttcctggagcccagccagtttcctagtgagtcagaattcctgaaagatttcggcgacctgaaaaccgaggaacaggtccagaagctacaggcaattctgaagcccatgatgttgcgccgactcaaagaagatgtcgaaaaaaacttagctcctaagcaggagaccattattgaggtggaactgacgaatattcagaaaaagtactatagagccatcctggagaagaactttagcttcctaagcaaaggagctggccacacaaatatgcccaacctgttgaataccatgatggagctgagaaagtgctgtaatcatccctacttgatcaatggagccgaagagaaaattttgaccgagttccgcgaggcctgtcacataattcctcatgatttccatctgcaggctatggtccggtccgccgggaaactggtcctgatagacaagctgctgcctaagttaaaagccggcggccataaagtgctgatcttcagtcaaatggtgagatgtctggatatcctggaagattacctaatccagagaagatacctatatgaaaggatcgacggcagagttcgcgggaatctgcgacaggcagctattgaccggttctctaagccggatagtgatcgattcgtctttcttttatgcactcgcgcagggggactgggcatcaacctgactgccgccgatacttgcatcattttcgactctgattggaatcctcaaaacgatttgcaggcacaggccagatgccacagaatcgggcagagcaaagctgtgaaggtctatcggctcatcacacgcaatagctacgagcgagagatgttcgacaaagcttccttgaagcttggactggataaggctgtactgcaatcaatgagtggtagggacggaaatatcaccggaattcaacagttcagtaagaaggagatcgaagacttattgagaaaaggggcctacgccgccatcatggaagaggatgatgaggggtctaaattttgtgaggaagacatagatcaaattttattgcgacggaccaccaccatcactatagagtctgaagggaagggaagtacttttgccaaagcctcgttcgtagcgagtgagaatcgaaccgatatttctttagatgaccccaacttctggcagaaatgggctaagaaggccgatctcgacatggatctgctgaattctaagaacaatctagtgatcgatacaccgcgtgtgcggaagcagacacgccatttctcgaccctcaaggacgacgaccttgtggagttttctgatcttgaatcagaagacgatgaacgcccccgctcccgcagacacgatagacaccatgcctatggcagaacagactgctttagagtagaaaaacacctgctcgtatacggttggggcaggtggcgagacatcctgtctcatggaagattcaaacgtaggatgacagagcgcgacgtggagacaatatgccgcgccatacttgtgtattgtctgctgcactaccgaggggacgaaaacataaaagggttcatctgggaccttatctcaccagccgagaacggtaagactaaggagctgcagaatcattcaggcctgtccattcctgttcctagagggcgcaaaggtaaaaaagttaagagtcagagtacctttgatatccataaggccgactggatcaggaagtacaacccagatacactgtttcaagacgaatcctacaagaaacacctgaagcatcagtgcaacaaggtactcctgagagtgagaatgctctactatctgcgtcaggaagtcatcggagatcaggctgaaaaggtcctgggcggcgccattgcttctgaaattgatatttggtttccggtggtagatcagctggaagtgcctactacctggtgggacagcgaagccgacaagtctctgctgattggagtgttcaagcatggatatgagaagtataataccatgagagcagaccctgccctgtgcttcttggaaaaggcaggcagaccagatgataaagcaatcgcggcggaacaccgggtgctggataacttcagcgatattgtggagggtgtggactttgacaaagactgcgaggatccagagtataagccgctccagggacctcctaaggatcaggacgacgaaggagatccactgatgatgatggacgaggaaatatccgtcattgatggcgatgaggcccaggttactcaacagccaggccacctgttctggcccccagggagcgcactgacagccagacttaggcggctggtcactgcttaccagcggtcgtataaacgggagcagatgaaaatagaggccgccgagaggggggaccgcaggaggagaaggtgcgaagccgcctttaagcttaaggagatcgctcgcagagagaaacagcagcgatggacccgcagggaacagaccgatttttatagagtagtatcaacctttggggtggaatatgaccccgataccatgcaattccattgggataggttccgaactttcgcccgtctggataagaagactgatgagtctctcactaagtacttccacgggtttgttgccatgtgtcggcaagtttgcagactgccaccagcagccggtgacgagcccccagatccaaatttattcattgaacccatcacagaggagcgagcctccaggactttgtataggattgagcttctgcggaggcttcgggagcaagtcctgtgccatcccttgctggaggaccgactcgccctgtgtcagccacctgggccggagctccctaagtggtgggagccagtcagacacgacggggagctgctgaggggtgcagcgagacacggtgtgtcacagactgattgtaacatcatgcaggatccagacttttcattcctcgctgccagaatgaattacatgcagaaccatcaggcaggcgcccccgcacctagcctgagccgttgctccactccactgctccatcaacagtatacctcgaggactgccagccccctgcctttaaggcccgatgccccagtggaaaagtcccctgaagagactgcgacgcaggtgcctagcttggagtctttgactctgaaactcgagcatgaagttgtcgcccgctccaggccaaccccccaggattatgagatgcgcgtgagcccaagcgatacaactccactggtatccagatctgtcccacctgtgaaactcgaggacgaggacgacagcgattcggaactggatctgtccaagctgtccccatcctcatccagtagctcatcatcgtcctccagcagttcctcaactgatgagagtgaggacgagaaggaagagaaactgactgaccaatctaggtcaaagctgtatgatgaggagtcactcctgagcttgacaatgtcccaggacggatttccaaacgaagatggggaacagatgacccctgagctgttgctgctccaggagcgacagcgagcttccgagtggcccaaggacagggtgttaataaacagaattgacctcgtgtgtcaggcagtgctgtctggtaaatggccctcttcacgccggtctcaggaaatggtcacaggtggcatcctggggccgggcaaccacctgcttgactcgccttccttaaccccaggtgagtacggtgatagcccagtgccaactccccgctcatcttccgctgcaagtatggctgaggaggaagccagcgcggttagtactgccgccgcccagtttaccaaattgcggcgcgggatggatgaaaaggaatttactgtgcagattaaggacgaggagggcttaaaactcacctttcagaagcacaaactcatggctaacggtgtgatgggagacggtcatcccctgtttcacaagaaaaagggcaatcggaaaaagttggttgaactggaagttgaatgcatggaagaacccaatcacctggatgtcgaccttgaaacgcgaattcccgtgatcaataaggtagacggcaccctgctggttggcgaggatgctcccagaagagcagagctggagatgtggttacagggacatcccgaattcgctgtggacccgaggttcctcgcgtatatggaggatagacggaaacaaaaatggcagcgatgtaaaaagaataacaaggctgaactaaactgtctgggcatggagcctgtgcaaacagcgaatagtcgtaatggtaaaaagggccaccacactgaaaccgtatttaacagggtcctgcctggcccaatcgctccagagtcaagcaagaaaagggcaagaaggatgaggccagatcttagcaaaatgatggcgttaatgcaaggcgggagtacggggagcttaagtctgcataatacgttccagcactcaagcagcgggctccagtcagttagctccctcggacattcatccgcgacctctgctagtctccctttcatgcccttcgtaatggggggcgctccttcgtctccccatgtggacagttcaacgatgctgcatcaccatcaccatcatccacacccccatcaccatcaccatcatcacccagggctcagagcaccgggatatcctagtagcccagttactaccgccagtggcacaacgctgagacttcctcccctgcaacctgaggaggatgatgatgaagacgaggaggatgatgatgatctgtcacagggatacgatagcagcgaaagggactttagcttaattgatgacccaatgatgcccgctaacagcgatagcagtgaggatgctgatgattag

SEQ ID NO: 112142 - DNA, 7746 bp, synthetic construct
  misc_feature 1..7746: note = Description of Artificial Sequence: Synthetic coding sequence
  source 1..7746: mol_type = other DNA
atggcagatcccatcatggacttattcgatgaccccaatctcttcggtttagattcactgacggatgactcttttaaccaggtcacccaggatccgattgaggaagctctcggcctgcccagctctttggacagtctggatcagatgaaccaggatggtggtggtggagacgtaggaaactcgagtgcgtccgaactggtcccgcctccagaagagactgcacccacagaacttagcaaggaatcgaccgctcccgccccagaatcaatcacccttcatgattatactactcagccagcttcacaagagcagcctgcgcagcccgtccttcagaccagcactccaacctctgggctgcttcaagtcagcaaatcacaagaaattttgtcccagggaaacccctttatgggcgtttcggccacggccgtatctagcagtagtgccggcggtcagcccccacagtctgcccccaagattgttattcttaaggcccctcccagctcatccgttacaggcgctcacgtagcccagatccaggcccagggaatcacatcaactgcacagccactcgtggccgggaccgcaaatgggggtaaggtgaccttcaccaaagttctcaccggcacccctctgaggccaggagtctccatcgttagtggaaatacggttcttgctgccaaagtccccggcaaccaggctgctgttcagagaatcgtgcaaccaagcaggccagtcaagcagctcgtgctccagccagtgaaggggtctgccccagccgggaatcctggtgcaacagggcctccactgaaacccgctgtgactctcacctctacacccacccaaggcgagtctaagcgaatcaccctggtgctacagcagccccagtcggggggtccccaaggccacagacacgttgtactgggtagcctgccagggaagatcgtgctccagggtaatcaattggcagcgttaacccaggcaaagaatgcccaagggcagccagccaaggtggttaccatacagttacaggtgcagcagcctcagcagaaaatccagatcgtgcctcaaccaccttcctcgcaaccacagcctcagcaacctcctagcacacagccagtgaccctttcttcagttcaacaggctcagatcatggggcctggtcagtcgcccggccagcgcctgtccgtacctgttaaggtggtgctgcagccccaggctggatcctcacaaggcgcgtctagtggtctgtccgtcgtgaaagtgctgagtgcttctgaggtagcggccctctcatctcccgcgagcagcgcaccacacagcggcgggaaaacaggtatggaggagaaccgcaggctagaacaccaaaagaagcaggaaaaagctaaccgcatcgtagctgaggccatcgcacgtgctagagcccgcggagaacagaacattcctcgggtgctcaatgaggatgaactcccatccgtccggccagaagaggaaggggagaaaaagcgcagaaaaaagtctgccggagaacggctgaaagaagagaagcctaaaaagtccaagacctccggtgccagtaagactaagggtaaatcaaagctgaacaccattacaccagttgttgggaagaagagaaaaagaaacacatccagcgataactcagatgtggaagtgatgccggcccagagcccccgggaagatgaagagtcaagcatccagaaacgacgatcgaatcgtcaagtgaagcgcaaaaaatataccgaggacctagatataaaaatcacagatgacgaagaggaagaagaggtagatgtgacaggcccaataaagcccgagccaatactgcctgaacccgtccaagagcctgacggggagacactaccctcaatgcagttctttgttgagaacccgtccgaagaggatgccgcaattgtcgataaggtcctcagcatgcgaatagtaaaaaaagaactcccatcgggccagtacacagaggctgaggagttctttgtcaaatataaaaactactcttatttgcattgtgaatgggcaactatttcacaactggaaaaagataagcggatccaccaaaaactgaagagattcaagactaaaatggcccaaatgagacacttttttcacgaggatgaagagccgttcaaccccgattacgtcgaggtcgaccggattttagatgagtctcactccatcgataaggacaatggagaacccgtcatatactacctggtaaaatggtgttctctaccatacgaggattcaacgtgggagcttaaggaagacgtcgatgaaggtaaaatcagagagttcaaaagaatccaatcaaggcacccggagcttaagagagtgaaccgccctcaggcgagtgcatggaagaagctggaactatcccacgaatacaaaaaccggaatcagctcagggagtaccagctcgagggcgtgaattggctcctcttcaattggtacaaccggcagaattgcattctggctgatgaaatggggttgggcaaaactatccaaagcatcgcttttctgcaggaggtgtacaacgtgggcattcacgggcccttccttgtgatcgcccccctcagcacaattaccaattgggaaagggagttcaacacttggactgaaatgaacacaatagtgtaccatggatccctcgcaagccgacagatgatccagcagtatgagatgtattgcaaggatagtcgcggcaggcttatccctggagcgtataaatttgatgcactgattacgacctttgagatgatcctctccgattgtcctgaactccgggagatagagtggcgctgtgtcattattgacgaggcacacaggctgaagaatcggaactgcaagctgctggattcacttaaacatatggatttggaacataaggtgctattgaccggtacccccctgcagaataccgtcgaagagttattctccctcttgcattttctggagccttcccagttcccatccgagtccgagtttctgaaggactttggtgacctaaagaccgaggaacaggtgcagaagttgcaagcgatactgaagccaatgatgctacgcagactgaaggaagacgttgaaaaaaacctagctcccaaacaggaaactatcattgaggtcgaactaactaacatacagaagaaatattatagagctatcctagagaagaacttttccttcctttcaaaaggtgcaggacatacaaatatgcccaacctgctcaacacaatgatggaacttaggaagtgctgcaaccatccctaccttattaacggcgccgaggagaaaatcctcaccgagtttcgagaggcctgccacatcataccacatgattttcatctgcaggcgatggtaaggtcagccggcaaactggttctgatcgataagctccttccaaagctaaaggcaggggggcataaggttttgattttttcacagatggtgcgctgcctggacatcctggaagactatctgattcagcgcagatatctctatgaacgaattgacgggagagttagaggaaacctgagacaggctgcaattgatcgcttcagcaagccggacagtgataggttcgtctttctcttatgtactagggctggcggcctagggataaatttgacagcagctgatacgtgtatcattttcgacagtgattggaatccacagaatgatctccaggcccaggcacggtgccatagaataggacagagtaaggcagtgaaagtttatcgcctgatcaccaggaactcttatgagagagagatgtttgacaaggcctcgcttaagctcgggttagacaaggcagttctgcagtcaatgtctgggagagacggcaatattactgggatccagcagttcagcaaaaaggaaattgaagacctactgcgaaaaggcgcttatgccgccatcatggaggaggacgatgagggatccaaattctgtgaagaagacattgaccagatattgctccgacggaccacaactattactatcgagagcgaaggtaaaggctctacctttgccaaagccagtttcgtggctagcgaaaacaggactgatatttcccttgacgatcccaacttttggcagaagtgggctaaaaaggccgatttggacatggaccttctgaatagcaagaacaacctcgtgattgacaccccccgagttcgaaagcagacgcggcattttagtaccttgaaagacgacgacttggtggaattttctgacctagaaagcgaggacgacgagagacctcggagtaggcgccatgataggcaccacgcttatggtaggacagactgcttccgggttgagaagcatctgctggtgtacggttggggccgttggcgggacattctgtcccacggacggtttaagaggcgaatgactgagcgggatgttgagaccatctgccgggccatcttggtgtactgcctacttcactataggggggacgaaaatattaaaggattcatctgggacctgataagcccagctgagaacggcaaaaccaaagaactccagaatcacagtgggctctccattcccgtcccacgtggcagaaagggcaagaaagttaaatcacagtcaaccttcgacattcacaaggccgattggattagaaaatacaaccccgatacactctttcaggacgaaagctataagaagcatctcaaacaccagtgcaataaagttttgttaagagtcaggatgctatactacctgaggcaggaggtgatcggggatcaggctgagaaagttttgggtggggctattgctagtgaaatagacatatggttccccgtggtcgatcagctggaggtccccacgacttggtgggatagtgaagctgacaagtctttgttgattggggtgtttaagcatggttacgagaaatataacacgatgcgagcagaccctgccctctgcttcttggaaaaagcagggcggccagacgataaagccatagcagcagaacaccgggtgctggataacttctcagatatcgttgagggagtggatttcgacaaggattgtgaggacccagagtataagcctcttcagggcccacctaaggatcaggatgatgagggggacccactgatgatgatggacgaagaaatcagcgtgatcgatggcgacgaagcacaggttacacaacagccgggtcacttgttctggccacccgggtccgccctcacagcccgtttgcggaggttagtgaccgcttatcaacgtagttataagcgggagcaaatgaagatcgaagccgctgagcggggcgatcgtcggcggcgaagatgtgaggctgcgttcaagttgaaagaaatagcccggcgagaaaaacaacagcggtggacaagaagagagcaaaccgacttttacagagtggttagtacctttggcgtggagtatgaccctgacacaatgcagtttcactgggacaggtttcggacttttgctcgtctggacaagaagactgacgagtcgttgacaaaatacttccatggctttgtcgcaatgtgtcgtcaggtgtgccgcctgccaccggccgccggggatgaaccccccgaccctaacctgttcattgaaccaatcactgaggagagagctagcaggaccctctatcgaattgagctgctgaggcgcctgcgggaacaggtgttgtgccatccgctgctcgaggatcgcctggccctgtgtcagcctcccgggccggaacttcccaaatggtgggagcctgtgagacacgatggcgaactgctgcgtggcgccgcccgacacggcgtcagccaaactgactgcaacattatgcaggatcccgacttctcgttcctcgcagccaggatgaattatatgcagaaccaccaagccggtgcaccagccccgagcctgtcaagatgctccacccctctacttcaccagcagtacaccagtcggacagcctctccactacccctgcgacccgatgcccccgtcgaaaagtctccggaggaaacagctactcaggttcccagcctggaatcactaacgctcaagctcgagcacgaggtcgtcgcaaggtcccgccccacacctcaggactatgagatgagggtatcgccttctgacaccactcccttggtgtctaggtcggtcccccccgtgaagttagaggacgaggatgattctgattccgagttggacttgtccaaactgagtccttcaagcagtagctccagcagcagtagctcatcctctagttcaactgacgagtctgaagatgagaaagaagaaaagctgacagatcagtcccgcagtaagctatacgatgaggagagtctcctgtcgctcaccatgtcccaggacggtttcccgaatgaggatggagaacaaatgacccccgagctgctgttgctgcaggaaagacagagggcaagcgagtggcccaaggatagggttctcattaacagaatcgacctcgtgtgtcaggcggtcttgagtggcaagtggccgtccagtcgaaggtcacaggaaatggtaacaggaggcatattggggccaggcaaccatttgcttgatagtccgagcttgacacctggagagtacggagacagccccgtccccacacccaggtcaagctcggcggctagcatggctgaagaggaagctagcgccgtgtcaacggcggccgcccagtttaccaaactgcgacgcggaatggacgagaaggaattcaccgttcagatcaaagacgaagagggcctcaagttaaccttccaaaagcataagcttatggctaacggcgtgatgggcgatggccaccccctcttccacaagaagaaaggcaatcgaaaaaaattggtcgaattagaagtggagtgcatggaagagcccaatcatctggatgtggacctcgagacaaggattccagtcattaacaaggtggatggcacacttttggtcggcgaggatgcaccgcgcagggccgagctagagatgtggctacagggccacccggagttcgcagttgaccctagatttctggcttatatggaggaccggaggaaacagaagtggcagcgctgcaaaaaaaataataaagccgagcttaattgcctgggcatggagccggtgcaaaccgctaattctcgaaatggaaaaaaggggcaccacactgaaactgtgttcaatagagtgttgcccggcccaattgcaccagagtcttcgaagaaacgtgcgcgcagaatgcgccctgatctgagcaaaatgatggcactcatgcagggcgggtccaccggttcactgagcctgcataacacctttcagcattcttcctcaggcctccagagcgtctcgtcattgggtcatagttccgctacaagtgccagcttaccattcatgcccttcgtcatgggcggtgcaccttccagcccacacgtagattcctctaccatgctgcatcatcaccaccaccatccacacccccatcatcatcaccatcaccaccccggactgcgggctcctgggtatccttcctcacctgtcacaaccgcttctggcacaaccctccgcctaccacccctgcagcctgaggaagacgatgacgaggatgaggaagatgacgatgacctgagccaaggctatgactcctcagaacgagatttcagcctcattgatgacccaatgatgcctgcaaatagcgacagttccgaggacgctgacgattag

SEQ ID NO: 112143 - DNA, 1797 bp, synthetic construct
  misc_feature 1..1797: note = Description of Artificial Sequence: Synthetic coding sequence
  source 1..1797: mol_type = other DNA
atgacctttcaggcatcgcacaggtcagcttggggaaagtctcgaaagaaaaactggcaatacgaaggcccgactcagaagttgttcctcaagcggaacaatgtatcagcacccgacggccccagtgatccttctatcagtgtttcgtcagaacagtcgggggctcagcaacctcctgcactgcaggtcgaaaggattgtggacaagcggaagaacaagaagggcaagactgagtatctggtgcgttggaaaggctatgactctgaggatgatacctgggagcccgaacaacacctggtcaattgtgaggaatatatacatgatttcaaccggaggcatacggaaaaacagaaagaatcaactcttaccaggacgaatcgcacatcacccaataatgcccgcaaacaaatcagtaggtctactaactctaacttttccaagacttcacccaaggcgctcgtgatcgggaaagaccatgagtccaagaactcccaactgtttgcagcgtcacaaaagttccgaaagaacactgcaccgagcctctcatctaggaagaatatggacctagccaaaagtggcattaaaattctggtaccaaagtctccagtgaagagccgaaccgccgtggacggctttcagtctgagtccccggagaagctcgatcccgtggaacaaggacaagaggatacagttgcccccgaagtggctgccgagaagcctgtaggtgcacttctgggaccaggagccgagcgtgcccgcatgggtagtcgaccacggattcatccactcgtcccgcaagtccccgggccagtgaccgcagcgatggcaacggggctggccgtgaacggaaaaggaaccagtcccttcatggatgccttgacggctaatgggacaaccaatatacagactagtgtgaccggggtgactgcaagcaagagaaagtttatcgatgaccggcgcgaccagccttttgataagcgattgagattttctgtcaggcagaccgagagcgcctaccggtacagagatatcgtagtgagaaaacaggatggtttcacacacattctgctttccacaaaaagcagcgagaataattccctgaacccggaagtgatgagagaggtgcagtctgcattgtcaaccgccgccgcagacgactccaagctcgtgctgctcagcgcggttggcagcgtattctgctgcggcctggactttatttactttattcgaagactaactgacgacaggaaacgtgagtccactaaaatggccgaagctatccggaattttgtcaatacatttattcaatttaagaaaccaataatcgtcgccgtcaatggaccggcaattggactgggggcctctattcttcccctgtgcgacgtggtgtgggcaaacgagaaggcttggttccagactccgtatacaacgttcggacagagcccggatggatgctccaccgtaatgttccccaaaatcatgggaggcgctagcgccaatgaaatgcttctgtctgggagaaagctcactgcacaagaggcatgcggaaaggggcttgtctctcaggtgttttggccaggaactttcactcaggaagtgatggttcgcataaaggagctggcatcctgcaaccctgtcgtgttagaagagtcaaaagcattagtgcgctgcaatatgaaaatggagctggagcaggctaatgaacgtgagtgcgaagtactaaaaaaaatttggggctcggcccaggggatggacagcatgctcaaatatctgcagagaaaaattgacgaattttag

SEQ ID NO: 112144 - DNA, 1239 bp, synthetic construct
  misc_feature 1..1239: note = Description of Artificial Sequence: Synthetic coding sequence
  source 1..1239: mol_type = other DNA
atggatctggccaagagcggcattaagatcttggttcctaaatctccagttaagtcccgcacggccgtggatggctttcagagtgagtcccctgagaagctggatccagtggagcaaggacaggaggacactgtagcccctgaggtagcggccgagaagccagtaggcgccctactaggccccggggccgagcgcgcccggatgggatcgcggccgagaatccacccgctggtacctcaggttccaggccccgttactgcggccatggcaacaggtctagccgtcaacggcaaggggacttctccttttatggacgctctgacagcaaacgggactaccaatattcaaacctcagtaacgggcgtgaccgcaagtaaacggaaatttattgacgaccgtagggaccagcccttcgacaaacgcctgaggttctctgttcggcaaactgaatcagcttacaggtacagagatattgtggttaggaaacaagacggctttactcatatcctgcttagcaccaaatcgtccgaaaataacagtctcaatcctgaggttatgcgcgaggtccagtctgccctgagcactgcagccgcggatgactcaaaacttgtgctgttaagtgccgtgggaagcgtgttctgttgtggactggacttcatctacttcatcaggcgtctgactgacgatcggaagagggagtcaaccaaaatggcagaggctatccgaaacttcgtcaacacttttatacagtttaagaagccaatcattgtcgccgtgaacgggccagctatcgggctaggcgcatctatcctgcctttgtgtgatgtggtgtgggctaatgaaaaggcttggttccaaaccccctataccacttttggacagagtcccgatggatgctctactgtgatgttcccgaaaattatgggtggcgccagtgcaaacgagatgctgttgtccggaagaaaactaaccgcacaggaggcctgtggcaaaggcttagtcagccaagtgttttggccaggcacctttacccaggaggttatggtgcgaattaaggagctggcaagttgcaatcccgtcgtcttggaggaaagcaaggccctggtgcgctgtaacatgaaaatggaattggagcaggctaatgagagagaatgtgaggtcctcaagaaaatctggggatcggctcaggggatggatagtatgttgaagtacctccagcgaaaaattgatgagttttag

SEQ ID NO: 112145 - DNA, 1635 bp, synthetic construct
  misc_feature 1..1635: note = Description of Artificial Sequence: Synthetic coding sequence
  source 1..1635: mol_type = other DNA
atggcaagcgaggaattatatgaggtggaacggatagtggacaagcgaaagaacaagaaaggaaaaacggagtatctagttcgctggaagggctatgactccgaggacgacacttgggaacctgaacaacacctggttaactgtgaggagtatatccacgatttcaatcgccggcacacggaaaaacaaaaggagagcactctcaccagaactaaccgaacttcacctaacaatgctcggaagcagattagccgctccactaattcaaactttagcaaaacgtctccaaaggccttagtcatcgggaaggaccacgaatccaagaatagccaactattcgcggcgagtcagaaattcagaaaaaacactgctccttcactctcgagccgtaagaacatggacttggctaagagcgggatcaagatcttggtgcccaaatcccccgtgaaatctaggaccgcagttgatggatttcaatcggaaagcccagaaaaattagaccctgtcgagcaaggccaagaagatactgtcgcacctgaagttgctgcagagaagcccgtcggggccctcctgggcccgggcgcggaacgggcacgaatgggatcccgccctagaattcatcctctagtccctcaagtacctggccctgtaactgccgctatggccacgggtctcgctgtgaacggtaaaggcacttcaccctttatggatgctctaacagcaaatggcaccacgaacatccagacaagcgtgacaggggtgactgcctccaagcgaaaatttattgacgatcggagggaccagccattcgacaagagactgaggttctccgtccggcagaccgaatctgcttaccggtatagggatatagtggtgagaaagcaagacgggtttacccatatattgttgagtacgaagagcagcgagaataatagcctgaatccagaggttatgcgggaggtgcaaagcgctctttcaactgctgccgccgacgattctaaactcgtcttgctctcagccgtgggaagtgttttctgctgcggactcgacttcatttacttcatcagaagacttactgacgacagaaaacgggagtccacaaagatggccgaagccatccgaaattttgtgaataccttcattcagttcaagaaacctataatcgttgctgtgaacggtcctgccattggcctgggggcatccatactgcctctgtgcgatgtggtgtgggctaacgaaaaggcgtggttccagactccgtatacaacttttgggcagagtcctgatggctgctccacggtcatgttccctaaaatcatgggtggggcgagtgcaaatgagatgctgctgagcggacgaaagctgacagcacaggaggcatgcggcaagggcttagtctcccaggtgttctggccaggcacatttacccaggaagtgatggtgcgcattaaagagcttgcttcatgtaacccagtcgttctcgaggagagtaaagcgctggtccgctgcaatatgaagatggagttggaacaagcaaatgaaagggaatgtgaagtgctgaaaaagatctggggaagcgcccaagggatggactccatgctcaaatatttgcagcgaaagatcgacgagttctag

SEQ ID NO: 112146 - DNA, 1239 bp, synthetic construct
  misc_feature 1..1239: note = Description of Artificial Sequence: Synthetic coding sequence
  source 1..1239: mol_type = other DNA
atggacctggccaagtcagggattaagatcttggtgcctaagagccccgtgaagagcagaaccgccgtggacgggtttcaatcggaaagccccgaaaagcttgaccccgtagagcagggccaggaagacacagtggcgcctgaagtggcagccgaaaaaccggtgggtgctcttcttggtccaggagctgagcgtgcccgcatgggctcccgaccgcgaattcacccactggttcctcaggtgcccggacctgtcacagctgcgatggcaaccggcctggcagtcaacggaaaggggaccagcccctttatggacgccctcacggcaaatggcacgacaaacattcagaccagcgtgaccggggtgactgcaagtaaacgcaaattcatcgacgatcgccgagaccagcctttcgataagaggctaagattcagcgtgcgccagaccgagtcagcttacagataccgcgatattgttgtgcggaagcaagacgggttcactcacatcttactgagcaccaaaagctccgaaaacaacagtttgaacccagaggtaatgagagaagtccagagcgccttgagtacggctgcggctgacgattccaagttagtgcttcttagcgcagtgggatctgtgttttgctgcgggctggatttcatctacttcattcgcagattgactgacgacagaaagcgagagagtacaaaaatggctgaggccattcggaatttcgttaataccttcattcagtttaagaaaccgattattgtcgcagtaaatggtcccgcaataggactgggagcttctatactaccgttgtgtgatgttgtttgggccaacgaaaaggcctggttccagactccatatacaacttttgggcagtctcccgatggctgcagcacagtgatgttcccaaagattatgggaggagccagcgcaaatgagatgctcctttctgggaggaaactgaccgcccaggaggcctgcgggaagggactggtgagtcaggttttttggcccggaacatttacacaagaagtcatggtgaggatcaaggagctcgcctcatgcaaccccgtggttctcgaagagagtaaggccctggtccgctgcaatatgaaaatggagttagaacaggccaacgagcgggaatgtgaagtgctgaaaaaaatatggggaagcgcccagggaatggacagtatgctgaaatacctgcagaggaaaatcgacgagttctag

SEQ ID NO: 112147 - DNA, 1665 bp, synthetic construct
  misc_feature 1..1665: note = Description of Artificial Sequence: Synthetic coding sequence
  source 1..1665: mol_type = other DNA
atggcctctcaggagtttgaagtggaggctatagtagataaaaggcaggataagaatggcaatacacaatacctggtcaggtggaaaggctacgataagcaggacgacacttgggagccagagcaacacttgatgaattgcgagaaatgtgtacacgactttaaccgcaggcaaacagagaagcagaagaaactgacttggaccacaacatcccggatattcagcaataatgccagaagaaggaccagccgcagtacgaaagccaattactcaaaaaactccccaaagacccccgtcactgataagcaccaccgcagtaaaaataggaagctctttgccgcaagtaagaatgttcgcaggaaggccgcttcaatcctttctgataccaagaacatggaaattatcaattctaccattgagacccttgccccagattccccattcgatcacaagaccgtgtccggcttccaaaagctcgagaagctagaccccatagccgccgaccagcaggacacagtggtgtttaaggtcactgaaggcaaactgctccgcgacccactgtccaggcccggggctgaacagacaggaatacagaacaagactcagatccatccattgatgtctcagatgagtggttctgtgaccgccagcatggccaccggtagtgccacgagaaagggaatcgtggttctgatcgaccccttagcggcaaacggaaccactgacatgcatacttctgtgcccagagtgaaaggtgggcaaagaaacatcacagacgactcacgggaccagccattcataaaaaagatgcatttcaccatccggttgacggaaagcgcctcaacatacagagatattgttgttaagaaagaggatggttttacccagatcgtgcttagcaccagatctaccgaaaaaaacgcattaaacacagaggttattaaggagattgtcaacgctcttaactctgccgccgcggatgatagtaaacttgtgctattttctgcagctgggagcgtcttctgctgtggcctcgattttggctacttcgtgaaacacctgaggaacaaccgaaacacagccagcctggaaatggtggataccataaaaaacttcgtaaacacttttatccagtttaagaagccaatcgtagtgtccgtaaatggaccggccatagggttgggcgcatcaatcctgcccctctgcgacttggtgtgggccaatgaaaaagcctggtttcaaactccttacacaacctttggccagagccctgatgggtgttcttccatcactttccctaagatgatggggaaggcatctgccaacgagatgctaatcgcgggcaggaaattaactgcacgtgaggcgtgcgccaagggacttgtctcccaggtgtttcttaccggcaccttcacccaggaggtgatgatccagattaaggagttggcaagctacaatcctatcgtgttggaagagtgtaaggccctagtcagatgcaacatcaagctggaacttgaacaagctaacgaaagggagtgcgaggtgctgcgcaagatatggtcttctgcacagggcatcgagtctatgcttaagatacccctcctgggttacaaggcagccttcccccctcgcaagacccagaacgatcagcgctggtgtccatag

SEQ ID NO: 112148 - DNA, 1623 bp, synthetic construct
  misc_feature 1..1623: note = Description of Artificial Sequence: Synthetic coding sequence
  source 1..1623: mol_type = other DNA
atggcctctcaagaattcgaagtggaagcaattgtcgataagaggcaggacaaaaatggcaacacccagtaccttgttaggtggaagggctacgacaagcaggatgatacctgggagcctgagcaacacttaatgaactgtgagaagtgtgtgcacgacttcaaccgcaggcagacagaaaagcagaagaaattgacatggacaaccacttctcggatcttctcgaataatgctaggcgaagaacaagtagatccacaaaagccaattactccaaaaattcgcccaaaaccccggtcaccgacaaacaccaccgttccaagaatcgcaagctgttcgcagctagcaaaaacgtccgtcgcaaggccgctagcatcctgtccgacacgaaaaacatggagatcataaattccacgattgaaactctggctcccgactctccgtttgaccacaaaacagtatctggatttcagaaattggagaagttggatccaatcgccgctgatcagcaagataccgtagtcttcaaggtaactgaaggcaaacttttgagggacccattatcccggccaggagcagaacaaacaggaatccagaacaaaactcaaatccaccccctgatgagccagatgagtggatccgtgactgctagtatggcaacagggagtgccacacggaaaggaatagttgtgctgatagaccccctggctgccaatggaaccacggacatgcatacaagtgtccccagagtaaagggcggccaaaggaatattaccgacgactcacgggaccagccgtttattaagaaaatgcacttcactattcgcctaaccgagagtgcttctacctaccgagacatcgtggtgaagaaagaagacggatttacacagatagtcctgtcaacccgtagcacagagaagaatgccctcaacacggaggtgatcaaggagattgtcaacgcgctcaactctgcagcagcagacgacagtaaactggtgctgttttcagcagccgggtcagttttttgctgcgggctggatttcggctactttgttaagcacctgcgaaataatcggaacactgcttctctcgaaatggtagacaccataaaaaattttgtgaacaccttcattcaattcaagaaacctattgttgtatcagtgaatgggccagctattggactgggagcctcgatcctcccgctgtgtgatctggtctgggcaaacgaaaaggcctggtttcagaccccttatacaacatttggacagtccccagatggctgcagctcaatcacgttcccgaagatgatgggcaaagcttcagcaaatgagatgctcatcgctggtcggaagctgacagcccgcgaagcttgcgcgaaagggttggtttcccaggtatttctgacgggcactttcacgcaggaagtgatgatccaaattaaagagctcgccagttataaccctatcgtgctggaagagtgcaaagcgttggtcaggtgtaatatcaagctcgagctcgaacaggcaaatgagcgtgagtgtgaggtgcttcggaagatctggagctcagctcaagggattgaaagcatgcttaaatacgtcgaaaataaaatcgacgagttctag

SEQ ID NO: 112149 - DNA, 1170 bp, synthetic construct
  misc_feature 1..1170: note = Description of Artificial Sequence: Synthetic coding sequence
  source 1..1170: mol_type = other DNA
atgggaaagatggctgctgccgtcggaagtgtcgccactctagctaccgaacccggagaggacgccttccgcaaattgtttagattttataggcaaagtagacccgggactgcagatctggagggggtgatagacttcagcgctgctcatgctgcccgcggcaagggaccaggcgcccagaaagtaattaagagccaattgaatgttagtagcgtgtcagaacaaaacgcctatcgtgccggccttcaacccgtgtccaagtggcaggcttacggcctgaaaggttacccaggtttcatctttatccctaatcctttcctgcctggataccagtggcattgggtgaaacagtgccttaaactgtacagccagaaacccaacgtatgcaacttagataaacacatgagtaaggaggagacccaggatctgtgggaacaaagcaaggaattccttcgttataaagaggctaccaagaggcggccccggtctctccttgaaaagctgagatgggtgactgtagggtaccattataattgggattctaagaagtactctgctgaccactacactccatttccctctgaccttggatttctgagcgagcaggtggctgccgcttgtgggttcgaagattttcgggcagaagccggcatactcaattactaccggttggacagtacacttggcatccacgtagataggtcagaactcgatcattccaagcctttactgtccttcagcttcggacagagcgctatcttcctcctcggtgggctgcaacgagacgaggcccctaccgctatgtttatgcatagcggcgacataatgatcatgtctggctttagcaggctgctgaatcacgctgtacctcgggtcctgcccaaccccgagggcgagggcctgccccactgcctcgaggcccctttaccagccgtgctgcctcgtgacagtatggtggagccttgttcaatggaagactggcaggtctgtgcatcctacctgaagactgctcgggtcaatatgaccgtccggcaggtgttggccacggatcagaactttcccttggagcctattgaagatgagaagcgcgatatctctacagagggattttgccaccttgatgaccagaatagtgaagtcaagcgtgccagaattaaccccgacagctag

SEQ ID NO: 112150 - DNA, 921 bp, synthetic construct
  misc_feature 1..921: note = Description of Artificial Sequence: Synthetic coding sequence
  source 1..921: mol_type = other DNA
atgcgatcagccgccgtcttggccctcctcctttgtgcagggcaagtgactgctctccccgtgaacagtcctatgaacaaaggagacaccgaggtaatgaagtgtattgtcgaagtgattagtgataccctatcaaagccctctccaatgccagtgtcccaggaatgcttcgaaactctccgaggtgacgagagaatcctgtccatcctgcgacatcaaaatctgctcaaggagctgcaagacctggctctccagggcgcaaaggaacgcgcacaccagcagaaaaagcactcaggcttcgaggacgaactgagtgaagttcttgaaaaccaaagctcccaagccgagttgaaaggtagaagtgaggcactggctgtggatggcgctggcaaacctggagccgaagaggcccaagatcccgagggcaaaggcgaacaggagcattctcaacagaaggaggaggaagaggaaatggctgtggtcccacagggactgtttcggggtgggaaatccggtgaactggagcaggaagaggagcgtcttagtaaggagtgggaggactctaaacggtggtctaagatggatcagctggcaaaggagttgaccgcagagaaacggctcgagggccaggaagaggaagaggacaatcgcgattctagcatgaagttgagtttccgagcccgggcatacggatttcgcggcccaggcccacagctcaggcgcggttggcggcctagcagccgcgaggactcattggaggctggcctccccctgcaggtacgcgggtatcccgaagagaaaaaagaggaggaaggctcagccaataggcgaccggaggatcaggagctcgagtctctatccgcaatcgaggcagaactggagaaagttgcacaccagttacaagctcttcggaggggctag

SEQ ID NO: 112151 - DNA, 2034 bp, synthetic construct
  misc_feature 1..2034: note = Description of Artificial Sequence: Synthetic coding sequence
  source 1..2034: mol_type = other DNA
atgcagccgacccttcttttatccttactcggggcagtaggactcgccgcagtgaattcgatgcccgtcgataatcgtaatcacaacgaagggatggtgaccaggtgtattatagaggtgctgtctaatgccctgagtaagagttctgctcctcccatcaccccagagtgcagacaagtgttaaagacgtcgcggaaggacgtcaaagataaggagaccaccgaaaatgaaaacacaaaattcgaagttcgcttgctaagggatcctgccgatgcatccgaagctcacgaaagttcttcccgcggagaggcaggggcccccggcgaggaggatattcagggccccaccaaagccgacaccgaaaagtgggccgaaggcggcggtcactctagggagcgggccgacgaaccccagtggtctctgtatcctagtgattcgcaggtatctgaggaggttaaaacgagacacagcgagaaaagccagagggaggacgaagaggaagaggaaggagaaaactaccagaaaggcgagaggggcgaggattccagtgaagaaaaacacctagaagaacccggggaaactcagaatgccttcctgaacgaacggaaacaagccagcgccattaaaaaagaggagctggtggctcgatctgagacacatgcagccggacacagtcaggaaaaaacccacagtcgtgaaaaatctagccaggaatcaggagaggaaaccggttcccaagaaaaccacccccaggagagtaaagggcagcctcggtcccaggaggaatccgaggaaggcgaggaggacgctacgagtgaggtggacaagcggaggacgcgaccacgccaccaccacgggcggtcacgccctgaccgctcgagtcagggtggaagcctacccagtgaggagaaggggcatcctcaggaagaatccgaagagagtaacgtgagcatggcatccttgggggagaaacgggatcatcattccacccactacagagcatctgaggaggaaccggaatacggagaagagatcaaggggtatccaggagtgcaggcccccgaagatctcgaatgggaacgctacagaggccgcggatccgaagaataccgggcccctaggccgcagtcagaggagtcttgggacgaggaggacaaacgtaattatccttcacttgaactggataagatggcacatggatatggtgaagagagcgaggaagagcgcggccttgagccagggaaggggcgtcatcaccgcggaaggggaggtgaaccacgagcgtattttatgagtgatacacgcgaagagaaaagattccttggagagggacatcaccgggtgcaggaaaatcagatggacaaggcaagacgccatccgcagggcgcatggaaggaattagaccgcaattacctcaattatggtgaagagggggcccctggcaaatggcagcaacagggcgatctgcaggacaccaaagagaaccgagaagaagcaagatttcaagacaaacaatatagcagccatcatacagcggagaagcgaaagcgtctgggcgaactcttcaatccttattatgaccccctgcagtggaaaagcagccacttcgagcggcgggataacatgaatgataattttctggaaggtgaggaagagaatgagctgaccctaaacgaaaaaaactttttccctgaatacaactacgattggtgggaaaagaaacccttctctgaagacgtgaattggggctatgagaagaggaatctagcgcgggtccccaaactagatctgaaaagacagtatgacagagtcgcccagttggatcagctgctgcactataggaagaaaagtgctgaattccctgacttttacgacagcgaggaacctgtgtctacgcaccaggaggccgagaacgagaaggatagagcagatcagacggtgctgactgaagatgagaagaaggagcttgaaaacctggccgccatggacctggagttgcaaaagatagcggagaagttttcgcaacggggctag

SEQ ID NO: 112152 - DNA, 870 bp, synthetic construct
  misc_feature 1..870: note = Description of Artificial Sequence: Synthetic coding sequence
  source 1..870: mol_type = other DNA
atgccggtcgacaatagaaaccacaatgaaggaatggtgacaagatgcattatagaggtactatccaatgcgctcagcaagtcctcggccccccctattactcccgagtgccgccaagttcttaagacctcaaggaaagacgttaaggacaaagagacaacagaaaatgaaaataccaagtttgaagtgaggttactgagagaccctgcagacgcctccgaagctcacgagtctagcagtcgcggagaagccggcgcaccaggtgaggaagacatacagggacccactaaggccgacaccgaaaagtgggcggagggagggggacattctagagaacgcgctgacgagcctcaatggagtctctatccgtccgactcccaagtgagcgaggaggtgaaaactagacacagtgagaaatcccagagagaggacgaagaagaggaggagggtgagaactaccagaaaggggagagaggcgaggatagttccgaagagaagcacctcgaggagccaggtgagactcagaatgcgtttctgaacgagcgaaagcaggctagcgccattaaaaaggaggagctggtagcgcggtccgagactcacgctgcagggcacagccaggagaagacacatagccgggagaagtcttcccaggagtccggggaggagacaggaagtcaggaaaatcatcctcaggagtctaagggacagccaagatcccaggaagaatcagaggaaggggaggaagacgcaaccagcgaggtggataagagacggactagaccccggcaccaccatgggcgctcaaggccggatcgcagcagccaagggggatctcttccaagcgaggagaaggggcaccctcaggagtag

SEQ ID NO: 112153 - DNA, 1806 bp, synthetic construct
  misc_feature 1..1806: note = Description of Artificial Sequence: Synthetic coding sequence
  source 1..1806: mol_type = other DNA
atgcccgagagggagctttggccggcaggaacaggtagcgaacctgtaaccagagtcggcagttgcgactccatgatgagtagtacgtctacccgcagcgggtcctctgactcgagttacgacttcctaagtactgaggagaaagaatgccttctcttcctggaagagactatagggtccttggataccgaggctgattccggactgtccaccgacgagagcgagcccgcgactaccccgcgtggctttagggctttgcctatcacccagccaaccccaagaggaggccccgaggagaccataacccagcagggtagaaccccacgcactgtgacagagagtagctcaagtcatccccccgagcctcaaggtttggggctgcgcagcggcagttattccttgcctagaaacatccacattgcccgcagtcagaactttcgcaagtccaccacccaggcatcaagccacaatccaggagagccaggccggttggctcctgagccggaaaaggaacaggtgtcgcagtctagccagcctcgtcaagccccagcttctccacaggaggctgccctggacctggacgttgtcctcattccacctccagaagcgttccgtgacacacagccagagcagtgcagagaggctagcctgcctgagggccctgggcagcaagggcataccccccagctgcacactccctcgagctcccaggagagggagcagactcctagtgaggccatgtcccagaaagccaaggagaccgtctccactcgctacacacagccccagccgccgcctgctggactcccacagaatgcaagagcagaagacgcccctttgagtagcggcgaggatcccaacagccggctggctccccttacaacgcccaagcctaggaagttgccgccgaacatagtcctcaaatcttccagaagcagctttcacagtgatccgcaacactggctgtcccgtcacactgaggcagcccccggcgactcgggcctaatttcatgttcgcttcaagaacagcggaaagccagaaaggaggcactcgagaagctcggtctcccccaggatcaggacgaacccggccttcatctctctaagccaaccagctccatacggcccaaagaaaccagggcgcagcacctgagccccgcacccggcctggcacagcctgcagcccccgcccaggccagcgccgccattcctgctgccggcaaggctctggcacaggctcccgcgcctgcaccgggcccagcacagggccctctgcccatgaagtcgcctgctccaggaaacgtcgcagcttcaaaaagcatgccaatctctatccctaaagcgccccgagccaattccgccctcacacccccaaagcccgagtcaggacttacgcttcaggagtccaacacgccaggccttaggcagatgaacttcaagagtaacactctggagagatctggcgtcggtctgagctcctatctttctacggagaaggatgccagccccaagacctcgacaagtctcggtaagggttccttccttgacaaaatcagtccctcggtccttaggaattcccgccctcgcccagcatccttgggaactggcaaggactttgccggaatccaggttggcaaactggcagacctggagcaagaacaatcaagcaaaaggttaagctaccagggccagagccgggacaaactccctcggccaccttgtgtgagcgtgaagatttctccaaagggtgtacctaatgagcaccgtagagaggctctgaaaaaactgggattgctgaaggagtag

SEQ ID NO: 112154 - DNA, 1068 bp, synthetic construct
  misc_feature 1..1068: note = Description of Artificial Sequence: Synthetic coding sequence
  source 1..1068: mol_type = other DNA
atgtcacaaaaggccaaagagaccgtctccacccgttacacccagccccagccaccccctgctggacttccacagaatgctcgggcagaagacgctcccctttccagcggcgaagacccaaacagccggttggcccccttgaccaccccgaagccacggaagttgccacctaatattgtattgaaaagtagcaggtcctcatttcattctgatccccagcattggctgagccggcacacagaggctgccccgggcgatagtggattaataagctgttctctgcaggaacagagaaaagcccgcaaggaagctctggagaagctcggcctaccccaggaccaggacgagcctggactccatctgagcaagcctacaagctccatacgccctaaggagacaagggctcaacatctttctccagccccggggctagcccaacccgctgcacctgctcaggcttcagcagcaatccccgctgccggtaaagccctggcacaggctcccgccccagcgcctggcccagcccaagggccactcccaatgaaatctccagcccctggtaacgtcgccgcttccaagagtatgcccatttcgattccaaaagcacctcgggcaaatagcgcactgactccacccaagccggaatccgggctgacactgcaagagagcaatacccccggcctccggcagatgaacttcaaatctaatactctcgagcgttccggggttgggctgagtagctacctctcaacagagaaggacgccagtccaaagacttccactagtctcggcaaggggtcattcctggacaagatctcaccatcagttctacgcaactcaagacctcgaccagcttctctagggactgggaaggatttcgccggcatacaggttggaaagctggcggacctcgaacaggaacagagcagtaaacgactgagctaccagggtcaaagccgggacaaactccctagaccaccttgtgtgtctgtcaaaatctcgcctaaaggagtgcctaatgagcacagaagggaggccctcaagaagctgggattattgaaagaatag

SEQ ID NO: 112155 - DNA, 1050 bp, synthetic construct
  misc_feature 1..1050: note = Description of Artificial Sequence: Synthetic coding sequence
  source 1..1050: mol_type = other DNA
atggccggcccagctattcataccgcccccatgctcttcctggtgctactgctgccccttgaattatccctggccggagcacttgccccgggtactcctgctcggaatctccccgaaaatcatattgacctccccggaccggcgttatggactccacaggcaagccaccatcggcgaaggggaccaggtaagaaagagtggggcccaggcctgccctcgcaggcccaagacggcgcagtggtgacagccacgaggcaggcaagcaggcttcctgaggccgagggcttacttccagagcagagccccgcagggcttctccaggacaaagacctgctccttgggttggcactcccgtatcccgagaaagaaaacagaccaccaggttgggaaaggacccgcaagagatctagggagcataagcgacgccgtgacaggctgcgtttacaccaaggaagagccttggttagaggcccaagtagtctcatgaagaaagctgaactcagcgaggcacaggtgctggacgcagccatggaagagagctccaccagcctggcccccactatgttcttcctcaccaccttcgaggcagcacccgctacggaggaatcactgatcctgcctgttacaagtctcaggccgcagcaggctcagcctcgatcagatggcgaggtgatgccgacgctggatatggctttgttcgactggaccgactacgaagacctgaagccggatggctggcctagcgctaagaagaaggagaagcatagaggaaagctgtctagtgatggcaacgaaacaagcccagccgagggggaaccatgtgaccatcaccaggattgcctgcccgggacctgttgtgacctgcgggagcacctgtgcactccccataacaggggactgaataacaaatgctttgatgactgcatgtgcgtagagggtctgcggtgctatgccaaatttcatagaaacaggcgcgtcacccggcggaagggccggtgcgtggaaccggagacagccaatggagatcagggttcttttatcaatgtgtag

SEQ ID NO: 112156 - DNA, 477 bp, synthetic construct
  misc_feature 1..477: note = Description of Artificial Sequence: Synthetic coding sequence
  source 1..477: mol_type = other DNA
atgtgcttttctcgagcagacgccgccgacaattacccatttggtacctgccagcaaagaaagcttttcccacacttccatccgcccaacctgataggaaataagttcgtgcccttacgcggaagtcctcatcgcggccctgggtgctatttcagcgatgaaatgacgcctcatgccggccggtatcaaaaagtcagtccgcagcaggagaagcataagcaaaactttgccccttttaatgtcctcgttccaagatttaagaattatcccaaggacacttattatcctagtcctggggcctataatcctgagaagaagccccctcccaaaatcgcatggcccatgaaatttggctcgccagactgggcacaggtgccttgtttgcaaaaacgaaccttgaaggcagagctgtccaccgacaaagacttcagaaagcatagaaacagggtcgcttatctgtccttgtactacaactag

SEQ ID NO: 112157 - DNA, 576 bp, synthetic construct
  misc_feature 1..576: note = Description of Artificial Sequence: Synthetic coding sequence
  source 1..576: mol_type = other DNA
atgtgtttcagtagggccgacgcggctgacaattatccctttgggacatgtcaacagagaaaattattccctcactttcatccacccaacttgattgggaataaattcgttcccctacgaggaagtcctcaccgtggccccggatgctatttctccgacggatacgggctggcttacgatctgtcaaaaatcccaaccagcataaaggggtacaccctgggggcccggacagccgtcagatttaaacctatacagaaggagatgaccccccatgcagggcgatatcagaaagtgtcacctcagcaagagaagcataaacaaaatttcgcaccatttaacgttctcgtaccccgatttaaaaattatccaaaggacacttactatcctagcccaggggcatacaaccctgagaagaaacctcctcccaagattgcatggcctatgaaatttgggtcacctgattgggctcaggtgccttgcctgcaaaaacggaccttgaaagccgagctgtctacagataaagatttccggaagcatagaaaccgggtggcctatttgtccctctactacaattag

SEQ ID NO: 112158 - DNA, 2055 bp, synthetic construct
  misc_feature 1..2055: note = Description of Artificial Sequence: Synthetic coding sequence
  source 1..2055: mol_type = other DNA
atgtgggtcctactccgatctggctatcctctgagaattctgctgcctctacgcggtgaatggatgggcagacgcggattgcccagaaatctcgcccctggcccacccaggaggagatacagaaaagagaccctccaggcccttgacatgccagtgttacccgtgacagcaacagagataagacagtatctacgcgggcacggaatcccatttcaggatggacatagttgcttacgggccctgtcccctttcgcggagtcgtcccagctgaaaggacagaccggtgtgaccaccagcttctcactgttcatcgacaaaactactgggcatttcctgtgtatgacatccctagctgagggatcatgggaggacttccaggcttctgtggaaggtcgcggcgatggagcgcgtgagggattccttctgagcaaagccccagaatttgaagacagcgaggaggtcaggcggatatggaatcgagccatcccattatgggaactccctgatcaggaggaggtgcagttagcagacactatgtttggactcacaaaagtcactgacgatactctaaaaaggttttccgtgagatatctcagacctgctcggagtctggtgttcccctggttttcaccggggggcagcgggctccgtggcctgaagctgctggaggccaagtgtcaaggcgacggagtttcgtatgaggaaaccacaatcccgcgtcctagcgcctatcacaatctgtttggcttgccgttgatatcacgccgagatgccgaagttgtgcttacttcccgggagcttgactctctagccctaaaccagagcactggactgcctaccctcacattaccccgcggcacaacatgcctgccacccgctctcctgccctacctggagcaatttagaaggatcgtgttttggctgggagacgacttacgctcctgggaggcggctaagttgttcgccagaaaactgaatccaaagagatgctttttggttaggccaggcgaccagcagcccaggccattggaggcacttaatggcgggtttaacctcagtcgaatcctgcggacagccctccccgcctggcacaagagcattgtcagcttccgacaactgagggaggaagtacttggggagctctcaaatgtcgaacaggccgcaggactccggtggtctagattccccgacctaaaccgtatcttaaaggggcacaggaagggtgaactcacagtgttcaccggccctaccgggagcggaaaaactaccttcatttctgaatatgccttggacttgtgcagccagggggtcaacacgttgtggggctcctttgagataagcaacgtgagattggccagggtgatgcttactcagttcgccgaaggcaggcttgaggatcaactggacaaatatgaccattgggccgatcgctttgaagacctcccgctctattttatgacctttcacggccagcagagtatccggaccgtgatagacaccatgcagcacgccgtatatgtgtatgatatttgtcacgtaattatcgataacctacaatttatgatgggccacgaacaactgtcaacagacaggattgccgcccaggattacatcatcggagtgttccggaagtttgctacagataacaactgccacgtcaccctggttatacatccgcgcaaagaagacgatgataaagagctccagactgccagcatttttggatctgcaaaagcgtcacaggaggccgacaatgttctgatcctccaggatcggaagctcgttactgggcccggcaagcgttatctgcaggttagcaagaatcgatttgacggagatgtgggtgtcttcccactggaatttaacaaaaattctttgaccttttcaatccccccaaaaaacaaagcccggctgaagaaaatcaaagatgacactgggcccgtggccaaaaaaccctcatctggcaagaaaggagctacgacacagaattccgaaatttgcagcggtcaagctccaacaccagaccaacctgacacctctaagcgtagtaaatag

SEQ ID NO: 112159 - DNA, 1749 bp, synthetic construct
  misc_feature 1..1749: note = Description of Artificial Sequence: Synthetic coding sequence
  source 1..1749: mol_type = other DNA
atgtgggtgttactacggagcggatatcctctccgaatcttactcccactgcgcggcgagtggatgggaagaaggggactgcccaggaacctcgctcctgggcccccgcggcgccgataccggaaagaaacccttcaagccctagatatgccagttcttcccgtcacggcgacagagattcgccagtacttgaggggccatggcatccctttccaggacgggcactcctgcctgagagcactgagccctttcgccgagagttcccaacttaagggccagaccggcgtgacgacgtcctttagtctttttatcgacaagacaactggacacttcctgtgtatgacttcactcgccgaggggtcttgggaggattttcaagcctcggtagaaggccgaggagacggcgctcgggaaggcttcctcctgtctaaggctcccgagttcgaggactctgaggaggtgaggagaatctggaaccgggccattcctctttgggagctccccgaccaggaggaggtgcaactggctgatactatgtttggcctgaccaaggtaacagacgataccctaaaacgattctctgtgcgatacctgagacccgcaagaagtctggtcttcccctggttttcacccggcgggtctggcctgcgcggtttaaagttacttgaagccaagtgtcagggagacggggttagctatgaagaaactactatccctagacccagcgcatatcataacttgttcggtcttccgctgatatcaaggagagacgccgaggtcgtgttgacctcaagagagctggacagtctcgctctcaatcaatccacgggtctgccgacattaaccctcccacggggcaccacctgtctgccccccgccctgctgccttaccttgaacagtttaggcggatcgtgttctggcttggggacgacctccggtcctgggaggcggccaaactgttcgcgagaaagctaaaccctaaacgatgtttcctggtcagacccggggaccaacagccaagaccactggaagccctgaacgggggcttcaatctctccagaatcctgcgtaccgccctgcctgcttggcacaaatcgattgtgagctttcgccaactgcgagaggaagtactcggagaactatctaacgtggaacaggccgcaggactgagatggtctagattccccgatcttaaccgtatcttgaagggccaccgcaagggggaactcacagtttttacaggccccactggcagcggcaaaaccacttttatatctgaatacgctctggacttgtgctcccagggagtgaatactctgtgggggtccttcgagatcagcaacgtgcgactagctcgcgttatgctgacccaatttgctgagggaaggctggaggaccagctggataagtacgaccactgggcagaccggttcgaggacctccccctttactttatgacatttcacggccagcagagcattcgaactgtcattgacaccatgcagcatgccgtctacgtttatgacatttgtcacgttattatcgacaaccttcagttcatgatggggcatgaacagctttccactgatcgaattgcggctcaggattatattattggtgtgttccgcaaattcgctacggataataactgccacgtgacactagttatacacccacgcaaggaggacgatgacaaggaactgcaaactgcctcgattttcggaagtgcaaaagtgagcggactgtag

SEQ ID NO: 112160 - DNA, 1029 bp, synthetic construct
  misc_feature 1..1029: note = Description of Artificial Sequence: Synthetic coding sequence
  source 1..1029: mol_type = other DNA
atgccatttctgctgggcctcaggcaggataaggaggcctgcgttggcactaacaaccaaagctacatatgcgataccggacactgctgtgggcagtcacagtgctgtaattactactatgagctgtggtggttttggctcgtgtggaccatcattattatcctctcctgttgctgtgtgtgccaccatcggagggccaaacaccggctgcaggcgcagcagcgccagcatgagattaatctcatcgcctaccgtgaggcacacaactattctgctctccccttttatttccgctttctacctaattatttgctgcccccctatgaggaagtagtcaaccggcctcccacccccccaccaccatattcagcttttcagcttcaacagcaacaactgctgccaccacaatgcggacctgccggggggagcccccccggcatcgaccctactcgcggctcgcagggagcgcagtctagtccattatcagagcccagtcgctcgtccacccgccccccttccatagccgatcccgacccctcggatcttcccgtcgacagagccgctacaaaagcaccggggatggaaccaagcggctccgtggccggcttgggagaactagatcctggcgcttttttagacaaggatgccgaatgccgagaggaactgctgaaggacgatagcagtgaacatggggctcccgattccaaggaaaaaacacctggcagacacaggcgctttaccggggactccggtatagaagtctgcgtctgcaaccgaggccatcatgacgacgatttgaaggagttcaatacgctgatcgacgacgccttggatggacctttagatttttgcgattcatgtcatgtacggcctcctggggacgaagaggagggcttgtgtcaatcaagcgaggagcaggcacgggaacccggccacccccacctgcctcgacctccagcttgcctgcttctaaataccataaatgaacaagacagtccaaactcccagagcagttcctccccttcctag

SEQ ID NO: 112161 - DNA, 1092 bp, synthetic construct
  misc_feature 1..1092: note = Description of Artificial Sequence: Synthetic coding sequence
  source 1..1092: mol_type = other DNA
atggagaggcggagattgctcggcgggatggcgctacttttacttcaggctctgccgtctcctctgagtgctcgagctgagccaccccaagataaagaggcctgtgtggggactaataatcagtcttacatctgcgatactggtcactgttgtgggcagtcccagtgctgcaactactattatgagctctggtggttttggctcgtatggaccatcattattatactgagctgctgctgtgtatgtcaccacaggagagccaagcatcggctgcaggcccagcagcggcagcatgaaatcaatttgattgcttatagggaggcacacaattattctgcattgcctttctacttcagatttcttccgaactacctgctccctccatacgaggaggtggtgaacaggccccccaccccacctccaccatattcagcgtttcaacttcaacagcaacagctcctgcctccacagtgcggccccgccggcggaagcccccctggtattgatcctacacgaggtagtcaaggcgcacagagcagccctttatcagaaccctctcgttccagtacgcggccaccttctatcgctgaccctgacccctcagaccttccagtcgaccgagccgccacaaaggcaccaggcatggaaccttccggaagtgtggcagggcttggggaattagatccaggcgcttttctagataaggacgctgagtgtagagaggaactgcttaaagatgatagctcagagcatggagcccccgactccaaagagaagactccgggtcgccatcggagatttacaggagacagtggaattgaagtttgcgtgtgcaacagaggccaccatgatgacgaccttaaagaatttaatacccttatcgacgacgctctggacggacctttggatttctgcgacagttgtcatgttagacccccgggagatgaagaggagggattatgccagtcttctgaggaacaggctcgagagcccggccaccctcacttgcctagaccaccagcatgcctgctgctcaacaccataaacgagcaggatagtcctaatagccagagctcctcttccccaagctag

SEQ ID NO: 112162 - DNA, 1056 bp, synthetic construct
  misc_feature 1..1056: note = Description of Artificial Sequence: Synthetic coding sequence
  source 1..1056: mol_type = other DNA
atggctaccgacgtgcaattagctgattatccccttatgtcgcctaaggctgagctaaagctcgaaaagaagtctgggcgcaaaccccgatctccccgtgactccgggccacagaaggaactggtaatccccggcatagtggactttgaacgcatcaggagagctctcaggaccccaaagccacagacgcctgggacctactgcttcggaagactgtctcatcattctttcttcagtcgccatcatcctcatccccagcacgttactcacatccaagatctgactgggaaaccagtgtgtgtcgtgcgagactttccggctcctctgcctgagtcaactgtgttttcaggttgccagatgggcatcccaacaatttccgtgccgatcggagacccgcagtctaaccgaaatcctcagctgagctccgaggcatggaagaaagaactgaaggaattggcatcccgcgtggccttccttactaaggaagatgagctaaagaaaaaagagaaggagcagaaggaagagccccttcgagagcagggcgcaaagtactccgcggagacgggccggttaataccagcatcaactagagccgtgggacggaggagatcccatcaggggcagcagtcacagagttcctcacgacacgagggagtacaggccttcttactccaggatcaggagctgctggtgctggaactcctctgtcggatcttagaaactgatctgttgagtgcgattcaattctggcttctgtacgcaccccccaaagaaaaggacctcgcactcggactgcttcaaactgccgttgcccagttactgccccagccattagtatccatcccgactgagaagcttctgtcccagctgcccgaggttcatgagcctcctcaagagaagcaggagccgccttgttcacagtctcccaagaagactaagatatcccctttcacaaagtcagagaaacccgaatacatcggcgaggctcaggtgctccagatgcacagtagtcagaacacagagaaaaagactagtaaacctagagctgagtcttag

SEQ ID NO: 112163 - DNA, 321 bp, synthetic construct
  misc_feature 1..321: note = Description of Artificial Sequence: Synthetic coding sequence
  source 1..321: mol_type = other DNA
cagtgtgccgaactctggggaagtgtaaggaaaaattcagataaattcctgctcagccgtaatttgcaccctagtaaagaggagtacaggcagcaaattaaaacgcccggggaggaatggcggcaaatcctcgttcattggcgatcttctagtccacccgatgcattcaagcctgagcaccgtgaggaagacattgaggccgaaggccgcgagctgcgaggcccgaatacatgcacatgtcttgctcaggagcaacctcagggctttagaggtgtgtccgttagtaccacctttaccgctgtcccggatagtctaccatag

SEQ ID NO: 112164 - DNA, 753 bp, synthetic construct
  misc_feature 1..753: note = Description of Artificial Sequence: Synthetic coding sequence
  source 1..753: mol_type = other DNA
atggcaacagacgtgcagctcgccgactacccgctcatgtccccaaaggcggaactcaagcttgagaagaaatctggacggaagcctcggtctccccgcgactcgggcccacagaaagaacttgttatccctggaattgtggactttgagcggatcagaagggctttgaggaccccaaagccacaaacgccgggaacgtactgttttggccgacttagccatcacagtttcttctctcgccaccacccccacccgcagcacgttactcacattcaagatttaactggtaagccagtgtgcgtggtgagagacttcccagccccccttccggagtcgacagttttcagcggttgtcagatgggaatccccactatcagcgtcccaattggagatccccaaagtaatagaaacccacagctcagttctgaggcctggaagaaagagctcaaagagttagctagtcgagtcgcattcctgacaaaagaagacgaattgaagaaaaaagaaaaagaacagaaggaagagcctctgagagagcagggggccaaatacagcgcagagacagggaggctgataccagcaagcactcgggctgttgggcggcgtaggtcccaccaaggacagcaaagccaatcctcaagccgacatgaaggagttcaagccttcttgctgcaggaccaggagcttttgaagaaaacctcactgtgggacagctgccgccagcagtggctttcctcttttccgagtccatag

SEQ ID NO: 112165 - DNA, 951 bp, synthetic construct
  misc_feature 1..951: note = Description of Artificial Sequence: Synthetic coding sequence
  source 1..951: mol_type = other DNA
tcacctaaggccgagcttaaattggagaagaaatccggacgcaaacccagatcgcctcgggactcaggtccacaaaaagaactggtgatcccaggtatagtcgattttgagagaatccgcagggctctaaggaccccgaagcctcagactcccggcacctactgcttcggaaggctgagtcaccatagtttcttcagcaggcatcaccctcacccgcagcacgtgacacacattcaggacctgacaggaaagccagtttgcgttgtacgagacttcccagcaccgcttcccgaaagcactgtgttttcaggttgccagatgggaatccctacaatatctgtgccgatcggcgatcctcagtcaaacaggaatcctcaactgtcttctgcctggaagaaggaactgaaagaactcgctagtagagtggccttcctaactaaggaggacgagctgaagaaaaaggaagacactaccagcctcaattggaactgtaagtcgcgtaggccacaggcgccaggcctgtccggtactgaccttggcgcagctgaattgggcatcaagaaggaacagaaggaggagcctcttagagaacaaggtgccaagtattctgcggagacaggacgacttattcctgcttctacgcgggccgtgggacgacgacggagccatcagggtcagcaaagccagagttcctcacgccacgagggagtacaggcctttttgctccaagatcaggagcttctcggcggcctgacatcccctggggctccagtctccgacccaggaaatcgcctggctaaaaggaacccagtccttgctgccttgaggagcgcccaggggaaacgacctaggtctggaactccagcagactcttctgggagcgcacccagccctgcccctagcttacacccatatcgaaaagcccctaagcccgccagtcgatcagcctag

SEQ ID NO: 112166 - DNA, 498 bp, synthetic construct
  misc_feature 1..498: note = Description of Artificial Sequence: Synthetic coding sequence
  source 1..498: mol_type = other DNA
atgtatataagccctaaagccgagctcaaattagaaaagaagtccggcaggaagccacgatcaccaagagacagcggaccacaaaaggaactggtgatccctgggatcgtcgattttgaacggatccgccgcgcacttagaacccctaagccacagacaccaggcacgtattgcttcggaagactgtctcaccattctttcttttcacgccaccatcctcacccccagcatgttactcatatacaggatctcaccggaaaaccagtgtgtgtggtccgcgattttcctgccccactgcctgagagcacggtcttctctggctgtcagatgggcatccccactatctcggtgcccatcggagacccccaatccaaccgcaatccacagcttagcagcgcatggaaaaaggagttgaaggagctggcgtcccgcgtggcttttttgacaaaagaagatgagctcaagaagaaagaagtgggtgccgagcatcgttcctag

SEQ ID NO: 112167 - DNA, 672 bp, synthetic construct
  misc_feature 1..672: note = Description of Artificial Sequence: Synthetic coding sequence
  source 1..672: mol_type = other DNA
atgctgtgggtgcagagaaaaaggcggaggaaggagacaagtgaatgccccagtgacaaggacaaatcccctgaaagtcataaagctaagaacgagagctggattaagagtcacttttcacggttgagtgaggagaaactggccctggacaacaacgctagtgcctcaggaaatgcaactcagaccgagagcgggtcagaagaagtatcatccactgtgcacatcgagacgttcactacgaggcacggggaagtcgggtcagctctgcaccgcgagagctttacctccagacagaaaacctcgggtcccagcgtgattcaagagatacaccaggagtccggaaaagcccccagcacagacgaggcgacctgggctgcggtggctgcatgcaccaaggaaattgatacccagggacggcatttggcccactctatgctgcagcgggcgatcgcataccagcattcaggacacctggagagtaaagatataaatcaggaagaactgagagccctcgaggaggtagagatgaaactgcaaaagaatttcttaacgcagagggagaacacgatagccggtgccaaccatactcacactttttacgggcacagccatcatagccaccacggacacccaagccaccaatcccattctttgcctaatcggagacactag

SEQ ID NO: 112168 - DNA, 399 bp, synthetic construct
  misc_feature 1..399: note = Description of Artificial Sequence: Synthetic coding sequence
  source 1..399: mol_type = other DNA
atgggacgtacatggtgcggcatgtggaggcggcggagacccgggaggcgctccgcggtccctagatggccccacctgagttctcagtccggcgtggaaccgcctgatcggtggaccggcacccccggatggccctcccgtgaccaggaggcgccaggaagcatgatgccaccggctgccgcccagccgtcggctcatggagccctcgtgcctccagctacagctcacgagccagtggaccatcccgctttgcactggcttgcctgctgctgttgtttgtctctacctggacagctcccactcgcgatacgtttgggctgggacctggatctcgaggcagggccctcctccgggaagctgtgtccacgggcaagaagatggcagcccctgccatcgtag

SEQ ID NO: 112169 - DNA, 537 bp, synthetic construct
  misc_feature 1..537: note = Description of Artificial Sequence: Synthetic coding sequence
  source 1..537: mol_type = other DNA
atggcctcctttttagtttggccgctgagaactgctctgcgaggcggtaaaagctgggccggacccggcgtgggatgtggtggggacggcgccaggggaggtggtgaactcagtttatctaacctagatctgccaggcgctggtgaggccgggttggaacaccatcccctcttaggccatttgttcatatcagccgttcctaggtggccacacctcagttcccaatctggtgtggaacccccagaccgttggacgggcacacccggatggccctcccgcgaccaagaagcccccggcagcatgatgcccccggccgcagcacaaccatcagctcacggtgcgctcgtccctcccgccactgctcacgagcccgtggaccaccccgctctgcattggctggcctgttgctgttgtctgagtctcccagggcaactgcccctggccatcagattagggtgggatctggatctggaggctggcccctctagcggcaagctttgcccacgcgcacgacgttggcagccacttccctcctag

SEQ ID NO: 112170 - DNA, 1350 bp, synthetic construct
  misc_feature 1..1350: note = Description of Artificial Sequence: Synthetic coding sequence
  source 1..1350: mol_type = other DNA
atgtggaccgctctggtgctgatctggatctttagcttgagcttaagcgagtctcatgccgcatccaacgatccaagaaactttgttcctaacaagatgtggaaggggttagtgaaaagaaacgcatctgtggagactgtggataataaaacaagcgaagatgtaactatggcagctgcatctcccgtgacccttacaaaaggcaccagcgctgctcatttaaattcgatggaggtgacgactgaggatacatccagaactgatgtgtcagaacccgccacctccggcggtgcagcggatggagttacatctatcgcccccaccgctgtcgccagtagcacgactgccgccagcattactacagcagcaagcagcatgacggtggcctctagcgccccgaccaccgctgcttccagcacaacagtggcctcaattgcacccacaaccgccgcgtcttctatgacagcggcgagttctaccccaatgaccctagccctcccagctcccaccagtacttcaaccggaaggacaccctctacaaccgctacgggtcacccaagcctgagcacagccttagcgcaggtaccgaagtcctcagctctgccgcggactgccacattagccactctggcaacccgcgctcagaccgtggcaacaacggcaaatacctccagcccaatgtcaactcgaccctcccctagcaaacatatgccctccgatacagctgcctcaccagttcccccaatgcggccccaggctcagggtcctatctcccaggtgagcgtcgaccaacccgtggttaatacaacaaataagagcactcccatgcccagtaacacgactccggagcccgctcccactcccacggtggtgacgaccactaaggcacaggcaagggaaccaaccgccagtccggtgccagtgccacacacaagtcctataccggaaatggaggccatgtctcctaccacacagccctcccctatgccctatactcaacgtgccgctggccccggcacctcacaggcccctgagcaggttgagaccgaggccacccctggcacagactctaccggacctaccccacgtagcagcggaggcaccaagatgcctgccaccgactcctgccagcccagtacgcaaggtcagtacatggtggtcacgacagagccactaacacaggcagtggtggataagactttgctgttagtcgtcctgctgctaggggttacactatttatcactgtgctggtcctgtttgcactacaggcgtatgagagctacaagaaaaaagattacacgcaggtggactacctgataaacgggatgtatgccgactccgagatgtag

SEQ ID NO: 112171 - DNA, 78 bp, synthetic construct
  misc_feature 1..78: note = Description of Artificial Sequence: Synthetic coding sequence
  source 1..78: mol_type = other DNA
atgtggacggctcttgtgctgatttggatcttttcactgagtttgtctgagtcccacgctgcgtcaaacgatccctag

SEQ ID NO: 112172 - DNA, 3969 bp, synthetic construct
  misc_feature 1..3969: note = Description of Artificial Sequence: Synthetic coding sequence
  source 1..3969: mol_type = other DNA
atgccagtggtctggccaactctgctcgacctgtcgcgagacgagtgtaaacgaatattgcgcaaactggaactcgaggcatatgccggggtcattagcgctctgcgcgcccagggagacctaacaaaagagaaaaaggatttgcttggcgaacttagtaaggtgcttagcatctcaaccgaacggcatcgcgctgaagtgaggagagccgtcaacgacgagcgtctaacaactatagcccacaatatgtctggaccgaactcctcctcagaatggagtattgagggtagaagattagtacccttgatgccccgacttgtgccccagactgcttttaccgtcacggctaatgccgttgccaatgctgcaatacagcataatgcttcactcccagtgcctgccgaaacagggtctaaggaggtagtttgttactcctatacctccaccacttccactccaacttccactccagttccttcaggatctatcgccactgtgaaatctcctcgtccagcctcgcctgcaagcaatgtggtagtattgccgtctggttccacagtgtatgtgaaatcagtgtcctgctcagacgaggacgagaagcctaggaagcggcgacgaacaaacagcagctcctcctctcctgtggtgttaaaagaggtgccgaaagcagtggtccctgtgtccaaaacgattaccgtgccagtttctggatctcctaaaatgtctaatattatgcagagcattgccaattctttgcccccccacatgtcccccgttaagattacatttacgaaaccttccactcaaactactaacacaacaacacagaaggtcatcattgtcacgacatccccgagtagtaccttcgtacctaacatcctttcaaagtctcacaactatgctgccgtgaccaaactggtccccacttctgtgatcgcaagcactacccagaagccgcctgtggttattaccgcctctcaatctagtcttgtgagtaacagcagtagtggctcgtctagttctacaccgagcccgatacccaatacggtagccgtgacagcggtcgtttccagcacaccatctgtggttatgtccactgtcgcgcagggtgtgtcgacaagtgccatcaagatggcctcaacaagattaccttctcccaagagtttggtgagcgcaccgacacagatccttgcacagtttcctaagcagcaccaacagtcccctaagcaacagctgtaccaggtccagcagcagacacagcaacaggtagctcaaccgagccctgtttcgcaccagcagcagcctcaacagtccccgctgcctcctggcataaagcccacaatacaaatcaaacaggaaagtggtgtgaagattattacccagcaagtacaaccttccaagattctcccaaaaccagtgacagccacactccccacctcttcaaattctcctattatggtggtcagctccaatggcgccattatgactaccaaactggtaacgacacccaccggaactcaggccacctacacacggccgacagtttcaccctccatcggacgaatggctgctaccccaggcgcagcaacatacgtcaaaactaccagcggatcgataatcacagtcgttcccaaatccctcgcaactttgggcggcaaaattatcagctcaaacattgtctctgggaccacaacaaaaatcactactattccaatgacttcgaagcctaacgttatagttgtgcaaaagacgactggcaagggaactacaattcagggcctgcccggcaaaaatgtagtaacaacattactgaacgccggcggggaaaagacaattcaaacagtgcctacaggggccaagccagccattcttaccgccacacggcctatcacgaagatgattgtgacccaacccaaaggcatcgggtctaccgtacagcccgccgcgaaaatcatccccactaaaattgtgtacggccaacagggtaaaactcaggtcttaattaagccgaaacccgtcaccttccaggctacagtcgttagtgagcagactagacagctggtcaccgagacactgcagcaagcctcccgggtggcagaggcgggcaactcctccatccaagagggaaaggaggagccacagaactataccgatagctcctcatctagcaccgagagttctcagagctcacaggacagccagcctgtggtccatgtcatagcctcccgcagacaagattggagcgagcatgagatcgccatggaaacctctcctaccattatttatcaggatgtttcttccgagtctcagagtgcaacttcgacaattaaagctctcctcgagcttcagcagaccacagttaaggagaagctggagtccaaaccacgccagcccaccatcgatttatcccagatggccgttccaattcagatgacgcaggaaaaacggcactctcccgagtccccgtctatcgcagtggtagaaagtgaacttgttgctgaatacatcactacggagagaaccgatgagggtaccgaggtcgccttcccactgctcgttagtcatagatcccagccacagcagccatcgcagccccagagaaccttgctgcagcacgttgcccaatcccagaccgcaacccagacctccgttgtggtcaagtctattcctgcctcatctcctggcgccatcactcacattatgcagcaggctctgtcaagccatacagcttttaccaagcacagcgaagaactaggcaccgaagagggagaggtcgaagagatggatacgctagatcctcagaccgggttgttctatagatccgctctgacacagtcccagagtgccaagcaacagaaactgtctcagccaccccttgagcagacgcagttacaggttaagactttgcaatgttttcaaaccaaacagaagcagacaatccacctgcaggcagaccaactgcaacacaagttgccgcagatgccccagttgtctattcggcaccagaagctgacgccccttcagcaggagcaggcccagccaaaacccgacgtccagcatactcagcaccctatggttgctaaggatcgacagctgccaacactaatggcacagccaccacagacggtcgtacaggtcctggccgtgaaaacgactcagcagctgcccaagctccagcaggcccccaatcaacctaagatctacgtccagccccagaccccccagagccagatgagcctgcctgcttcctcggagaaacagaccgcaagccaggtcgagcaacccatcattacgcagggtagtagcgtgaccaagatcacgtttgaaggcagacagccgcctactgttactaagatcactggaggtagctccgtacccaaactgaccagtcccgtgacatctatttcccccatccaagcctccgagaagactgcagtctcggacatattgaagatgtccttaatggaagcacagatcgacaccaacgtagaacatatgattgttgacccacccaaaaaagccttggcaacatcgatgctgacaggcgaagccggatccttaccaagtactcatatggtggtcgccgggatggcaaacagcaccccccagcagcaaaagtgtagagagtcatgcagcagcccgagcaccgtagggtcgagtctgaccacaaggaaaatcgatccacccgccgtacctgccaccggacagtttatgcggattcaaaacgtcggacagaaaaaagctgaagaaagcccagccgaaattattatccaagccatcccccagtacgctattccctgccattcaagctccaatgtagtcgtcgagcccagcggtctgctggagctgaacaattttacatctcagcagcttgatgacgaagagaccgccatggaacaggatattgactctagcacagaggacggtaccgaaccctcacctagccagtccagcgccgagaggagttag

SEQ ID NO: 112173 - DNA, 3468 bp, synthetic construct
  misc_feature 1..3468: note = Description of Artificial Sequence: Synthetic coding sequence
  source 1..3468: mol_type = other DNA
atgccagttgtctggccaactcttctcgatctttccagggacgagtgtaaacgcatcctccgtaagttggagctagaggcttatgcaggcgtcatttctgctttacgggcccagggcgacctgacgaaggaaaagaaggacctgttgggtgaattgtcgaaggttctgtccatctcgactgaaagacaccgcgcggaggtacgacgcgcagtgaacgacgagcgactcacgaccattgcccacaacatgtcagggcccaactcttcaagcgaatggtctattgaagggaggcgcctggtgccgctgatgcctagattggttccccagaccgcctttacagtcacagctaatgccgtggcaaatgccgccatccagcacaacgccagtctgcctgtcccggccgaaacaggctccaaggaggtcgtttgctattcttatacatcaacaacctcaactccgaccagcacgcctgtaccatccggaagcattgctactgtgaaatctccaaggcctgcatcccccgcctccaatgtcgtagtcctcccttccgggtccaccgtgtatgtcaaatccgtgtcctgcagcgacgaggacgagaaaccgcgcaagcgacgcaggaccaacagctccagcagctcccccgttgtgctaaaagaagtgcctaaggcagtggtccctgtcagcaaaaccatcactgtgccagtatccggctcccctaagatgagcaacatcatgcagagcatagctaatagcctaccaccgcacatgtcccccgtgaaaatcacatttactaaacccagtactcagacgaccaataccacaactcagaaagttattatagtgactacttcaccaagctccacgttcgtcccaaacatcttgtccaagagtcacaactatgccgcggtgaccaaattagtccccaccagtgttattgccagcaccacccagaagccacctgtggttataaccgcctcccagtcttcactggttagcaattccagctctgggtccagcagtagtacaccgtcgcctatccctaacaccgtggctgtgacagccgtagtctccagcactccttctgtcgtcatgagtaccgtggcacaaggggtgagcacctctgcgatcaagatggctagtacccggctcccctcaccaaaaagtttagtgagtgcacccacccagatcctggcacagttcccgaagcagcatcagcagtcccctaagcagcagctctatcaggtacaacaacaaactcaacagcaagtggctcagccctccccagttagtcatcagcagcagccacagcagtcccccctgccccctggcatcaagcctaccattcagattaagcaagagtcaggagtaaaaatcatcacccagcaggtccagccctccaaaatcctaccgaagcctgtcacggccacccttccaacttcatcgaacagccccataatggtggtgtcttctaacggtgcaatcatgactaccaagctcgtaaccaccccaaccggcactcaggcaacatacacacgccccaccgtgagtccttccatcggtcgaatggctgccacgcccggtgcagcaacctacgtcaaaactacttcagggagcattattactgtcgttccgaaatcccttgctacactggggggaaagattatctcctccaacatcgtctccggtactaccacaaagatcaccactatccctatgacctccaaacctaatgtaattgtggttcaaaagactacgggcaaaggaacaacaatccaggggcttccaggaaagaacgttgttacaactctgttaaacgcagggggggagaaaacaatacagacggtgcctaccggtgctaagcccgccattctgacggccaccagaccaattaccaaaatgattgtaacacagcctaaggggatcgggagtacggtccagccagcggccaagatcattccgactaaaattgtctatggccagcagggcaagacgcaggtcttgatcaaacccaaaccggtcacttttcaggctacagtcgtatccgagcaaactagacagctcgtgaccgaaacacttcagcaggctagtcgggttgccgaggcgggaaacagcagtatccaagagggaaaggaggaaccccagaattacacagattcaagcagctcatctacagagtcgagccagagctcccaggactcacagcctgtagtacacgtgatcgcatccagaagacaggattggagcgagcatgagatcgctatggagacctcacccactattatataccaggatgtgtcaagcgagagccagtcagcaactagtactattaaggcgttgctggagttacaacagacaacggtgaaagagaagctcgagagcaaaccccgtcagcccaccattgacctgtcacagatggccgttcccattcagatgactcaggaaaaacggcactcacccgagagtccatccatcgccgtggtcgagtcggagctggttgcagaatatataacaactgagcgcaccgacgaggggactgaggtcgcgttccccctcctggtttctcaccgatcccagccacagcaacccagccagccacagcgcacgttgcttcagcatgtggcccagtcccagaccgcaacccagactagcgtggttgtgaagtcaattcccgcaagttctcctggtgccatcacacacatcatgcagcaggccctcagcagtcatactgccttcacaaagcatagtgaggagctagggaccgaagaaggggaggtggaggaaatggacaccctggacccacaaactgggttgttctataggtcagccctgactcagagccagagcgctaaacaacagaagctctcccaacctcccctggagcagacgcagcttcaagtgaagaccttgcaatgctttcagactaagcagaagcaaacaattcacttgcaagccgaccagcttcaacataagctgccacaaatgccccagctgtcaatccggcatcaaaagcttacaccgctacagcaggagcaggcccagcccaaaccagatgttcagcacacccaacaccctatggtcgcaaaggatcggcaattgccaactctaatggcccaacccccacagacagtggttcaggtgttggccgtaaaaacgacccagcaattgcctaagctgcagcaggctccaaatcagccaaagatttacgttcaaccccaaacaccacagtcccaaatgtcactccccgccagtagcgagaagcagacagcctcccaggctattccacagtatgcgatcccgtgccattcttcatccaacgtggttgtcgagccgagcgggcttctggagttgaataattttacatctcagcagctcgacgatgaagaaactgctatggagcaagatatagacagctccacagaggatgggacagaaccgtccccaagccagtcttccgctgagagaagttag

SEQ ID NO: 112174 - DNA, 3015 bp, synthetic construct
  misc_feature 1..3015: note = Description of Artificial Sequence: Synthetic coding sequence
  source 1..3015: mol_type = other DNA
atgccggtcgtctggccaacccttctcgacctgtctcgcgatgagtgcaagcgcatcctgaggaagcttgagctggaagcctacgctggcgtgatctcagctctcagagcccagggggatctcactaaggaaaagaaggacctgctgggcgaactctccaaagtgctgtcaatctcaacagagcggcaccgggcagaggtgcgacgggctgtcaacgacgagaggctgacaactatagcccataacatgtccggtccgaacagctcctctgagtggagtatcgagggcaggagactggtaccactcatgcctcgactcgttccacagacagctttcactgtgaccgccaacgccgtggcaaatgcggccattcagcataatgcctccctgcccgtgcccgccgaaaccggttccaaggagggcgtcagttgcagtgacgaagacgaaaagccaaggaagcggcgaaggaccaattcatcatcctcaagtcctgtggtgttaaaggaagtcccgaaggcagtagtgccagtcagcaagacgattaccgttcccgtgtctggtagccctaaaatgtcaaacattatgcagagcattgctaactctttaccacctcacatgagcccagtgaagattactttcactaagccttccacccagaccactaatacgaccactcagaaagtgatcatcgtgaccacatcacccagtagtacatttgtgccgaacattctgtccaaatcgcacaattacgcagctgttacgaaattggtccccacctcggtcattgccagtaccacacaaaagcctccagtggtcatcacagcatcgcagagcagcctggtcagcaacagcagttcaggttcctcctccagcacaccttctcctatccccaacactgtggcggtgaccgctgtggtgtcctcaacgccttccgtggtcatgtcaacagtggcgcagggtgtctccacctccgctatcaagatggcctccacgcggctcccctctccaaaaagtctcgtgagcgcgcccacgcagatcctggcacagttcccaaaacagcaccagcagagccccaagcagcagctataccaggtgcagcaacagacacagcaacaggtggctcagccttctcctgtgtcacaccaacaacagccccaacaatcacctctgccacctgggattaagcctacaatccaaattaagcaagaaagcggggttaagatcatcacacagcaggtccaaccatccaaaatcctcccaaaacccgtgactgccatcctcactgcgaccagaccaatcactaagatgattgtgactcagcctaagggtatagggtctacagtgcaaccagctgccaagatcattcccaccaagattgtgtacgggcagcaaggaaaaacgcaggttctgattaaaccgaaaccggtgaccttccaggctaccgtggtgagcgagcagaccaggcagctggtgaccgagacactccaacaggcatcccgcgtagcagaggccgggaacagttccatccaggagggaaaagaagaaccacagaactacacggacagctcctcctccagcaccgagtccagccagtcgagccaggtgtcccatcgtagtcagccgcagcaaccatctcagcctcagaggaccctcttgcagcatgtggctcagtcacagaccgcgacgcaaacgagtgtggtggtgaagtcgatacctgcctctagcccaggtgcaatcacccacatcatgcaacaagctctctcgagccatactgccttcacgaaacacagcgaggagctcggcaccgaggaaggagaggtggaggaaatggacactttggatcctcagaccggactgttttacagaagtgcacttacacagtcccagagtgccaaacaacagaaactttctcagcctccgttggagcaaacccagctgcaggtgaaaacactacagtgttttcaaactaagcagaaacagacaatccatcttcaagccgaccagctgcagcataaattgccacaaatgccccagctgagcatcagacatcagaaactgacacccctgcaacaagaacaggcccagccaaaacctgacgtgcagcatactcaacatcctatggtcgcaaaagaccggcagctgccgaccttgatggctcaacccccccagactgtggtccaggtcttggctgtgaaaacaacccaacagcttccgaaactccagcaggcccccaaccaaccgaaaatctatgtgcaaccccaaaccccacagtcccagatgagtttacccgcctcctcagagaagcagaccgcatcccaggtggagcaacccataattactcaaggctcgagtgtgaccaagatcacttttgagggacgacagcccccgaccgtaaccaaaataactggcggtagcagtgtccccaaattgacctccccggtcactagtattagccctattcaggcgtcggagaaaacagctgtctcagacatactgaagatgagtttgatggaggcccagattgacacaaacgtagaacatatgattgtagacccacccaaaaaagccctggctaccagtatgcttacaggcgaggctggtagcttgccatccacccacatggtcgttgctggaatggctaattcaaccccacagcagcagaaatgtcgagaatcctgctcaagtccgtctactgtgggaagctccctgaccaccaggaagattgacccaccagcagtgccagccaccggccagtttatgcgaatccaaaacgtaggacagaagaaggctgaagaatctcccgccgagatcatcattcaggctattcctcagtacgccatcccatgtcattccagtagtaatgttgtagtggagccatctggcctcctcgaactcaataacttcacttctcagcagctggacgacgaggaaaccgccatggagcaggacatagattcttcaacagaggacggaactgagccctcaccctcccagtcgtcagctgagaggtcctag

SEQ ID NO: 112175 - DNA, 3969 bp, synthetic construct
  misc_feature 1..3969: note = Description of Artificial Sequence: Synthetic coding sequence
  source 1..3969: mol_type = other DNA
atgcctgtggtgtggcctactcttttagatctgtcccgcgatgagtgcaagagaatcctgagaaagctggaactcgaggcttacgccggggtgatctctgctctcagggctcagggcgacttaacaaaagagaaaaaagatctgctcggcgaattatcaaaggttctgagcatttccaccgagcggcacagagctgaggttcggagggccgtaaatgacgagcgactgacaacaatagctcataacatgagcgggcccaattcatccagcgagtggtcaatcgaaggtagacgcctcgtcccgctgatgccacgtctcgtgcctcagacagctttcaccgttactgccaacgcggtggcaaacgccgcaatccaacacaatgcctcgctgcccgtgccggcagagaccggtagcaaggaggtcgtgtgttactcttacacttcaaccacctcaaccccaacttctaccccggtgccttctggatccatcgctacagtgaaatccccacgtccagcatccccagcctcaaacgtggtcgtcctaccttccgggtcaactgtgtacgttaagtccgtgagttgttcagacgaagacgagaaacccaggaaacgacgaaggaccaatagctcctcctcttcacctgttgtgctcaaagaagtacctaaagcggtggtccctgtcagcaagaccattacagttcctgtctctggttctcccaaaatgagtaatattatgcaaagcatcgccaacagcctgcctccccatatgtcccccgtcaaaataacctttacaaagccatctacacagactacaaacactaccacccagaaggtcataattgtcaccacctccccttcttcgacgttcgtgccaaacatcttgagtaaatctcacaactatgctgcagtcactaaactggtccccacctcagtcattgccagcacaacgcagaagcccccggtggtgattacggcctcgcagtcgtcgttagtgagtaactctagctccggttcatcttcatcaaccccatcacccatcccaaatactgtggcggtcaccgccgtggtatcatcaactccatccgtggtcatgagtacagtggcccagggggtgagcacctccgcaatcaagatggcatctacgcgtctgccctcgcccaagagcttagtcagtgcccccacacagattttagcgcagttccctaagcagcaccagcagagcccaaagcagcagctgtatcaggtacagcaacaaacacaacaacaggttgcacagccctctccagtgtcccaccagcagcagccccagcaaagcccactgcctcccggcattaaaccaaccatacaaatcaagcaagaatcaggcgtcaaaatcatcacccaacaggtacagccttccaagattttgcctaaacctgtgacggccaccttgcctacttcttccaactccccaattatggtagtcagcagtaacggagccatcatgacgactaagctcgtgacgacgccaactggaacacaagccacttacactaggccaactgtcagcccctctatcggccgtatggctgcaacgcctggtgcggcaacatatgtgaaaacaacgagcggttcaataatcacagtcgtgcccaaatcactcgctacactgggcggcaaaatcatctcgtccaacatagtttcagggactaccactaagattacgacaatccccatgacctcaaaaccgaatgtgatagtggtccaaaagactacgggcaagggcaccacgatccagggcctgcctgggaaaaacgtggtaaccacactgctaaacgccggcggagaaaaaactatccagacggttcctaccggcgcaaagccagctatactaacagctacacgcccgattacaaagatgatcgtgacccagcctaagggtattgggtctactgtgcaaccggcggctaaaatcatccctaccaaaatagtctacgggcaacagggcaagactcaggtactcatcaagcccaagccggtgacttttcaagccactgttgtgagtgagcagactagacagctggtgaccgaaacactccagcaggcctcaagggtggctgaggctgggaacagtagtattcaggaaggtaaggaagagccccagaattatactgattcttctagcagctcgacggaatcctcgcaaagctctcaggattcacagccagtcgtgcatgtgattgccagtcggcgccaggattggtcggaacatgaaatcgcaatggaaacctctcctactattatctaccaggacgtgtcatctgaaagtcagagcgcaactagcaccatcaaggcactgctcgaactgcaacagaccactgtgaaagagaagctcgaatcgaagccacggcaaccaaccatagatcttagccagatggccgttcccatacagatgacccaagagaaaaggcactcccctgagtctccctcaatcgcagtagtcgaaagcgagttggtcgccgagtacataactactgagagaaccgatgagggtactgaagttgctttcccccttctggtgagccatagatctcagccgcagcaacctagtcagcctcagcgaactttactccagcacgtggcacagtcacagacggctactcagacaagcgtagtcgttaaatcaatccctgccagtagccccggtgcaatcacgcacatcatgcagcaggcgctttctagccacacagctttcacaaaacacagtgaagagctgggcaccgaagagggagaggtcgaggagatggatactctggaccctcagactggactgttctaccgctcagcccttacccagagccagagtgccaagcagcagaagctcagccagccacctttggagcagacacagctccaggtgaaaaccttgcagtgcttccaaactaaacagaaacagacaatacacctgcaggcggatcagctccaacataagctaccacagatgccacaactgtctatcagacatcagaagctcaccccgttgcagcaggagcaggctcagccaaagcctgacgtgcaacatacgcaacaccccatggttgcgaaggatcggcaactgccaacgctcatggcacagccaccacagaccgttgtccaggtccttgcagtgaagactacgcagcagctgccaaagctacagcaggcccctaaccaaccgaaaatctacgtgcagccccagacaccacagtcgcagatgtctttgcccgctagtagtgaaaaacagactgcttcccaagtggagcaaccaatcattactcagggctcctccgtgaccaagatcacattcgagggccgacaacctcctaccgtaaccaaaatcacgggtggatcttctgttcccaaattaacttcgcctgtgaccagcatctctcctattcaggccagtgaaaagacagccgtatcggatattttgaaaatgtccctcatggaggcccagatagacaccaacgtggagcatatgatagtggatccccctaagaaagctctggccacttcaatgcttactggcgaggctggatcactgccatcaacacacatggttgtagcgggcatggctaatagcacacctcagcagcaaaaatgtagagagagttgctctagcccaagcaccgtggggagcagcttgaccactagaaagatagacccacctgccgttccagctaccgggcagttcatgagaatccagaacgttggacagaaaaaagctgaggagtccccagccgaaatcattatacaagccataccccagtatgccattccttgccactcaagttcaaatgtcgtggttgaaccctccggtttgctggaactaaacaactttacctcccaacaacttgacgatgaggagactgccatggaacaggacatcgacagctctaccgaggacgggaccgagccctctcctagccaaagctctgcagaacggtcctag

SEQ ID NO: 112176 - DNA, 624 bp, synthetic construct
  misc_feature 1..624: note = Description of Artificial Sequence: Synthetic coding sequence
  source 1..624: mol_type = other DNA
atggcagtgtttcatgacatgctcctgcaacctttaggcatgttcctctgcctgtccctgcagctgtcatcggccacatttatccgctatagcagcacttgctttacctttgacgaatactacaccattactttggatataaaggcctcgtcgcatatctacgaatcaaatgccgtgtattccgtgtttgtgcctgtgaatgactcagtttacgccgttgtgatgaagaccttggacgagaattcggacagtgctggactatggcagagagccgacaaaaattgttattccaacagtacatactatgtgaaagaccaatatatgaccgtcctagaggcccaatggcaggcgccggagccggagaatattacagaggttgagatccaagctttcaccgtccagattagagccctgcctatactgagcaccctcaagttgcgagagaagctctccacactggccctggccgctaaaatcccacaaagcagcgcctttaaacccttcttcatgattactccaaagagtatcagactggaaggcctcgctaatcaggttttcagcagccctatcactgaggctatctacattctgctggccttccttaccagcactttgctgttttag

SEQ ID NO: 112177 - DNA, 3708 bp, synthetic construct
  misc_feature 1..3708: note = Description of Artificial Sequence: Synthetic coding sequence
  source 1..3708: mol_type = other DNA
atggatcataccgcctcccagaacgcccaggatctgattgggatcccgcacctgggcgttagcggttcaagcactaaatggcattccgaactctctccaaccgagggaccgcatagtgccggatcttccactcctggctttttgagccccatggccgaactttctcacccctcccctccgcctccggccctgggaagcctactgcagcttcctgatggcagcccatcttggtccatgctggaggttgcttccgggccggctagcactcaacaaatcaaggccggcgtccctggtagggtgcacaacggggttagcctgccaacatttaagaacactgagacggctacacatgaagctgagccacctctgttccagaccgccgaatcaggggcaatagagatgacatcccggaagctcgcatcggcaacagccaacgactcagctaatccactgcaccttagtgccgcgcccgagaatagcagagggcccgcgttgtctgctgaacatacgtcttcgctagtgccaagcctgcatatcacaacgcttgggcaggaacaggccattctgtctggggccgtgcctgctagtcccagcactggaaccgccgattttccctcgatactaacttttctgcaacccacggagaaccatgctagtcccagccctgtgcctgaaatgcctactctgccagctgaaggcagtgatggctctcctccagccacaagagatctgctgctctcaagtaaagtacctaacctgctgtctacgtcctggacatttcctcggtggaagaaagatagcgtgacagcaatcctcggcaagaatgaggaagctaacgtgaccatcccattgcaggcattcccacggaaggaggtgctgtccctgcacacagtgaatggattcgtgtccgattttagtacaggctcggttagctcccctatcatcactgctcctcgcacaaatcctctgccttccgggccccctctcccttctattctgtcaattcaggccacacagacagtgtttcctagtcttgggttctcttctactaagccagaggcttacgctgccgcagtagaccattctggcctccccgcctcagcaagcaaacaggtcagagcaagtccttcatcaatggatgtgtacgactcgctgacaatcggtgacatgaagaaaccagctacaaccgatgtgttctggtccagtttaagcgccgagaccggctcactctcaactgaatctattatttccggcctgcagcagcagactaattacgatcttaatgggcataccatctccactaccagctgggaaactcatctagctcctaccgcacctcccaatggcctgacttccgcagcagacgcgatcaaatcccaggattttaaagataccgctggccacagtgtgaccgcggaaggctttagcattcaggacctcgtgcttggtaccagtatcgagcagcccgtgcagcaatccgatatgacaatggtggggagccatatagatttgtggcccacatccaataataaccattctagagacttccagaccgccgaggtggcgtactactcaccaacaacacgccattccgtctcccatccacagctccaactccctaaccagccagcccaccccttactgctcacctcacccggccccaccagtacagggagcctgcaggagatgttgagcgatgggaccgatacagggtcagagattagttccgacattaactcttctcccgaaaggaatgcaagcactccatttcagaacattctgggatatcattcagccgcagagagctctatatccacatcagttttccccaggacaagtagtagggtcctccgtgcttcccaacaccctaagaagtggacaggcgcagccacgaatgccgccgacacggtatcttccaaggttcagcccacagcagctgctgctgtgaccttgttccttaggaaatcctcaccgcccgcactatcggctgccctcgtagcaaagggcactagttcctcccctttggccgttgccagcgggccggctaagagtagcagtatgaccactttggcaaagaatgtaacaaataaagcagcttcaggacccaaacggacaccaggagccgtgcacaccgctttccctttcacgcccacttacatgtacgcaaggacagggcacacaaccagcacccacaccgccatgcaggggaacatggatactgcatccggcttactctccacaacctacctgcctcgtaaacctcaggccatgcatacaggcctccccaatcccacaaatctcgagatgccacgtgccagtaccccacgcccgctgactgtgaccgctgcattgactagtataacggccagcgtgaaagctaccagactgcccccattgagagccgagaacacggatgcagtccttcctgcagcctcagcggcagtcgtgacgaccggcaagatggcttccaaccttgaatgtcagatgtcctccaaactgctggtaaagacggtgctgttcctgactcagagacgggtgcagatctctgaatcactaaaattttcaatcgcaaagggactcactcaggcccttcgaaaggcatttcatcagaacgacgtttcagcccacgtggatatcctggagtatagccataacgtgactgtgggatactatgccaccaagggaaaattggtgtacttacctgcggttgtgatcgagatgctcggagtttatggggtcagtaacgttacagccgatctgaaacagcatacacctcacttgcaaagcgtggctgtcctggcttctccttggaatcctcagccggccggctatttccagctcaagacagtgctccagtttgtgtcgcaggctgataacattcaatcttgcaagtttgcccagactatggagcaacggcttcagaaggcatttcaagacgctgaacgtaaagtccttaacaccaagagcaatctaactatacagatcgtaagcacaagcaatgcatctcaagctgtgactctagtttacgtcgttgggaaccaaagcacattcctgaatggaactgtggcatcatccctgctgtcacaattatccgctgaactggtggggttttacctgacatatccacctctgactattgccgaaccacttgaatacccgaatctggatattagtgaaaccacccgcgattattgggttattactgtgttgcagggagtcgacaatagcttggttggtctccacaaccagtcttttgctagggtgatggagcaacgcttggcccagctgttcatgatgagccaacagcagggccggcgctttaagagggccactacactggggagttataccgtgcagatggtgaaaatgcagcgcgttccagggccaaaagaccccgctgagttgacgtactacaccttgtacaatgggaaaccattactcggaactgccgcagccaaaattttgagcaccatcgacagtcaacgcatggcattaaccctacaccacgttgtcctgttacaagccgaccccgtggtcaaaaacccaccgaacaatctctggatcatcgctgctgtactggcccccattgctgtggtgactgtcatcattatcatcattaccgccgtgctatgtcggaagaacaaaaacgatttcaagccggatacaatgatcaatcttcctcagcgagccaaacaggttgcccaatag

SEQ ID NO: 112178 - DNA, 5550 bp, synthetic construct
  misc_feature 1..5550: note = Description of Artificial Sequence: Synthetic coding sequence
  source 1..5550: mol_type = other DNA
atggatcataccgcctcccagaatgcacaagacttgatcggcatcccccacctaggagtctccggaagttccacaaaatggcactctgagctttctcccacagaaggaccccattctgcaggctcctccacaccaggtttcttaagccctatggcggagctctcccacccgtcaccaccgcctcccgccctggggagtctgctgcagctccctgatgggtccccatcctggtctatgctcgaggtggcgtctggaccagcctccacacagcagattaaggctggtgttcccggcagggttcacaacggagtgtcactgcccacatttaagaacacagagactgcgacccacgaggcggagcccccactctttcagactgccgagtccggtgcgattgagatgacgtcaagaaagcttgcttccgcgaccgccaacgactccgccaatcctctccacttgtctgccgcacctgagaacagccgcggccctgctttgagtgcagagcataccagctccctggtgccttccctgcatattacaacactgggccaggaacaggccatcctgtctggggcagtgcccgcttctcctagcacagggacggccgacttcccctccattctgacatttcttcagccaactgagaatcatgcatcaccatcacctgttccagagatgcctaccttgcctgcagaagggtccgatggcagcccccccgccactcgagacttactcctcagttctaaagttcccaacctcctgagcacaagctggacctttcctagatggaagaaggattcagtgaccgcaatcttgggcaaaaatgaagaagctaacgtgacaatcccgcttcaagctttccctaggaaggaagtgctgtcccttcacactgtgaatggcttcgttagtgactttagtaccggatccgtctcttcgcctatcatcaccgccccaagaaccaatcccctgccttcaggccctcccctgccctcaatactgagtattcaggctactcaaaccgtgttcccttccctgggtttctcgagtactaagcccgaggcctacgcagctgccgtggaccactctggattgcctgctagtgcttcgaagcaggtgagagcctctccctcatctatggacgtctacgattctttaaccattggagatatgaagaagccagccaccaccgacgtattttggagctcactctcagcagagaccggcagtctgtcaacagagtccattatctcaggacttcagcagcaaacaaattatgacctcaatgggcacaccatctcgactacatcttgggagactcatttggcccctaccgcgcctcccaatggtcttacgagtgccgccgatgccataaaaagtcaggacttcaaggacacagccgggcactcagtcactgccgaagggttctccatccaggacctagtcctgggcacgtccatagagcagcccgtgcagcaatctgacatgacaatggtcggaagtcacatcgacctctggccaacctccaacaataaccattccagggatttccagactgctgaggtcgcctattatagcccaactaccaggcatagcgtgagtcacccacagctgcagctgcctaaccagccagctcacccactgctgctgacttcccctggacccacttccaccggatcactgcaggagatgctgtccgacggaaccgacacaggcagcgagatcagttctgatattaactcatcccctgaaagaaatgcttccacgcccttccaaaacatccttggttatcactccgcagcggagtcctcaatctcgacaagtgtttttcctcggacttctagcagagttctgagggcgtcccaacacccaaagaagtggactgcagacactgtgtcgtccaaggttcagcctacagccgcagcagctgtgacgctgttcctccgcaaatcatctccccccgctcttagtgcggcgctcgtggctaaggggacatccagcagtccccttgctgtggccagcggacccgccaagtcctctagcatgaccaccctggcaaaaaacgtcacaaacaaggccgcttccggacctaaacgaacgccaggggcagtgcacaccgcttttccttttactcccacgtacatgtacgcaaggaccgggcataccacctcaacccacactgccatgcaaggaaatatggacacagcatctggactcctgagtactacctatctcccgagaaagccccaagccatgcacacaggtcttccgaatcccaccaacttggagatgccccgtgcaagtactccaagacctctgaccgtgactgctgccttgacgtcgatcaccgcatccgtgaaagccacacgtcttcctccattacgggcagaaaacaccgatgctgtgctgccagcagcctccgcagcggtcgtgacgaccggaaagatggcttctaatttagagtgccagatgtcttcgaagctgctggtgaaaaccgtattgtttctcactcaacgccgcgttcaaattagcgagtcacttaaattctcaattgctaagggccttacacaagcgctgagaaaggcgttccaccaaaatgacgtgagtgcccacgtggacatcctggaatactctcataatgtgaccgtgggctactacgcaacaaaagggaaactcgtctatcttccggctgtcgtgatcgaaatgctgggagtgtacggcgtctctaatgtgacagccgacctgaaacagcacactcctcatctgcagtctgtggcggtgctggcctccccatggaaccctcagccagcggggtattttcaattgaaaacagtcctccagttcgtttcacaggccgacaacatccagagctgtaagtttgcccagacgatggagcagagactgcagaaggcttttcaggacgcggaaagaaaagtgttaaacaccaaaagcaacctgactattcagatcgtttcaacctctaacgcttcccaagcagtgactctggtctacgtagttggtaaccagtccacctttctgaacgggactgtggccagttcattattatcccagctgtctgcggagttggtaggattctatctgacctacccgccactcaccattgccgagcctttggagtatccaaatctggacatcagtgagaccaccagggactactgggtcattaccgtccttcaaggggtggataattccctggtgggactgcacaatcagtcatttgccagggttatggaacaacgcttggcccaattatttatgatgtcccagcaacagggacggcgcttcaagagagccactaccctcgggagttatacagttcagatggtgaagatgcagagagtgccaggtcctaaggaccccgcggagctgacatactacacactatacaatggaaagcccctgctgggcaccgctgcagcaaagatcctgtctacaatcgactctcagagaatggctctgacactccaccacgttgtcttattacaggctgatcctgtcgtgaaaaaccctccgaataacctgtggatcatcgctgccgtgctggcgcccatcgcagtcgtcacagtcatcattattatcattaccgccgtgttgtgccgcaagaataagaacgactttaaacctgacaccatgattaatctaccgcagcgggcaaaaccagtgcagggattcgactacgccaaacagcacctgggtcagcaaggagcagacgaggaggtcatccctgtgacgcaggaaaccgttgtactacccctgccaattcgcgacgcaccacaagagcgggatgtggctcaagatgggagtactataaaaacggccaaaagtacagagaccagaaagagcagatctccctccgaaaacggctccgtcatcagtaatgagagcggcaaaccgtcaagtggccggcggtcgccgcagaatgtcatggcccagcagaaagtgacgaaagaggaggcacgtaagaggaatgttcctgctagtgacgaggaggaaggggctgtgctttttgataactcttcaaaagtagcagcagagccttttgacacttctagtggcagtgtccaactgatcgctattaagcctactgcccttccaatggtcccacctacctccgacaggtcgcaggagagcagcgccgtgctgaacggagaagtgaacaaggcgctgaaacagaagtccgacatcgagcattatcgcaataagctccggctgaaagctaaaagaaagggctattacgatttccctgcagtcgagaccagcaagggcctgactgagaggaaaaagatgtatgagaaggctccgaaggaaatggaacacgtactggatcctgactcagaactatgcgccccatttacagagtcaaagaatagacagcagatgaagaactctgtgtaccgaagcagacagtccttaaattctccaagccccggcgaaaccgagatggacctactggttacaagagagagaccacggaggggcattaggaacagcggatatgataccgaacccgagatcatcgaagaaaccaacattgaccgggtgcccgaaccacggggatactccagaagcaggcaggtgaaaggccattcagagacatcgacgctgtcaagccaacccagcatagacgaggtgagacaacagatgcacatgttgcttgaagaggctttttcactggcctcagccggccatgcaggtcaatcacggcatcaggaggcgtacggctcagctcaacacttgccatatagtgaagtcgtgactagcgctcccggcacaatgaccagacccagagccggagtacagtgggtcccaacgtatcgtcccgagatgtaccagtatagcctaccacgccccgcctaccgatttagccagttgcccgagatggtaatgggctcgcctcccccaccagtgccaccccgcacaggccctgtggccgtagctagcctaagaagaagcacaagtgatatcggctccaagactagaatggctgagtccacgggtccagaaccagcacagctgcatgatagcgcctctttcacacagatgtcgagaggtcctgtgagtgtgacgcagctggatcagagtgcactgaactattcgggaaacactgtgcccgctgtgttcgctatccccgccgctaaccggcccggtttcactggctattttatccctactccccctagttcgtacagaaatcaagcatggatgtcctatgctggggagaacgagctccctagccagtgggcagatagcgtgcctctgcctggttacatcgaggcctacccccgatctcgctacccccagagctcaccatctcggctgccccgacagtatagccagcccgccaacctgcatccttctttagagcaggccccggctccctctacagccgcctcccagcaaagcctcgctgagaacgatccctcggacgctcctctcaccaatatcagcaccgccgccctcgttaaagctattcgagaggaggttgcaaaactcgcaaaaaagcagacagacatgtttgagtttcaggtgtag

SEQ ID NO: 112179 - DNA, 5568 bp, synthetic construct
  misc_feature 1..5568: note = Description of Artificial Sequence: Synthetic coding sequence
  source 1..5568: mol_type = other DNA
atggaccacaccgccagccagaatgcgcaggatctgatcggaattccccacttgggagtgtctgggagttctactaagtggcatagcgaattgagccccactgaggggccacactcagctggctcctctacgccaggcttcctgtcaccaatggccgagctgagccacccctctcccccaccaccagcactagggagcctgctgcagttgccagacggctcaccctcatggtcaatgctcgaagtagccagcggtccagcttccacccagcagataaaagcgggagtgcctggtagagtgcataatggcgtgagtttgcctacctttaaaaacaccgagacggctacacatgaagcagaacccccattattccagactgccgagtcaggagccattgagatgacaagccgcaagttggcaagtgccacagctaatgattctgccaatcctctccatctgagtgccgcgcccgagaacagtcgagggcctgccctctcagcggagcacaccagttccctggtgccgagcctgcacattactacgctcggtcaggaacaggccattctaagtggcgctgtaccagcaagcccctcgaccggcacagccgacttcccctctatactgaccttcctgcaacccaccgagaatcatgctagtcctagccccgttcctgagatgcctacattgccagccgaggggtccgacggctcacccccagccacacgggacctcctgctcagctccaaagtgcctaaccttttgtctacctcatggaccttcccccggtggaaaaaggatagcgtgacagctattcttggcaaaaatgaagaggccaacgtaacgatccctctccaagcattccccagaaaggaggtgttgagcttgcataccgtgaatgggtttgtgagcgacttttcaactgggagcgtttcatctccaataattaccgctcctcggaccaatcctctgcccagtggcccacccctgccgtctatcttgagtattcaggcaacccaaaccgtgttccctagtttaggtttttcatcaaccaagcccgaagcatacgccgcggccgtggaccactccggtttacccgccagtgcttccaagcaggtgagagcgtcccccagtagtatggatgtatacgatagtcttacaataggtgatatgaagaaacctgctaccaccgacgttttttggtcgagcttgagcgcagaaacgggaagcctgtccacagaaagcatcatctcgggattacagcagcaaactaactatgacctgaatggacacactatcagcaccacaagctgggagacccacctggctcccaccgcaccacctaacggacttacttccgcagccgatgctattaagagccaagatttcaaggacaccgctgggcactccgtgacagcggaggggttttctatacaggatctcgtgttgggaacttccatcgagcagcccgtacaacaatcagatatgactatggtaggcagtcatatcgatctgtggccgacgtccaacaataaccattctcgggactttcagacagctgaagtggcctactactctccaaccactaggcactcagtttcacacccacagttacaactgcctaatcagcccgcccatcctttgttgctgacatctcccgggcccaccagtactggctcattacaggagatgctgagtgatggtaccgacaccggctcagagatctcatctgatattaactcatcaccagagagaaatgcttccactccgtttcagaatatactcggttatcatagtgcggcagagtcctcgataagcacaagcgtcttccctcgcacaagctctagggtactgcgcgccagccagcatccgaaaaaatggaccggcgcggccaccaacgcagccgatacggtgagcagcaaggtccagcccacggccgcggccgctgtgacattatttcttcgtaagtcttctccccccgcactgagcgccgctcttgtcgcgaaggggacttccagcagcccattggctgttgcaagtggaccagctaaaagctcctcaatgaccaccttggcgaaaaacgttaccaataaggccgccagcggtcctaagcggactccaggagcggttcataccgcttttccctttacacctacttacatgtacgccaggaccgggcatactacctccactcacaccgccatgcaggggaatatggacaccgctagcgggctgttatcgaccacctacttaccacgaaagccccaggctatgcataccggacttccaaaccctacgaaccttgagatgcctcgcgcctccacaccacggccattgacagtcacagcagccctaacgtctattaccgctagtgtgaaggctactcggctccctcctctcagggccgaaaatacagacgcagtgctaccagccgcatcagccgcagttgtgactacaggcaaaatggcctctaacctggagtgccagatgtcatctaagcttctggtcaagacggtactgttcttgacacaaagacgcgtgcagataagtgaaagcctgaaattcagcatcgcaaagggattaacacaagcattacggaaagcatttcatcagaacgatgtgtctgcccacgtggatatcctcgagtacagccacaacgtgactgtggggtattatgctacaaagggaaaattagtgtacctgccagccgtcgtaatcgagatgctcggcgtctacggggtatccaacgtgactgctgatctaaaacagcatacacctcatctgcagtcagtggctgttttggcttctccttggaacccccagcctgctggctacttccaactgaagacagtactccagttcgtaagccaggcagacaacatccagtcatgtaagtttgctcagacaatggaacagaggctacagaaagcctttcaggacgccgaacggaaggtgctcaataccaaaagcaatctgactatccagattgtttcaactagtaatgctagccaggccgtcacgctcgtgtatgtcgtgggcaaccagtctacattcctcaatggcacggtggcaagctcactgctgtcccagctctctgctgaattggttgggttttatcttacctatcctccgcttactatagctgagcctctggagtaccccaatctcgatattagtgaaacgacaagagattactgggtgattacagtgctccagggcgtggacaatagtcttgtaggactgcacaatcaatcattcgctcgtgtcatggagcagcgcctcgcacagttatttatgatgtctcagcagcagggccggcgtttcaagcgtgccacgacactcggatcatataccgtgcagatggtgaaaatgcagcgggtacccggcccgaaagaccccgctgaactgacctactacacgttatataatggcaagcctctgttgggcactgcagccgctaagatcctatcaactatagactctcaacgtatggccctgactttgcatcacgttgttttgcttcaagctgacccggtcgtgaaaaatcctccgaacaatctttggattatagcagccgtccttgcaccaatcgctgtagtgaccgttattatcataatcattactgccgttctgtgtaggaaaaataagaacgacttcaagccggacactatgattaacctgccgcaacgggcaaagcccgtgcagggattcgactatgcaaagcagcacctcggacagcagggggccgacgaggaagtcatacctgtgacccaagagactgtggtcctaccactgcctatcagagacgccccacaggaacgggacgtcgcccaggacggatccaccattaagaccgccaaatccacagagacccggaaatcccggtccccgtcagagaacggatcagttataagcaatgagtcagggaagccctcctccggacgcagatcaccccagaacgtgatggcccagcagaaggttacaaaagaagaagcgcgtaaaagaaacgtacccgctagcgacgaggaagagggggcggtactctttgataattcctcaaaggtcgcagcagagccattcgacacatccagcggctctgttcagttaatcgccatcaagcctaccgcgctgcccatggtccccccaacttcggacaggagtcaggaatctagcgcagtgcttaacggtgaggtaaataaggcgctgaagcaaaaatccgatattgaacattataggaataaactcaggctgaaagccaagaggaaagggtactatgatttccccgccgtggaaacctccaaaggactgacggagagaaagaagatgtatgaaaaagcgcccaaggaaatggagcatgtcttagatccagactcagagctctgcgcaccatttacagagagcaagaatcgccagcagatgaaaaacagcgtctacaggagccgccagagtctaaacagtccctcgcccggggagactgaaatggatctactggtgacgagagagcgaccgcgtagagggatccggaatagcgggtatgacaccgagcctgagattatagaagagactaacatcgatcgagttcccgaaccaagggggtattctaggtcacgtcaggtcaaagggcatagcgagacaagtacactatcaagtcagccctctattgatgaggtgagacagcaaatgcatatgctcctcgaggaggcttttagtctcgcttcagccggtcatgctgggcaaagcaggcaccaggaagcttacggatcggcacaacatctcccttattccgaagtggtgacaagcgcccctggtacaatgaccagacctcgagctggagtccagtgggtcccgacttatcggcctgaaatgtatcagtactcccttccaaggccggcatacagattcagccagctacctgaaatggtaatgggaagccccccacctcccgtgccgcctcgcacggggccagtggcggttgcatcactgaggcggtcaacatccgatattggcagcaagaccaggatggctgagtcaactggcccggagcccgcgcagcttcacgattctgccagctttacccagatgagtagaggacctgtgtcagtgacccagctcgatcagtcagcattgaattattccggcaacaccgtgccagccgtatttgccatccctgcggctaatcggccagggtttacaggatatttcattcccacacctccaagtagctacaggaatcaggcctggatgagctatgctggagaaaacgaacttccatctcaatgggcagatagtgtgcccttaccgggctatatcgaggcctaccctcgaagccgctatccccaatcaagtccatctcgccttcctcggcagtactcacagcctgcaaacttgcaccccagcctggagcaggccccggccccctctacagccgccagccaacagtctttggcagagaatgatccgagtgatgcaccgctaaccaacatctcaaccgcagctctggttaaggcgataagggaggaggtagcaaagctggcgaagaaacagactgacatgttcgagtttcaagtgtag

SEQ ID NO: 112180 - DNA, 5067 bp, synthetic construct
  misc_feature 1..5067: note = Description of Artificial Sequence: Synthetic coding sequence
  source 1..5067: mol_type = other DNA
atccctgagggtctttccgccgaacacacctcttcgttggtgccttcgctgcacatcaccacccttggacaggagcaagcaatcctgtcaggcgctgtccctgcaagcccgtctacagggaccgccgacttcccatcaattctgacctttttgcagcccaccgaaaatcacgcttcccctagccccgtgcctgaaatgcccaccctcccagctgaagggtctgacgggtcgcctccagccacaagagatctgctcctttcatccaaggtccccaaccttttgagcacatcatggacattcccccgctggaagaaggattccgtgactgccatactgggaaaaaatgaagaggccaacgtgaccattccgctgcaggcatttccgcgaaaggaagtgctaagccttcacacagttaacgggttcgtctcggacttctcaacaggatctgtcagttcgcctatcatcactgctcctaggacaaatccactgccatccggccccccattgccctccattctgtctattcaggcgacacagactgtgtttcccagcttgggcttttccagtacgaaacctgaggcctacgcagctgccgtcgaccacagcggcctacccgcaagcgcctcaaagcaggtccgagcgtcacccagcagtatggacgtgtatgactcccttactatcggtgatatgaagaagcctgcaactactgatgtattctggtctagtttgtcagccgaaaccggcagcttatctacagaatctatcatcagtggacttcagcaacagaccaattacgatctaaacggccatactatctccacaacatcatgggaaacgcaccttgcaccaactgcaccaccaaacggattgacgtccgctgcagacgcaatcaagtcgcaggatttcaaagacactgccggccactctgtgacggctgaaggattctcgattcaggatctggtgcttggcaccagcatcgagcagccagtgcaacaatcggatatgactatggtgggcagtcacatcgacctgtggcccacgtccaataacaaccatagccgtgattttcagacggccgaagtcgcatattattccccaaccacacgtcatagcgtgagccacccgcagcttcaattaccaaatcaacctgcccaccctctgttgctgacctccccaggccctacatcaaccgggagcctgcaggagatgctttccgatggcaccgacacgggcagcgaaatctcaagcgatataaacagctcgcccgagaggaatgcttccaccccattccaaaatatccttggctaccacagcgccgccgaatcctctatcagtacttctgtctttccacgtacaagttcaagagtgctcagggcatcccagcatccaaagaagtggactgctgacacagtctcgtccaaggttcagcccactgctgcagccgccgttacccttttcttgagaaaatcatctccccccgcacttagtgcggccctggtggccaaaggaacatcatctagcccactggcagtggctagcggcccagccaagtcctcttctatgactaccctcgcaaaaaatgtgacgaacaaagcagcatctggacccaaaagaacgcccggtgccgtccacaccgccttccctttcactcctacatacatgtacgccagaacaggacacactactagcacacacacggctgcccgcaagcacggacactgcttgtggcctgtcgtatacaaccttcctccaagaaaaccgcaggcaatgcatacagggctacctaacccaacaaatctcgaaatgccacgcgccagcaccccccgaccactcactgttaccgctgctttgacctcaatcacagcctctgtgaaggccacacggttaccaccactgagagcggagaacaccgacgcagtgctgcccgcagcctctgctgctgtggtgacgacagggaaaatggccagcaatttagaatgtcagatgagtagtaagctcctggtgaagacggttctgttcctgacccagagaagagtgcagatctccgaaagcttaaagttttctatcgcaaagggcctgactcaagcgctccggaaggcctttcaccagaatgatgtatccgcccacgttgacatcctcgaatattcccataacgtgacagtgggctactacgctactaaaggcaagctggtgtatctgcctgcggtggtcattgaaatgctgggcgtgtacggggtgtctaacgtaactgctgatctcaaacagcacacgccccacctgcagtcggtcgccgtgttggcctcgccctggaacccccagcctgccggttatttccagctgaaaaccgtgttacagtttgtctcgcaagccgataacattcaatcatgcaagtttgcacaaactatggagcaaagactacagaaagcctttcaggacgccgaacgaaaagtcctgaacactaagagcaacctcaccatccagattgtaagcacctcaaatgcttcgcaagcagtaactctggtgtatgtggtaggaaaccaatctactttcctgaacgggaccgtggcttcgagtcttctaagccagctctcagccgagctggtggggttctatctgacatatccacctctgaccatcgccgaaccgctcgagtaccctaatttagatatatccgaaactacacgcgactactgggtaattacggtcttgcagggagtggacaactctcttgtgggactgcacaatcaaagtttcgcacgcgtgatggagcagaggctggcacagcttttcatgatgagccagcagcagggcagacggtttaaacgcgcaaccacactgggatcctataccgtgcagatggtgaaaatgcagagggtacccggacccaaggacccagcagagctcacatattacaccttatataatggaaaacctctgttaggtaccgcagcggctaagattctgagtaccatcgactcacaacgaatggccctgactctccaccacgtggtcctcttacaagctgaccctgtggtcaagaaccctcctaataatctctggattatcgctgcagtgctggccccaattgccgtggtgactgtcattatcatcataatcacggctgtgctatgtcggaaaaacaaaaacgattttaagcctgataccatgatcaatctcccccagagagcaaagccagtccaaggattcgattacgccaagcagcacctgggacagcagggggccgatgaagaagtcattcctgtgactcaagaaacagtagtgctgccgttgcccatacgggatgccccacaggaaagagatgtggcccaagatggaagcactattaaaacggccaagtcaaccgaaacccggaaaagcaggtccccctcagaaaacggctccgtgatctcaaacgagtccggtaagccaagctccggccggaggtccccccagaatgtgatggctcagcagaaggttacgaaggaagaagccaggaaacgcaatgtcccagcttcagacgaggaggagggggccgtattgttcgataactcctctaaagtcgccgcagagcctttcgatacaagcagtgggtctgttcagctgatcgctatcaagcctaccgctcttccaatggtgccccccacaagcgaccggagtcaagaaagctcggctgtcctgaacggggaagtgaataaggctttgaagcagaagagcgatatcgaacattatcggaataaactgcgtttaaaggccaaacggaaaggctattacgattttcccgcggtggaaacatcaaagggtctgacggagcgcaaaaagatgtacgagaaggcccccaaggaaatggaacatgtgctggaccccgattcagagctgtgcgcaccatttaccgaaagtaaaaaccggcagcaaatgaagaactccgtgtatcgcagccgccagtccctcaatagcccctccccaggggagacagagatggatctcctcgtgacgcgtgagcggccaaggcgcggtattcgcaatagcggctatgacacagagccagaaattatcgaggaaacgaatattgacagagttcccgaacctcggggctatagccgttccagacaagtgaagggacatagcgagactagcactctgagctcccaaccgtccatcgacgaggttaggcagcagatgcatatgctgcttgaggaggcattctctctagcttccgccggacacgccggtcagtcccgacaccaggaggcctacgggtctgctcagcacctgccatacagtgaagttgtaacctccgctccgggcactatgacccgcccaagggcaggcgtccagtgggtgccaacctaccgcccggagatgtatcagtattcactgcctcgcccagcctaccggttctctcagttaccggaaatggtaatggggagccccccacctccagtccccccccggaccgggcctgtcgccgtggcctcccttcggagaagtaccagcgacattggttctaagacccgtatggccgagtctacgggtcccgaacccgcacagctgcacgatagtgcttctttcactcagatgagccgcggccctgtctctgtgacgcagcttgaccagagtgcgcttaactatagtggtaacaccgttccagctgtgtttgccatccctgccgccaacagaccaggcttcaccggttacttcatcccaactcccccgtccagctatagaaaccaggcttggatgtcctacgcaggcgagaatgaactgcccagtcagtgggcagacagtgtcccattaccgggatatatcgaggcctaccccagatcacggtacccccagtccagcccctccaggctaccaaggcaatactctcagccagcaaacctccatccttccctggagcaggcccctgctccttccacagccgcaagtcagcagtccttggcagagaacgatcctagtgatgcccccctcaccaatatatcgaccgccgccctggtgaaagccatcagggaggaagttgccaaacttgctaaaaaacagactgacatgttcgaatttcaggtatag

SEQ ID NO: 112181 - DNA, 783 bp, synthetic construct
  misc_feature 1..783: note = Description of Artificial Sequence: Synthetic coding sequence
  source 1..783: mol_type = other DNA
atgatggatccgtgctctgttggagtgcaactgaggactacaaatgaatgtcacaagacttactatacacgacacacggggttcaaaactctgcaggagctttcgtccaacgatatgttgttgcttcagctcagaactggaatgaccttatccgggaacaacaccatatgtttccaccacgttaaaatttacattgaccggtttgaggacctgcagaaatcctgctgcgatccgttcaatatccacaagaaactcgctaaaaagaatctccatgtgatcgatcttgacgatgccacctttctgtcagctaaatttggacgccaactcgtgccagggtggaagctctgccctaagtgcactcagatcatcaacggctctgtcgacgtcgataccgaggaccggcagaagcggaaaccagagtccgacggccggactgcaaaagccctgcgatcccttcagttcacaaaccccggccgacagactgagtttgctcccgagacaggaaagagggaaaagcggcggctgacgaaaaatgctacggctggaagtgacagacaggtcattccagcgaagagcaaggtctacgactctcaaggcctgttaatattttcaggtatggacctctgcgattgcctggacgaagattgtctgggctgtttttacgcttgtccagcctgcggtagtactaaatgcggcgccgaatgcagatgcgaccgcaagtggctgtacgagcagatcgagatcgaaggtggagaaatcatacacaataagcacgccggctag

SEQ ID NO: 112182 - DNA, 507 bp, synthetic construct
  misc_feature 1..507: note = Description of Artificial Sequence: Synthetic coding sequence
  source 1..507: mol_type = other DNA
atgatggacccatgttctgtcggagtccagttaagaacaaccaatgagtgccacaaaacgtattacactaggcacacgggcttcaagacactgcaagagctctcatcgaacgacatgctactcctgcagctaagaaccggcatgacactgagtggcaataacactatatgctttcatcacgtgaaaatttacatcgaccgctttgaggatcttcagaagtcttgctgtgacccctttaatatccataaaaagttagccaaaaagaatttacacgtcatcgatttggacgatgctacatttttatcggcaaaatttggacgccagcttgttcctggctggaaactctgtccaaaatgcactcagataatcaacggctccgtggatgtggatacggaagaccggcagaaaaggaaaccagaatcggatggaagaacagccaaagcgttaaggtctctgcagtttacaaaccctggacgacagaccgagtttgcgcccgaaactggttag

SEQ ID NO: 112183 - DNA, 180 bp, synthetic construct
  misc_feature 1..180: note = Description of Artificial Sequence: Synthetic coding sequence
  source 1..180: mol_type = other DNA
atgagacagttgaagggaaaacccaaaaaggaaacgagtaaggacaaaaaggagagaaaacaagccatgcaggaggcccggcagcaaataaccaccgtcgtactgcctaccctagctgtagtggtcctgctgatcgttgtctttgtttacgtagcaaccagacctactattaccgagtag

SEQ ID NO: 112184 - DNA, 180 bp, synthetic construct
  misc_feature 1..180: note = Description of Artificial Sequence: Synthetic coding sequence
  source 1..180: mol_type = other DNA
atgcggcaacttaaaggcaagcctaagaaggaaaccagcaaagataaaaaggagcgcaagcaggccatgcaggaagccagacaacagataacaacggtagttctgccaacacttgccgtggtcgtcctgctgattgtggtgtttgtttacgtcgccacgcggcctactattaccgaatag

SEQ ID NO: 112185 - DNA, 144 bp, synthetic construct
  misc_feature 1..144: note = Description of Artificial Sequence: Synthetic coding sequence
  source 1..144: mol_type = other DNA
atgcggcagctgaaaggcaagcccaaaaaggagacaagcaaggataagaaagaaagaaagcaggccatgcaggaggccaggcaacagataaccactgttgtactgccaaccctggccgtggtggtactcctgattgtggtctag

SEQ ID NO: 112186 - DNA, 180 bp, synthetic construct
  misc_feature 1..180: note = Description of Artificial Sequence: Synthetic coding sequence
  source 1..180: mol_type = other DNA
atgagacagcttaaaggcaagccaaaaaaggagaccagcaaggacaaaaaggagaggaaacaggccatgcaggaagccaggcagcagattaccacggtggtgctgcctactctcgccgtcgtcgtcctgctgattgtagtctttgtctacgtagcgacgagacctactattaccgagtag

SEQ ID NO: 112187 - DNA, 159 bp, synthetic construct
  misc_feature 1..159: note = Description of Artificial Sequence: Synthetic coding sequence
  source 1..159: mol_type = other DNA
atgcgccaactcaaaggtaaaccaaaaaaggaaaccagtaaagataaaaaagagagaaagcaagcgatgcaggaggctcgacagcagataactactgtcgtgctgcctaccctcgccgtggtggtgctgttaatagtggtcttcgtgtatgttgcttag

SEQ ID NO: 112188 - DNA, 3336 bp, synthetic construct
  misc_feature 1..3336: note = Description of Artificial Sequence: Synthetic coding sequence
  source 1..3336: mol_type = other DNA
atgcattggctgcctgccggccatgatattaatggagccctcgagcccagcaacatcgacacttcgattctggaagaatacatctctaaggaggacgcctctgatctctgttttcccgacatctcagcgcccgcttcctctgcaagctactcacatgggcagccagccatgcccggaagctcaggtgtacaccacttgtctcccccagggggtggccccagccctggaaggcacgggccactgccccccccgggctatggaacgccacttaactgcaacaacaacaatggaatgggggcggcccccaagcccttcccagggggcacaggcccccccatcaaagcagaaccaaaggctccctacgccccaggtactttgcccgactcgcctcccgactcaggtagcgaagcctacagtcctcagcaggtgaatgaacctcacttgcttcgtactattactccggaaaccctctgccatgtgggcgttccttctcgcctggagcacccaccccccccacccgcccacctgccaggcccaccccccccgccgccgccccctccgcattatcccgttctccagagagatctttatatgaaggcagagccacccatccctcattacgccgcgatggggcaaggcctcgtccctacagacttgcaccacacccaacagtcccagatgctgcatcagctactgcagcagcatggtgccgagttgccaacccacccttcaaagaaaaggaaacattccgaatcgcccccctctactctcaacgctcagatgttaaatggaatgattaagcaggaaccgggcactgtgacggccctccccctccatccaacccgcgccccctcgcctccttggcctccacaggggccactttctcctggcccaggctcgctgccgctcagcattgcccgcgtgcaaactccaccttggcatcctcctggcgcgccgagtcctggtctgctccaagatagcgatagcctaagcgggagttatctggacccaaactatcaatctatcaaatggcagccacatcaacaaaacaaatgggccacgctgtatgacgcgaactataaagagctgcccatgctgacttaccgcgtggacgccgacaagggatttaacttttctgtgggggacgatgccttcgtttgtcagaagaagaaccatttccaagtcactgtgtatattgggatgcttggcgaacctaagtatgtgaaaacccccgaaggtctgaaaccattggactgcttttacttgaagttgcacggagtcaagttggaggctctgaaccagagtatcaatattgaacagtcgcaatcagatcgaagcaaaagaccattcaaccctgtcactgtgaaccttccgcccgagcaagtgaccaaggtaactgtcggccggctccacttctcggaaacaacagccaacaacatgcgcaagaaggggaaacccaaccctgatcagcgctattttatgttagtcgttgccctgcaggcacatgcccagaatcagaactatactctagctgcccagataagtgaacgcataattgtgcgggccagcaaccccggtcagtttgaaagcgatagcgacgtactctggcagcgagcccaagtcccagacacagtattccaccacggacgcgtgggaattaacaccgaccgacctgatgaggccctggtcgtccatggcaacgtcaaagttatgggatctctaatgcaccctagtgatctgcgggctaaagaacatgtgcaggaggtggacacgaccgagcagcttaaacgtatctctcggatgaggctggtgcactataggtacaaaccagagttcgctgcctctgccggcattgaggccacagctccggaaaccggggtgatagcacaagaagtgaaagaaatactccctgaagccgtcaaggatactggcgatatggtcttcgccaacggtaaaaccattgaaaatttcctggtggtaaataaggagcggatctttatggaaaacgtgggagctgtgaaagagctgtgtaaactgactgataatctcgaaactcgaattgatgagctagagaggtggtcacataaactggccaaacttagaagattggactccttgaaatctacgggctcatctggggcctttagtcatgccgggagccagtttagccgggccggtagcgtgccacacaagaagaggcctcccaaggtcgcttctaagagctcatcagtggttcccgaccaggcctgcatatctcagagatttctgcaagggactattatagcgctggtggtagtcatggcgttctcagtagtctccatgtcaacgctgtatgtgctgtcactaaggaccgaagaagatctggttgacaccgatgggcgctcctcacagagcttcggaacaactcaactgcggcagtcccccctgaccacgggactcccaggcattcagccttccttgttgctggtgaccacgtcgctgacctcatcggcccctggatctgcggtccgcactctggatatgtgctccagtcatccttgtccagtgatttgctgctcttctcccacgacaaatcccaccaccggacccagcttgggaccatctttcaaccccggacatgtgctctctcccagccctagcccgtcaacgaacaggtcggggccgagccagatggcgctcctacctgtaactaacattagggctaagagttgggggctcagcgtcaatggcattggacactcaaagcaccacaaatctctggaaccacttgcttcgcccgccgtgcccttcccagggggtcagggaaaggcgaagaatagtccttcattggggttccatggccgcgcgcggcgaggagctctgcagagtagtgtggggccagcggaacctacctgggcacagggccagtctgaacccgtaccttcacttacgtcaatacaagttctcgaaaactccatgagcatcacttctcaatactgtgctccgggagatgcctgtaggccggggaactttacgtaccacattccagtttcatccggcacccctctccatttgagtctgacactccagatgaattcctcctcccctgtgagtgttgtcctgtgttccctgaggagcaaggaagaaccatgcgaggaaggaagtctaccacagagtctgcacacccatcaggatactcagggtacaagccacagatggcccattactattttatcttttagggagtttacataccactttcgtgtggctctgctcgggcaggcaaattgctcaagtgaggcattggcccagcccgcaaccgattatcacttccatttttacaggctttgcgactag

SEQ ID NO: 112189 - DNA, 3456 bp, synthetic construct
  misc_feature 1..3456: note = Description of Artificial Sequence: Synthetic coding sequence
  source 1..3456: mol_type = other DNA
atggaagtagttgacgaaactgaagcattgcagagattcttcgaaggtcatgatattaatggcgctcttgaaccaagcaatattgacacgtctattctcgaagaatatatttccaaagaggacgcaagtgacctgtgttttcctgacatatccgcaccagcaagctcggcaagctacagtcacgggcagccagcaatgccagggagctctggagtgcaccacctttccccacctggtggtggaccctcacccggtcgccacggccccctgcctcccccagggtatgggacccccctgaattgcaataataacaacggcatgggcgccgccccaaaaccatttcccggaggtaccggcccaccaatcaaggccgaacctaaggccccatacgctcctggtaccctgccggactctccgcctgacagtggttccgaagcatatagcccgcagcaggtcaatgaaccccatctgctcaggacaattactcccgaaacactgtgccatgtgggggtcccaagtagactggagcatcctccaccccctcctgctcaccttcccggcccccctccgccacccccccctccacctcactaccctgtgttgcaacgcgatctctacatgaaagccgagccgccaataccacactatgctgcgatgggccagggactcgtacccactgacctgcaccatacccagcagtcccagatgttgcaccagttgctgcaacagcacggcgcggaactccctacacacccttcgaagaagagaaagcacagtgaaagcccaccctccaccttaaacgctcaaatgttgaatggcatgatcaaacaggagccaggaacagttaccgcgctgcccctgcatccgacccgggctccttccccgccctggcctccacagggtcccctatcacccggccccgggagcttgcctttgtccatcgcccgtgtccagacccccccgtggcacccccctggggcccccagccctggcctgctacaggacagcgattccctgtcgggcagctatctggatccaaactatcagagcatcaaatggcaaccacaccagcagaacaaatgggccaccctttacgacgcgaattacaaggaattgcctatgttgacatacagggtcgacgctgataaaggttttaacttcagcgtgggagatgacgccttcgtgtgccaaaagaaaaaccattttcaggtcaccgtgtacatcgggatgcttggtgaacctaagtacgtgaaaacccccgaaggactgaagccgctggattgtttttatttgaagttgcacggcgtgaaactggaggctctgaatcagtccattaacattgagcagagccagagtgatagaagtaaaaggccgtttaatcccgtcaccgtgaatctgccccccgaacaggtgacaaaggtgaccgtgggtcgactccacttcagtgagactaccgccaataatatgcggaagaaggggaaacctaaccctgatcagagatactttatgctcgtggtagctctgcaggcacacgcccagaaccagaactatacactagcagcccagattagtgaacgcatcattgtgagggcaagcaatccaggacaattcgagtctgactccgatgtactctggcaacgagcccaagtgcccgatacagttttccatcacggacgcgttggaattaacactgaccgccccgacgaggccctggtagtgcacggtaacgtgaaagtgatggggagtctgatgcacccctccgacctgcgtgccaaagagcacgttcaggaggtggacactactgagcagctgaaaaggattagcagaatgaggctggtgcattataggtacaagcctgaattcgccgcttcagcaggcatcgaagccaccgctccagagacaggagtaatcgcacaggaagtgaaagaaattctgccagaggcagtgaaggacactggtgatatggtctttgccaacgggaagaccatagagaacttcctcgttgtaaataaagaacgcatctttatggaaaacgtcggagccgtgaaagagctgtgcaagttaacggataatttggaaacccgcatagacgaactcgaacgatggtcacataagctggccaaattgcgccggttagattcgctgaaatccaccggttcctcaggcgctttttcacatgcgggatcccagttttcgcgcgctggatccgtaccgcacaagaaaagacccccgaaggtagctagtaaatcctctagcgtggtgccagatcaggcttgcatcagccaacggttcctccagggcacaatcatcgctctagtggttgtgatggctttttccgtggtgtctatgagcactctgtatgtgttgagtctgcgcactgaagaagatctggtggacacagacggcagcttcgctgtttccacatcttgcctgcttgcactgcttcgaccccagccacctggtggatccgaggctctttgcccctggtccagccagtccttcggaactactcagttacgacagtctcctctgacgaccggattacccggcatccagcccagcctgctgctggtgaccacttcacttacctcatcagctccaggtagtgctgtgcgcactcttgatatgtgttcctctcacccttgcccggtgatctgttgctccagtcctaccactaatcctactactggcccatcactgggaccaagtttcaatcccggccacgttctcagccctagtccatctccatctacgaaccgctcaggcccttcacagatggccctgctgcccgtgaccaacatcagagcaaagtcctgggggctgtcagtgaatgggattggccatagcaaacaccacaagagcttagaaccattggcaagcccagcagtacccttcccgggtgggcagggcaaagctaaaaacagcccatcactgggatttcatggtagggccaggcggggggcattacaatcttccgtagggcccgcggaaccaacttgggcccagggccagagcgctagtctgctggctgaacctgttccgagcctgactagcatccaggtgttggaaaattctatgagcattacatctcagtattgcgctcccggagacgcttgccgacctgggaatttcacttaccatatccctgtgtctagcggcacccctcttcacctcagtcttacgctccaaatgaattcttcatcccccgtgtctgtagtcctctgctctctgaggtccaaagaagagccctgtgaagagggatccctgccccaaagcttgcatacacatcaagacactcaaggcacatcacaccggtggcccataaccatactaagcttcagagaatttacctaccatttcagggtcgccttgctgggccaggctaattgtagctccgaggcactagcccagccagctaccgattaccatttccacttttacaggctgtgcgactag

SEQ ID NO: 112190 - DNA, 1449 bp, synthetic construct
  misc_feature 1..1449: note = Description of Artificial Sequence: Synthetic coding sequence
  source 1..1449: mol_type = other DNA
atgctcacatatagggtcgacgcagataagggctttaatttttctgtgggagatgatgcttttgtgtgtcagaagaaaaatcacttccaagttacagtttacattgggatgctgggagagccgaaatatgttaaaacccccgaggggttaaagcctctcgattgcttttatctgaagctccacggactggaggccctcaatcagagcattaacatcgagcaaagccagagcgacagaagcaaacggccgttcaatccagtgacagtgaatctgccccccgaacaagttactaaagttactgtcggcagactccatttttcagaaacaaccgccaataatatgcgcaaaaagggtaagccaaaccccgatcagcgatattttatgctagtagtggccctccaggcacacgcccagaatcagaattatacacttgccgcacaaattagcgaacgcattatagtgcgggcaagcaaccccggacagttcgaaagcgactccgacgtgctgtggcaaagagcccaggtgccggatactgtctttcaccatggcagagtcggcatcaatacggatcggccggacgaagcccttgtggtccatggcaacgtgaaggttatggggtcccttatgcacccatctgatctgcgagcgaaagagcacgtccaggaggtcgataccaccgaacagttgaagaggatcagccgaatgaggctggttcactacagatacaaacccgaatttgcagcttcagccggcatagaagctaccgcccccgagactggggtgatagctcaggaagtcaaagaaatcctcccagaggcagtcaaggacaccggagatatggttttcgccaatggcaagactatcgaaaattttcttgtcgttaacaaagtgtgcgggctgaagtacgttgtatactgcgaggatgacgtgtgtcacctgccagtcctgagtctaggcgccaaagaagcatgggctgtgaaggagctctgcaaactcacagacaaccttgagacccgaatcgacgaactcgagcgatggtctcacaagctcgccaaactgcgccggttagatagtctgaaatcaacaggcagcagtggcgcttttagtcacgctggaagccagttcagtcgagcaggatcagtgcctcacaagaagcgacccccaaaggttgcaagtaaggtaggcagtagctcggtggtgcccgaccaggcttgtatttcacagcggttcctccaaggcaccataattgccctggtggtcgttatggccttccgccatcaccttggtgctcaacctcaggagcagggtccacaaccatgtccgagggagagggccctcgatggggggagctcctcaaacggccatccattcttatggctccagcgcggggtccacgtgcacactgtgagggcggagcccgcccacaggggcggcccaggaaggcactag

SEQ ID NO: 112191 - DNA, 789 bp, synthetic construct
  misc_feature 1..789: note = Description of Artificial Sequence: Synthetic coding sequence
  source 1..789: mol_type = other DNA
atggctgctcccagcggaaccgtgtcagattctgaaagctccaattcctcatcggacgccgaagaactagaaaggtgcagggaagcggccatgccggcctggggactggagcagcgtccacacgtcgctgggaagcctcgtgcgggagctgccaattcacagttgtccacatcacaaccatctcttcggcacaaggtgaacgagcatgaacaagacggcaacgaacttcagaccacacccgagtttagggcacatgtagctaagaaactgggggctttgctggacagcttcatcactataagcgaggcggctaaagaaccagctaaagctaaggtgcagaaggtggccctcgaggatgatgggtttcgcctgtttttcacatccgtgcccggtggaagggagaaggaggagagccctcagcctcgccggaagcgacagccgtccagcagctctgaagactctgacgaggagtggcggcgatgtagggaggctgccgtgagcgcttccgatatcttgcaggaatctgccattcactcccctgggaccgtagaaaaagaggctaaaaagaagcggaagttaaagaagaaggccaaaaaggttgcaagcgtagacagtgccgtggccgccactacaccaaccagcatggccacagtccagaaacaaaaatctggagaacttaacggcgatcaagtaagcctggggacgaagaaaaagaagaaggccaaaaaagcttcagagacctccccttttcccccagccaagtccgctaccgctattcccgccaactag

SEQ ID NO: 112192 - DNA, 666 bp, synthetic construct
  misc_feature 1..666: note = Description of Artificial Sequence: Synthetic coding sequence
  source 1..666: mol_type = other DNA
atgttttgccagaaccctggcgccgctaactcccagttaagcacttctcagccatctcttaggcacaaagtgaacgagcatgaacaggacggaaatgaattgcagactacccctgagtttagggcacacgtggcaaaaaaactgggtgcactgctcgactcgtttatcacgatttctgaggctgcaaaggagccagccaaggcaaaggtgcaaaaagtggcattggaagatgatggtttcagactgttcttcacaagtgttcctggagggcgggagaaggaggagtcccctcagccccgccgaaagagacagccctcctcatcctcatctgaagatagcgacgaggaatggcgcagatgcagggaggctgcagtgtctgcaagtgacattctccaggagagcgccattcactctcccggtacagtggagaaggaggccaaaaagaaaagaaagttgaagaaaaaggcgaaaaaggtcgcttccgtagactcagccgttgccgccaccacccctacttccatggcgaccgtgcagaaacaaaaatctggagagctcaatggcgaccaggtgtccttgggaactaaaaaaaagaaaaaggctaagaaggcgagcgagacaagccccttcccccctgctaagagtgcgaccgccatccccgccaattag

SEQ ID NO: 112193 - DNA, 699 bp, synthetic construct
  misc_feature 1..699: note = Description of Artificial Sequence: Synthetic coding sequence
  source 1..699: mol_type = other DNA
atgccggcctggggcctcgaacaacgcccacatgttgctggcaagccgcgcgccggtgcagccaattctcaattgagcacaagccagccctctttacgacacaaggttaacgaacacgagcaggacgggaacgaattacaaacaacacctgagttccgagcacatgtagcaaaaaagttgggagcactgttggactcttttattactatcagcgaagctgccaaggaaccggcgaaagctaaggttcagaaggtcgccctggaggatgatggctttcgcttattttttacatccgtgccaggtggccgcgaaaaggaagaatctccacagccaagacgcaagcgacagccgagtagcagcagcgaggacagtgacgaagaatggcgcaggtgtcgcgaggcggctgttagtgcaagtgacatactgcaagagtctgctatacactcccccgggaccgtcgagaaagaggcaaagaaaaagaggaagttaaagaagaaagctaagaaggtcgcaagtgtagattctgccgtggccgctacaacccccacctcgatggcaacagtccagaagcagaagagcggagagttgaatggagaccaagtgtctcttgggactaagaagaagaagaaggctaaaaaagcttccgagaccagtccgttccctcctgctaagagcgccaccgccatcccggcaaattag

SEQ ID NO: 112194 - DNA, 1497 bp, synthetic construct
  misc_feature 1..1497: note = Description of Artificial Sequence: Synthetic coding sequence
  source 1..1497: mol_type = other DNA
atggacgtgaccgaccactacgaggatgtaaggaagatttatgacgattttttgaagaattcgaacatgctggatctcatcgatgtctaccagaagtgtagggccctcacttctaactgtgagaattacaatacggtgagcccctcacagctccttgactttctgtccggcaaacaatacgccgtgggtgacgagaccgatctgtcaattcccactagccccacatctaaatacaatcgcgacaatgagaaagttcaactgttggcgcgcaagatcatcttttcatacctaaatctcctagttaacagtaaaaacgacctcgccgtcgcttacatactgaatattcccgatcgcgggttaggccgtgaagcatttaccgatctgaagcatgccgcccgagagaagcaaatgagcattttcctggtggcgacatcctttatacggaccatcgaacttggcgggaagggctacgctcctcctcctagcgaccccctgcgtacccatgtaaaagggctgtctaacttcatcaacttcatcgataagctggacgagatcctgggagaaatcccaaacccttctatagccggagggcagattttgtcagttatcaagatgcagctgattaagggccagaattctagagatccattctgcaaggccatcgaggaagtggcacaagatctggacctgcggattaagaatataattaacagtcaggaaggggtcgtcgcactctccacaactgacatatctccagcccgcccaaaaagtcatgccattaatcatggcaccgcctactgtggaagagataccgtgaaagcactgctggtgctcctggatgaggaggcggctaacgcaccgaccaaaaacaaggccgaactcctgtatgacgaagagaacactatccaccatcatggtacatctatattgaccttgttccggagccccactcaggtcaacaactcaattaaacccctgagagagagaatctgcgtctcgatgcaggagaagaagatcaaaatgaagcaaacgctcatccgctcacaattcgcttgcacctacaaagacgactacatgattagcaaggataattggaataatgttaatctcgcgtcaaagcctctgtgcgtgctctacatggaaaatgatctgtctgagggcgtgaacccctccgtgggccggtcaaccatcggtacatcctttgggaacgtgcacctggaccgcagcaaaaacgagaaagtttcacgaaagagcacttcccagacgggtaacaaatcatctaagcgcaagcaggtggacctggatggagaaaacatactctgcgacaacaggaatgagcctcctcaacacaagaacgccaaaattccaaagaagtctaacgattcccagaatcgcttatatgggaaactggcaaaagtggccaaaagcaataagtgcactgcaaaggacaagttgatcagcggccaggcaaagctgacccagttcttccgactgtag

SEQ ID NO: 112195 - DNA, 1740 bp, synthetic construct
  misc_feature 1..1740: note = Description of Artificial Sequence: Synthetic coding sequence
  source 1..1740: mol_type = other DNA
atggctgtgttcaatcagaaaagtgtgagtgacatgatcaaagaattccgaaagaactggcgggccctgtgcaattctgaaagaaccacgctctgtggtgctgactctatgctgctggctctgcagcttagcatggctgagaataacaagcagcacagtggcgagtttactgttagcctatccgatgtgctgctcacgtggaagtatctgctccacgaaaagctgaacctgcctgtcgagaacatggatgttactgatcattatgaagacgtgaggaaaatatatgacgatttcctcaaaaactcgaatatgttggaccttatcgacgtgtaccagaagtgccgagccctgaccagtaattgtgagaactataataccgtctcccctagccagttactggacttcctgtccggtaagcagtacgctgtaggtgatgagaccgatctatcaatccccacctctcctacctctaaatataaccgggataatgagaaggttcagctgcttgcgcggaaaatcatttttagttatctgaatttgttggtaaattcaaaaaacgacttggcagtcgcctacatccttaatattcctgatagaggcctgggacgagaggcttttactgatctcaagcatgctgctcgggaaaaacagatgtccatcttcctggttgccacttcctttatccggacgatcgagctggggggcaagggctatgccccgcctccaagtgacccactgaggacgcacgttaaaggcctcagtaacttcatcaattttattgataagctggacgaaatcttgggggagatcccaaaccctagcatcgcaggaggccagatactttcagtcatcaagatgcaactaattaaaggccagaactctcgcgacccgttttgtaaggcaattgaggaagtcgctcaggatctcgacctcaggatcaagaacataatcaacagccaggaaggtgtagtcgcgctatctactactgatatttcaccagcccggcccaagtcacacgcaatcaaccacggcacagcctattgtggccgtgatactgtcaaggctctactcgtgcttttagatgaggaggcagccaacgctcccacaaagaataaggctgaactgctgtacgacgaggagaataccattcatcatcacggaacatccatactaacactgtttaggtcaccaacccaggtgaataatagcatcaaacctctgagggagaggatatgcgtgtccatgcaggaaaagaagattaagatgaagcagaccctgatcagaagccaatttgcgtgtacctacaaggacgattacatgatttctaaggataactggaataacgttaacttagcctctaaacctctctgtgtgctgtacatggagaatgatctttctgagggagtgaacccaagcgtgggtaggtccacaatcggaacctccttcgggaacgttcatctggaccggagtaagaatgagaaggttagcaggaaatcgacttcacaaacagggaacaaatctagtaagaggaaacaagtcgacctggatggagagaatatactgtgcgacaatcggaacgaacccccacagcataagaacgccaagattccaaagaagtctaacgattcacaaaatagactgtacggtaagctggccaaggttgcaaaaagcaacaaatgcactgccaaagacaagctgatcagtggacaggccaaactgacccagttctttcgcctgtag

SEQ ID NO: 112196 - DNA, 894 bp, synthetic construct
  misc_feature 1..894: note = Description of Artificial Sequence: Synthetic coding sequence
  source 1..894: mol_type = other DNA
atggccgtgtttaaccaaaagtccgtgtcagatatgattaaagaattccgcaagaactggcgagctctctgcaacagtgagagaactactctgtgcggtgccgactccatgctgctggccctccaactcagtatggctgagaacaataagcaacactcgggcgagttcaccgtgagcctcagtgacgtgttactcacttggaagtacctccttcacgaaaaattaaacctgcccgtggaaaatatggacgtcaccgaccactacgaggacgtgaggaagatctacgatgacttcctgaagaacagcaacatgctcgacttgattgacgtgtaccagaagtgtcgcgctttaactagtaactgcgagaattacaacacggtttcaccatcacagctgttggatttcctttccggcaagcaatacgctgtgggcgacgaaacagatttgtccattcccactagccctacctctaagtataatagggataacgaaaaggtgcaactcctggcccgcaagattatcttttcctatttgaatcttctagtgaattcaaagaatgacctagccgtggcttacatcttgaatattccagatcgtgggttagggcgtgaggcgtttaccgacctcaaacacgcagctcgcgagaaacagatgtccatctttttagtagccacgtcttttatccgcacaattgaattgggaggtaaggggtatgctcctccccctagcgatccactgaggacacatgtcaaagggctgagcaattttatcaattttatcgataaactcgacgagatactcggagaaatccctaaccctcggggatgcaagtctatctgctggaagatcaataactggaacgaattttggaagtgtagcagcggccagaagtag

SEQ ID NO: 112197 - DNA, 1497 bp, synthetic construct
  misc_feature 1..1497: note = Description of Artificial Sequence: Synthetic coding sequence
  source 1..1497: mol_type = other DNA
atggacgtcaccgaccactatgaagatgttaggaaaatctacgatgatttccttaaaaactctaacatgttggacctcatagacgtctatcagaagtgtagagctctgacctcaaattgcgaaaactacaatacagtgagcccaagccagctcctggacttcctatccggaaagcagtatgccgtgggcgacgaaactgacctgagtatccccacttcacccacttctaagtacaaccgcgacaacgagaaggtgcaattgctggcccggaagatcattttctcttatttaaatctacttgttaactctaagaatgacctagcagtcgcctacatcctgaacatccccgaccgaggcctaggtcgggaagcattcactgacctaaaacacgctgcacgggagaaacaaatgagtatcttcctggtcgccaccagttttatcagaactattgagctcggcgggaagggctacgcaccccctccgtcagaccccctgcgtacccacgtcaagggcctcagcaacttcatcaatttcatcgacaaactagatgagatcctgggggagattcccaacccttcaatcgcaggaggccagattctgtctgttatcaaaatgcagctcatcaagggacagaacagtcgcgacccattctgtaaggccattgaagaagtcgctcaggacctcgacctgcgcatcaaaaacattatcaacagtcaagagggcgtcgttgctttaagtaccaccgatatatctccagctaggcccaaaagccacgctataaaccatgggaccgcctactgcggtagggatactgtcaaagcactgctggttctgctggacgaggaagcagcaaatgcaccaactaaaaataaggccgagctgttgtacgatgaggagaacactatccaccaccacgggacctcaatattaactcttttcagaagcccaactcaagtcaataacagcataaaaccgctcagagaacgcatttgcgtgagcatgcaggagaagaaaattaagatgaaacaaactttgatcaggagtcagtttgcgtgtacgtataaggatgattatatgatatctaaggacaactggaacaatgtgaacctggcttctaaacctttgtgcgtcttatatatggagaacgacctgagtgagggggtcaacccaagcgtgggccgtagtacaattgggaccagctttggtaacgtgcaccttgatcgaagcaaaaacgaaaaggtctctcggaagtccacatcccagacaggcaacaaatcttctaaacgaaagcaggtcgatttagacggtgagaatatcctgtgcgataatcgaaacgagcctccccagcacaaaaatgctaaaatccctaaaaaaagcaacgatagccagaatcgtctttacggaaagttagctaaagtggccaagagcaacaagtgtactgctaaggataagcttatttccgggcaggccaagctcactcaattctttcggctttag

SEQ ID NO: 112198 - DNA, 813 bp, synthetic construct
  misc_feature 1..813: note = Description of Artificial Sequence: Synthetic coding sequence
  source 1..813: mol_type = other DNA
atggcccgcttcgctcttaccgtcgtgaggcatggcgaaacaagattcaacaaagaaaaaatcatccaggggcagggcgtagatgaaccactgtctgagactgggttcaagcaagccgcggctgccggtatcttcttaaataacgtgaagttcacacacgcattttcttctgatttaatgcgaacaaagcaaactatgcatggtattctcgagagatctaagttctgcaaagacatgacagtcaaatatgattctaggctgcgcgaaagaaaatatggcgtcgtggagggcaaggcccttagtgagctccgtgctatggccaaggcagccagagaagaatgtcccgtttttactccccctggaggagagacacttgaccaagtgaaaatgcgcggcatagatttcttcgagtttttgtgtcagctgattcttaaagaagccgatcagaaagaacagttttcgcaaggatctccttctaattgtctggaaaccagtctcgccgagattttccccctcgggaaaaatcattcttccaaagtaaactctgactccggcattccgggtttggctgcatctgtgttggtagtgagccacggagcatacatgaggtctttatttgattattttttgacagatcttaagtgcagtttgccggccaccctgagtaggtctgagctgatgagcgtgacacccaataccggcatgtccctgttcattataaacttcgaagaggggagggaggtaaaaccgactgtgcagtgcatatgtatgaatctgcaggatcatttaaacgggctgaccgagacgaggtag

SEQ ID NO: 112199 - DNA, 501 bp, synthetic construct
  misc_feature 1..501: note = Description of Artificial Sequence: Synthetic coding sequence
  source 1..501: mol_type = other DNA
atgtcgaccgtcgggctcttccacttccctactcccttaacaagaatttgcccagctccctgggggttaaggctgtgggagaaactaactctcctaagccctgggatcgcagtgacaccagtccaaatggcgggtaaaaaagattacccagcccttctctcactggacgaaaacgagctggaggaacagttcgttaagggtcacggtcccgggggccaagcgacaaacaagacttcaaactgtgtggtgctcaagcatatcccttcaggcatcgtggttaagtgccaccagacacgcagcgtcgaccagaataggaaacttgctcggaagattctgcaggagaaagttgacgttttctataacggcgagaattcccccgtgcataaggagaaacgggaggccgccaagaaaaagcaggagagaaagaaaagggcaaaggaaactctcgaaaagaaaaaactgctgaaggaactttgggaaagctccaaaaaagttcactag

SEQ ID NO: 112200 - DNA, 501 bp, synthetic construct
  misc_feature 1..501: note = Description of Artificial Sequence: Synthetic coding sequence
  source 1..501: mol_type = other DNA
atgtctaccgtagggttgttccatttccccacaccactgacacggatttgtcctgcaccttgggggcttagactttgggagaaactgactctgctctcccctggaattgccgtgacaccagtccaaatggctggcaaaaaggactatccagcgctgctaagcctggacgagaacgagttggaggagcagttcgtgaagggtcatggtccaggtgggcaggctacaaataagacatcaaactgcgtggtcctcaaacacatcccttctggcatcgtggtgaagtgccaccagacccgctcggtggaccagaacaggaaattggcccgaaagattctccaggagaaagtcgacgtgttctataacggtgaaaattcacccgtccataaagagaaaagagaagctgcaaaaaagaaacaagaaagaaaaaagagagctaaagagaccctggagaaaaagaaactgttaaaagaactgtgggagagctcgaagaaggtccactag

SEQ ID NO: 112201 - DNA, 501 bp, synthetic construct
  misc_feature 1..501: note = Description of Artificial Sequence: Synthetic coding sequence
  source 1..501: mol_type = other DNA
atgagcacagtcgggctgtttcactttccaacacccctgacccgaatctgcccagcaccatggggactacggctgtgggaaaagttgacactactgtctcctggtatcgcggtgactccggttcagatggccggaaaaaaagattacccggctctcctgtccttggacgaaaacgaactggaggagcagttcgtgaaggggcatggccctggggggcaggctaccaacaaaacaagcaactgcgtcgtactcaagcatattccatctggtatcgtagtgaagtgtcaccagacccgcagtgtggatcaaaacagaaaactggcccgaaagattttacaagaaaaagtcgacgtgttttacaacggcgaaaatagtcctgtccacaaggagaaacgcgaggctgctaaaaagaagcaagaacggaagaaacgggccaaagagaccctcgaaaaaaaaaaactcctgaaggagttgtgggagtcttcaaagaaggttcattag

SEQ ID NO: 112202 - DNA, 111 bp, synthetic construct
  misc_feature 1..111: note = Description of Artificial Sequence: Synthetic coding sequence
  source 1..111: mol_type = other DNA
atgagcacagtgggcctcttccactttcctacccctctgacacgcatctgcccagctccttggggccttcggctgtgggagaaacttactctgctgagccccggaatctag

SEQ ID NO: 112203 - DNA, 417 bp, synthetic construct
  misc_feature 1..417: note = Description of Artificial Sequence: Synthetic coding sequence
  source 1..417: mol_type = other DNA
atgagtactgtgggcttatttcattttcccacgccactgactagaatctgcccagccccttggggcttacggttatgggaaaagctcacccttctcagtccgggaatagctgtgacgcctgtgcagatggctggtaaaaaggactacccagccctgctgagcctagacgagaatgagctggaggagcagttcgtcaagggacacggccctggggggcaggcaactaacaagacaagcaactgcgttgtgcttaaacatatcccttcagggattgtggtgaaatgtcaccagaccagatctgtcgaccagaaccgcaaactggctcgcaaaattttgcaagagaaagtggacgtcttctacaatggggaaaactctcccgtccacaaggagaagcgggaagcagccaaaaagaagtag

SEQ ID NO: 112204 - DNA, 291 bp, synthetic construct
  misc_feature 1..291: note = Description of Artificial Sequence: Synthetic coding sequence
  source 1..291: mol_type = other DNA
atgagcactgtcggactgtttcactttcccacacccctcacccggatttgccccgcgccatgggggttgaggctctgggagaaattgactttgttaagccctggcattgccgtgacccctgtgcaaatggccggaaagaaagattatcccgccctgttatctttggacgagaatgaactcgaggagcagtttgtcaagggccatggcccaggggggcaagccacgaacaaaacctccaactgcgttgtgctaaagcatattccttcaggaatcgtagtcaaggtagattag

SEQ ID NO: 112205 - DNA, 423 bp, synthetic construct
  misc_feature 1..423: note = Description of Artificial Sequence: Synthetic coding sequence
  source 1..423: mol_type = other DNA
atgtcccggtttttaaacgtgctaagaagctggttagttatggtctccatcatcgccatgggcaacactctgcaatccttccgcgaccacacattcctctacgaaaagctttatacaggcaaacccaacctagttaacggcctccaggctcgtacttttggcatctggacactgttgagctctgttatccgttgcctttgcgccatcgacatccacaacaagacgctgtatcacattacattgtggactttcctcctcgctctgggacactttctttctgaactctttgtgtatggaacagccgcccctactattggtgtcctggctccactcatggtggcgagcttctctatcctgggcatgttggttggcctgaggtacctcgaggtagagcctgtgagcagacaaaagaagcggaattag

SEQ ID NO: 112206 - DNA, 1443 bp, synthetic construct
  misc_feature 1..1443: note = Description of Artificial Sequence: Synthetic coding sequence
  source 1..1443: mol_type = other DNA
atgaatcggacaaagggcgacgaggaggagtattggaactcatcaaagtttaaggcgtttacatttgatgacgaagatgacgagctttcccaattgaaagaatctaagcgagccgttaactccctgcgcgattttgttgatgatgacgacgacgacgacctggagagggtctcctggagcggggagcctgttggcagcataagctggagcatacgagagacagctggaaatagcgggtccacccacgagggcagggagcagctcaagagcaggaactcgttctcctcctacgcccagctgcccaagccaacttccacttatagcctgtcttcattctttcgcgccctgtcagacacaccagctaagagttacgcacctgagctcggccgaccaaaaggagagtatcgagattactcaaatgactggtctcccagtgatactgtgagaagactgaggaaaggcaaggtatgtagcctagaacggttcaggagcctgcaagataagttgcaactcttggaggaggccgtgtcaatgcacgacggaaacgtaatcaccgcagtccttatcttcctgaagaggacactaagcaaagagatcctgtttcgagagctggaggtccgacaggtggcgctgcgtcacctgattcacttcctgaaagagattggggatcagaagctgttgttggacctgtttagatttctggaccgtacagaagaactcgcattgagccattaccgtgagcatctaaacatccaggatccagataagaggaaggaatttctgaagacatgtgtgggattgcctttttcagccgaggattccgcccatatccaggatcactatacattactagagcgccagattattatcgaggctaacgaccggcacttggagtccgctggccagactgagatcttcaggaagcacccgcgcaaagcatcaattctaaatatgccattggttacgactctgttctactcttgcttctatcattatactgaagctgaaggcaccttctccagccctgtaaatctaaaaaagacctttaaaatcccagacaagcagtatgtgctgacagcccttgccgcacgggctaagctgagagcttggaatgatgtcgatgctttgttcacgaccaagaactggctgggttacaccaagaaacgtgctccgatcgggttccatcgagtagttgagatcctgcacaagaacaacgctcccgtgcaaatcctgcaagagtatgtgaacttagttgaggatgtggatactaaattgaatctcgctaccaaattcaaatgtcatgatgtcgtcatagacacttaccgtgatttgaaggatcggcaacagctgctggcttatcgctccaaggtggataaggggagcgctgaagaggaaaaaatcgatgctctcctgtcttcttcacagatccgatggaagaattag

SEQ ID NO: 112207 - DNA, 1482 bp, synthetic construct
  misc_feature 1..1482: note = Description of Artificial Sequence: Synthetic coding sequence
  source 1..1482: mol_type = other DNA
atgaatcggaccaagggggacgaggaagagtattggaattcgtctaagtttaaggcattcacatttgacgacgaggacgacgagttgagccaattaaaggagtccaagcgagcagttaactcattacgcgacttcgtcgacgacgatgacgatgacgatcttgagcgggtctcctggagcggcgaacccgtcgggtcgatatcctggtcgatccgcgaaacggccggcaatagcggatcaacacatgaggggcgcgagcagcttaaatcccgaaactccttctctagttacgcccagcttcctaagccgactagcacatattctctgtctagcttctttcggggcagaaccagacccggcagcttccagagcctgtccgatgcactgagtgatacccctgctaaatcctacgccccggaattgggacgccctaaaggcgaataccgtgattactccaacgactggtcaccctcagatacagtgcgccggctgcgcaaaggaaaggtttgctcactggaacgttttagatcactccaggacaaattgcagctgctggaggaggcagtctcaatgcatgatggaaacgtaatcactgcggtgctcatctttctgaagcggacactgagcaaagagatcctcttcagggaactcgaagtcaggcaggtagcacttaggcatttgattcactttcttaaggaaatcggcgaccagaaactcctgctggacctctttcgcttcctagaccgtacagaagagctggccctgtctcattacagagaacacctgaatattcaagaccccgacaaaagaaaggaattcctgaaaacatgtgtcggcctgccattcagcgctgaggattccgcacatatccaggatcactacacactgttggaacgccagattataattgaagccaacgaccgccacctggagtcagccggccagacagagatcttccggaagcatccacgcaaggcctccattttaaacatgccccttgtgaccacactcttctattcatgcttttatcactacacagaagctgagggaacctttagtagtcccgtgaacctgaagaaaacttttaagattcctgacaagcagtatgtgttgacagctcttgctgctcgcgctaaactgagagcctggaatgatgttgacgccctcttcaccaccaagaactggctcggttatactaagaagcgggcccctatcggattccatcgcgtggtagagatcctgcacaagaacaatgcccccgtgcaaattctccaggagtacgtgaacctcgtggaagatgtcgacaccaagctcaatcttgcaaccaaatttaaatgtcatgatgtggtgatagacacataccgagacttgaaagaccggcagcaattactagcttatagatcgaaagttgataagggtagtgccgaggaggaaaagattgatgccctgttgtcttcatctcagatacgctggaaaaactag

SEQ ID NO: 112208 - DNA, 1335 bp, synthetic construct
  misc_feature 1..1335: note = Description of Artificial Sequence: Synthetic coding sequence
  source 1..1335: mol_type = other DNA
atgaaccggaccaagggagatgaagaggaatactggaactcctctaaatttaaggcctttacgtttgacgacgaggacgatgagctaagccagttaaaagagtccaaaagagcagtgaacagtcttagggacttcgtggacgacgatgacgacgatgatctcgaacgtgtgagttggagcggagagcccgtcgggtctcggactagaccaggaagctttcagtcactgagtgacgcactgagtgatacgccggcgaaaagctacgcccccgaactcggcagacccaaaggggagtatagagactattccaatgactggtctccttccgatacagtgagacggctgcggaagggtaaggtgtgtagcttggaacgcttccggtccctgcaggacaaattacagctgctggaagaggccgtcagtatgcacgacggcaacgtcataacagcagtgctgatcttcctgaagaggactctctccaaggagattctgtttcgtgagctggaagtccgtcaggtcgctctgcgtcacctcattcatttcctgaaagaaattggcgatcaaaagctcttacttgacctgttcagattcctggacaggacagaggagttggccttaagccactatcgggagcatctcaatattcaggaccccgacaaacgtaaggaatttttaaagacttgcgtgggtctgcccttctctgctgaggactccgcacatattcaagaccattacaccttactggaaagacagatcatcatcgaggccaacgacaggcacctcgaaagtgccggtcagacagagatcttcaggaaacatcctcgtaaggcctccattctcaatatgccactggtcacaaccctgttctacagctgtttttatcattatacggaggccgaggggaccttcagcagtcctgtgaatctcaaaaagaccttcaaaattccagacaagcagtacgtgcttacagccctggcagcgagagctaagctgagggcttggaatgacgtcgacgcactgtttacgaccaaaaattggcttgggtacactaagaagagggctcctatcggatttcatcgtgtcgtggagatcctgcataaaaacaatgctcctgttcagatcctacaagaatacgtcaatctcgtcgaagatgtcgacacaaaacttaatttagctacgaaattcaagtgtcacgatgtggtgattgacacctacagggacttaaaggataggcagcagctgctggcgtacaggagcaaagtggacaaagggtccgccgaggaggagaagattgacgcacttctatcgagctcccaaattagatggaaaaactag

SEQ ID NO: 112209 - DNA, 1482 bp, synthetic construct
  misc_feature 1..1482: note = Description of Artificial Sequence: Synthetic coding sequence
  source 1..1482: mol_type = other DNA
atgaatcgtactaaaggggacgaggaggaatattggaattcttccaaattcaaagctttcaccttcgacgacgaggatgacgaattgtcacagcttaaggagagcaaaagggccgtcaatagtttgcgcgactttgttgatgacgacgacgacgacgatttggagcgggtaagctggtcgggagagccagtgggctcgatctcttggtccataagagagactgcgggaaacagcggttctacccatgagggccgagagcagctcaaaagccgcaattccttctcctcatacgcacagttaccaaagcctacctctacctattcactaagtagcttcttccgtggcaggacacgtcccgggtcattccagagtctcagcgacgctctctctgatacccctgccaagtcgtacgcaccggagctcgggcggcccaagggtgaataccgcgactacagcaacgattggtctcccagcgatacggtgaggaggttgcggaagggcaaggtgtgcagcctagaaaggtttcgaagcctacaggataaacttcagctgctagaagaggcagtgtcaatgcacgatggtaatgttatcactgccgtcctaatcttcctcaagagaactctctcgaaggaaattttgttcagagaactggaggtgaggcaggtcgcactgagacacttgatacattttctgaaggagattggagatcaaaaactattgctggatctgtttagattccttgatcgaactgaagagcttgcattgtcccactaccgggagcacttaaatattcaggatcccgacaagagaaaggaattcttgaagacctgtgtgggattgccctttagcgccgaggacagcgctcatatccaggaccactacactctccttgaacgccagataataatcgaggctaatgaccggcatttagagagcgcggggcagactgagatcttcagaaaacatccacgcaaagccagcattttgaatatgccactggtaacaacacttttttattcttgtttctaccactacaccgaagccgaaggcactttcagcagccctgtaaacttaaaaaagacctttaagataccagataaacagtatgtgctaaccgccctggccgcaagagccaagctgcgcgcctggaatgatgtcgacgcactttttactacgaagaactggctaggctatactaagaaacgagcgcctattggctttcacagagttgttgaaatcctgcacaagaataacgcgcctgtgcaaattctacaggagtatgtgaacctggtagaggacgtggatactaaactgaatctcgctaccaaatttaaatgtcacgacgtcgtcattgatacctatagagacctgaaagacagacagcagttgctggcgtacagaagcaaagtcgacaaaggatctgctgaagaggaaaagatagatgctctcctaagttcctcccagataagatggaagaactag

SEQ ID NO: 112210 - DNA, 1560 bp, synthetic construct
  misc_feature 1..1560: note = Description of Artificial Sequence: Synthetic coding sequence
  source 1..1560: mol_type = other DNA
atgaccactggacttatcttattttttcagagcgggaggcctttgggtgccggcgttcggcttgggctggggttaagaatgaacagaacaaagggcgatgaggaagaatactggaactcctccaagtttaaggcttttacgtttgatgacgaagacgatgagttaagccaactgaaggagtccaaacgggcggtgaacagtctgagggactttgtggatgacgatgatgacgacgacctcgagcgggtcagctggagtggggaaccggttgggtctatttcttggtctatcagagaaacagccggcaatagcggctcaactcacgaaggccgggaacagctcaagtctagaaattccttttcgtcgtacgcacagctgccgaagcctactagcacctatagtctttcatccttcttcagggggcgcacacgacccggctctttccaatctctctccgatgctctctctgacacaccggccaaatcctatgcccccgaactcggcaggcctaagggcgaatatcgggattattcaaacgactggtccccttcagacacagtgaggagactgcgaaagggcaaagtttgttctcttgaacgctttcgcagccttcaagataagctgcaactcttggaggaggcagtgtccatgcacgatgggaatgttattaccgcagtgctcatctttctgaagaggactttgagcaaagagatcctgtttagagaactggaggttcgccaggttgccctgagacatctcatccacttcctgaaagagattggagatcagaagttactgctagacctcttcaggtttctggaccgaaccgaagagctggcactctcccattaccgtgagcatctaaacatccaagacccagacaagcgaaaagagttcctcaaaacatgtgtcggactgccattcagcgccgaggactctgcccacattcaggaccactacaccttacttgagcgccagattattatagaggccaatgaccggcacctggagtctgccggccagacagagatatttaggaagcacccgcgcaaggcgagtatactcaatatgccgctggtgactaccctcttctactcatgtttttaccattacacagaggctgagggcactttctcttcccctgtgaatctcaagaaaacatttaagattcccgacaaacagtacgtgttgaccgcactggcagcacgcgctaagctgcgcgcttggaatgacgtcgatgctttgttcaccacaaagaactggttgggatatacaaagaaacgggcaccaataggcttccatcgagtcgttgaaattctgcacaagaacaacgccccagtccaaattcttcaggaatacgtaaacctcgtggaggatgttgacacaaagctgaatcttgcaaccaaattcaaatgccatgacgtggtgatcgacacataccgggatcttaaagaccgccagcagcttctggcctatcgaagcaaagtggacaagggcagtgcagaagaggagaaaatagacgcactactatcaagctctcaaatccgctggaaaaactag

SEQ ID NO: 112211 - DNA, 138 bp, synthetic construct
  misc_feature 1..138: note = Description of Artificial Sequence: Synthetic coding sequence
  source 1..138: mol_type = other DNA
atgaaccgcaccaagggggacgaagaagagtattggaactcttctaaattcaaagctttcacatttgacgacgaggacgatgaactttcgcagctgaaagagagtaagagggccgtcaactcactgcgtgatttttag

SEQ ID NO: 112212 - DNA, 1482 bp, synthetic construct
  misc_feature 1..1482: note = Description of Artificial Sequence: Synthetic coding sequence
  source 1..1482: mol_type = other DNA
atgaaccgcaccaaaggtgatgaagaagagtactggaacagcagtaaatttaaggccttcacatttgatgacgaggacgacgaactctcgcaactgaaagaatctaagcgcgcagtgaacagtctcagagattttgttgacgatgatgatgacgacgatctggagcgggtttcctggtccggcgagcccgttggctcaatttcttggtccatccgcgagactgccggtaacagcggatccacgcacgaggggagggagcaacttaagagtcggaattctttttcatcatacgcccagctaccgaaacccacgagcacatattccctgagctccttcttccgcggacgcacgagaccaggatcattccaatccctctccgatgctttgagtgacaccccagcaaaaagctatgccccagaactcggcaggcccaaaggggagtaccgagattattctaacgactggagcccaagcgatactgtacgccgattgcggaaagggaaggtctgctcgcttgagagatttcgtagcctacaggataaactacaactgcttgaagaggccgtcagcatgcacgacggcaacgtcataaccgctgttcttatattcctgaagcggaccctctcgaaagagatcctgttcagggagctggaggtgaggcaggtggcactccgacatttgattcacttcttaaaggagatcggagatcaaaagttgttgctcgatttatttcggtttctggacaggacagaagagctggccctgagtcactaccgtgaacacctgaacattcaggaccccgataagagaaaggagtttctaaagacctgcgtcggactgcctttctccgccgaggattcagcccatattcaggatcattacaccctactcgagcgccagattatcattgaagcgaatgaccgtcacctggagtcagccggccagaccgagatctttaggaagcaccctcggaaagcatcaatattgaatatgccactggttaccaccctgttttacagctgtttctaccattacaccgaggctgagggcacattttcgagccccgtgaacttgaaaaagacctttaagattccagacaagcagtacgttttaaccgcccttgctgcccgggccaaactgagggcttggaacgatgttgatgcccttttcaccacgaaaaactggttaggatacactaaaaagagagccccaattggtttccaccgggtggtggaaatcctacacaaaaataacgcaccagtgcaaatacttcaggaatatgtgaatcttgtcgaggacgtcgacactaaactgaacctggccaccaaatttaagtgccatgacgtcgtaatcgacacctatcgcgacctgaaagacagacaacagcttcttgcatatagatccaaagtcgataagggatcagccgaggaggagaagatcgacgctctcctatcgagctcccaaatacgatggaaaaattag

SEQ ID NO: 112213 - DNA, 735 bp, synthetic construct
  misc_feature 1..735: note = Description of Artificial Sequence: Synthetic coding sequence
  source 1..735: mol_type = other DNA
atgtttcgtaggaagttgactgcactggattaccataaccctgccggctttaattgcaaggacgagactgaattccgcaactttatcgtttggctggaggaccagaaaatacggcattacaagatagaagataggggaaatcttcgtaacatccactctagcgactggcccaaatttttcgaaaagtacttgcgggacgtcaactgcccctttaagatccaagaccggcaggaagctatcgactggctactggggttagctgttcggctggagtatggagacaatgccgagaagtacaaggacctagtccccgataactcaaaaactgccgacaacgccaccaagaacgctgagccactgatcaacctagatgtgaacaacccagattttaaggccggggttatggccctcgccaatcttttgcagattcaacgccacgacgactatcttgtgatgctcaaggcaataagaatattagtgcaggagaggcttactcaggatgctgtcgctaaggctaaccagaccaaggaggggctgcccgtcgcccttgataagcacattctgggttttgacacgggagacgcagtattgaatgaggccgcccagattttgcggctgctccatatcgaggaacttagagagttgcaaactaagatcaatgaggccatcgttgccgttcaggctatcatcgccgacccaaaaacagatcataggctgggcaaagtgggtaggtag

SEQ ID NO: 112214 - DNA, 177 bp, synthetic construct
  misc_feature 1..177: note = Description of Artificial Sequence: Synthetic coding sequence
  source 1..177: mol_type = other DNA
atgctgcaatcgatcataaaaaatatctggatcccaatgaaaccctactacacaaaagtctaccaagaaatctggatcggaatggggctgatggggtttattgtgtataaaatccgagccgcagacaaacgatccaaggcacttaaggcctccgccccagcacctggtcaccactag

SEQ ID NO: 112215 - DNA, 228 bp, synthetic construct
  misc_feature 1..228: note = Description of Artificial Sequence: Synthetic coding sequence
  source 1..228: mol_type = other DNA
atgaaactgtacggcacccggggatccgacatcagccacttccagtgtcagatgcttcaaagcatcataaagaacatttggatcccaatgaagccgtactacacaaaagtgtatcaggagatttggattggaatgggcttgatgggtttcatcgtgtataagatcagagcagccgacaagcgctccaaagcactgaaagctagtgcacctgcacctgggcatcattag

SEQ ID NO: 112216 - DNA, 177 bp, synthetic construct
  misc_feature 1..177: note = Description of Artificial Sequence: Synthetic coding sequence
  source 1..177: mol_type = other DNA
atgctccagtcaatcattaaaaatatatggattccaatgaagccctattacaccaaagtttatcaggagatttggataggaatggggctgatgggtttcatcgtgtataagatacgggcggccgacaagagaagtaaagctctgaaagccagtgctcccgcaccgggccatcattag

SEQ ID NO: 112217 - DNA, 177 bp, synthetic construct
  misc_feature 1..177: note = Description of Artificial Sequence: Synthetic coding sequence
  source 1..177: mol_type = other DNA
atgctccaatccatcattaagaacatctggatacctatgaaaccatactatactaaagtgtaccaagaaatttggattggcatggggctcatgggctttatagtctataagattagagctgccgacaaacggagtaaagctctgaaggctagcgcccctgcccccggccaccactag

SEQ ID NO: 112218 - DNA, 2928 bp, synthetic construct
  misc_feature 1..2928: note = Description of Artificial Sequence: Synthetic coding sequence
  source 1..2928: mol_type = other DNA
atgacacagcagccccaggacgactttgacagatccgtggaggatgcacaagcctggatgaaggccgtgcaggatcagttgcaggtcaatgacaacacccaggggccccgcgcagctctagaagctcggctgtgggagaccgagaagatttgccagctcgaacctgaggggcgggtcagagtggacctagtgcttcgaatggcagaagcgcttctggcatgttgtccgggtgatcagaaacctggaattctggcaagactgaaagatataaaggcccaatgggaagagaccgtgacttacatgactcactgccacagtcgcatcgaatgggtgtggttacactggtctgagtatctgctggccagagacgagttttatcggtggtttcagaagatgatggtaacgctggaacctcacatagaactccagctgggactgaaagagaagcagtggcaactgtcccacgcccaggtgttattgcataacgtggataatcaggctgtgctgctcgaccgtctgcttgaagaggctgcttcattgttcaacagaataggggacccttctgtggacgaggatgcgcagaagcgcatgaaggctgagtatgacgctgttaaagctaaagcccagaaacgtgtcgatctgctggagcaggtcgcccgcgagcatgaagaatatcaagcaggagtggacgaattccagctctggctgaaagctgttgttgaaaaggtaaatggctgcctgggcaggaattgcaaactcccaatcactcaaaggttgtctactttgcaggatatcgctaaagactttcctaggggcgaagagtccctcgaaactttagaagagcagagcgctggggtcattcgcaatacgagtcctctcggcgctgaaaaaatcacaggagagctagaggaaatgagaaaagtgctggaaaagctcagggccctgtgggaggaggaggaagaaagacttcggggcctcctgaggagtcgtggggcctgggagcagcaaatcaagcagctggaagccgagctctcagagttccgaatggtgcttcagagactggcccaggagggtcttcaaccagccgctaaagcagggacagaggatgagcttgtggctcactggcgcagatatagtgcaacacgagccgccctcgcctctgaagagccaagggttgatagactccaggctcagttgaaagagcttatcgtattcccccacaatctgaagccattaagcgattccgtcatagcgaccatccaagagtaccagagcctgaaagtcaaatccgcacgtctgaggaatgccgccgctgtggagctttggcagcattttcagcgaccacttcaggacctccaattatggaaggctttggcccagcgcctgctggaggtaacagcctccctccccgatctgccttcactgcacacattccttccacagatcgaggccgccttgatggagtcttcccgcttgaaggaactgctaactatgctccagctcaagaaggacctgctcataggcatatttggacaggaacgcgcgacggccttgctggaacaggttgccgggagcatgcgagacagggatttgttgcacaactcattgcttcagcggaaatccaaactccaatccctgctcgcgcagcacaaagatttcggggctgcattcgaaccattgcagagaaaactgttagacctgcaagtacgcgtgcaggccgagaaagggctccaacgagacctaccaggcaagcaggcacaattaagccggcttcagggcctgcaagaggagggcctggacctaggcgcacaaatggaggccgccagacccctcgtgcaggagaatcctaaccaccaacacaagatggatcagctatcttctgactttcaggctctgcagagatcccttgaggatcttgtcgacagatgtaggcaatcagtccaggaacattgcactttttctcaccagctcctcgagttgaggcaatggattgtggtcaccacccagaaactcgaggcacaccgaggcgaggccggacctggcgatgccgaaagccaggaggcggaattcgagagactggtggcagagttcccagagaaggaggctcagctttcgcttgtggaggctcaggggtggctggtgatggagaagagctccccagagggcgctgccgtggtgcaagaggagttgcgggaactggcagagtcctggagagccctgagactcctggaagaatctctcctgtctctgataaggaattggcacctacaacgaatggaagtcgatagcggaaagaagatggtgtttactaacaatattccgaaatctggcttcttgatcaaccctatggacccaattccaaggcacagacgtcgagctaatctgctccaggaggaggaaggaagccacgaagattttagtcagttgctcaggaatttcgggcagtggttacaggtggagaacagtaagttggttagaattatcgctatgagaaccagcacagcagaggacctgcggacccgtaagtcaaaactccaggaactggaggcaagagtaccggaagggcagcaccttttcgaaaatctgcttcgcctgggcccagctagggggacctccgatgagctcgaggacctgagataccaatggatgctgtataagagcaaacttaaggacagcgggcacctgctcacgcagtccagtccgggtgagccaaccggcttccagaagacaaggcgctggagagggctgggctccctgttccggagggcatgctgtgtcgcattgcccctgcagttactcctgttgcttttcttactcctcctctttctgcttcccattcgggaagaagataggtcctgcactctggcgaataatttcgcgcgcagctttaccctgatgctgcgttacaatgggccaccccccacctag

SEQ ID NO: 112219 - DNA, 1791 bp, synthetic construct
  misc_feature 1..1791: note = Description of Artificial Sequence: Synthetic coding sequence
  source 1..1791: mol_type = other DNA
atgactcaacagcctcaagatgatttcgaccggtctgtggaagacgcacaggcctggatgaaggctgtgcaggaccagctgcaggtgaatgataacacacagggaccccgcgccgccctggaggcccggctgtgggaaacagagaagatctgccagctggagccagaggggagagttcgggtagacctggtattgcggatggcagaagccctcctggcatgttgcccaggagaccagaagccagggatccttgcgcgtctaaaagacatcaaggcacagtgggaggaaactgtgacctatatgacacattgtcactcacgaattgagtgggtatggctgcactggtccgagtacttactcgcgagagatgaattctatcggtggtttcagaaaatgatggtaacactcgaacctcatattgagctgcaactgggccttaaggaaaaacaatggcaactgtcccacgcccaggtgctactgcacaatgtggacaaccaagcggtactactggaccgcctgctcgaagaggccgcctcactgtttaataggattggcgacccgagcgtggacgaggacgctcagaagaggatgaaggcagaatatgatgcagttaaggctaaggctcagaaaagggtggacctacttgagcaagtggcaagggagcatgaggagtatcaagccggagtggatgaatttcagctctggctgaaggccgtcgtagagaaagtcaatggctgcctcgggagaaactgtaagctcccaattacccagaggctgtctacactccaggatattgcaaaggatttccctcgcggggaagagagcctagaaaccctggaggagcagtccgcaggtgtcatacgtaatacaagtccattgggtgcagagaaaatcactggcgagcttgaggaaatgaggaaggttctggagaagctcagggccttgtgggaggaggaagaagaaaggctgcggggtttgctccggtcacgcggcgcttgggagcagcagattaagcagctcgaggccgagctgtccgaatttagaatggttttgcagcgactggcccaggagggcttgcagcctgcggccaaggccggaactgaagacgaactggtggcgcattggagacgatatagtgcaactcgggcggcgttggctagcgaggagccgagggtggacagactacaggcacagctgaaagagctgattgtgttcccgcataacctcaaaccactttccgattcggtaatagctaccattcaggagtaccaaagcctgaaggttaaaagcgcccgcttacggaacgctgcagccgtggagctctggcagcactttcagagaccactgcaggacctccagctctggaaggcgctggcacaacgcttactcgaggtgaccgctagtctgcctgacctcccgtctctgcatacctttctgccccagatcgaggccgctctgatggaatcttcacgcttaaaagaattactcacaatgttacagttgaagaaggatcttttgattggaatcttcgggcaggagagagctactgccctcttggaacaggtggcaggctcaatgagggatagagatctgctgcacaattctcttcttcagagaaagagcaaacttcaatctctcctggctcagcataaagactttggtgcggccttcgagcccctgcagagaaaactgttagacctgcaagtacgcgtgcaagccgagaagggacttcagagggatctgccaggtaaacaggcccagctgtctcgcctgcaggtgagaggcctctag

SEQ ID NO: 112220 - DNA, 2913 bp, synthetic construct
  misc_feature 1..2913: note = Description of Artificial Sequence: Synthetic coding sequence
  source 1..2913: mol_type = other DNA
atgactcagcaacctcaggatgatttcgatcgctcagtggaagatgctcaggcgtggatgaaagcggttcaagatcaactgcaggtgaatgataacacacaaggaccgcgcgcagcactcgaggctcggctgtgggaaactgagaagatctgtcagctcgagcccgagggtagagtgagagtggacctggtgctgaggatggctgaggcactgctggcgtgttgccccggtgatcagaaaccaggtatcttggcaaggctgaaagatataaaagcccagtgggaggagactgtgacttatatgacacactgtcactctcggatcgagtgggtttggctgcactggtcagagtacttgttggcgcgcgatgagttctatcgatggtttcaaaaaatgatggtgactctcgagcctcatatagagcttcagcttggactgaaagagaaacagtggcagctatcccacgcacaggtgctgctccataacgtggataatcaggccgtactgttagacagacttctcgaagaggctgcatccctcttcaacaggattggcgatccatcggttgacgaggatgcccagaaaagaatgaaagcagaatatgacgccgttaaggctaaggcgcagaaaagagtggacttgctagaacaggtagctagggaacatgaggaataccaagctggggttgacgaattccagctatggttgaaagctgttgtggagaaagttaatggatgtctcgggaggaattgcaaattgcccatcacacagcgattaagtacactgcaggatatcgccaaggactttccccgcggcgaagagtctctcgagacgctggaagagcaatctgctggagtcatccgtaacaccagtcccttaggcgcggagaagattactggggaactcgaagaaatgaggaaggttctagagaagctgcgcgccttgtgggaggaggaggaggagagactaaggggactgttgcggagcagaggagcctgggaacaacaaataaagcagcttgaggccgagttgagcgagttcaggatggttctacagaggctggcccaggagggtctgcagcccgccgccaaggccggaacggaggatgagctggtcgcccactggcggcggtacagtgccaccagagccgctctagcatctgaagaacctagggtggatcggctacaggctcagttgaaggagctgatcgtattcccccataatctgaagcctctatccgattctgtgattgccacaatccaggagtaccagtccttgaaagtcaagagcgccagactgcggaacgctgccgcagtcgagctgtggcagcacttccagagacctctgcaggatctgcagttgtggaaggcactagcacagcgtttactcgaagttaccgccagcctgcccgatcttccttccttacacacattcctgcctcagatagaggcggccttgatggaaagctctagattaaaagaactgcttacaatgctacagttgaagaaggatctactgattgggatcttcggtcaggagcgggcaactgcccttctcgagcaggtggccgggagtatgcgcgatagggacctgctacataacagcctactgcagcgcaagtctaagttacagagtctgctggctcaacacaaggatttcggagcggcatttgagccccttcagcgcaagctgctggatctccaagtacgggtacaggccgagaagggtctgcagcgcgatctccctggcaagcaggcacaattgtcaagactccaagggcttcaggaagaagggctggacctcggagcacagatggaagccgctcgcccactagtgcaagagaacccgaatcatcaacataaaatggatcagctaagttcggacttccaggcactgcagaggtcactggaggaccttgtagataggtgcaggcagtccgtccaggagcattgcacttttagccaccagcttttggaattaaggcagtggattgtcgttaccactcaaaagttggaggctcaccggggcgaggctggacctggggacgctgagagccaggaagctgagtttgagcgattagtcgccgagtttcccgagaaggaggcccagctaagcttagtggaggcacaggggtggctggttatggagaagtcaagtcctgaaggagccgccgttgttcaggaagaactacgggagctagcagaaagttggcgagcacttaggctgctagaagagtccttactttccttgatccgcaattggcatctccaacgcatggaggtcgacagcggcaagaagatggtattcacaaataacatccctaagagcgggttcctgatcaatccaatggatccaataccgaggcatcgacgccgcgaggaggagggttctcatgaggactttagtcagctgttgcgcaactttggtcagtggctgcaagttgaaaactccaagctggtgaggattatcgcaatgcgcacaagtacagcagaagatttgcggacaagaaagagcaagctgcaggagctggaagcgcgggtgccagagggccagcacttgtttgaaaatttgctgagactgggcccggctcgcggcacgtcagatgagctggaagaccttcgatatcaatggatgttatacaaatctaagttgaaagattcagggcatttactgacccaatctagtcctggcgagccaaccggtttccagaagactcgacgctggcgggggttaggttccttgttccggcgcgcctgctgcgtggcactgccactgcaacttcttttgctgttgttcctgctgctcctattcctgcttcccatcagggaggaagaccgttcctgtactctggcaaataattttgcccgaagctttaccctcatgctgcgttataatggcccaccgcccacctag

SEQ ID NO: 112221 - DNA, 3471 bp, synthetic construct
  misc_feature 1..3471: note = Description of Artificial Sequence: Synthetic coding sequence
  source 1..3471: mol_type = other DNA
atgggtaatcttcttagcaaatttagacctggctgtcggagaaggccgctgcctggccccggacgcggagcacccgcgcccttaagcagagatgctagtcctccgggaagggcacactccgttccaacccccaggccttttcgaggactattcaggaggaatgctcgccgcagaccatctgcggcgtccatttttgtcgcacctaaacggccttgccccctccctagagcagccgctgcaccactcggtgtcctgcccgccgtaggttgggggctggctattagaaagacccctatgctgccagctcgcaacccaccccgcttcggtcacccatcaagtgtccgcattcctcccccttccaggatgttcacgttactgctgccatccccaagagagcccgccgtgaaggcccggaagccaatacccgccaccctgctggaggaaactgaggtctgggcccaggagggtccccgaagagtgaagaaagacgaggaccccgtgcagattgaaggcgaagatgatgaaaagcggacaccactctcgtccggcgaagcctcaagcacgagtcggtctcagggcactcagggggacgtggcaagtttcaggtgctctccaggcccacttgagggaaacgtctatcacaaattctcggagaattctatgtccgagaaagcccaagccagcccggcctcctcgtgcctggaaggtccggcgatgccatcaactcactcccaggctgggtgtgctcgccacctgggaaaacccgatcccgacgctaccgcccctcctgagccggcggtgggctgctccctgctgcaacaaaagctggcggccgaagtcctgaatgaggagcctcccccctcctccctggggctccccataccactcatgtctggcaaacgcatgccagatgaaaaacctttctgtatcccaccccggtccgcagcaccacccagggctgctagaaaccgaccttgcaaaaggaagatgagtatcccgctgctgcttcccctacccccctctcttcctctgctgtgggaccggggcgagcttcctcctcctgcaaaactcccatgtctatccgtagagggagacctgcatacccttgagaagagtcccgagtataagcggaatagcaggattctagaggacaagacggagactatgaccaactcgagcattacccagcccgccccctcattctctcagcctgtacagaccaccgactctctccccctgactacctacacaagccaggtaagcgcaccgctcccgatccccgacctggcggacctcgccaccgggccgctgatcctgcctatcccccctctgtctaccactccgaagatggacgaaaagatcgccttcacaattcccaatagtcctctcgccctgccagctgatctcgtacctattcttggagatcaaagcaatgagaagggcggatcatacaacagcgtggtgggcgccgcaccgctgaccagtgatcccccgacccccccttcctctactccctcgttcaaacctccagtgacccgcgagtcccctatttctatgtgtgtggactccccgccgcccttgagctttttgacactcctccccgtaccaagtactggtacttcagtgatcacatcaaaacccatgaactctactagcgtcatttcgactgtcaccacaaatgcttcagcccatctgacgtcccagaccgccgttgatcccgaggtagtgaatatggatactacggctccgagccaggttgttatcttcacatccagcctctcatcccgcgtgtcttccctacctaactcccagatccactgttcagctgagcagcggcaccccgggaagactagcgtctatacttcccctcttccctttatttttcacaacaccactccttctttcaatcagttatttggcaaagaagccacgccccaaccaaagttcgaagctcctgatggacagccccagaaggcctccctgcccagcgcgtgcgtgtttctgtcactgcctattatcccgccaccagacacttccactctcgttaactccgcaagcaccgcatcctcttcaaagccaccgatcgagaccaacgccatgcatacaactcctcctagtaaggctgtgatattacagagtgctagcgtctctaagaaatatttgccattttatctggggctaccaggatcaggcaacactcagcccagcggaaatacagcctccgtgcaggggtcaacatcacttcccgcccagtccgtgcgcgcccccgccaccgccagtaaccacccccttaaccctggcgccactccacagcctaaattcggcgcgcctgacggcccccaacaaaagaccagcctacctagcgcgcacgattttttgtctctgcccataatggtccctccagatacatcaacgctggtatcttcagcctcggccgcatcactcagtaagccagcaatcgacacctcagacatgaacacaactcccccatctaaaacagttatactgcagtcaaccttcgtgtcccggaaggaggagtacattaggttctatatgggcttgccagggagcggcaacacactgcacagcgacagcattgcgtctgcacaggttagcaccagctttccagctcaggccgaccggaggcctacaaccactagctctcatcccctaaatacaggctcaatatcccatagcaccttaggcgctaccgacggacaacagaagtccgattcttctttcattctgggtaatcctgctacccctgccccagtgatcggactgacgagcccctcggttcagccactgtctggctctatcattccccctggcttcgcagagttgactagcccttacaccgctctggggacccccgtcaatgcagagcctgttgaaggtcataatgcatctgcttttcctaacggtactgccaagactagcgggtttcggattgctacaggaatgcccgggacgggcgattcaacgctgttagttgggaatactattcctgggccacaggtcatcatgggacctggcacccctatggatggaggcagtatcgggtttagcatgtctgcaccgggcccttcgtccaccagcggtgaactgaacatcggacaggggcagtccggaacaccaagtacgacttccgtatttccatttgggcaggcagcctgggaccctactgggcactcaatggcggccgcgccccagggcgccagcaacatccctgtttttggatacacctctgccgcggcctacataccaggcctggatccgcctactcagaatagctgctccggaatgggaggagacgggacccgctcaattgttgggggcccttgtgtgcccgcatttcaacagtgtatattacagcacacctggacggagagaaaattctacacatcctccacccattactacggtcaagaaacttatgtccggcgtcacgtatgttttcagctgccctag

SEQ ID NO: 112222 - DNA, 5733 bp, synthetic construct
  misc_feature 1..5733: note = Description of Artificial Sequence: Synthetic coding sequence
  source 1..5733: mol_type = other DNA
atggcatgttgccataaagtcatgctactgttggatacagctgggggggcagccaggcattcccgggtccgtagagcagccctgaggctgctaacatatctgtcctgtaggtttggcctggccagagtccactgggcctttaaatttttcgactcacagggcgctcgttcccggcctagcagagtcagcgatttcagagaactgggaagcaggagttgggaggactttgaagaagagctggaggcccgcctcgaagatcgcgcccatctgcccggtccagcaccacgagccactcatacacatggggcgcttatggaaactttactggactatcagtgggacagaccagagattacctctcccactaaaccgattctgcggtccagtggacggcgcttacttgatgtggaaagcgaagcaaaggaagcggaggctgcactcggcggactcgttaacgctgtgttcctactcgctccatgtccacattcacagagagaactgctgcagtttgtttcaggctgcgaggcgcaggcgcagaggcttccacctacaccaaagcaggttatggagaagttactgcctaagcgcgtccgcgaggtcatggtcgcacggaagataaccttctactgggtggacaccacagagtggagcaaactctgggaaagcccagaccatctcggatactggactgtgtgtgaactactacatcacggggggggcacagttttgccttctgaatcttttagctgggattttgcccaggcaggtgaaatgctgcttaggtctggcatcaagctctctagtgaacctcacttaagcccatggattagtatgttacccactgatgctactctcaatcgactgctctataattcacctgagtacgaggcctcctttccacgcatggaggggatgttgtttctgccagtggaagctggaaaggaaattcaggaaacgtggacggtaaccctggagcccctggcaatgcaccagaggcattttcagaagccggtgagaatctttcttaagggaagtgtggcacagtggtccctccctacctcttctaccctgggaaccgacagctggatgctggggtctccagaggagagcaccgccactcagcggctcctctttcagcagctcgtcagcaggctgacagccgaagagctccatctcgtggccgacgtggatcccggcgagggccggccaccaatcaccggagttatctcacccctgagcgcatcagcgatgattctcactgtgtgtaggacaaaagaagcagaattccaacgccatgttctgcagacagcggtggctgatagcccccgcgatacggcatcattgttctcagatgtggtggacagcattctgaatcaaacccacgactccctggcggataccgcatcagcagcaagccccgtccctgagtgggcccaacaagaacttggccatactaccccatggagtccagccgtggtcgaaaagtggtttccattttgcaatatatccggggcaagctcagacctcatggagtccttcggcctgctgcaggcagcaagcgccaacaaggaagagagcagcaagaccgaaggcgaattaattcactgtttggccgaactctatcagcggaaatccagagaggaatccacaattgcccatcaagaggattctaagaagaaaaggggtgtccccaggacgccggtgaggcagaagatgaacactatgtgtcgaagcctcaaaatgctaaatgtagccaggctgaatgtcaaggcacaaaagctgcatcctgacggttcacccgatgtcgcaggcgagaagggtatccagaagataccttcgggccggactgttgacaaactggaggatcgcggccgaaccctgaggagctctaagccgaaggactttaaaacagaggaggaactgctttcttacatcagagaaaactatcagaagacagtggctaccggagagatcatgctctatgcgtgcgcacgcaatatgatatcgactgtcaaaatgtttctcaaaagtaaaggtactaaagagttagaagttaattgtctcaatcaggtgaagagctcactcctcaagacatccaagtccttgcgccagaacctagggaaaaagttagacaaggaggacaaggtacgagaatgccagctgcaggtgtttctcaggctagagatgtgtttacagtgtccctctatcaacgagtccacggacgatatggagcaggtggtggaagaggtgaccgacctcctgcggatggtgtgtctcactgaagactcagcctacctcgccgaattcttggaggagatccttcgcctttacatcgatagtattcccaagaccctgggaaatttgtacaacagcttggggtttgtgattcctcagaaactggcaggagtactacctaccgattttttttcagacgattccatgactcaggagaacaaatctccactcctctccgtgccctttctgtcatctgcacgccggtctgtctctggatcgcctgaatctgacgagctgcaagaactgaggactagatctgctaagaaacggcggaaaaacgccctgatccgccacaaaagtatagctgaagtgtcccagaatctccgccagatagagatcccgaaggtatcaaaacgggctaccaaaaaggagaacagccaccccgctccgcagcagccaagccaaccggtcaaagacacagttcaggaggtcaccaaggttcgccggaacctgtttaaccaggagctgctcagtcccagcaagagatcactgaaacgtggtctgccccgctctcactctgtgtctgctgtggacggattagaggacaagctagacaattttaagaagaataaaggatatcataaactgctaaccaagagcgtggcagagacccccgtgcataagcaaatctccaagcgcctcttacaccggcaaatcaagggaagaagcagcgaccctggccccgatataggagttgtagaagaaagcccagaaaagggggatgaaatttcactgaggaggtccccacggattaaacagttatccttttctcggactcacagtgcctctttctatagcgtctctcagcccaaaagcagaagcgttcagagagttcactcttttcagcaggataagtcagaccagcgcgagaatagtcccgtgcagtctattaggtccccaaaatccctgctcttcggcgcgatgtccgagatgatctcgccctccgaaaaggggagtgcacggatgaagaagcgtagccgaaacactctcgatagtgaggttccggccgcctatcagaccccaaagaagtcccaccagaagagcctaagcttcagcaaaaccacgcctcggcgcatttcgcatactcctcaaactcccctctatactcccgagaggctgcagaagtccccggccaaaatgacgcctaccaaacaggctgccttcaaggagtcactgaaagatagctcttcccccggccacgatagtcccctggactccaagataaccccgcaaaagaggcacactcaggctggggagggcacctctctcgaaacaaaaactcctaggacccccaaaagacagggaacccagccccctggattcttgcccaactgcacttggccacacagtgtgaactcgagtcccgaatctccatcgtgtcccgcaccccccacatcttccacagcccaacccagacgagagtgcctgacaccaatcagggaccccctgagaacacccccgcgcgccgcggcgttcatgggtaccccgcagaaccaaacccatcagcagccccacgtactgcgggctgctcgcgcagaagagcccgcgcagaaactgaaagacaaggccattaaaacccccaaacgccctggcaattctacggtgacgtcgtcccctccagtcactcccaaaaagctgttcacaagtccactgtgcgatgtgtctaaaaagtccccattcagaaaaagtaagatcgagtgcccaagtcctggggagctggaccagaaagagcctcagatgtcgccatccgtcgcagctagcttatcctgtcctgtcccctccaccccccccgagctctcccagcgcgctacccttgacactgttccacccccgcctccttccaaggtagggaagcggtgcagaaagacatctgaccccagacggtccattgtcgagtgtcagcccgacgcatccgccactcccggcgttggaacagcagattcccccgctgcccccacagacagcagagacgaccagaaaggactgagcctgtctcctcaatccccaccagagaggcggggctaccctggacctggtcttcgctctgattggcacgccagcagcccactgctaataactagtgataccgagcacgtaactctgctgtctgaagctgaacatcacggaattggtgatctgaagagcaacgtgctgtcggtggaggaaggggaaggcctgagaacagccgacgctgaaaaatcaagcctgtcacaccctggcatccccccctcaccaccctcctgcggccccggatccccactgatgcccagcagggatgtccactgcacaacagacggtcgtcaatgccaggcgtctgcacagcttgataacctgccggcttccgcctggcactctactgactctgcttcacctcagacttatgaggttgaactggagatgcaggccagcggcctgcctaaactgcggattaagaagattgacccttcctccagcctagaagctgagcccttgtccaaagaggaatcctccctgggggaggagtcttttctgcccgcactttccatgccacgggcctcaagatccctgagcaagcccgaacccacctacgttagtccaccatgtccccgacttagccactctacaccaggcaagtcccggggccagacctatatctgtcaggcctgcaccccgactcacggcccttcttccacgcccagtccgttccaaaccgatggggtcccttggaccccttctcctaagcattctggcaagaccactcccgatatcatcaaggattggccaagaaggaagcgggcggtgggatgcggcgcaggttcctcctccgggcggggcgaagtgggcgcggaccttccaggctctctgtccctgctcgagtccgaaggcaaagaccacgggctagagttatcgattcatagaacacccatcttggaagattttgaactagagggggtttgccagctccccgatcagagtcctccccgcaattctatgcctaaggctgaggaagcgtctagttggggccagttcggcctgagctctagaaagagggtgctgctggcaaaagaagaagctgatcgtggagctaaaagaatttgcgacctgagggaggacagcgaagtttccaaatcaaaagagggctctccctcttggtccgcatggcagctgccctctacaggcgacgaagaggttttcgtgagtgggtccacccccccaccatcttgtgctgtcaggagttgcctgtccgcatctgccctgcaggctctcacccagagtcctctactttttcaaggtaagacgcccagcagtcagtccaaagacccaagggatgaggacgtggacgtgctgccctctaccgtggaagacagtcccttcagccgagcattctctcggcggcggccaattagccgcacctatactcgtaagaagcttatgggcacatggttagaggatctgtag

SEQ ID NO: 112223 - DNA, 354 bp, synthetic construct
  misc_feature 1..354: note = Description of Artificial Sequence: Synthetic coding sequence
  source 1..354: mol_type = other DNA
atgaagttgtcctccgctgcagggcaggaaagtcctggccacccccatccaagtccacccgcatggactctgaagaaaccgagcgagtctgttgcacaacgggccatgtgctcggcaagggcatgcccagtggcctgccccgtggggtgtcctattgcatgtccagtctcatgcccagtggcctgccccgtgggctgccctgtcggtagcatggccacagccccccagggcctctcccctcaagagtgggaagccgatcgcgagaccgggtcctcgtctcacgctggtaccacccagtgttcaattcatagtcctagcagttcttcgcgtcacctcagtcgtacacaaacctag

SEQ ID NO: 112224 - DNA, 627 bp, synthetic construct
  misc_feature 1..627: note = Description of Artificial Sequence: Synthetic coding sequence
  source 1..627: mol_type = other DNA
atgagctctgaaccacctcctccataccccgggggccctactgcccctctgctggaagagaagagtggcgcccctcccacacctggccgctctagccccgccgtaatgcagccccccccagggatgcctttgccacctgcggatattgggccccctccttacgagcctccgggacaccctatgccgcagccaggcttcatccccccacacatgtccgccgacggtacctacatgcctccagggttttatcctccaccgggacctcacccacctatgggctactatccacccgggccatatactcccggcccctaccccggccccggtggccatacagcgactgtgttagttccttctggagctgccactacggttactgtgctgcaaggcgagattttcgagggggctcccgtgcaaactgtatgcccgcactgccaacaagccatcactacaaaaatctcgtacgagatcggactgatgaatttcgtccttggcttcttttgctgctttatgggatgtgacctgggctgctgcctcattccctgtctaattaacgattttaaggatgtgacgcatacatgccccagctgtaaagcttacatttacacttataagcggttatgttag

SEQ ID NO: 112225 - DNA, 765 bp, synthetic construct
  misc_feature 1..765: note = Description of Artificial Sequence: Synthetic coding sequence
  source 1..765: mol_type = other DNA
atgtcgctggcaagaggtcatggcgatactgctgcctctaccgcagctcctctgagcgaagagggtgaagtgacaagtgggctgcaggccctagccgtggaggatacaggaggcccctcagccagcgccggcaaagcagaagatgaaggggagggtggacgggaagaaacagaacgcgaggggtctggtggagaggaagctcagggagaggtgccaagcgctggaggcgaagaaccagcagaggaagattcggaggattggtgcgtgccttgttcggatgaggaggtcgaactaccagcagacggccagccttggatgccccccccttctgaaatccagcgactctacgagctcctggctgctcacggtactttggagctgcaggccgagatcctgccacgaagaccgccaacccctgaagcgcaatccgaggaggagcggtcagatgaagagcccgaggcaaaagaggaggaggaggaaaaacctcacatgccaaccgagttcgacttcgatgatgagcccgtaacccctaaagattcgctcattgaccgcagacggaccccaggttcatcggccaggagtcagaagcgcgaggcaagattggacaaagttctgtctgacatgaaacggcataagaaattggaggaacagattcttcggaccggtcgcgacctgttttctttagactctgaagacccatctcctgcctccccccctttgagatcgagcggctcctcactatttccccgccagaggaaatattag

SEQ ID NO: 112226 - DNA, 2010 bp, synthetic construct
  misc_feature 1..2010: note = Description of Artificial Sequence: Synthetic coding sequence
  source 1..2010: mol_type = other DNA
atgggaagcgaccctagcgctcctggacgcccagggtggacaggaagcctgcttggagaccgcgaggaggccgccagaccgcgccttttgcctctcttgcttgtgttgcttggctgcctcgggctgggcgtcgctgctgaggacgctgaagtgcatgccgagaattggctgcggttgtatgggtatcttccccagcccagccgccatatgtcaaccatgcgctccgctcagatcttggcttctgccctggccgaaatgcagcgattttatgggattcccgtgaccggcgtgcttgatgaggagaccaaggagtggatgaagagacccaggtgcggcgtgcccgatcaatttggtgtgcgagtgaaggctaacctgcggcggcggcgcaagaggtacgcactcaccggccgaaaatggaacaaccaccatctaacctttagcattcagaactatactgaaaagcttggctggtatcattctatggaggccgtgcgcagagcattcagagtctgggagcaagccactccactggtgttccaggaagtgccttacgaagatatccggttgagacgacaaaaggaggcggacataatggtgctatttgcctctggctttcacggggatagttctccctttgacggaaccggcggtttcttagcccacgcttacttccctggcccgggcctaggaggggatacacacttcgatgccgatgagccctggactttctcgtccaccgacctgcatggcaataatctgttcctggtggcagtacacgaactgggtcatgctcttggtctggagcacagcagcaacccaaacgccatcatggctcccttttaccagtggaaagacgttgataactttaaattgcccgaagacgacctgcggggcatacagcagctctacggcaccccggacggacagccccaacctactcaaccacttccgactgttaccccacgacgcccaggtcgacccgaccacagacctccccgccctcctcagccaccccctcccggtgggaaacctgagcgcccaccgaagcctggacccccggtgcagcctagggcaacagagagacccgatcagtacggaccaaatatctgtgacggtgatttcgacaccgtggctatgctgcgcggcgagatgttcgttttcaaaggccggtggttttggagggttaggcataacagggtgctagataactaccccatgcctatcggacatttctggcgggggctgcccggggacatcagtgcagcctacgaaaggcaggacgggcgtttcgtatttttcaaaggagatcgttactggctctttcgcgaggccaatcttgagcctgggtatccccagcctctgacatcctacggcctgggcattccatacgaccggatcgatacagcgatctggtgggagccgaccggccacacctttttttttcaggaggatagatattggcggttcaacgaggagacccagcgcggcgatcccggctacccgaaacccatcagcgtctggcagggcatcccagcgtctcctaagggcgcatttttgtcgaatgatgctgcgtatacctatttctacaaaggtacgaaatattggaaatttgacaacgagagactgaggatggaacccggatatccaaaatctatcctcagagacttcatgggatgccaggaacacgtggagcccgggcctaggtggcctgacgtcgcccggccaccgttcaatcctcatggcggagcagagcctggtgctgacagcgccgagggagatgtcggcgatggcgacggcgacttcggggccggcgtgaataaggatggaggttctagggtcgtcgtgcagatggaagaggtggccagaactgttaatgttgtgatggttctggtgcccctcctcctgctcctgtgtgtgctcgggttgacctacgcactggtgcagatgcagcgaaagggggctccccgcgtattactgtactgcaaacgcagcctccaagagtgggtctag

SEQ ID NO: 112227 - DNA, 561 bp, synthetic construct
  misc_feature 1..561: note = Description of Artificial Sequence: Synthetic coding sequence
  source 1..561: mol_type = other DNA
atgtctgcagctcctttagttgggtactcaagtagcggaagtgaggacgaaagcgaagatgggatgcgcacgagacctggcgatggctctcaccggaggggccaaagccctcttcccaggcagagattcccggtaccggatagtgtactgaatatgttccctgggacggaggaagggcctgaggatgatagcacaaagcacggagggcgtgttcggaccttcccccacgagaggggcaattgggctacccatgtgtacgtcccttatgaggccaaagaagagtttttggacctgttggacgtgctcctcccgcacgcccagacgtatgtgcccagactggtccggatgaaggtctttcatctgtctttaagccagtcagtggtcctgagacatcactggatcttgcctttcgttcaggcactcaaggcgcggatgacaagtttccactcaccccaccctgggcctcactgtctgatcgggacaaaggacgcacctgttacccaagagatcccaaaggatctgggtgccctccggcaggaacctggctcccagaccaggtag

SEQ ID NO: 112228 - DNA, 744 bp, synthetic construct
  misc_feature 1..744: note = Description of Artificial Sequence: Synthetic coding sequence
  source 1..744: mol_type = other DNA
atgtccgctgctccactcgtgggctactcatcgagcggcagcgaagacgagagcgaggacggcatgagaacaaggcctggggacggttcccaccgtagaggccagtctcctttacctagacagcgatttcctgtgcctgactccgtgctgaacatgttccccggaacggaggagggaccagaggacgacagtaccaagcatggcggaagggtgcgtaccttcccacacgaaagagggaactgggccactcacgtatatgttccttatgaggcaaaggaggaatttctggacctcctcgacgtgctgctgcctcacgcacagacgtacgtgccacgactggtgcggatgaaggtatttcacctgagtctctcacagagcgtggtgctccggcaccactggatactgccattcgtccaggctctcaaggctagaatgactagtttccaccggacatttatcggactcgaggtaacatcgggacacgcccagtttctggacctcgtttctgaggtggaccgggtgatggaggaatttaatttgactactttctatcaggaccctagcttccacctctctctcgcctggtgcgtaggtgacgccaggctccaacttgaaggccagtgtctgcaggaattgcaggcaattgttgacggatttgaagacgccgaggtgctgctgagggtccataccgaacaggtcagatgcaaaagtggtaacaagttctttagtatgcccttgaagtag

SEQ ID NO: 112229 - DNA, 642 bp, synthetic construct
  misc_feature 1..642: note = Description of Artificial Sequence: Synthetic coding sequence
  source 1..642: mol_type = other DNA
atgagccctctgccccgacagcgttttccggtgccagatagtgttctgaacatgtttccggggacggaggagggccccgaggatgattctaccaagcatggaggccgtgtgagaacatttcctcacgagaggggtaactgggccacccacgtgtacgtgccgtatgaggctaaggaggagttcctcgacttactggacgtgctccttccccacgcacagagtgtggtcctgcgccaccattggattcttccattcgtgcaggctttaaaagcacgtatgacttccttccacagattcttctttaccgcgaaccaggttaaaatctataccaaccaggaaaagacacggacttttattggactagaggtgacctctggacacgcgcagtttctggaccttgttagcgaggtagaccgcgtcatggaggaattcaacctcacaaccttttatcaggacccctccttccacttgagtcttgcatggtgtgtcggcgatgccagactccagctggagggccagtgcctgcaggagttacaggcgatagtggacggcttcgaggatgctgaagtgctgctgcgtgtccatacagagcaggtgcgctgcaagagtggtaacaagtttttctccatgcccctgaaatag

SEQ ID NO: 112230 - DNA, 1683 bp, synthetic construct
  misc_feature 1..1683: note = Description of Artificial Sequence: Synthetic coding sequence
  source 1..1683: mol_type = other DNA
atgggctctaccgactcaaaactaaactttagaaaggcagtgatccagctgacaactaaaacccaaccagtggaagctaccgacgacgcctacgacccagtggggtacggcattccctataatcacctgttgttcagcgattatcgggagccactggttgaggaggctgcacaagttctcatcgtgaccctggatcacgattcagcctcatccgcatcccctacagttgatggcacgactactggaacagccatggatgacgctgacccaccaggcccagagaacctcttcgtgaattacctgagcagaatccatcgcgaagaggactttcaatttatactgaagggaatagcacgtctccttagcaacccactcctacagacctatctgcccaacagtacaaaaaaaatccaattccaccaggagctcctggtcctgttttggaaactatgcgacttcaacaaaaaattcttattttttgtcctaaagagcagcgacgtactcgatatcctggtgcctattttgttctttctgaacgacgccagggcagaccagtctagagtggggttaatgcacatcggcgtgttcatccttctgctgctcagcggcgaaaggaactttggggtccggttgaataaaccctacagcattagggtgcccatggatatcccagtgttcactggtacccatgctgacctgctcatagtcgtctttcataagatcatcactagcggccatcagcggcttcaaccattattcgattgcttactgacgatcgtggtaaatgttagcccttacctgaagagcctcagtatggtgacagcaaacaaactgctacatctgctagaagccttcagcactacttggttcctgttctcggccgcccaaaaccaccatctcgtgttcttccttctggaggtatttaacaatatcatacagtatcagttcgacgggaattccaacctggtgtatgccatcatccgtaagagatcaatcttccaccagcttgccaacttgccgacggatccgccgacaattcataaagcactgcagaggagacggcgaacacccgaaccgctgtccaggacaggatcccaggaaggaacaagcatggagggcagtcgtccagccgcacctgccgaaccaggaacactcaaaacatcgctcgtcgcaactcctggcatcgataagctgacggaaaagagtcaggtgagcgaagacggcacattacggagtctggaacccgaaccacaacagtcccttgaggacggttcccccgcaaaaggcgagccatcccaagcgtggcgtgagcagaggagaccttcaacctccagcgcgagcggccagtggtctcctacgcccgaatgggtcttaagctggaaaagcaagttacccctccaaacaattatgaggctgctccaggttctggtgccccaagtagagaagatctgtattgacaagggcttaaccgacgagtcagaaatcttgaggttcctgcagcatggaaccctggtgggactgctgcctgtgccacaccctatccttatcaggaaatatcaggctaactccggcaccgcgatgtggttccgtacctacatgtggggggtgatctatttgaggaacgtggacccgcctgtgtggtacgacacagacgtaaagctctttgaaatccaacgcgtctag

SEQ ID NO: 112231 - DNA, 2367 bp, synthetic construct
  misc_feature 1..2367: note = Description of Artificial Sequence: Synthetic coding sequence
  source 1..2367: mol_type = other DNA
atgggatctacagactctaagctcaactttagaaaagctgttatccaacttacaaccaagacccagccggttgaggccaccgacgatgctttctgggatcaattttgggctgacacggccaccagcgtgcaggatgtcttcgccctggtgccagcggccgagatcagggctgtgagggaagagtctccttccaacctagcgaccctgtgctacaaggcagtcgagaaacttgtgcagggagctgagagcggatgccattccgagaaggagaaacagattgtgctgaactgttctcggctgctgaccagagtactcccgtacatttttgaggaccccgactggcgtggttttttttggagcaccgttcctggagctgggagaggaggacagggtgaggaggatgatgaacatgcacggcccctcgccgagagcctgcttctggctatagctgacttactcttctgtccagattttactgttcagagtcaccgtaggtctacggtggacagcgcagaagacgtgcactctcttgattcctgcgaatacatctgggaagccggcgtgggttttgcccattccccacagccaaattacattcatgacatgaatcgaatggagctgctgaagctcctgctgacatgtttctccgaagccatgtatctgcctcccgcgccagagagcggctcgacgaacccctgggttcagttcttctgcagcaccgagaatcgccacgccctgccactgttcacatctctactcaatactgtgtgtgcctatgatcctgtcgggtatggtattccctacaaccacctgcttttcagcgactacagagaaccactggtcgaggaggccgctcaagttctgatagtgaccctcgaccatgacagtgcctctagcgcctcgccaaccgtggatgggaccactaccgggacagccatggatgacgctgacccacctggacctgaaaacttatttgtcaattacctctcacgcattcaccgagaggaggacttccagtttattcttaaaggtatcgcacgactgctcagtaatcccctactacagacctacttgcccaattctacaaaaaagattcaatttcaccaagagcttctggtgctattttggaaactgtgtgacttcaataagaagtttctgttttttgtccttaagtcttcagacgtgttggacatcctagtgccaatcctgttctttctaaacgacgccagagcagaccagagcagagtcgggttgatgcacatcggagtgttcatcctcttgctactctctggagaaagaaattttggagtcaggcttaataaaccttattcaattagggtgcctatggacatcccagtttttaccggaacccacgccgaccttctcattgtggtctttcacaaaatcatcacctctgggcaccagcgattgcagcctttatttgattgccttttgacgatcgtcgtcaatgtgtccccttaccttaagagcctgagcatggtcaccgctaacaagcttctccatctgctcgaagctttctctacaacttggtttcttttttccgccgcacagaatcaccatttggtgtttttcctgctggaagtgttcaacaacatcatccagtatcagttcgacggcaacagcaacttggtctatgccattattcggaagagaagtatttttcaccagctggctaatttgccgaccgacccaccaactatacacaaggccctgcagagacgccgaaggacgccagagcccctgagccggactgggagtcaagagggcacgagcatggagggatccaggcctgccgcacccgctgagccgggtactctgaagacctccctggtggcaacaccaggaatcgacaaactgacagagaagtcccaggtcagcgaggatggaacccttagatctcttgaaccagagccccagcagtccctggaggatgggagccccgccaaaggcgaaccgagccaggcctggcgtgagcagcgtagacccagcacttctagcgcttcggggcagtggagcccaacacccgagtgggtgctttcctggaaaagtaaactgcctctgcagacaatcatgcgcctgctacaggtactggtaccccaagtggagaagatctgtattgacaagggactgacagacgagtccgagattcttcgctttcttcagcacggtacactggtgggtctgcttcccgtgccccatccgatcctaattcgcaagtaccaagccaatagcggcacagcaatgtggttccgcacctacatgtggggcgtgatttatctgaggaacgtcgacccgcccgtttggtacgataccgatgttaagctatttgagattcagcgcgtgtag

SEQ ID NO: 112232 - DNA, 810 bp, synthetic construct
  misc_feature 1..810: note = Description of Artificial Sequence: Synthetic coding sequence
  source 1..810: mol_type = other DNA
atgtcttctgaccacctaaataacagcacactcaaagaggcccagtttaaagacctgttcctgaagaaggctgagctggaattcgcacagatcattattattgtcgtggttgtcactgtcatggtggttgttattgtgtgcctcctcaaccactacaaggtgagcacaaggtcctttatcaaccgccctaatcagagtaggcgcagggaggatggattgccccaggaagggtgtttatggccttcagatagtgcagctcctcggctcggggcaagcgagattatgcacgctccaaggtcccgcgatcgatttacagctccatccttcatacagcgagatcgcttcagcagattccagccgacgtacccgtacgtgcagcacgaaatcgacctgcctcctaccatttctctgtctgacggggaggaaccacccccctatcaaggtccatgtacactgcagctcagggatccagaacagcagatggagctaaatcgggaatcagtgagggcgcctccaaataggaccatcttcgactccgatcttatcgacatcgccatgtattccggaggcccttgccccccaagctcaaattcaggcatttcagcgagtacttgttctagcaatggtcggatggaagggccccccccaacctactctgaggtgatgggtcaccatccaggagcatctttcctccatcatcagcgcagcaatgcgcacaggggttctcggctgcagtttcagcaaaacaacgcagagtcgaccatcgtgccaattaagggtaaggataggaagcccggcaatctcgtttag

SEQ ID NO: 112233 - DNA, 921 bp, synthetic construct
  misc_feature 1..921: note = Description of Artificial Sequence: Synthetic coding sequence
  source 1..921: mol_type = other DNA
atgcctgaagctgggttccaagctaccaacgcattcaccgagtgtaagttcacttgcacatccggtaagtgtctctatctgggcagcttggtctgcaaccagcaaaatgactgtggagacaactccgacgaagaaaactgcctactggttactgagcatcccccccccggaatatttaactccgagctcgagtttgcccagataataatcatcgtggtagtggttacagtgatggttgtcgtcattgtatgtttacttaatcattacaaagtgtcaacacgctctttcattaaccgcccaaatcagtctcggcgaagggaggacggattaccacaggaaggatgcttatggccaagcgacagtgcagcgccaagactgggggcctctgagatcatgcacgcgccaagaagcagggacagatttactgcccccagctttatacagagggaccgattttctcgatttcagcccacctatccctacgttcagcatgaaatcgacctgcccccgaccattagtctatctgacggagaggaaccccccccttatcagggaccgtgtactttacagctcagagatccagagcagcagatggaattgaaccgggagtctgtgagggctcctccgaatagaacaatttttgattcagatctgatagacatagccatgtacagtggcggcccctgtccaccatccagtaacagcggcatcagcgctagtacatgttcatccaatgggcgtatggagggcccgcctccgacttatagtgaggttatgggccaccaccccggagccagcttcctgcaccaccaacgaagcaacgcccaccgaggctctagattacagttccagcagaataacgctgaatctaccattgtcccgatcaaaggaaaagaccggaagcccggcaaccttgtgtag

SEQ ID NO: 112234 - DNA, 747 bp, synthetic construct
  misc_feature 1..747: note = Description of Artificial Sequence: Synthetic coding sequence
  source 1..747: mol_type = other DNA
atggcagccgagctagaattcgcccagattatcatcattgtcgttgtcgtaactgttatggtggtcgtcattgtatgcttattgaatcactataaagtcagcactagatcgttcattaacagacctaaccaatccagaaggcgggaggacggactgccacaagagggatgtctttggccatcggactccgcagcaccaaggctgggcgcctctgagataatgcacgctcccaggtcaagggataggttcactgctccatcttttatccagcgcgataggttctctagatttcagcccacttatccctacgtccaacacgagatcgatctgccgcctacaatctctctgtcagatggggaggaaccaccaccctatcaaggaccttgcacgttacaattgagggatccagaacagcagatggaacttaaccgcgaatcagtgagggcaccgcctaatagaactattttcgacagtgacctaattgacatcgccatgtacagcggcgggccctgtccgccctccagcaacagtggtatcagtgcaagtacatgttcgagtaacgggcggatggagggacctccaccaacctatagtgaagtcatggggcatcatccaggcgcctcgttcttgcaccatcagcgcagcaatgctcatagagggtccaggctacagtttcaacagaataatgccgagagtaccatcgtgccaataaaaggaaaagatcgaaaacccggcaacctagtgtag

SEQ ID NO: 112235 - DNA, 756 bp, synthetic construct
  misc_feature 1..756: note = Description of Artificial Sequence: Synthetic coding sequence
  source 1..756: mol_type = other DNA
atgagcagcgatcacctaaataactcaaccctgaaagaagctcagttcaaggatctcttccttaagaaagcagagctggaatttgcccagattattatcatcgtggtcgtggtgactgtgatggtggtggtgattgtttgtctgctgaaccattataaagtgagcacccggagttttatcaaccgtccaaaccagagcaggcggagggaggacgggttgcctcagattatgcacgctccacggtccagagatcgcttcacagctccttcttttatccaaagggaccgctttagtcggttccaacccacttatccttacgtacagcacgaaattgacttgcccccaacaatatcgctaagtgatggcgaggagccacccccttatcaggggccctgtactctccagctccgggaccctgagcagcagatggaacttaatagagagtcagtcagagccccaccaaaccgaacaatctttgactcagacttaatcgatatcgcaatgtattcaggcgggccgtgccctcctagttcaaacagcggcatatctgctagcacgtgctcctctaatggtaggatggagggacctccaccgacgtacagtgaggtcatgggacatcatccgggcgcatccttcctgcatcatcagcgttctaatgcacacagaggctcccgcctgcagtttcagcaaaataatgccgagagcacaatcgtccctataaaagggaaggatcgcaaacctgggaacctcgtgtag

SEQ ID NO: 112236 - DNA, 867 bp, synthetic construct
  misc_feature 1..867: note = Description of Artificial Sequence: Synthetic coding sequence
  source 1..867: mol_type = other DNA
atgcccgaagccggcttccaggcaaccaatgccttcacggagtgcaagtttacctgtacgagcgggaagtgtctctatctgggcagtctggtgtgcaatcagcaaaacgattgcggggataactcggacgaagagaactgtctgctagttacagaacaccccccaccgggtatcttcaactcagagcttgaattcgctcagataattatcattgtggtggttgtgacagtcatggtcgtggttattgtgtgcttgctcaatcattacaaagtctcaacccgatccttcatcaacaggcccaaccagagtaggcgaagggaagacggactaccgcagattatgcacgccccccgttctagggacagatttacagccccttcctttattcaaagagacagattttccagatttcagccaacctatccttacgttcaacacgaaatcgatttgcctcctaccatatctctgtccgatggcgaagagccccctccctaccaaggaccttgcaccttgcagctgcgcgacccagaacagcagatggagctgaaccgggagtcagtacgcgctccccctaatagaacaatctttgattcagatcttattgatatcgcgatgtactccggcggcccttgcccaccctctagtaattctggcatttcggctagcacctgcagtagcaacggtcggatggaagggcctcccccaacgtattcagaggtgatggggcatcatcccggggccagttttttgcaccaccagaggagtaacgcgcaccggggctctaggctccaattccagcagaataacgccgaaagcacgattgtgccgatcaaggggaaagacaggaaacctggaaatctggtgtag

SEQ ID NO: 112237 - DNA, 693 bp, synthetic construct
  misc_feature 1..693: note = Description of Artificial Sequence: Synthetic coding sequence
  source 1..693: mol_type = other DNA
atggcagctgagctggagttcgctcagattatcatcattgttgtagtggtgactgtgatggtggtggtgatcgtctgtctgctgaaccactataaggtctcgacaaggtcttttatcaaccgccctaatcagtctcgacgaagagaggatggcctgccacagattatgcacgctccaagaagccgagataggtttaccgccccctctttcattcagcgagatcgcttttcaaggttccagccaacatacccatatgtgcagcacgaaatagaccttcctcccacaatttcattgtcagacggcgaagagcctccaccctatcagggtccctgcacgctgcagcttcgcgacccagaacagcagatggagctgaatcgggagagcgttcgcgccccgccaaatcgcaccatttttgacagcgatctcattgatatcgctatgtactctggagggccatgccctcctagctcaaattctggtataagcgcctcaacctgctcctccaacggacgaatggaggggccacctccaacatattcagaggtcatgggccatcatcctggtgccagcttcctccaccatcaacggtccaacgctcacagaggcagtcgcctacaattccagcagaacaacgccgaatctaccattgtaccaatcaaggggaaggaccggaagccaggcaacctagtctag

SEQ ID NO: 112238 - DNA, 1119 bp, synthetic construct
  misc_feature 1..1119: note = Description of Artificial Sequence: Synthetic coding sequence
  source 1..1119: mol_type = other DNA
atggctaagtctaagacaaagcataggctatgctctcaagagtcatcagtcagtgcgttactggcatcttgtacactgagcgggtcaaatagcagtaatagcgacgggtcattccattataaagacaagctgtaccgtagcgcatcacaggcactacaggcctacattgacgactttgacctgggccagatctatccaggcgcttccactggcaaaattaacatagatgaggacttcacaaacatgtctcaattttgtaattatatctacaaaccaaacaatgcttttgagaacctggaccacaaaaagcatagcaactttatctcgtgccgccgtcacactgtgaacgatattgattccatgagcctgacaacagatgatctgctgagactgcccgcagacggaagtttttcatatacgtatgtgggccccagtcaccgcaccagcaagaaaaataaaaaatgcagggggagactgggcagtctggacattgagaagaatccgcattttcagggcccttacacctcaatgggtaaagacaatttcgtgacccccgtcatccggtctaatatcaacggaaaacagtgcggcgataaaatagagttgttgatccttaaggcaaagcggaacctcgaacagtgcaccgaagagctgcctaagagcatgaaaaaggatgatagcccttgcagcctggacaaactggaggcagacagatcttgggagaacattccggttacgttcaagagccccgtgcccgtgaactcagacgactccccacagcagacctcccgggcgaagagcgcaaagggagtgctggaagatttcctaaataacgacaatcagtcttgtacattatctgggggcaagcatcatggacccgtggaagcccttaagcagatgttattcaacctgcaagctgtccaggaacgcttcaatcagaataaaactacagaccccaaggaagagatcaaacaggtttcggaagacgacttctctaagcttcaattaaaggagtctatgatccctattacacgcagcctccagaaggctctgcatcaccttagtcgcttaagggacctggttgacgatacaaatggggagaggtcgccaaagatgtag

SEQ ID NO: 112239 - DNA, 1602 bp, synthetic construct
  misc_feature 1..1602: note = Description of Artificial Sequence: Synthetic coding sequence
  source 1..1602: mol_type = other DNA
atggcaaaaagcaaaacaaagcacaggctttgctcccaggaatccagcgtgtccgcccttctcgctagttgcacactctccgggagtaattcctctaacagtgatgggtcctttcactataaagataagttatacagatctgcgtcccaggcactccaggcctacatcgacgattttgacctgggacaaatatatcctggggcttcaaccggtaaaattaacatcgatgaggattttaccaacatgtcacaattttgtaattacatttataagcccaataatgccttcgagaacctggaccataagaagcactcgaatttcattagttgccgccgacacaccgtgaacgacattgactctatgagcctgaccacagatgacctgctcagactccctgccgacggttcattctcctacacatacgtaggcccatcgcatcgaacatctaagaagaacaagaaatgtcggggtagactgggtagcctcgacatcgaaaaaaaccctcacttccaaggtccttatacctccatgggaaaggacaacttcgtgacgcccgtaatccgttctaacattaatggaaagcagtgcggcaggctcaagaacccaaagctgatgaatcgaacgaacaattgtatttccgaatcttctctgtccttcccaaagaagagttccttcaaggattcttcagaacattcactcgagaaaaattaccctcggtggttgacaagccagaagtctgacttgaatgtctctggtattacatccattcctgactttaagtaccccgtctggctgcataaccaggatttactgcccgacgcaaactcccagcgggtgtatcaaatttttaaggatgatcagtgctcaccccggcactcacaccaggctcaggggacaagtcggttaatcaacaagctcgactgctttgagtatgcattcgaaccatctaactttagcaactccctgtctgacgacaaggagctggtgaacgagtacaaatgcgattttgaacactctcagtgtcagtgtgagaaccccctgctccctggccaatcaaccaaacccttctctggcgacaagatcgaactcctgattctgaaagccaagcgcaacttggaacaatgcacagaggagcttcctaagtcgatgaaaaaagatgattctccatgcagtctagacaagcttgaagctgaccggagctgggaaaacattcccgtcacatttaagagcccagtcccagtgaatagcgacgattcacctcaacaaacgagtcgggcaaagtcggcaaagggcgtgttagaggattttttgaacaacgacaaccagagctgcacactgtcaggaggcaagcatcatggcccagtggaggctctaaagcagatgttgtttaatcttcaggcagtgcaggaacggttcaatcagaataaaactaccgacccaaaggaagaaattaaacaagtttcggaagacgatttctcgaaactgcaactgaaggagtctatgatccccatcacaagatctctccagaaggccctacatcatctgtctagactgcgagacctggtggatgacactaacggcgagcggtctcctaagatgtag

SEQ ID NO: 112240 - DNA, 522 bp, synthetic construct
  misc_feature 1..522: note = Description of Artificial Sequence: Synthetic coding sequence
  source 1..522: mol_type = other DNA
atggcggccccttctggcgggtggaacggagtgggggcaagcttgtgggcggcgctgctgctcggggccgttgcactccggccagcagaagccgtgtctgagcctacaacagtggcgtttgatgtgcggcctggcggggtagtccacagcttttcccacaacgttggaccaggcgataaatacacctgcatgtttacttacgcctcgcagggaggcacgaacgagcagtggcagatgagcctgggaacaagcgaagaccaccagcacttcacttgcacaatctggaggccacaggggaaatcttacctgtactttacgcagtttaaggctgaagtccgcggggccgagatcgaatatgctatggcatattccaaagctgcgtttgagcgcgagagtgatgtccctctgaagacggaagagtttgaagtgaccaagaccgcagtcgcacacaggccaggtgccttcaaggctgagcttagcaagttggtgatagttgccaaagcctccagaaccgagctgtag

SEQ ID NO: 112241 - DNA, 426 bp, synthetic construct
  misc_feature 1..426: note = Description of Artificial Sequence: Synthetic coding sequence
  source 1..426: mol_type = other DNA
atgacaatcatggtggaggatattatgaaacttctctgctccttgagcggagagagaaaaatgaaagccgctgttaaacactctgggaagggcgctctcgtgacaggcgcaatggcttttgttgggggcctcgtaggtggaccacccggccttgcagttggaggagccgtaggaggattactgggggcctggatgacaagcggccagtttaagcccgttccccagattctgatggagttgccacccgccgagcagcagcggctattcaacgaggctgcagctatcattcgtcacctggagtggaccgacgccgtgcaactcaccgcccttgtcatggggtcagaagctcttcagcaacagctcttggctatgctggtcaactacgttacaaaggagctgcgagctgaaatccagtacgatgattag

SEQ ID NO: 112242 - DNA, 324 bp, synthetic construct
  misc_feature 1..324: note = Description of Artificial Sequence: Synthetic coding sequence
  source 1..324: mol_type = other DNA
atgacaattatggttgaggacatcatgaagctgctttgttctctttccggggaacgcaagatgaaggctgctgtcaagcactctggaaaaggcgccctggtcacgggagccatggcctttgtaggaggactagttggcggacccccaggactggccgtggggggtgcggtgggcgggttactgggcgcatggatgacctctgggcagtttaaacctgtgccacagattctgatggagcttcccccagccgaacagcagcgtctgttcaatgaggctgctgcaattacacgcccttgctcttcttcctgctggccctgctggtag

SEQ ID NO: 112243 - DNA, 459 bp, synthetic construct
  misc_feature 1..459: note = Description of Artificial Sequence: Synthetic coding sequence
  source 1..459: mol_type = other DNA
atggaaagattaaaaagtcataagccagcaacaatgactatcatggttgaagacatcatgaagttactgtgttctttgtctggggaaaggaagatgaaggcagccgtgaagcattctgggaagggcgctttggtgacaggcgccatggcctttgtgggtggtcttgttgggggccctcctggactggccgtcggtggcgctgtcggtggactgctgggcgcctggatgacgtcgggtcaattcaaaccagtacctcagatactgatggagctgccacccgctgaacaacagaggctgttcaacgaagccgcagccataattcgccatttagaatggactgacgctgtccaactcactgctctcgtgatgggatcagaagcccttcaacagcagcttctcgctatgctagtcaattatgtgaccaaagaactgcgggcggagatacagtacgatgattag

SEQ ID NO: 112244 - DNA, 648 bp, synthetic construct
  misc_feature 1..648: note = Description of Artificial Sequence: Synthetic coding sequence
  source 1..648: mol_type = other DNA
atggagaaaaatcctcccgacgatacagggcccgtacatgtgcctttaggtcacattgtagccaacgagaagtggaggggcagccagctggcacaggaaatgcaggggaagataaaactcatctttgaagacgggctgacaccggacttttacctcagcaatcgttgttgcattctctacgtcaccgaagccgaccttgtggccggcaatgggtatagaaagagactggttcgcgtgcggaatagcaacaatctgaaagggatagtcgttgtcgaaaagacgcgaatgagtgaacagtattttcccgccctccagaagttcacagtgctggatttaggaatggttctgctgcctgtggcctctcagatggaagcttcctgccttgtcatccagctcgtccaggaacagactaaggagcctagcaaaaatccgctgctaggaaaaaagcgggcacttcttctgtccgaaccaagcctgttgaggacggtgcagcaaatccctggtgtggggaaggttaaggccccattattactgcagaaatttccttctatccaacagttgagtaatgcctccatcggcgaacttgagcaggtcgtaggccaggctgttgctcaacagattcacgccttcttcacccagcctcgctag

SEQ ID NO: 112245 - DNA, 648 bp, synthetic construct
  misc_feature 1..648: note = Description of Artificial Sequence: Synthetic coding sequence
  source 1..648: mol_type = other DNA
atggagaagaaccctccagacgacactggtccagtccatgtgccccttggacacatcgtggcaaatgaaaagtggaggggaagtcagttggcccaggagatgcagggtaaaatcaaactgatattcgaggacgggctgacgccggatttttatctctccaataggtgctgcattctctatgtgactgaggctgacctggtggccggtaacggttaccggaagcggctggtgagggtgcgcaatagcaacaacctcaagggtattgtggtggtggagaagacacggatgtccgagcagtacttcccggccctgcaaaagtttacagtgttggacctggggatggtgctgctccctgtggcctctcagatggaggcaagttgtctcgtgatccagctcgtgcaagagcagacgaaagaaccctcgaagaatccattgttaggtaagaagagggctctgctactgagcgaaccttctctcctgagaacggtgcaacaaatccctggagttggaaaagtcaaagccccgctgctcctccaaaagttccctagcatccagcaactcagtaacgcgtctatcggcgagctggagcaagtggtgggccaggctgtagcccaacaaatccacgcatttttcacacagccaagatag

SEQ ID NO: 112246 - DNA, 1227 bp, synthetic construct
  misc_feature 1..1227: note = Description of Artificial Sequence: Synthetic coding sequence
  source 1..1227: mol_type = other DNA
atgtcggaacatgtggaaccagctgccccaggtcccggaccgaatgggggtggtggcgggcctgctcctgctaggggcccacgcacaccgaacctgaaccctaatccactgatcaacgtgcgtgaccggctgttccacgcattgttctttaagatggcagtcacttactcccgactgttccccccagctttccgccggctcttcgaattcttcgttcttctcaaagcgctgttcgttctctttgtgctggcctatatccatattgttttcagccggtcacccattaactgtctggaacatgtgagagacaagtggccacgcgaggggatcctgcgagtcgaagtccgccacaactcctcaagagctcccgtttttttgcagttctgtgattctgggggccgggggagctttcccgggcttgcggtcgaaccaggctctaacctcgacatggaggacgaggaagaagaggagctcaccatggagatgttcggaaattcttcaataaagttcgaattagacattgagcctaaagtctttaaaccaccctcatctacagaagccctgaatgactctcaggagttccccttccctgaaacccccacaaaggtatggccccaagacgagtacatagtggaatactctcttgagtatggcttcttaagattaagtcaggccaccaggcagcgtctttccatcccagtgatggtggtgactttagacccaacaagagatcagtgcttcggtgacagattttccaggttgcttttggacgaattcctcggatatgatgacattttgatgtcctccgtcaaggggctggctgaaaatgaagagaataaggggtttctgagaaatgtcgtaagcggagagcactatagattcgtctccatgtggatggccagaacgagctacctggccgctttcgccattatggtcatttttacactgtcagtgagtatgttactccggtactctcaccatcagatttttgtcttcatcgtggacctgcttcagatgctggagatgaatatggcaatcgcttttcctgcggcccctctgctcacagtgatccttgctctggtcgggatggaggcgattatgagcgaatttttcaatgatactacaacagctttttatatcatcctgattgtgtggctggccgaccagtatgatgcaatttgttgccataccagcaccagtaagcggcattggctgcggataccttag

SEQ ID NO: 112247 - DNA, 1863 bp, synthetic construct
  misc_feature 1..1863: note = Description of Artificial Sequence: Synthetic coding sequence
  source 1..1863: mol_type = other DNA
atgtccgaacacgttgaaccggccgcccctgggccaggcccaaatggcggcggaggcggtccagcacctgcccgcgggccccggacacccaatctcaaccccaatcctctgattaacgtgagagaccgtctgtttcatgcgctgttttttaagatggcagttacgtacagccggttgttcccaccagccttccgaagactgttcgagttcttcgtcctcctcaaggctctattcgtactcttcgtattggcttatattcatatcgtcttttcacgctcacccatcaactgtcttgaacacgtgcgcgacaaatggccccgggagggcattctgagggtggaggtgcgccacaattcaagccgagctcctgtgttcctgcagttctgtgacagcggcggacgtgggtcatttccgggcttagctgtcgagcctggatcaaatttggacatggaagacgaagaagaggaggaactgacaatggagatgtttgggaactccagtatcaagttcgaactggacatagaacctaaagtcttcaagcctccaagctctacagaagcgttgaatgatagccaagagttcccatttcctgagactcccacaaaagtttggcctcaagacgagtacatcgtggaatatagcttggaatatggcttcctgcgcctgtctcaggccaccaggcagaggctgtcaatccctgttatggtggttacactagacccgactcgcgatcagtgcttcggcgatcgattttcacgacttttattagacgagtttctcggctatgacgatatcttgatgtctagcgtgaaaggactggctgaaaatgaggaaaataaaggctttctacgtaatgtcgtgagcggagagcattacagatttgtgtccatgtggatggcgagaaccagttacctggccgccttcgcaattatggtgatctttactcttagcgtcagtatgcttctacgatacagccaccaccagattttcgttttcatcgtggacctgcttcagatgctcgagatgaacatggctattgcctttcctgctgcaccgctgctgacagtgattctggcactggttggcatggaagctataatgtccgaattcttcaacgacactaccaccgccttctacattatcctgatcgtatggctggccgatcagtacgatgcaatttgctgccatacatccacctccaagcgtcactggctgcgattcttttacctgtaccacttcgccttctatgcttatcactaccgatttaatggccagtatagctcgctagctctggtgacaagttggctattcatacagcattccatgatctactttttccaccattacgaactgcctgccattctgcagcaagtgagaatacaagaaatgctgttacaggcccctccactcggacctgggactccaacagcgttacctgacgacatgaacaacaattccggggcacccgcgacagccccagactccgcaggccaacccccagctctaggtccagtgtcccccggcgcatctggcagcccaggacctgtagccgctgccccgagcagtcttgtggcagctgcagccagtgtggccgcagccgccggcggagaccttgggtggatggccgagacagcagccataattacagacgcatcctttctgagcggtttatccgcctccctcttagaacgccgaccagctagtccactggggcctgccggggggctgcctcacgctccccaggacagcgtcccgccctccgactctgctgcctctgatactacgcctctcggtgccgccgttggtgggccatcgccagcctctatggctccaactgaggccccatccgaggttggtagctag

SEQ ID NO: 112248 - DNA, 447 bp, synthetic construct
  misc_feature 1..447: note = Description of Artificial Sequence: Synthetic coding sequence
  source 1..447: mol_type = other DNA
atggccgcatcaccagcaagacctgccgtgctggccctgactggtttagcgttgctgttactgctgtgttggggcccaggcggtatctccggtaataagctgaagctgatgctccaaaagcgcgaggcacctgtgcctacaaagacgaaggtagctgtggatgaaaacaaagccaaggagtttcttggatccctgaaaagacagaaacggcagctctgggacagaaccagacctgaagtgcagcagtggtatcagcagtttctatacatgggcttcgacgaagccaaattcgaagacgatatcacatactggctgaaccgagatagaaatgggcacgaatattacggtgactactaccaacgccattatgacgaagactcagctattggtcctcggtctccttatggatttcggcacggggcctccgtcaattatgatgattattag

SEQ ID NO: 112249 - DNA, 2964 bp, synthetic construct
  misc_feature 1..2964: note = Description of Artificial Sequence: Synthetic coding sequence
  source 1..2964: mol_type = other DNA
atgaccccagcattaagagaggcgacagcgaaagggatcagcttttccagccttccatctacgatggagtctgacaagatgctgtatatggagagcccacgtactgtggatgaaaagctgaaaggtgacactttctcacagatgttaggatttccaactcccgaacctacgctcaacacgaattttgtaaatctgaaacattttggctcgccacagtccagcaagcactaccaaactgtattccttatgagatccaactcaacactgaacaaacacaacgagaactataagcagaaaaagttaggggaaccctcttgtaacaagctcaaaaatatcctgtacaatggctctaacattcaactcagcaagatctgcctgtcccattcagaagagtttatcaagaaggagccgctctctgatactaccagtcaatgtatgaaagacgtacaaatcatactggatagcaacattactaaagacaccaacgtcgataaggtacaacttcagaactgcaaatggtaccaggaaaacgcactgttagataaggtgactgatgccgaaataaagaagggtcttctgcactgcactcagaaaaagattgttcccgggcatagcaacgtgcctgtgagctcatccgcggcagaaaaggaagaagaagtgcacgctcggctgttacactgtgtgagtaaacaaaagatcctgctctcgcaggctcgacgcacacaaaagcacttacagatgctgctagcgaaacacgtggtcaaacattatggacaacaaatgaagttgtctatgaagcatcaactccccaaaatgaaaactttccacgagccaacgacgatactgggcaattccctcccaaagtgcacagagatcaagccggaagtaaatactctgaccgctgagaataaactctgggatgacgccaagaacgggttcgcccgctgtaccgcggctgaaatccagcgttttgccttttctgccacgggcctcttgtcacacgtggaagagggcctggattccgacgcaactgacagtagctccgacgacgacctcgatgagtatacattgaggaagaacgtggccgttaattgttcgacagaatggaaatggttagtggaccgtgcacgcgtgggttctagatggacgtggcttcaggctcagatctctgatctcgagtgtaaaatccagcagctcaccgacattcatcgccagatccgcgcctctaaaggtatcgtggttctggaggagtgtcaactgccgaaagacatcctgaagaaacagatgcagttcgctgatcaggccgccagcttaaacatcctgggtaaccctcaggtgccacaagagtgtcaggatccagtgcccgagcaagatttcgagatgtcaccttcaagcccgaccctgttactgagaaatatagagaagcagtccgcgcagcttacggaaattatcaattcattgatagcccccctcaacttgtccccaacgagctcaccgttgtcgtcgaagagctgcagccataaatgcctggcaaatgggatctatcggtctgcctctgaaaatctcgatgaactcagctcatctagttcctggctcttaaatcagaaacacagtaaaaagaagcgtaaagatagaactagactcaaatctagctctctcactttcatgagtacctccgctcgcactcgcccactacaatcgttccataagcgcaagctgtaccgtctgtcgccaaccttctactggacgccccaaactcttccatccaaggagaccgcatttctaaacacgacacaaatgccttgtctgcagagtgcctctacatggtcaagttacgaacacaactccgaaagttatcttttgcgggaacacgttagcgagttggatagctcctttcactccgtgctgtcactacccagtgatgtgcccctacactttcatttcgagacgctgctcaagaagacagagatcaaagggaacttggcagaaaataagttcgtggatgaatacataatttccccaagtcctgtgcatagcacactgaaccaatggcggaacggctatagcccaatatgtaagcctcagattcggagtgaatcatccgcgcagttgttacagggtcggaagaaaaggcacctgagcgagactgccttgggcgaacggaccaaactggaggaaagtgacttccaacacacagagtccggcagccattccaatttcacagctgtttccaatgttaatgtcctttctcgcatacagaactcgagcaggaacaccgcccgcaggagacttcggtctgagagctcttatgacatcgataacattgtgattccaatgtccctcgttgcacccgctaaacttgagaaattgcagtacaaagaaatcctgaccccttcatggcgaatggtggtgttgcaacctcttgatgagtataatcttggtaaagaagaaatcgaggacctaagcgatgaggttttctctttacgacacaagaagtacgaggaaagggagcaggctagatggtccctatgggagcagtcaaagtggcacaggaggaattctagagcttattccaagaatgttgagggtcaggatctgctgctgaaggaataccctaacaatttttcttcttctcagcagtgcgccgctgcatcacccccaggcctcccatcagagaatcaggacctttgtgcatatggactacctagcttgaaccaatcacaagaaactaagagcctgtggtgggagcgacgcgcgttcccacttaagggcgaagatatggctgctttactgtgccaggacgagaaaaaggatcaggtcgaacgttcctccaccgctttccacggagaaatctttggtacttctgtacccgagaatggtcatcaccctaagaagcagtctgatgggatggaagaatacaagacattcggcctgggcctaactaatgtcaagaaaaataggtag

SEQ ID NO: 112250 - DNA, 687 bp, synthetic construct
  misc_feature 1..687: note = Description of Artificial Sequence: Synthetic coding sequence
  source 1..687: mol_type = other DNA
atgtcatatgcagagaaaccagacgagatcactaaagacgaatggatggaaaagctcaataatctccacgtccagcgtgccgacatgaatagactgatcatgaactacctggttacagagggctttaaagaagccgcagaaaaatttagaatggagtccgggatcgaaccctccgtcgatttggagacactggacgagaggataaagattagggaaatgattctgaaggggcagatacaggaagccattgcacttattaactccctgcatcctgagttgctcgacactaaccggtacctgtattttcaccttcaacagcaacatttgatagagctcatcagacagcgggaaaccgaagccgctttggaattcgctcagactcagctggctgagcagggggaggagagccgggaatgtctgacagagatggaacgtacactcgccttgttggcattcgattcccctgaagaaagcccctttggggacctcctccacaccatgcagagacagaaagtctggtctgaagtcaaccaggcagttttggattatgaaaacagggaaagcacccctaagcttgcaaaacttctcaagctccttctgtgggcacaaaacgagctggatcagaagaaagtcaagtaccctaaaatgacagacctgagcaagggtgtcattgaagagcctaaatag

SEQ ID NO: 112251 - DNA, 468 bp, synthetic construct
  misc_feature 1..468: note = Description of Artificial Sequence: Synthetic coding sequence
  source 1..468: mol_type = other DNA
atgtcctacgccgagaaaccggatgagatcaccaaagacgagtggatggaaaagctgaacaatcttcacgtgcaacgggctgacatgaaccgactgatcatgaactacttagtcaccgaaggctttaaggaggcagccgaaaagttccgcatggagagcggcattgagccgagcgtggatctggaaaccctagatgagagaattaaaatccgcgagatgatccttaagggtcagatccagcaggttgtgcatgattgttggcggaaggagagagttttcattctgtcagatctaccgagttctatatccgctgcaagtcatcctccctccagcgctggcagcgccgatgtgttgctgctgttcacgcacagaaccgtcccttgctccgtcgtgggccggcgggaggtggtgcaaggctgtgttcattgcctacgcgtggggactgtagatggccatatggccctgtag

SEQ ID NO: 112252 - DNA, 3534 bp, synthetic construct
  misc_feature 1..3534: note = Description of Artificial Sequence: Synthetic coding sequence
  source 1..3534: mol_type = other DNA
atggacgtataccctcctagaaggcaggggcttcctcgggcccgctcccctggcgggtcctcaaggggatccccatctgtttcctgtagcaggctgaggcaggtacagtccattctgacgcaatccagcaaaagtagacctgatggcatcctgtgcattctcggaatcgattccaggtataacgagggatgtcgagagctggctaattatctgctgttcggtctttacaatcagaacacaagtgacttcgagaagactggcttctccgaagaagtgttggatgacgtcattattttgattaagtctgattctgttcatttatactgtaatcctgtcaatttccggtatctgctgccatatgtcgcccactggaggaaccttcacttccattgtatgacagaaaatgaatatgaggacgaagaagccgccgaagagtttaagatcactagcttcgtcgatatggtgcgcgactgctcccgtattggcatcccatacagtagccagggccacctgcaaatctttgatatgtttgttgtggagaaatggcccattgtgcaggcgtttgcccttgagggtatcggcggggacgggtttttcacaatgaaatatgaactgcaggacgtgtcccttaatctttggaacgtgtattccaagatggatcctatgtccctggaatccctactctccgacgatctggtggcttttgaacatcagtggacctctttttttgctaattttgacacggaaatcccctttctgctggagctttccgaatcccaggctggcgagccatttcggtcttacttctcacatggtatgatcagtagtcacattacggaaaattcacccaataggcagccctttgtgttattcggtaatcactccacgcgggaaaacctgaatgcaggcaactttaatttcccttcagaaggccatctggttcgaagcactggcccgggcgggtcttttgctaagcatatggtggctcagtgcgtctctccgaaagggccacttgcttgtagccgcacgtacttttttggggcgacccacgtgccctacctagggggggattcaaaactgcccaagaagacagagcagatcaggctactttctcagatttatgccgctgttattgaagccgtcctcgcaggtattgcctgctacgcaaaaacgtctagcctgacaaaagccaaggaggtcgccgaacagaccctgggatctgggttggacagctttgagttaatcccctttaaagctgcactaaggtcaaagatgacatttcatatccatgccgttaataatcaggggcgaattgtcccactggattccgaggactctctcagcttcgtgaaaaccgcctgtatggctgtctatgacattcccgatctactgggaggaaatgggtgtctcggttcagttgtatttagcgagtccttcctaacctcacagatcctggtcaaggaaaaagacggcacagtcacaacagaaacctcttcagtagtgttaacagccgccgttccgcgattctgtagctggctggtggaggacaatgaagtaaaactgagcgaaaagactcagcaggcagttcgcggcgatgagagctttctgggaacgtacttaaccggaggcgagggggcctacctgtattcatcgaaccttcagagttggccggaagaaggaaacgtccacttttttagctctggtctgctgtttagccattgcagacaccgctccataattataagcaaagaccacatgaatagcatcagcttctatgatggagatagcacttcaactgtggctgctctgctcattgattttaaatcttctctgttgcctcacctgcctgtgcattttcatggctcttcaaatttcctgatgatcgcactgtttcccaaatcaaagatctaccaggccttttactccgaggtgttctcactctggaaacagcaagacaacagtggcatttctctgaaggtcattcaggaggatggccttagcgtggagcaaaagcgacttcactcctcagcacagaaactgttctccgctctctctcaacctgctggcgagaaacggtcctctttaaagcttctaagtgctaaactgccggaactggattggttcctgcagcactttgcaatctcaagtatctcgcaggagcccgtaatgcggactcatctccccgttttactgcagcaagccgagattaataccacacacaggatagagtccgacaaagtcataatttctattgtgacagggcttcccggctgccacgccagcgagctctgtgcctttttggtgacattacacaaagagtgcgggaggtggatggtctaccggcagataatggatagctccgaatgttttcatgctgctcactttcagcgctacctgagtagtgctctcgaggcccaacagaataggtccgctcgccagtctgcatacattagaaagaaaacacgcctgctggtcgtgctgcagggatatacagatgtcattgacgtcgtccaggcgctgcaaactcaccccgacagcaatgtcaaggcgtcttttaccattggcgctattaccgcctgtgtggagcctatgtcatgttatatggaacatagatttctttttcccaagtgccttgatcagtgtagccagggtctggttagcaacgtggtgtttacttcacacaccacggagcagcgccatcctctgctcgtacagctgcagagcttaataagagccgccaaccccgctgcagcctttatcttggcggaaaacgggattgtgaccagaaatgaggatatcgaactgatcctgagcgaaaacagttttagctccccagagatgctcaggagccgatacttaatgtaccctgggtggtacgagggaaagttaaacgccggctccgtctaccccctgatggtgcagatctgtgtttggtttggcaggcctcttgagaagacacgcttcgtggccaagtgtaaagcaatccagagctccatcaagccaagtccttttagcgggaatatttaccacatcctgggcaaggtcaaattttcagacagtgagcgcactatggaggtgtgttacaacaccctggcaaactctctgagtatcatgcccgtcctggaagggccaactccgcctcctgactctaaatccgtctctcaagatagttccggacagcaggaatgctatctggtgtttatcggctgttcattaaaggaggactcaataaaggattggctgaggcaaagcgccaagcagaagccccagcggaaggcccttaagactaggggaatgctgacacagcaggaaatccggtctatccacgtaaaaaggcacctcgaaccgctgccagctggctacttctataacgggacacagttcgtgaactttttcggcgataagacagacttccaccctctgatggaccagttcatgaatgattacgttgaggaagccaatagggaaattgagaaatacaatcaggaacttgagcagcaggagtatcacgacctctttgaattaaagccttag

SEQ ID NO: 112253 - DNA, 1488 bp, synthetic construct
  misc_feature 1..1488: note = Description of Artificial Sequence: Synthetic coding sequence
  source 1..1488: mol_type = other DNA
atggagggctgtttgggacaggagttgttttccaatcatatgttcctgactagcttgagcagccccaatcggcagcccttcgtgctgtttggtaaccactctacacgcgaaaacttaaatgctggcaacttcaacttcccaagtgaaggacacctggttcgaagcacggggccaggcggcagcttcgccaaacacatggtggcccagtgtgtatcgcccaagggaccactggcctgtagtagaacgtatttttttggggctacccatgttccatacctggggggggatagcaagctgccaaaaaaaacagagcagatgctcctgagtcagatttatgccgctgtgatcgaggctgtcctcgccggcatcgcctgctacgctaaaactagctctttaaccaaggctaaggaggtcgccgagcagaccctaggaagcggccttgactcatttgagctgatcccttttaaagctgcgctgcggtctaaaatgacatttcacattcacgctgtgaacaaccaaggaagaatagtccccctggactcggaggattcactgagcttcgtaaagacagcatgtatggccgtttacgatatacctgatctgctggggggcaacgggtgcctcggaagcgttgtattcagtgagtctttcctgacctctcagatcttagtaaaggaaaaagatgggaccgttacgacagaaaccagttccgtggtgctcactgccgccgtaccgagattttgcagctggctcgttgaggataatgaggtgaagctcagcgagaaaacccaacaggccgtgagaggagatgaatccttcctgggcacatatctgacggggggggagggagcctacctgtacagctctaacctgcagtcgtggcccgaagaaggcaacgttcacttttttagttccggccttctgttctcacactgtcggcatagatctattattatttccaaagaccatatgaactcaattagcttctacgacggtgactccacaagcaccgtggcagccctgctgattgatttcaagtccagcttactgccacacttgccggtacacttccacggctccagtaactttctcatgatagccctgttcccaaaatctaagatttaccaggcgttctactccgaggtgttcagtctctggaaacagcaggataacagcggaatctcccttaaggtcattcaggaggacggcctgtccgtagaacagaagagactccattcctccgcccagaagcttttttctgccctgagtcagcctgctggggagaagcggtcgagtctgaagctgctttcagcaaagctcccagaacttgactggtttctgcagcacttcgcgatatcttctatatcccaggagcccgttatgcgcactcatctacctgtgctgctgcagcaggcagagattaacacaacacataggatagagtccgataagatggacggcgtctctcctaaccacggacagctttag

SEQ ID NO: 112254 - DNA, 615 bp, synthetic construct
  misc_feature 1..615: note = Description of Artificial Sequence: Synthetic coding sequence
  source 1..615: mol_type = other DNA
atgggcgaagcagaagtggggggagggggagccgctggtgataaagggcccggggaggccgcaaccagtccagctgaagagaccgtggtctggagccccgaagtggaggtttgtctgtttcacgctatgctgggtcataagccagtcggggtgaaccggcacttccacatgatttgcatccgggacaagttttctcagaacattggacgacaggtacccagtaaggtaatctgggaccacctctcgaccatgtacgacatgcaagcccttcatgaatctgaaatcctccctttccctaatccagagcgaaattttgtgctgcctgaggaaattatccaggaggtgcgtgaaggcaaggttatgatagaggaagagatgaaagaagagatgaaggaggatgtggacccgcacaacggagcggatgatgttttctcctcttcaggaagcctgggaaaggcatccgagaagtctagcaaagataaggagaaaaactcatctgacttagggtgcaaagagggcgcggacaagcggaagaggtctcgcgttacagacaaagtcttgacagctaactctaatccgtcatcaccaagcgccgctaagcggaggaggacgtag

SEQ ID NO: 112255 - DNA, 1278 bp, synthetic construct
  misc_feature 1..1278: note = Description of Artificial Sequence: Synthetic coding sequence
  source 1..1278: mol_type = other DNA
atgtatccctctaataaaaagaaaaaggtatggagggaggagaaggagaggctcctgaaaatgacgctcgaagaacgaagaaaagaatacctgcgagactacatcccactcaactctattctgtcctggaaagaggagatgaagggaaaagggcaaaatgacgaggaaaatacacaagagaccagccaggttaagaagagccttaccgagaaagtcagtctgtatagaggcgacatcactctcctggaagtggacgccatcgtgaatgcggctaacgcatcactgttaggtggaggcggagtggatgggtgcattcatcgggccgctggaccatgtttactcgccgaatgtcgcaacctcaatggatgcgatacagggcatgccaagattacctgtgggtatgaccttccagcaaagtatgtgatccatactgtgggtccaattgcgcggggccatatcaacgggagccacaaagaggacctggccaactgttataaatcctcccttaaactcgtgaaggagaataacattaggagcgttgctttcccctgcatctcaacaggaatttatgggttcccaaacgagccagccgctgtaatagctctcaacacaatcaaagagtggctggccaagaaccaccacgaagtggaccgcatcattttttgtgtatttctcgaagtcgacttcaagatttacaaaaaaaagatgaacgagttctttagcgtggatgataataatgaggaagaagaggacgtggagatgaaagaggacagcgatgaaaacggccccgaagaaaagcagtccgttgaggaaatggaggagcagagccaggatgccgacggagtcaatacagtcaccgtccctgggcccgcctctgaagaggctgtagaggactgtaaagatgaagacttcgcgaaagatgaaaacataactaagggtggtgaagtgacagatcactccgtccgcgatcaagaccaccccgacggacaggaaaatgactcaaccaaaaacgaaattaagatagagaccgagtcccagtcatcttatatggaaactgaggagctctccagcaaccaggaagatgcggtgatcgtagagcagcctgaggtgatccctctgaccgaagaccaggaagagaaggagggagagaaggcccccggggaggatacgccaaggatgcctggcaagagtgaggggtcgagcgatcttgaaaacacccccggacccgacgccggagctcaggacgaggctaaggagcagcgtaacggcactaaatag

SEQ ID NO: 112256 - DNA, 1248 bp, synthetic construct
  misc_feature 1..1248: note = Description of Artificial Sequence: Synthetic coding sequence
  source 1..1248: mol_type = other DNA
atggcttttttgatgcacctactggtgtgtgtctttggcatgggcagctgggtaacaatcaatggcctctgggttgaacttcccttgctggtaatggaactccccgagggttggtatctaccttcctatctgactgttgtgatacagctggccaacattgggcctttactggtgactttgttgcatcatttccggccatcctgcttatccgaagtccccatcattttcacattacttggagtaggcactgtgacatgcattattttcgcattcctatggaatatgactagctgggtactggatggccatcacagtatagccttcctcgtcctgaccttttttctcgcactggtggactgtaccagctctgtgacattcctgccctttatgtcacgactgcctacctactatctgacaactttcttcgtgggcgaaggactttcaggtctgctccctgcattggttgccctggcgcaaggttccggactgaccacatgcgttaacgtgactgagatttctgacagcgtcccttcaccagtacctactcgcgaaaccgatatcgcccagggggttccacgggccttggttagcgccttgcctggtatggaggcacctctgtcgcatctagagtctagatacttgcccgcccatttcagcccacttgtatttttcttgctattgagtataatgatggcatgttgtctagttgcctttttcgtgctccagcgtcaaccgagatgttgggaggcctcagtggaggacctgctcaatgaccaggtaactctgcattcaatacggcccagagaggaaaatgatttaggtcccgctggcaccgtggactctagccagggccagggatacctcgaggagaaggctgccccttgctgcccagcccaccttgctttcatttacaccctggtcgcctttgtgaacgctctgactaacggcatgctgcctagcgtgcaaacttatagttgtctcagctatggccctgtagcctaccatttggctgccaccctgtctattgtggcgaatccactggcgagccttgtctcaatgtttctgccaaatcgaagcctgctcttcctgggggtgttaagtgtgctggggacgtgtttcggtgggtataatatggcaatggccgtcatgtcaccttgtcctctgttacaagggcactggggcggagaggtgctgattgtgtccatacgacccgtgggtctcctgccactccggacgcctcacccctag

SEQ ID NO: 112257 - DNA, 1038 bp, synthetic construct
  misc_feature 1..1038: note = Description of Artificial Sequence: Synthetic coding sequence
  source 1..1038: mol_type = other DNA
atgttgcgtcccgccgggctctggaggctgtgtcgaagaccatgggcagcccgtgtaccggccgagaacttaggacgtagggaggtcactagcggagtgagccctcgaggatctacaagccccaggaccctgaacatctttgatcgtgatctcaagcggaaacagaaaaactgggccgccagacagccagaacctactaaatttgactatctaaaggaggaagtgggttcccgaattgctgacagagtatatgatatacctcggaactttccgctggccttggatcttgggtgcggtagggggtatattgcacagtacttgaataaggaaactatcggtaagttttttcaggctgacatcgctgagaacgctctaaaaaacagctcagagacggaaataccaaccgtgtcagtgcttgctgacgaggaattcctgcctttcaaagaaaatacctttgatctggtggttagctccctgtcactccactgggtgaacgacctgccacgggctctggaacagatccactacatcctgaaaccagatggtgtgtttattggggcaatgtttgggggcgacacgctgtatgagctcagatgttcactgcagctggctgagactgagcgcgagggagggttcagcccacacatttcccctttcaccgcagtgaatgatttaggacatttactgggccgagccggcttcaacacactcactgtcgacacggatgaaatacaggtgaattacccgggtatgtttgagctaatggaagatctccagggaatgggcgagagcaactgcgcctggaaccggaaggcactgctgcatcgggacactatgctcgcggccgcagcggtgtatcgggaaatgtataggaacgaagatggcagcgttcctgcgacgtatcaaatctactacatgatcggatggaaataccacgagagccaagctaggcccgccgagcgcggctctgctacagtgagcttcggagagctgggaaaaattaacaacttaatgccccccggcaagaagagccagtag

SEQ ID NO: 112258 - DNA, 954 bp, synthetic construct
  misc_feature 1..954: note = Description of Artificial Sequence: Synthetic coding sequence
  source 1..954: mol_type = other DNA
atgctgagacctgctgggttatggcgattatgcaggcggccttgggcagcccgggtcccggctgagaacctcgggcgtagagaggttacctctggcgtttccccccggggatccaccagtcctcggaccttgaacatcttcgacagagatttgaaacggaagcaaaagaattgggcggcaaggcagccagagcccacgaaattcgactacttgaaagaagaagtaggaagccggatcgccgatagggtatatgatatccctcggaacttcccactggccctcgacctcggttgcggtcgggggtacatagcgcagtacttgaataaactgcagttattccactgtcgaaaattactcgaatcctttagcaagcttacactacaaaagatgctatgtctgcactgggttaatgatttgcctcgcgctcttgaacagattcactatatactgaaaccagatggggtctttatcggagctatgttcggaggcgatacgctgtacgagctcaggtgctccttacaacttgccgaaactgaacgggagggcgggttttcacctcacatttctccatttacggcggttaacgacctcggccaccttctcggtagggctggttttaacaccctgaccgtagatacagatgaaattcaggtgaattaccccggcatgtttgaactgatggaggatctccagggtatgggcgagtccaattgcgcatggaacaggaaggcgcttttacatcgcgacaccatgctcgctgctgcagctgtctacagggaaatgtatcggaacgaagatggtagtgtccccgctacctaccagatatactatatgatcggctggaagtatcatgaaagccaagctaggccggctgaaagaggatctgcgactgtgtctttcggagagctcggcaaaatcaataatctcatgccaccgggcaagaaatcccagtag

SEQ ID NO: 112259 - DNA, 804 bp, synthetic construct
  misc_feature 1..804: note = Description of Artificial Sequence: Synthetic coding sequence
  source 1..804: mol_type = other DNA
atgcttaggccagcgggcttgtggagactatgccggaggccttgggctgcccgcgttcccgcagagaacctgggcaggcgtgaggtgactagtggtgtgtctccacgaggatcgaccagtcctcgcactctgaatatcttcgacagagatttgaaaaggaaacagaaaaactgggcagcgcggcaacctgaacccacgaaattcgactaccttaaagaagaggtgggctcgaggatcgcagatagagtgtatgatatcccacgcaacttccccttggcccttgatctaggttgcggaagaggatatatcgcacagtatctaaacaaggagaccatagggaagttttttcaagcagacattgcagagaacgccctgaaaaactccagcgagaccgaaatacccacagtaagcgtcctagcagatgaagagttcttgcccttcaaagaaaacactttcgacttggtggtaagcagcctttctttgcattgggtgaatgatctcccaagggcgctggaacagatccactatatattaaagccagacggcgtctttattggggctatgtttggaggcgatacactgtatgaattgagatgctctcttcagttagccgagaccgagcgggagggtgggttctccccccacatttcgccctttactgccgtgaacgacctcgggcatctcctcggacgggccgggtttaataccctgacggtggacaccgacgaaatccaggtgaactacccagggatgttcgagcttatggaggatctgcaggagcaaaaatcccgcatgcttacatag

SEQ ID NO: 112260 - DNA, 771 bp, synthetic construct
  misc_feature 1..771: note = Description of Artificial Sequence: Synthetic coding sequence
  source 1..771: mol_type = other DNA
atgaaactcacccggaaaatggtgctcaccagggctaaggcatcagagctgcatagcgtgcggaagttgaattgctggggatctcgactgaccgatatcagcatctgccaggaaatgcccagtctcgaagtgattactttgtctgtaaacagcataagcacgctggagcctgtgagcaggtgtcagcgactgagcgaactgtacctcagacgaaacaggattccctcgctggctgaattgttctatctgaaagggctgcctcgattacgtgtgctgtggctggccgaaaacccttgttgtggtacatcccctcataggtatagaatgaccgtgctgagaacactccccaggctgcagaagctggacaatcaggccgtcacagaggaggaactgagcagagctctgtccgagggcgaggaaatcacagccgcacctgagcgcgaaggcactgggcacggtgggcccaaattatgttgcaccttgagcagtttgtccagcgccgccgaaaccggcagagatcccctggactcagaggaagaggctacttcaggggcgcaagatgagcgtggtctgaaaccaccatctcggggccagtttccatctctttccgctagggatgcctccagttctcacaggggaagaaatgtactgactgccattctgttacttctgcgagaactcgatgcggaagggttggaggccgttcagcagacagtagggagcagattgcaggcactgcgcggggaggaagtacaggagcatgccgagtag

SEQ ID NO: 112261 - DNA, 654 bp, synthetic construct
  misc_feature 1..654: note = Description of Artificial Sequence: Synthetic coding sequence
  source 1..654: mol_type = other DNA
gtcactcaggggccccagggcctgagggcgtcagggagatcttgtgtcggcccctttctatcccaccttggaagggatcgaacccctggggtcctgactgagctccggtgcgtggtgcccgctagactcacagcgctggagcggagtagaaaacctcgagggcgcggacggggccggtatattaccctattacccgtgcccgaggcagacccaattttagaacgggttccacagcctgaattttgctcctgcgtgaactccatctctacactcgagcctgtatcacggtgtcaacgtctttctgaactctacctgaggagaaatagaatcccatctctggccgagttgttctatcttaagggactgccccggctgcgggtgttgtggctggctgaaaacccttgctgtgggacaagtccacataggtacaggatgacagtccttcggacgttgcctagactgcagaaactcgataaccaggctgtaaccgaggaagaactttcaagagcactcagtgagggcgaagaaattaccgcggcacctgagagggaggggactggccacgggggtccgaaactttgttgcactctttcctcactgtcctctgctgccgagactggccgagatccactagatagcgaagaagaagcatag

SEQ ID NO: 112262 - DNA, 1128 bp, synthetic construct
  misc_feature 1..1128: note = Description of Artificial Sequence: Synthetic coding sequence
  source 1..1128: mol_type = other DNA
atgaagctgacccgtaagatggtgctaacgcgcgctaaagccagcgagctacacagcgtaaggaaactcaattgctggggatctcggctcaccgacatctccatctgtcaggagatgccatccttagaagtgatcaccctgtcagtaaatagcatctccacccttgagccagtgagcagatgccagcgcctgtcggaactctacctgcggagaaatcgcatccccagcctggcggagctgttctacctaaagggactgccccggctgcgagtcctctggctggccgaaaatccctgttgcggaacatctcctcatcgttaccgcatgaccgtgctcaggactcttccccggctccaaaaactggataaccaagctgtcacagaggaagagctgtcccgcgccctgagcgagggtgaggagatcaccgctgcccccgagagggagggcaccggtcacggggggcccaaactgtgctgcactctctcatcactgagcagtgcggctgagacaggacgagatccccttgattcagaggaggaggctacaggagcccaagatgaaaggggactaaaaccaccatcccggggtcagttcccatccctgtctgcacgcgacgcgagtagctctcacagaggcagggtttctggcggcccactgggcgccgcagcggcctctgcccattgtacccattgcaccgagactgtggggagggaacacggcgcgtctcagggtcccgtcgggagagaacacggtgcctcacaaggcctcgaggagctctgtcccaggggttcctgtgtctgtggcagcgtgaatgcccacacccgcgtcacccgagcaccacatggagcggtccttgcacctcagccgcttttgctatcttggtcagtggagtgcggccctggcccctgttgggctgaaggcaatcggtctcatgtggaggaggtcccacacactaggccgcaggccggactcctgtgttccgacagcccatcagtgcctaacgttctgaccgcaatacttctgctgctgcgtgagctggatgcagaaggattggaggccgtgcaacagaccgttggtagtaggctgcaggctctccgcggagaggaagttcaggagcacgcagagtag

SEQ ID NO: 112263 - DNA, 807 bp, synthetic construct
  misc_feature 1..807: note = Description of Artificial Sequence: Synthetic coding sequence
  source 1..807: mol_type = other DNA
atggccgccgtgcgggtactcgtcgcttcacgcctcgccgcggcttcagcgttcacctccctgagccccggaggaaggactccttcccagagagcagctctccatctgtccgtgccacgaccggccgccagggtggcgttggtccttagtggctgcggtgtatatgatggcacagagatccatgaggcgagcgccattttggtccacttatcacgcggaggggctgaggtgcaaatctttgcgcctgacgtcccccagatgcacgttatcgatcacacaaagggtcaaccttcagagggcgaaagccggaatgtgttgacggaatcagcacgaatcgctagaggaaaaattactgatttggccaacctgagcgccgccaatcatgacgccgccatcttccccggtggtttcggtgccgccaagaatttgtccacatttgccgtggatggaaaggattgcaaagttaataaagaagtcgagagggtgttgaaagaattccaccaggctggaaagccaattggcctctgttgtattgccccggtcctggcggcaaaagtactccgaggcgttgaggttactgtggggcacgagcaggaagagggggggaaatggccctatgcaggaaccgccgaggctatcaaagctctgggcgcaaaacattgcgtgaaggaggtcgtagaagcccacgtggatcagaaaaataaggtcgtgacaactcctgcgtttatgtgtgagactgcactgcattatattcacgacggcatcggggccatggttcggaaagtattagaacttacgggcaagtag

SEQ ID NO: 112264 - DNA, 714 bp, synthetic construct
  misc_feature 1..714: note = Description of Artificial Sequence: Synthetic coding sequence
  source 1..714: mol_type = other DNA
atggcggctgtgcgagttctggtcgcctctagactcgccgctgccagcgcgttcacctccctgtcgccagggggtcggacaccatcccagcgcgccgcactccatctgagtgttcccaggccagctgccagagtcgctctggtgctcagcggatgtggcgtctacgatggcactgaaatccatgaggctagcgctatactggtccacctttcccgtgggggagccgaagtgcaaatctttgcccccgatgtgccacagatgcacgtcatcgatcacaccaaggggcaaccatcagaaggggagtccagaaacgttttgaccgagtctgctcggatcgcccgggggaagattacggatcttgccaatcttagcgcggccaaccatgacgcggcaatattccccggcgggttcggtgccgcaaagaaccttctgtgttgcatcgcaccagtgcttgcagctaaggtattgcggggcgttgaagtgacagtgggacacgaacaggaggagggaggaaaatggccgtatgcaggcaccgccgaggctattaaagcactgggcgccaagcactgcgttaaggaggtagtagaggcccacgtggaccagaagaataaagtggtcactactcctgcgttcatgtgcgagactgctctgcattacatccacgacggtatcggcgccatggtccgcaaggtactggagctcacgggtaagtag

SEQ ID NO: 112265 - DNA, 1023 bp, synthetic construct
  misc_feature 1..1023: note = Description of Artificial Sequence: Synthetic coding sequence
  source 1..1023: mol_type = other DNA
atggccgagggtggcgagctaatgtctagactcctgtcagagaatgctgaccttaaaaaacaggtgagactgctaaaagaaaatcaaatgctgcgcagacttctatcccaaagttgccaagaaggaggaggtcacgatctcctgccccctagggcccacgcctatccagaggcaggcagcccaggatcaggggtacctgacttcggccgctttaccagcgtagccgataccccatcccaattgcagacgtcttcgttggaggacctcctctgcagtcatgcccccctgtcttcagaagacgacacatcaccgggctgcgctgcccccagccaggctcccttcaaagcgttcctgtctccacccgagccccactctcatcgaggaaccgaccgtaagctgtcccctcttttaagccccctgcaggactccctggtggacaagacgctgctggagcctagggaaatggtacgccctaagaaagtgtgcttctctgaaagtagtctgcctacaggcgacaggacccgtcggtcatattatcttaatgaaattcagagtttcgcaggtgccgaaaaggacgcgagagtcgtcggcgagatcgcttttcagcttgataggagaattctggcatacgtttttccaggtgtgaccaggctgtatggctttaccgtggccaacataccggaaaaaatcgagcaaacctcgaccaagtcacttgacggaagcgtcgacgagaggaaactacgagagctaacacaacggtatttagccctctccgctcgattggaaaagctgggctattcgcgcgacgttcaccctgccttttcagaatttctcatcaatacttacggaatcttgaagcagcgcccggatctgcgcgcaaacccactgcactcatctccagctgctttgcggaagctggtgattgatgtggtcccaccaaaattcttaggcgatagcttgctgttgctgaactgcctctgcgagttaagtaaggaagatgggaaacccttgtttgcctggtag

SEQ ID NO: 112266 - DNA, 561 bp, synthetic construct
  misc_feature 1..561: note = Description of Artificial Sequence: Synthetic coding sequence
  source 1..561: mol_type = other DNA
atggtcagacccaagaaagtgtgcttctcggaatctagcctgccaactggtgatagaacacgtcggagctattacttgaacgaaatccagagctttgccggagcggagaaagacgcacgcgtggtaggtgagatcgctttccaattggacagaagaattctggcatatgtttttccgggcgtcacgaggctgtacggttttactgtcgcgaatatccctgagaagattgaacaaactagcacaaaatccctggatggcagtgtggatgagcgcaaattacgagagctgacccaacgctacctggccctaagtgccagactggaaaagctgggctactcacgggatgtccatccagccttttccgagttcctgatcaatacttatggaattttaaagcagaggcctgacttgagggcaaaccctcttcattctagccccgccgccttgagaaagcttgtgattgatgtggtcccacccaagtttcttggtgactcactcctcctgctgaattgcctgtgcgagctctcaaaggaggacggtaagcccctgttcgcctggtag

SEQ ID NO: 112267 - DNA, 438 bp, synthetic construct
  misc_feature 1..438: note = Description of Artificial Sequence: Synthetic coding sequence
  source 1..438: mol_type = other DNA
atggtccaactcattgctcccctggaggtcatgtggaacgaggcagcagacctgaaacccctggcactgtcgagaaggttggaatgcagtggcggcatcatggcccactactcccctgatctcctaggccctgaaatggaatcacgttatttcgctcaggtgggtctcgaacatctggcaagcagcagccctcctgcctttggttttctgaaatgcctggattattccatctctgtgctgtgctccgccaccagcctcgccatgctggaggacaatcctaaagtaagtaaattggctacaggcgactggatgctgacgttgaagcccaaatcgattaccgtccctgtggagattcccagctcacctctagccggacgaccgcgaaggcggcggcggctacggtgcccccatgatcagcattcacaggggacttgttag

SEQ ID NO: 112268 - DNA, 429 bp, synthetic construct
  misc_feature 1..429: note = Description of Artificial Sequence: Synthetic coding sequence
  source 1..429: mol_type = other DNA
atgatctctactgcgagagtccctgcggataaaccggtgagaatagcttttagcttgaacgacgccagcgatgatactcccccggaggatagtattccgttggtttttcccgaattagatcagcagctgcagccactcccaccatgccacgactctgaagaatcaatggaggtatttaagcaacattgccaaatcgcagaggagtaccacgaggtgaagaaagagatcacactgcttgaacagaggaagaaggagctgatagccaaactcgaccaagccgaaaaggaaaaagtcgacgcagccgaattggtcagagaattcgaagctttgactgaggaaaaccgaaccctgaggctcgcgcagagtcagtgcgtggagcagttagaaaaactgagaatccagtaccagaaaaggcagggatcgagctag

SEQ ID NO: 112269 - DNA, 729 bp, synthetic construct
  misc_feature 1..729: note = Description of Artificial Sequence: Synthetic coding sequence
  source 1..729: mol_type = other DNA
atggtgcagctgatcgcaccgctggaagtcatgtggaacgaggcagctgacctgaagcccttagcgctctctcgtcggttggagtgctcaggcgggattatggcgcactacagtcccgacctgctgggacccgaaatggagtctcgctattttgcccaggtagggctggagcacctggcttcaagctctcctcctgcttttggctttctgaagtgtttagactatagcataagcgtgctgtgttctgccactagcctcgcaatgttagaggataatcccaaggtctctaagcttgctacaggggattggatgctgacccttaaacctaagagtatcacagtaccggttgagataccatctagtcctctggatgacacaccgcctgaggactccatacctctggtgtttcccgagctcgatcagcagctccagcctctccctccttgtcacgattcagaagaaagcatggaggtttttaaacagcactgtcagattgcagaggagtaccacgaggtaaaaaaagaaattacactgttggagcagcggaagaaggagctaatcgctaagctggatcaagctgaaaaagagaaggtcgacgctgcggagttggtgagggaattcgaggccctgaccgaagagaacaggactctgaggttggcccagtcacagtgcgtcgagcagttggagaaactgcgtattcaatatcagaagcgccagggatcctcatag

SEQ ID NO: 112270 - DNA, 429 bp, synthetic construct
  misc_feature 1..429: note = Description of Artificial Sequence: Synthetic coding sequence
  source 1..429: mol_type = other DNA
atgatttctaccgcacgcgttcctgcggataaaccggtacggatcgcgttcagcctgaacgacgctagcgacgataccccccccgaagattctatccccttggtgttcccagagctggaccaacagctgcaaccactcccaccttgtcatgattcagaggagagtatggaggtatttaaacagcactgtcagattgctgaggaataccacgaggtgaagaaagagatcacactgctggaacaacggaagaaggagcttatcgcaaaattggatcaggccgagaaggagaaggtggacgcagctgagttggtgagagaattcgaagcgctgacagaagagaatcgaaccctcaggctagcccaaagccagtgtgttgagcagttagagaagctacgcattcagtaccagaaaagacagggtagctcgtag

SEQ ID NO: 112271 - DNA, 429 bp, synthetic construct
  misc_feature 1..429: note = Description of Artificial Sequence: Synthetic coding sequence
  source 1..429: mol_type = other DNA
atgatctccactgcgagagtgccagccgacaaacccgtgcggatcgctttcagtctcaacgacgcttccgatgatactcctcctgaagactctatccccttggtgtttcccgagcttgaccagcaattacagccgttgccaccctgccacgactctgaagagtccatggaagtattcaagcagcattgccaaatcgctgaggagtaccatgaagtgaagaaagaaatcaccctcctggaacaacggaagaaggagctcattgcaaagctcgaccaagcggagaaagagaaggtggatgccgcggagctggtccgagaatttgaggcgctgaccgaagagaacaggacacttcggctggctcagagtcaatgcgtggagcaactggaaaagttaaggatccagtatcaaaaacggcagggcagcagctag

SEQ ID NO: 112272 - DNA, 429 bp, synthetic construct
  misc_feature 1..429: note = Description of Artificial Sequence: Synthetic coding sequence
  source 1..429: mol_type = other DNA
atgatctcgacagctcgggtacccgcggacaagccagtgagaatcgcattctccctgaacgacgcttcagacgacacacctcccgaggactcaattccgctagtgttcccagaactcgaccagcagctacaaccgctgcctccctgccatgatagtgaagaatctatggaggtatttaaacagcattgccaaatcgcagaagagtatcatgaagtgaaaaaagagattacgctgttggagcaacgaaagaaggagctgattgctaagctggatcaggccgagaaggagaaggtggatgccgccgagttggtgcgcgagtttgaggccctcaccgaagaaaacaggaccctgcgactggctcagtctcaatgcgtggagcagctcgaaaaactacggattcagtaccagaaacgacaaggcagctcctag

SEQ ID NO: 112273 - DNA, 429 bp, synthetic construct
  misc_feature 1..429: note = Description of Artificial Sequence: Synthetic coding sequence
  source 1..429: mol_type = other DNA
atgatcagcaccgcgagggtcccagcggacaaacccgtgcgcatcgccttctcattgaatgatgcaagcgatgacacaccgccagaagactccatcccacttgtgttcccagagctcgatcaacagctgcaaccacttcctccctgccatgactctgaagagagtatggaagtgtttaagcagcactgccagatagccgaggaataccatgaggtgaaaaaagaaattacgctactagaacagcggaagaaagagttaatcgcgaagttagatcaggccgagaaggagaaggtagacgccgctgaactggtccgggaatttgaggccttgaccgaagaaaaccggacgctacgtctcgcacagtctcagtgtgtagagcagctggaaaagttgcgtatacagtaccagaagcgccagggaagctcatag

SEQ ID NO: 112274 - DNA, 429 bp, synthetic construct
  misc_feature 1..429: note = Description of Artificial Sequence: Synthetic coding sequence
  source 1..429: mol_type = other DNA
atgatcagcacagcacgtgttcccgcagacaaacccgtgcggattgcctttagtctcaatgatgcctccgacgatacccctcctgaagatagtatcccactggtgttcccggagttggatcagcagttgcagcccctgccaccttgtcacgactccgaggaatcaatggaagtattcaagcagcactgccaaatcgccgaagagtatcacgaggtgaaaaaagagattactctccttgaacagcgcaagaaagaactgatcgcaaagctcgaccaggccgagaaagagaaagtggacgcagccgagttggtcagagagttcgaggctttgaccgaggagaacaggacactgcggctcgcccagagccagtgcgtggaacaattggagaaattgagaatccagtaccagaaaaggcaggggtctagctag

SEQ ID NO: 112275 - DNA, 729 bp, synthetic construct
  misc_feature 1..729: note = Description of Artificial Sequence: Synthetic coding sequence
  source 1..729: mol_type = other DNA
atggtgcagctgatagccccactcgaagtgatgtggaacgaagcagctgacctcaagccactggctctttcacgccgcctcgagtgctccgggggcatcatggctcactattcgcctgacctactgggcccagagatggaatccagatactttgctcaggtcggtttggagcacttagcctctagcagtccccctgcatttggattcttgaagtgtctggattactctatcagcgtgctgtgctccgccactagtctggccatgctggaggataacccgaaagtgtctaagttggctaccggggattggatgctaaccctgaagcctaaatcaattacggtgcctgtagagattccatcttctccccttgatgacacacctcctgaggatagtattcctcttgtttttcccgaacttgaccagcagcttcagccccttccgccttgccacgatagtgaagaatccatggaagtgttcaagcagcactgccagatcgccgaggagtaccatgaggtcaagaaagagattacacttctagaacagaggaaaaaagaactgatcgcaaaactcgatcaggctgagaaggaaaaggtagatgctgccgagctagtgagggaattcgaagcccttactgaagaaaatagaacactgcgtcttgcccaaagccagtgtgtggagcaactggaaaagctgaggatccaataccagaagcgtcaagggagtagctag

SEQ ID NO: 112276 - DNA, 135 bp, synthetic construct
  misc_feature 1..135: note = Description of Artificial Sequence: Synthetic coding sequence
  source 1..135: mol_type = other DNA
atggtccagcttatcgcgcctttggaggtcatgtggaatgaagccgcggacctgaaacccctcgctctttctcggaggcttgagtgcagcggtggaattatggcccactactccccggacctcctgggaccctag

SEQ ID NO: 112277 - DNA, 285 bp, synthetic construct
  misc_feature 1..285: note = Description of Artificial Sequence: Synthetic coding sequence
  source 1..285: mol_type = other DNA
atgatcagcacggccagagtgcctgcagacaagccagtgcggattgcctttagtcttaatgacgctagtgacgacacccctcccgaggacagtatacccctagtctttccagaactggatcaacagctgcagccgctgcctccatgtcacgacagcgaggagtctatggaagtatttaaacaacattgtcagattgcagaggaatatcacgaagtgaagaaagaaatcaccctgttggagcagaggaaaaaggagttaatcgcaaagctcgaccaggcggagtag

SEQ ID NO: 112278 - DNA, 411 bp, synthetic construct
  misc_feature 1..411: note = Description of Artificial Sequence: Synthetic coding sequence
  source 1..411: mol_type = other DNA
atgcttgtgagcagttctagcctcaccccctttccccctgtgcgtacggcagatgacacccccccagaggattccatacccctcgtctttcctgagttggatcagcagctgcagccactgcccccttgtcatgatagtgaggaatccatggaggtgtttaagcaacactgtcagatcgctgaagagtaccacgaggtaaagaaagagattacccttttagagcagcgaaagaaagagttgatcgctaaactggaccaagccgagaaggagaaggttgacgcagcagagctggtgcgagaatttgaagccttgactgaggaaaaccggacgctgcgcctggcacagtctcaatgtgtggagcagttagagaagctccgcatccaataccagaaacgacagggcagtagctag

SEQ ID NO: 112279 - DNA, 786 bp, synthetic construct
  misc_feature 1..786: note = Description of Artificial Sequence: Synthetic coding sequence
  source 1..786: mol_type = other DNA
atggtggtggtggctgccgctccgaatccagccgatggtaccccgaaggtgctgctgctcagcgggcagcccgcgtctgccgcgggggcccccgccggccaggcattgcctttgatggtgccggctcagagaggcgcatctcctgaggccgccagcgggggactgccacaggccagaaagcgtcaaagattaacccatctgtctccagaggagaaggcgctccgccgcaagctaaagaacagagtcgctgctcagaccgctcgggatcggaaaaaggctagaatgtctgaattggagcagcaggtggtagatctcgaagaagagaaccagaaattgctgctggaaaatcagcttctgagagagaagacgcatggactcgtggtggagaatcaagagctgcgccagcgacttggtatggacgccctcgtcgcagaagaagaggccgaggccaagggaaacgaggtacgccctgtggccgggtccgccgagtcggctgccctgagactgagggcccccctgcagcaggtgcaagcccagcttagcccactccagaatatttctccatggatcctggctgtcttgacgctccagattcaaagcctgatatcctgttgggccttttggacgacgtggacccagagttgctcatccaacgctctgccacaaagtctgccagcttggcgcagctcccagcgatctacgcaaaaagacccagtcccttatcagcctcccttcttatgtcagtggggcaggcatcaaccatcctggaaaccactcatgaactag

SEQ ID NO: 112280 - DNA, 528 bp, synthetic construct
  misc_feature 1..528: note = Description of Artificial Sequence: Synthetic coding sequence
  source 1..528: mol_type = other DNA
atgagcagatcttacaacgatgagctgcagttcctggagaagatcaataagaactgctggaggattaagaagggattcgttcccaatatgcaagtggagggcgtgttttatgtgaacgatgccttagagaaactgatgttcgaagagctgagaaatgcttgccggggcggcggagtaggcggctttctccccgcaatgaaacaaatagggaacgtagcggctctgccgggaattgtccacaggtctattgggctccctgatgtgcacagtgggtatggatttgccatcggaaatatggccgccttcgacatgaacgaccctgaagcggtcgtaagccccgggggggtcggcttcgatatcaattgtggagtcaggctgttacgcaccaacctggacgagagcgatgttcaaccagtaaaagagcagctggctcaggctatgttcgaccatatcccagtgggggtcggttccaagggtgacatgatgagggccgttcattgtcccgagcagaacctggacgtgatctag

SEQ ID NO: 112281 - DNA, 2304 bp, synthetic construct
  misc_feature 1..2304: note = Description of Artificial Sequence: Synthetic coding sequence
  source 1..2304: mol_type = other DNA
atgagtcacgccgttaccatcgaggagccacaggcacagccccaggtgtctcagactagatatagggaaagatcccgtgcagggtcccacataagctctaaccgagcttacgatttcctttacgatccactgtttatcgtgagttcagaaaaagaccatacccaagcgaacattcaggcaacattgattagatcacgtctccgaaaggttccgagatttaagacaatgttctctaatctcattcattacccacgctacagtctctattggtcaaagagtgatccggtgcccccttttatctcccgggagtggaaaggacacaaagaaaaacaccgtgaagccctgcgacaactgacaaccacagatgcgtctttccaaatgccaaaagaagtgtacgaagatccagaagttacgggaaaaaaccgctacaagtatttcgaaagacctttcctgcctttttttcagcagatgccattcaatgttgtgtatgctgtgtccaaagccgaaccctacactttcccccctacctccacaaagcatctgagcatcccaagtaaatccacagtcggtacacagacggactacagagatgcagacgtgcagaccgatccttactcagccgaatacgtggtgtgccaggattctatacctgaactgctgaccctcgctacccttacctgggggcgggggctacccgccgggcaggccgaggtggaaatgatcgaaagggctagagaaaaacgcgcgtgggaggcaagtctacctgctctgagcgacacctcacaattcgagaagcggagaaagatgatgaatgagatggagcgcaaagagtgggcgtttagagagcaggagatcgaaaagctccaagaaatccgcctggaagtgctgaaggagcttttgcgaaaacgcgaggagaaccaaaatgaggtgaacatgaaacacttgaatgccagatggagcaagctccaggaaggcaaggaagccaaaatggcaaaaattcagagaactcacgtttccacgattaggaagcttgttggtaaaagaaagaacattgagggtaaactggaaaggaggaacattattaaggattattccgactacgcaagccaggtctacggccctttatcccgcctggggtgtttccccgataacaactccgaggacttcgttgtgaagaattattatctcaacacatatgaggggctcgtggaactggaatcgtgcctgcccgactttgtcacacagccacaaattcgagcccccaagcccaaggtgattactaccaaagcgggattccttaagcgggcagcccggctggactacgagttagctgaagtgcacaaggcccttttggataaaaagaataaggtgcttgaagttaaaaagccacctagattcttacagaggaatccaattccacagccacgcttgcctactccgactctcgaaatgacgagcaacgaggaagaggagatggagatggcagtgatctatctgcagaagcttctgcgaggacgtgtagtgcagaatatgatgtttgagggcaaagagaagaggttagagcttatccaggaactgagaacctgccatgcccttcaggaggatgagaagctggttaagaaagccgagaaacaggtgacgctggcactgcaaagacaacgtaacctgcacgagcacaaggtctcactagtcgaaaatcatttggccgggctggagggccgagcccttgccgatatgtttgactttctgtcgaaggaattagtgcggcttcaagaggagcgccgcatccatgcctttgttatgttggctgagagacagaggagggtgagggaagctgaggaatctggacgcagacaggtcgagaagcagaggcttcgcgaagaggatgagatctttaaagaagttgttaaggttcatcattcgaccattagttcatatctggaagacattattttaaacaccgaggcgaataccgcagaagagcaagccagggccgagatcgagaaaatggcggaaaagatcaacgacatcgcttatgagatggaatctcgcagaacctatctgcagtctgaagagatagtagccgagttggtgtactcattccttatccccgaagtccagaaatattttgtgaaagaaaaagtacgcaatgctcagagaaagcacattctcgctgcacaccaaataattcactcctacactgagtctatggtgcagaagaagctcacagaaggagagcaggacgaggcgtctaacgccgccatgcttctcgagaaagaaacccagaatgagaataattcatag

SEQ ID NO: 112282 - DNA, 564 bp, synthetic construct
  misc_feature 1..564: note = Description of Artificial Sequence: Synthetic coding sequence
  source 1..564: mol_type = other DNA
atgagccatgctgtgaccatagaagaacctcaggctcagccgcaggtgtcccagacccggtatagagagcgctctcgagctgggagtcacatcagttctaaccgcgcctatgattttctctacgatccactttttattgttagctcggaaaaagaccacacgcaggcaaatattcaggctacattgatccggtcccgcctccggaaggtccctcgcttcaagaccatgttctcaaaccttatccactatccacgctacagtctgtattggtccaaatcagatcccgtgccaccctttattagcagagagtggaaaggacacaaggagaagcatcgggaggctctgagacagcttactacgaccgacgcctcattccagatgccgaaagaagtctatgaggacccagaggtcacaggcaagaataggtacaagggtcagaaccataccctgttcctacttctgctgttatcaacatacccctcgctccagagcttgctctgggcacttcgcctaattatcggaatgctcacctttaaacaaatacatactctgcaaaacatgtag

SEQ ID NO: 112283 - DNA, 717 bp, synthetic construct
  misc_feature 1..717: note = Description of Artificial Sequence: Synthetic coding sequence
  source 1..717: mol_type = other DNA
atgtctcacgcagtgaccatcgaggaaccccaggctcagccccaagtaagccagacccgctatagagagaggtccagggccggatcccacatttcaagtaatcgcgcttacgacttcctctacgacccactgttcatcgtaagctcagagaaagaccacacgcaagcaaatatacaggcgaccctcatcagatctcgccttcgaaaagttccaaggttcaaaaccatgttttccaaccttattcattatccgcggtactcactctattggtcaaaatccgacccagtgcctccttttatttccagagaatggaaaggtcataaggaaaaacatagggaggcgctgcgacaactgaccacaactgacgccagcttccagatgcctaaggaagtatatgaggatcccgaagttaccggcaagaatcgttataaatatttcgaaaggccattcctgcctttcttccaacaaatgccttttaatgtagtgtacgctgtatctaaagccgaaccttatacctttcctcccacatcaaccaagcatctgtccatcccgtcaaagtccaccgtcggtacacagaccgattatcgagacgcagacgttcagaccgatccctacagtgccgagtacgtggtatgccaggattccattcccgaactattaaccctcgcaactctcacgtggggagagctagtgaatttactgacaatcggcagatag

SEQ ID NO: 112284 - DNA, 654 bp, synthetic construct
  misc_feature 1..654: note = Description of Artificial Sequence: Synthetic coding sequence
  source 1..654: mol_type = other DNA
atggacctagctcaaccctcccagcccgtggatgagcttgagctctcagtcctggaacgacagcccgaagagaacacacccctgaacggggctgataaggtgttcccaagtctggatgaggaggtgcctcccgctgaggcgaataaagaatctccctggagctcatgtaacaagaatgtggtgggtcgctgtaagctgtggatgattatcacaagtatattccttggggttatcaccgtgattataatcgggctctgtctggcagctgtcacatacgttgatgaagacgaaaacgaaatcttggaattgtcaagcaacaaaacatttttcattatgcttaagataccagaggaatgcgtggcggaagaggaactgccgcacctcttgactgaaaggctgaccgacgtgtactctacgtccccgtctctgggccgttacttcacttcagtagagatcgtggactttagcggcgagaatgccacagtcacgtacgacctgcaattcggtgtgccttcggatgatgagaacttcatgaagtacatgatgagcgaagagctcgtgctaggcatcctcttacaggacttccgggatcaaaatatacctggctgtgaatcccttggcctggaccctacctcccttttgttgtacgaatag

SEQ ID NO: 112285 - DNA, 444 bp, synthetic construct
  misc_feature 1..444: note = Description of Artificial Sequence: Synthetic coding sequence
  source 1..444: mol_type = other DNA
atggatctcgcgcagccatcccaaccagttgatgagcttgaactcagcgtgcttgaaagacagcctgaggagaacacaccactgaatggggcggataaagtctttccatctctcgacgaggaggtcccccctgccgaagcaaacaaagaaagcccctggagtagttgcaacaagaatgtggtcggcagatgcaagctgtggatgataattacctctatatttctcggcgttataaccgttataattatcggtctttgtctggccgcagtcacttatgtcgatgaggacgagaatgagattctggagctgagttccaataaaacattcttcattatgttaaaaatccctgaggagtgcgtcgctgaagaggagctgccccacctcttgactgaacgggaagttggtttgaagcccaatccagaggccctggtgggctttgaatag

SEQ ID NO: 112286 - DNA, 753 bp, synthetic construct
  misc_feature 1..753: note = Description of Artificial Sequence: Synthetic coding sequence
  source 1..753: mol_type = other DNA
atggatctggcacagcctagccagcctgttgatgagctagaattgtccgtattggaacgtcaaccagaagaaaacaccccactgaatggagccgataaggtctttccctcgcttgatgaggaggtccccccagctgaagcaaataaggagtcaccctggagttcatgtaacaaaaatgtggtgggacgttgcaagttatggatgataatcacgtcaatcttcctgggggtcatcacagtgatcattatcggactgtgcctggctgctgtcacctacgttgacgaggatgagaatgagatattggagctatccagcaataaaacctttttcattatgctaaaaatacccgaagagtgtgtggccgaagaagagctgccccatctcctgactgagcgaaacgaggtgatggaggccgggctgtgtctcaaggcagtgctctaccaggttttggaaatgaagggaattcactctgtgctgcaaaaacggttctgcgggctgatccaaaaacaccagcaacatcagcgtgggggcgattcattcttgtcacgcttctactcattggcactgtcccctgtcaagcaactgccctcaaccgcgtctgccggctcatcactggacaaggggagaaaacctgctcgagttggcgccattggatcagccggcatgtctcattgctggcgctccctggtattctgcctttttctcttttgtttcgtgctgttctttgaaaccggctctcggtcagtggcttag

SEQ ID NO: 112287 - DNA, 1293 bp, synthetic construct
  misc_feature 1..1293: note = Description of Artificial Sequence: Synthetic coding sequence
  source 1..1293: mol_type = other DNA
atgtggcgcctcgttccaccaaagcttggcaggttgtcaagaagcttgaaactggccgctcttggctcgctattggtgttaatggtgctgcattcccctagcttgctcgccagctggcagcgcaacgaactgaccgatcggcgcttcttgcagttaaataagtgtcctgcatgcttcgggacttcctggtgccggcgctttctcaatggccaggttgtttttgaggcatggggaaggctgcgcttactggacttcctgaatgttaaaaatgtgtattttgcccagtatggcgaaccacgggagggtgggaggcgtcgtgtggtgctcaaacggctcggatcccagcgcgagttagcgcagctggatcagtcaatctgcaaacgcgctacaggccgccctaggtgtgacttgctgcaggccatgccacgtaccgaattcgcacggctgaacggcgatgtgcggctcctgacgcctgaggcagttgaaggctggagcgaccttgtccattgcccaagtcagcgactcctggacagactggtgcggcgatacgctgaaacaaaggatagcggctcattcctgttacggaatcttaaggacagcgagcgaatgcagctgcttttgactctggccttcaaccccgagccacttgtgcttcaaagtttcccctctgacgaaggctggccattcgcaaaatacctgggggcctgtggacgcatggtcgctgtgaactatgtcggggaagagctttggagttatttcaatgccccttgggagaagagagtggacttggcctggcagctgatggagatcgccgaacagctcaccaataacgacttcgaatttgccttgtatctgttggacgtctcatttgacaactttgcagtggggccgcgcgatgggaaggtgataattgttgatgcagagaacgtacttgttgcagacaagcgccttattagacagaataagcccgagaattgggacgtatggtacgaaagtaagttcgatgattgcgataaggaggcttgcctaagcttttccaaagagattctctgtgcccgggcaactgtggaccataattactatgcagtttgtcagaatctgttgagcaggcacgccacatggagaggaacttcaggaggactgctccatgatccaccctctgagattgccaaagatggcaggctggaggccttactcgacgagtgcgcaaatcccaaaaagaggtatggccgtttccaggctgccaaggagctgagagagtacctggctcagctctccaataatgtccggtag

SEQ ID NO: 112288 - DNA, 666 bp, synthetic construct
  misc_feature 1..666: note = Description of Artificial Sequence: Synthetic coding sequence
  source 1..666: mol_type = other DNA
atgaagtccgagaacgggaccgtggtgggctcctttccgtcagatgaaggctggccattcgccaagtatctgggggcttgcggccggatggtcgctgttaactatgtaggcgaggagctctggtcctattttaatgctccatgggagaagcgagtcgatctggcatggcaactgatggaaatcgccgagcagttgaccaataacgattttgaattcgctctgtacctccttgatgtgagctttgacaactttgctgtgggtcctcgtgatggcaaggtcattatcgtggatgctgagaatgtgctggtggcagacaaaaggctcatccggcaaaacaaaccagagaactgggacgtgtggtacgaatcaaaatttgacgactgcgataaagaggcatgtctctcatttagcaaggagatcttatgtgctcgtgcaacagtggaccacaactactacgccgtatgccagaacctgctctcccggcacgccacttggagaggaactagcggcggcctgctgcatgaccccccttctgaaatcgccaaggacggccgactggaagcccttctcgatgagtgcgccaaccccaagaaacggtatggacggttccaggctgcaaaagagctcagagaatacctggctcagctgtccaacaacgtgcggtag

SEQ ID NO: 112289 - DNA, 5079 bp, synthetic construct
  misc_feature 1..5079: note = Description of Artificial Sequence: Synthetic coding sequence
  source 1..5079: mol_type = other DNA
atgcgaaggcctcccccactggggcctacaacagcatcgggtcccgagggcaatgtccgcaacctacagaagcggcaggcacccgggccgggcgcagcaggtggatgtggcccagaggccggcggatgcagggagaacaagcagaagcgcaggatggttgcccgagctactcccggccggggagaggtagagagcgacaagtcagtggcagcctcaggggccgggaaggcggcgcgtcggcaagtagaaggacgtcgcggtccagtctcccctagcgacagttcagacccgcggggcctggaggccgcaaaggaagctgaacttcctttacagacagagagacacactaaggagaaacgcaaggtgaccgaggcctcttccgacgatcctcagccaggcctagatctggtgcgcaaggaaagcctcacgagttcggagagcttccagaccgtggagtgtctacagtcactaggaaaggaatccatcatcgaaggcatcaagagacggatccggaacaaaaagctgaaatcgttagaaaaccctcctcttaaaatcactgagaatgaggccacacagaatattaaagttgagttccaggacgagctgtataaaaacactcctaagtactcatgtaacattctgtcaccagaggtggaaaacaacagcgttctcaaactgcgagactgtaactgcttcccgcattcgaaaggatgcaatgacgaaaataatctgccctacaagccagatgggggatgcatgcatgtggctgaaaacttcagtaaaaaagaaaatctgagatcgctggccgaaaagtctgacactaatagcatacctcagttactacaaaccgaggagaacgtgatgggggtgaacaaactcctgccagaagagtccgacctctaccagagcaaaacaaacgggctgctctcttgcctgcaacacgaaaaaaataagtattccattgaggagtctagcgtggggaggaagcctagaaagcggatgaaactgtcggagaaggccgacgagacagtcactgagatgaatttcagcaacgaatataacaaaagtgagctcatgctacaggagaaccaaatgattgctgacgggaaagaggcagaaacgaagtcccctttgaatgtcttaagaaaagtctctcacaacaccgtgagcctgatggaccatctgctgagcgtccccgaaaccgtcgagaaggaaacatcctccgaacatcacgttaatgctgtttttcaaaagacaattgaacccctgctcaaggaggagaccgagaacgcttccgagccattaggctatgagagcatggcttcaaaggaagattttaagagcatgaagtcgttcattggcaagagcccaaatgagtaccacatcgagcgacgttcctcccgcgaagatctgcgttcagcaagcgaggagcttaaactaagctgccagagaacgatccctatgaccgggaaacgaacgtggccatattacagctgcgcccgcatttccgcttggtgttggaagaaggccagcctgccggaatcctcttattttttaagagggtcacaggagtcatgtaggcaagttgacgtccccaagcatcagactaatcaaacccatctcactgactctaagctgcttctgcagagttccctgactgaaactaacacagaatcaagttctaaggagaagttagactcaaacagcaactgtctgagctctgtaagtgctgtcgagccaacgctgatggtgataaaagagcccatcatcaaggacgataagaaaattaagagcgaagagttatctaggcggggttctgaggtcatcagtaataccaccgaggatacccaactaacatccgaaacacagtccctgactggcaataaaaaaaaagctcgggggaacctcacgaaattgaatctgacagcgactagtaaagacggtcaggaggctaataattccgctgggaaaaccatccatagaaaagcgtgtatcgcccagcagacgttcattgtccctgacctggtgaaaatcctaaatacaggacgccttaccaatttcaagattccccttttgaagaacaaatcggaaaagaggaaagaggtgaacgcaaaaagctccgagcgagaagcttattccccactggaactgctcgataatctctcaggtgcggacgtgaggcagaaccgaagcaaagagaatgtgtccatgatgatgctgggtcctcagaccttgtccatccggaatagcgtgacacccgtccaggcctcctcagatagtttttacaataaaaaaagctactcaatcagcccgagctttacaaagcaaggtaataacagcaagccgagcaaccatgtgagtgagcccggcaacatcgtgagtaacaaagaagtcgcttctctcaccgtagaaaataatgcttttagctgcgacccaggctacgtcgaaaagtccccgtccttctgttgtaacgaacaggaaaccttccgccccgtctcctcagaggtcagaggcagaaagatcacgaaaaattttagtgaggtggggttccccgatattctgaaagcctatgaagatgatgtgctgctcattgacgtgatccaagacgaccccgatctattcggagtgtccaacgaaggcgagctttccttcaccagcgaggtaccaaagatctctcaagaacccaatgtggctggagaacatcaaagcaccgactccaaatatatggagacacccgtgaaaaaggaaccctcagatgacctccgtgagttacctgtgctggactgtgggtggataaagccggatatctgtgcatctaacagtgcggagagtgagataaagcgcgatccaaaagacgtcaacacatccttgggagaagttgcgaacgaaacatccgagaatgaaacactcggcgacttttctgaacagattaagggtagtgatcttgatgagaagcatcggttcacggacaaagttattacgaaagaagaaaaagagaatatctacgaggtgtgtaagtcaaaagactctcgcaacgccgacttcatggtgggcgaatgtcagttcgctgtgcccgttcccaaaccgttgtgtttgctggtgcctcctctgaacctttctggtaggcaggaggacactatcctgaacacctggatgaatgatttcagattcctggggaagcactcagttctcaaacttcagaaccccgagacttgtgagatctttaagagagaaaagaatgtcggggtattccagaagtccctcggtctgatgatcccctacaaatactgcaagtttcatttcaacacgctccgggggtgcgaacggccactgtgtaaatttgcgcacgtccccgaacagggggacgaaaaggtttgcatggatgtgttcaagaaatatatcaacataaatgagctctgcctgctgcagagggcagtgaacatttttatggagtattaccggaaatttccacctggggtttactttgatctgcaggtccttaacgatctgctgaactcattattgaaacactgcctgctcaaagaagtgtttcagatagttaatctgagtataatggttaagatgttgccaagtctgaaaattctgttaaacatattcgaatatgttgcaaccatgaagctgcgcaatgccgtgcccgccctgatcgatatattctgcaaattagtcgaggctggaatggttctggatccagaacatttcaattacattgtgaaactgttatatcaggtgcaggccagcaagcaggaaattactgcagtgttggagatgaaatctaggctgcagatgcgccgctttaaaaaaaactggaaatgtgatctggattcggcactgaataaactggagcattgcaaggaaaaaggagactggaccaaactgggaaagctctacataaatgttaagatgggctgtgagaaatttgccgattttcaaactttctgcgcatgcatcgcagagactctcaccaaaaactatgaagacgagcggccggatatacctttctgtgaattcgctgaaaccgtgagcaaggatcctcagaacagcaaagtggataagggggtgttagggcggattggtatcagcgctatgtatttctaccacaagcttttgcagtggtccaagggtcggaaggttctcgagaaactgtatgagctgaagatccactttacttccctcaagggactcatcggacctgagaagctcgcatcccgatgccagatcgtcaacgtggcggctgagatatttctgaagtcgggaagtctagacggagctatttgggtgatgcgggagtctgagtggattatcaacactccactgtggccctgcgacagattagatgtgctgaataggcacaacctgctgtgcaccatcgcacacgagatcctggcgaaaagcctgtatagacagacattcgaagtgctccagaatttacccggcttccagaatagccaggagacagttgaggtgtctcagtatagcctgctctttaacaaacttttagggagttgtattgagtcgtccagcctgggtatgtcttcttcagtggctgagtttatgatcagcaaatctatccccattgacttctctttcctacgacgactgataacgagcttgggaagaagccgattatggctgaaagcgagggcacactacaagtccgccttgagcctgggctgttacccacccctcgaaggcaatttgtaccgaaaactgttactaatccccagctacttgtccgagatcgaaatgctgctggcaattgaaatattcatggtgtcaaacgcctctagtattcagagtccaggcacaagtacccagattctccagatcgtgctgaagaggtgcgaggacaaccaatcaagatccaacgatgattatcaggccgccgtggaacggctaatcatggccgcgagaatttctgacccaaagctattcgtcaagcatatgaccgtgaacgttaataaggaacaggtctattcacttgaacattgctcggcgctcaaatggctgaaggagaatatgaagtgggcaggcaaagtttggctgttctctaatcactag

SEQ ID NO: 112290 - DNA, 207 bp, synthetic construct
  misc_feature 1..207: note = Description of Artificial Sequence: Synthetic coding sequence
  source 1..207: mol_type = other DNA
atggtgtactatccagaattgtttgtttgggtgtctcaagagccatttccaaataaagatatggaaggaaggttgccaaaaggcaggctcccggtgccaaaagaggtgaatcgcaagaaaaacgatgaaacgaacgccgccagcctcacccctctcggatcatcggagttgcggtccccccgtatcagttacctacacttcttctag

SEQ ID NO: 112291 - DNA, 207 bp, synthetic construct
  misc_feature 1..207: note = Description of Artificial Sequence: Synthetic coding sequence
  source 1..207: mol_type = other DNA
atggtctattacccagagctctttgtttgggtaagccaggaaccatttcccaataaagacatggagggtaggctgcccaaagggcgcttgcccgtgcctaaggaagtaaacagaaaaaaaaacgatgagacgaacgccgcctcactgactcccctagggtcaagcgaactccgaagcccccgtatctcatacctgcacttcttttag

SEQ ID NO: 112292 - DNA, 339 bp, synthetic construct
  misc_feature 1..339: note = Description of Artificial Sequence: Synthetic coding sequence
  source 1..339: mol_type = other DNA
atgaaaggagtttggaactactcagccctgagtaggagagaagatgaaactaggacccagcgtagccggatgaccgaccgcgtcccgtgttccaagtgttttcaagtccactgccagatcagcgtgctaaactgcgtatactaccctgaattgttcgtctgggtcagccaggaaccattcccaaacaaagacatggaaggaaggctgcctaagggacgtctgccagtgcctaaggaggttaaccggaagaagaatgatgagacgaatgctgccagcctgactcccctgggcagcagcgaactgaggtctcccaggatctcctatctacatttcttctag

SEQ ID NO: 112293 - DNA, 207 bp, synthetic construct
  misc_feature 1..207: note = Description of Artificial Sequence: Synthetic coding sequence
  source 1..207: mol_type = other DNA
atggtgtactaccctgaactgttcgtttgggtgagccaggaaccttttccgaataaagatatggaaggcagactgcctaagggcagactccccgtacctaaagaagttaatcgcaaaaaaaacgatgaaacgaatgccgcctctctgacacccctgggaagttctgagttacgcagcccccggatctcctacctgcacttcttttag

SEQ ID NO: 112294 - DNA, 207 bp, synthetic construct
  misc_feature 1..207: note = Description of Artificial Sequence: Synthetic coding sequence
  source 1..207: mol_type = other DNA
atggtgtactatcctgagctgttcgtgtgggtgtcccaggagcctttccctaacaaggatatggagggtcggttgcctaagggcagactgcccgttcccaaggaagtgaataggaaaaagaatgacgaaacaaacgccgcctctctcacacctctcggatcaagtgagcttagatcgcccaggattagttatttacactttttctag

SEQ ID NO: 112295 - DNA, 207 bp, synthetic construct
  misc_feature 1..207: note = Description of Artificial Sequence: Synthetic coding sequence
  source 1..207: mol_type = other DNA
atggtctattatcctgagctgttcgtgtgggtttcgcaggagccctttcccaacaaggatatggagggcagactgcccaaggggaggctcccagtgcctaaggaagtgaatcggaagaagaatgacgaaactaacgccgcatcactcacgccattaggctcatcagaattgcgcagtccgcgtataagctatctccacttcttctag

SEQ ID NO: 112296 - DNA, 207 bp, synthetic construct
  misc_feature 1..207: note = Description of Artificial Sequence: Synthetic coding sequence
  source 1..207: mol_type = other DNA
atggtttattaccccgagctgttcgtgtgggtgtcccaggagccatttcccaacaaagacatggaaggccgactacccaaaggaagacttcctgtgccgaaggaagtgaatcgaaagaaaaatgacgagaccaatgccgccagtttgacccccctcggttcttcagagcttagatctcccagaatttcctatctccatttcttctag

SEQ ID NO: 112297 - DNA, 207 bp, synthetic construct
  misc_feature 1..207: note = Description of Artificial Sequence: Synthetic coding sequence
  source 1..207: mol_type = other DNA
atggtgtactacccagagctgttcgtatgggttagtcaggaacccttccctaacaaggacatggaagggcggttgcctaagggaaggctccctgtacctaaagaggtgaacagaaagaagaacgacgagaccaacgcagcatctttgacacctttgggctcatccgagctgcgctcaccccgaatctcatatctgcactttttttag

SEQ ID NO: 112298 - DNA, 207 bp, synthetic construct
  misc_feature 1..207: note = Description of Artificial Sequence: Synthetic coding sequence
  source 1..207: mol_type = other DNA
atggtgtactaccccgagctctttgtgtgggtctctcaggagccctttccaaacaaggacatggagggaagactcccaaaaggccgattaccagtaccgaaggaagtgaacagaaaaaaaaatgatgaaacaaatgcagcctccctcacccccctgggctctagcgaattgcgcagcccccggatctcctatctgcacttcttctag

SEQ ID NO: 112299 - DNA, 18 bp, synthetic construct
  misc_feature 1..18: note = Description of Artificial Sequence: Synthetic coding sequence
  source 1..18: mol_type = other DNA
atggtgtactatccctag

SEQ ID NO: 112300 - DNA, 102 bp, synthetic construct
  misc_feature 1..102: note = Description of Artificial Sequence: Synthetic coding sequence
  source 1..102: mol_type = other DNA
atggtgtactacccagaactcttcgtctgggtctctcaggaacctttcccgaataaggatatggaggggcgactccccaagggccggcttccagtgccttag

SEQ ID NO: 112301 - DNA, 207 bp, synthetic construct
  misc_feature 1..207: note = Description of Artificial Sequence: Synthetic coding sequence
  source 1..207: mol_type = other DNA
atggtctactacccggagctgtttgtgtgggtaagccaggagcccttcccgaacaaagacatggagggcaggctgcccaaaggacgtctgccagttccgaaggaggtcaaccgaaagaaaaacgacgaaacaaacgctgcatcacttacccctttgggcagtagcgagcttagatccccccgaatcagttatttacatttcttttag

SEQ ID NO: 112302 - DNA, 207 bp, synthetic construct
  misc_feature 1..207: note = Description of Artificial Sequence: Synthetic coding sequence
  source 1..207: mol_type = other DNA
atggtctattaccctgaactttttgtttgggtgtcacaggagcctttccctaataaggacatggaggggaggctgcccaaggggagactcccagttccaaaagaagttaaccgaaagaagaatgacgagacaaatgccgccagtctcaccccccttggaagttctgagctgaggtctccccgaatctcgtaccttcattttttttag

SEQ ID NO: 112303 - DNA, 198 bp, synthetic construct
  misc_feature 1..198: note = Description of Artificial Sequence: Synthetic coding sequence
  source 1..198: mol_type = other DNA
atggtgtactatcctgaattgttcgtgtgggtgtcccaggagccatttcctaacaaagatatggagggcagactgcccaagggacggctgcccgtccctaaggaggtgaacagaaaaaagaatgacgaaacaaacgcggctagtctcactcctttgggctcttccgagttgcgctctccccgtataagttatttatag

SEQ ID NO: 112304 - DNA, 735 bp, synthetic construct
  misc_feature 1..735: note = Description of Artificial Sequence: Synthetic coding sequence
  source 1..735: mol_type = other DNA
atgcattacggcgccgccacgcatattcagaactcgaggagccatgggctggagacggtacctgggcatcagagattagaacgcggcgcggggggcgagacccccgaattccccgggtgccacagtcccgcaccgcctgaaaattttggcaatgagctcctcccacttagcgccccactgcaaggccttagcgagggcctgtacccgcctggacgaaacaagactttacctgcaggcgttctacgagagggggccgtgcagtttctgcatcgcggcttgtgtaactccaacctctcatccgaggccagcgctcgaccgtctggtacacaggacgagttacactcctctcgcagaaaaaccggccagacccggagagagggcgcccgcaagcatctcgtttgcagctttcggctatatccgttcacagtgcataccgtgagccccggaaactctcatctagctctgtaccaggtgtttaaagccgtcaaattgtgcccaagtgagactagcttctttctttcccgcaaaagcttaaagagttctgacccatggcacccaccaagcctttcccctaactcctggaacaggcaagccgggtttcgagcatggtccagccatctcattagcctgtcactgacctgttctgattcacagtcgcggcgcgtgtcctctagccagcagccacctctccacagcctttcctcacacagacgggctgcacacgtccctgaatag

SEQ ID NO: 112305 - DNA, 480 bp, synthetic construct
  misc_feature 1..480: note = Description of Artificial Sequence: Synthetic coding sequence
  source 1..480: mol_type = other DNA
atgtaccgcagaaaaagtggctggacaggttgcgcaatcacatgcagcccttgcaccgcgatgacacagctgcggaattgcatgcgcctctcgagaagctgttcactgacctgggagacaccccggtggtatatggctggcagagtcgcgacctccacgtcaggctgtcactgctggatgagccggcgagatctgaccccattgccacacccttctgagcccggggtgctcgactgtctaggcccctgccatctgctccctctcttgtctccaggaagcccttgctgggtgctggggctgcacttcagcttgcacccgccatctgcagcctccgcctctcacgcccttacaattacctccttacctcccggactgctgccatttgtgggcgttgagctgaccgcccatccccaagcacttatgggcaggggtttcccctcaggaatgggcgccgcgggccggcacctgtgtttcctttag

SEQ ID NO: 112306 - DNA, 480 bp, synthetic construct
  misc_feature 1..480: note = Description of Artificial Sequence: Synthetic coding sequence
  source 1..480: mol_type = other DNA
atgtacaggcgtaaatcagggtggaccgggtgtgctattacctgctccccctgtactgccatgactcagctgaggaattgcatgcgtttatcacgttcatgttcccttacctgggagacacctcggtggtacatggcgggcagagtcgcgacctctacctccggatgtcattgttggatgtcccggcgagaccttaccccattgccccatccttctgagcccggggtgctggattgtctcgggccttgccacctccttccactcctctccccaggatcaccctgttgggtactcggactgcattttagcttacacccgccgagcgccgcgagtgcttcacacgcccttactattacatcacttccgcctggtctactaccattcgttggcgttgaactgacagctcacccacaggcactgatggggcgcggctttcccagcggtatgggcgctgctggacgacatttatgcttcttgtag

SEQ ID NO: 112307 - DNA, 480 bp, synthetic construct
  misc_feature 1..480: note = Description of Artificial Sequence: Synthetic coding sequence
  source 1..480: mol_type = other DNA
atgtatcgcaggaagtccggatggacaggctgcgctataacttgctcgccctgcacagccatgacacagcttcgcaactgtatgcgcctctcgcgaagctgtagtctgacatgggaaacacctcgctggtatatggctggaagggttgcaacctcaacgtctggatgtcattgttggatgtcccggcgagacctgactcctttaccgcatccttccgagcccggagtattagactgcctgggcccttgtcatttactgcccttgctctcgccaggctcaccctgttgggtgttgggcctccacttctccctgcatcccccctccgccgcctcagcttctcacgctctaaccatcacaagccttccaccgggcctgttgccgtttgtaggagtggagctcactgcccacccccaggctctcatgggccgcggtttccccagcgggatgggagcggccggccgccacttatgcttcctctag

SEQ ID NO: 112308 - DNA, 480 bp, synthetic construct
  misc_feature 1..480: note = Description of Artificial Sequence: Synthetic coding sequence
  source 1..480: mol_type = other DNA
atgtatcgacggaaatccggatggacggggtgcgccatcacatgttccccctgtacagctatgacacagctcagaaactgtatgcgcctgtctcgttcttgcagcctcacatgggagactccacgttggtatatggcaggacgcgtggccaccagtacctctgggtgccactgctggatgtcacgacgggacctcacaccattgccccacccatcagagccgggagtgctggactgccttggaccatgccatctcttaccgctactgagtcctggatctccatgctgggtcttaggtctgcatttttctctgcaccctccctccgccgcatctgcctcacacgcgctgactattacatcacttccaccagggcttctgcctttcgtcggtgtggaactgaccgcccatccccaggcactgatgggccgcggcttccctagcggaatgggtgcggcaggacgtcacttgtgcttcctgtag

SEQ ID NO: 112309 - DNA, 294 bp, synthetic construct
  misc_feature 1..294: note = Description of Artificial Sequence: Synthetic coding sequence
  source 1..294: mol_type = other DNA
atgtcctccgccccagagcctcccactttcaagaaggagccacctaaagaaaaggagtttcagtcccccggcctccggggggttcgcaccacaacattatttcgcgctgtgaatcccgaactctttatcaagcccaataaacccgtcatggccttcggtctggtgaccctctctctgtgcgtggcatacattgggtatctgcatgcaatccaggagaataaaaaggatctctatgaagcgatagattccgaggggcatagctacatgcgccggaagaccagcaaatgggactag

SEQ ID NO: 112310 - DNA, 768 bp, synthetic construct
  misc_feature 1..768: note = Description of Artificial Sequence: Synthetic coding sequence
  source 1..768: mol_type = other DNA
atgacaaagactagcacttgtatctatcacttcctcgttctgtcctggtacacattcctgaattattatatttctcaggagggaaaagacgaggtaaagcctaagattctggcaaacggagcaagatggaagtatatgactctgctgaatctgttgctgcagactattttttatggggtcacctgtctggacgacgttctgaaacggaccaagggcgggaaagacattaagttcctgacagcatttagagatctgctgtttactacattagcgtttcctgtcagcactttcgtctttctggccttctggattctgtttctttacaaccgtgatctgatttaccctaaggttctggacactgttattcctgtatggcttaatcacgccatgcacacatttatcttcccaattacactcgcggaagtggtgttacgcccgcacagctatccatcaaaaaagactggtctcactttactggccgcggccagcatcgcttatatcagcaggatcttgtggctctacttcgagaccgggacttgggtttatcccgtttttgctaagctgtctctccttggactggctgccttcttctctttgagctacgttttcatagcttcaatttatctgttaggggagaagctgaatcactggaaatgggtgagcgtgcagattttgcaaaggtggcggctcgaatcagtaggaatctgcttccagtggcccgattggaaatccccagctaaacaccaactggtgaagaacattaggtag

SEQ ID NO: 112311 - DNA, 510 bp, synthetic construct
  misc_feature 1..510: note = Description of Artificial Sequence: Synthetic coding sequence
  source 1..510: mol_type = other DNA
atgaccaaaaccagcacctgcatctatcacttcctggtgctctcttggtatacgtttctgaactattatatttcacaggaaggaaaggatgaggtcaagcccaagattcttgccaatggagcccgatggaaatatatgactcttctgaacttattgctgcagaccatcttttatggagtcacgtgtctagatgatgtgctcaaaagaactaaaggcggaaaggacattaaattcctgactgccttccgcgatctgcttttcactacacttgcattcccggtgtcaactttcgtcttcctagccttttggatcctgtttttgtacaatagagatttgatctacccaaaagtgttggataccgtcattccagtctggctcaatcacgccatgcacacatttatctttccaatcaccctggctgaagtagttttgcgaccccacagctatccgtctaagaaaactggcctcactttgctagcggccgccagcatcgcttacatctcccgctag

SEQ ID NO: 112312 - DNA, 693 bp, synthetic construct
  misc_feature 1..693: note = Description of Artificial Sequence: Synthetic coding sequence
  source 1..693: mol_type = other DNA
atgacgaagactagcacttgtatctaccatttcctggttctgtcctggtatactttccttaactactacattagccaagaagggaaagatgaagtcaagccaaagatcttggcaaatggagcccgctggaaatacatgaccctcctgaatctgctgctgcagacaattttctacggggtcacatgcctggacgatgtgctgaagcgaactaaggggggcaaggatatcaagttcctgacagccttccgtgaccttttgtttaccaccctggcatttcctgtgagtactttcgtgttccttgcattctggatcctgttcctctataacagagacctgatctaccccaaggtccttgataccgtaataccagtgtggctcaatcacgcgatgcatacttttatattccctatcactctggcagaggtggtgctgcgccctcatagctaccccagcaaaaagacaggcctcactctgttggccgccgccagcattgcttacattagccgcattctctggctttacttcgagacagggacatgggtgtatcctgtatttgcgaaattgtcgctcctaggcctcgctgccttttttagcctttcttatgtgttcattgcgtctatttacctgctaggagaaaaactcaatcactggaagtggggcgatatgagacaacctcgaaaaaaacgaaagtag

SEQ ID NO: 112313 - DNA, 507 bp, synthetic construct
  misc_feature 1..507: note = Description of Artificial Sequence: Synthetic coding sequence
  source 1..507: mol_type = other DNA
atgactaaaacttcaacctgcatctatcactttctggtgttgtcatggtacacctttctgaattactatataagtcaggagggcaaggacgaagtcaagcccaagattctggctaacggggctcgctggaaatacatgacactactcaacctcctcctccagacaatcttttacggtgtgacttgtcttgatgacgttctgaagcgcactaaaggcgggaaggatatcaaattcctgactgccttccgcgacttattgtttacaactttggcctttcctgtttctacattcgttttcctggctttttggattcttttcctatataaccgagacctgatttatccgaaggtcctggatacagtcatcccagtgtggctgaatcacgccatgcacacgtttatttttcctatcacactggctgaagtagtcttgaggccacacagctacccgagcaaaaaaaccggactgaccctgctagcggccgcttccattgcctatatcagttag

SEQ ID NO: 112314 - DNA, 675 bp, synthetic construct
  misc_feature 1..675: note = Description of Artificial Sequence: Synthetic coding sequence
  source 1..675: mol_type = other DNA
atgagttttgtggaggacgttactataggcgaaggtgaaagcatcccgccggatacgcaattcgtgaaaacctggagaattcaaaactctggcgcagaggcatggcctcctggggtgtgcctgaagtacgtgggtggggaccaattcggccacgttaacatggtgatggtgcggtcactggaacctcaagaaatagctgatgtatccgttcagatgtgtagcccttccagagcaggcatgtatcagggacagtggcgcatgtgtactgcgaccgggctgtattatggcgacgtgatctgggtgatcctctctgtggaggttggggggcttttgggagtgacacagcaactgtctagctttgaaacagagtttaacactcaacctcatagaaaagtggaaggcaactttaatccatttgcgtctccccaaaagaatcggcagagcgatgagaacaatttgaaggatcccggcggaagtgagttcgactcgatcagtaagaatacgtgggccccagctcccgacacttgggctccagcccctgaccagaccgagcaggatcagaatagactgagccaaaattcagtcaacctgtcccccagttcccacgccaacaatctttccgttgtgacttactcgaaaggattgcacggaccttacccctttgggcagtcctag

SEQ ID NO: 112315 - DNA, 897 bp, synthetic construct
  misc_feature 1..897: note = Description of Artificial Sequence: Synthetic coding sequence
  source 1..897: mol_type = other DNA
atggagggtatggacgttgatcttgaccccgaacttatgcaaaaattctcctgtctgggcactactgataaggacgtgttgatctccgagtttcagaggttactggggttccagctgaaccccgccgggtgcgccttctttctcgacatgacgaattggaacctgcaggctgcgattggggcatactacgacttcgaaagccccaacatcagcgtgccttcgatgagcttcgttgaggacgtgacaattggcgagggagagtccatccctccagacacacagttcgtcaaaacatggcggattcaaaacagcggtgctgaagcgtggcctcctggagtttgcctgaaatacgtcgggggtgatcaatttggccatgtgaatatggtcatggtccggtctctagaaccccaagagatcgccgacgttagcgtccaaatgtgttccccgtcccgggctgggatgtaccaggggcaatggcgaatgtgtactgctacaggcctttactatggtgatgtgatatgggttattctctccgtggaagtcggaggtctgctgggcgtgacccaacaactgtcaagctttgagaccgaattcaacacgcagcctcataggaaggtggaaggaaactttaatccttttgcctccccccaaaaaaacaggcagagcgacgaaaacaaccttaaggacccaggcggaagcgaattcgacagcataagcaagaacacctgggcccctgcccctgacacttgggccccagcgcctgaccagacagagcaggaccagaaccggctttctcagaattcagtcaacctgagtccaagctctcacgctaacaatctgagcgtggttacttactctaagggtctgcatggaccctatccttttggccagagttag

SEQ ID NO: 112316 - DNA, 699 bp, synthetic construct
  misc_feature 1..699: note = Description of Artificial Sequence: Synthetic coding sequence
  source 1..699: mol_type = other DNA
atggagggaatggatgtcgatcttgaccccgagctaatgcagaagttcagttgcctcggtacaacagataaggatgtgctgattagcgagttccagagactgctgggtttccagttaaatccggctgggtgtgccttctttcttgatatgaccaactggaatcttcaagccgccatcggggcctattatgacttcgaatcacccaatattagcgtgccgagtatgagctttgtggaagatgtcactattggcgagggtgagtccattcccccggatactcagttcgtcaaaacatggagaattcagaattcagacgtcatatgggttatcttgagtgtcgaagtgggcgggctgctcggtgtcacacagcagctgagcagcttcgaaactgagtttaatacacagcctcacaggaaggtagaaggcaacttcaacccatttgccagtccccagaagaaccgccagagtgatgaaaacaacctcaaggaccccggagggagtgagttcgactctatcagcaagaacacctgggccccggcgcccgatacttgggcgcccgcgcccgaccaaaccgagcaggaccagaacagattgtctcagaactcagtgaacctaagccctagcagtcacgccaataacctgtcggtggttacatattctaaaggactacacggaccttatcccttcggccaaagctag

SEQ ID NO: 112317 - DNA, 126 bp, synthetic construct
  misc_feature 1..126: note = Description of Artificial Sequence: Synthetic coding sequence
  source 1..126: mol_type = other DNA
atgggagacatatacatcacatggattggctgtggtcttgaccgcctccagtgggaaaacgtgagtgccatgattgaagaggtcttcgaggctactgacattaagattacagtgtacactctctag

SEQ ID NO: 112318 - DNA, 459 bp, synthetic construct
  misc_feature 1..459: note = Description of Artificial Sequence: Synthetic coding sequence
  source 1..459: mol_type = other DNA
atggcctcgagcctgaatgaagatccagaaggatctagaattacttatgtcaagggcgatctgtttgcctgtcccaagactgactcactggcccactgcatttccgaggactgccgtatgggcgctggaatcgctgtgttattcaaaaagaaattcgggggtgttcaggagttgttaaaccagcaaaaaaaatctggtgaagtggcggttttgaaaagggatgggcgttacatttattacctgattactaaaaagcgggcctcccacaaaccaacctacgagaatctgcaaaagagcctggaggcaatgaagagccactgtctgaagaatggcgtcaccgacctgtcgatgccccggatcggatgcggactggatcgtctacagtgggagaatgtgagcgccatgatagaggaagtttttgaggcaaccgatatcaagattaccgtttacaccctctag

SEQ ID NO: 112319 - DNA, 459 bp, synthetic construct
  misc_feature 1..459: note = Description of Artificial Sequence: Synthetic coding sequence
  source 1..459: mol_type = other DNA
atggcaagttcgttgaacgaggatcccgagggctcacgtattacctacgtgaagggcgacttatttgcttgcccaaaaaccgatagccttgcccactgtatctcagaggattgccgaatgggggctgggattgctgtccttttcaaaaaaaaatttggaggcgtgcaggagctgttgaaccaacagaagaagagtggagaagtcgctgtcttaaaaagggacggccgctatatctactacctgattacaaaaaaaagggcatctcataaacctacgtacgaaaacttgcagaaaagtctcgaggccatgaaatcacattgtcttaaaaatggagttacagacttgagtatgccacggataggttgcgggctggatagactgcagtgggagaatgtttctgccatgattgaggaagttttcgaagcaactgatataaagattactgtttatactctgtag

SEQ ID NO: 112320 - DNA, 459 bp, synthetic construct
  misc_feature 1..459: note = Description of Artificial Sequence: Synthetic coding sequence
  source 1..459: mol_type = other DNA
atggctagctcgctgaacgaagaccctgaaggatctcgaatcacgtacgtgaaaggagatctcttcgcctgccccaagactgactctctggcccattgcatcagtgaagactgcagaatgggagccgggatagctgttctttttaaaaagaaattcggcggcgtccaagagctgctgaaccagcagaagaagtctggcgaggtcgcagtactcaagcgcgatgggcgctacatatattacctcattacgaagaagagggcaagccataagcctacttacgaaaaccttcaaaaatctctggaagccatgaaatctcactgcctgaagaacggggtaacagatctctcaatgcccaggatcggatgcggacttgaccggctacaatgggagaacgtgtctgcgatgattgaggaagtgtttgaggctaccgatattaaaataactgtgtatacactgtag

SEQ ID NO: 112321 - DNA, 459 bp, synthetic construct
  misc_feature 1..459: note = Description of Artificial Sequence: Synthetic coding sequence
  source 1..459: mol_type = other DNA
atggccagtagcttgaacgaggaccccgaaggctcacggataacctatgtgaaaggggaccttttcgcttgcccaaagacagactccctggcccactgcatttctgaggattgtcggatgggagccggcatcgctgtcctattcaaaaaaaagttcggcggagtacaggagctcttaaatcagcagaaaaaaagcggagaggttgctgtacttaaacgagatggccgatatatttattacctcataactaaaaaaagagcctcccataaacccacgtatgaaaacctgcaaaagtcacttgaagccatgaagtcacattgtctgaagaacggtgtaaccgacctcagtatgccacgcattggctgcgggctggatcgcctgcagtgggagaatgtcagcgcgatgatcgaggaggtgtttgaggctaccgatattaagatcactgtgtataccttgtag

SEQ ID NO: 112322 - DNA, 396 bp, synthetic construct
  misc_feature 1..396: note = Description of Artificial Sequence: Synthetic coding sequence
  source 1..396: mol_type = other DNA
atggcctcatctctgaatgaggatccagaaggctcacgtatcacttatgtcaagggcgacctgtttgcttgcccgaaaactgattctctggctcattgtatcagcgaggactgcaggatgggcgccggtatagccgttctgttcaaaaagaagtttggcggcgtgcaggaattgcttaatcagcaaaaaaagagcggcgaagtggctgtcctcaaaagagacggaaggtacatttactaccttataactaaaaaacgagcaagtcataagcctacctatgagaacttacaaaagtccctggaagcaatgaagtctcattgtcttaaaaacggagtgaccgacctttccatgccccggatcgggtgcggattggatcgcctgcagtgggagaactag

SEQ ID NO: 112323 - DNA, 1371 bp, synthetic construct
  misc_feature 1..1371: note = Description of Artificial Sequence: Synthetic coding sequence
  source 1..1371: mol_type = other DNA
atggaagctctgggtgacctggagggcccgagagcacctggaggggacgatccagctggtagcgctggggaaacccccggctggctctctcgggagcaagttttcgtgctaatctcagccgctagcgtgaatttaggctctatgatgtgttacagcatactgggccccttttttcccaaagaagccgagaaaaaaggcgcatccaatactatcatcggcatgatcttcggttgcttcgccctgttcgagcttctggcatcactggtcttcggcaactacttggtccacataggagctaaattcatgttcgtggccggcatgttcgtgtcaggtggcgttacaatcctgttcggcgtgctggatagggtccccgatggcccagtttttatcgcaatgtgcttcctggtgcgagtcatggatgccgtgagtttcgcagctgctatgactgcgagcagttcaattctggctaaggcttttccaaataacgtggccaccgtgttaggctccttggaaactttttcaggcctgggattgatcctgggtccccccgtaggcggtttcctgtaccaatcatttggctatgaggtgcccttcattgtccttgggtgcgttgtgctactcatggtaccattgaacatgtatatcctacccaactacgagtctgacccaggagaacatagtttctggaaactcatcgcgttgcccaaggtcggacttatcgccttcgtcatcaactctctttcttcttgttttggttttttagacccaaccctgtcattattcgttctggagaaattcaacctccctgcaggatacgtcggtttagtgtttttaggcatggcccttagttatgcaatctcctcccctctgtttggcctgctctcagataaacgcccacctctgcgcaaatggctgttggttttcggaaatcttattacagcgggttgctatatgcttcttgggcccgtccctatcctccacattaagtcacagctgtggctgctggttctcatcttagtcgtgtcaggcctgagtgccggaatgtccataatccccacgtttccagagattttatcatgtgcgcacgagaatgggttcgaagagggccttagcacactgggcctcgtgagcggtcttttcagtgcaatgtggagtattggggccttcatgggacccaccctcggaggatttttatacgagaagattggatttgagtgggctgccgcgattcagggtctatgggcccttatttcagggttggctatggggctcttctacctccttgagtactctcgcaggaaaaggtccaaaagtcagaatatactcagcacggaggaggagcgcactactctgcttcctaatgagacatag

SEQ ID NO: 112324 - DNA, 324 bp, synthetic construct
  misc_feature 1..324: note = Description of Artificial Sequence: Synthetic coding sequence
  source 1..324: mol_type = other DNA
atggaagctctaggggacctagaagggccgcgagcaccgggcggagatgaccccgctggcagcgccggggagacccctggatggttgtcacgtgagcaagtgttcgtgttgattagcgcggccagtgtgaacctgggatccatgatgtgttattccatcctgggccctttcttccctaaggaagccgaaaagaagggcgcttctaataccattataggaatgattttcggttttcagtttacttcctggatctgcggcaccagcatccccggctacggcaccgttctgtgccacctatttaccacaatttggagcccaaaatag

SEQ ID NO: 112325 - DNA, 324 bp, synthetic construct
  misc_feature 1..324: note = Description of Artificial Sequence: Synthetic coding sequence
  source 1..324: mol_type = other DNA
atggaggcgcttggcgatttggaaggcccccgcgcccccggcggcgacgacccggccggttccgccggcgaaacacccggctggctgtctcgcgaacaggtgttcgtgctcatttccgccgccagcgtaaatttagggtcaatgatgtgctattcgatcctaggaccatttttccccaaggaggctgagaagaaaggtgcaagcaacaccattataggaatgatcttcggatttcaatttacatcctggatctgcggcacatccatccctggatacggcaccgtgctgtgccacctgttcaccacgatttggagtccgaagtag

SEQ ID NO: 112326 - DNA, 711 bp, synthetic construct
  misc_feature 1..711: note = Description of Artificial Sequence: Synthetic coding sequence
  source 1..711: mol_type = other DNA
atgttctgttttgtgcgcgttgcaggcatcctgggcatctggaaactgtcttgcacctattggtctaagatctacgtgtgctcacggaatgtttgcctcagacgctcatacaacagcttgtggggttccttggagaccttcagtggcctggggcttatcctggggcccccagtcggagggtttctgtaccagagctttggctacgaggtgccctttatcgtgctcggttgtgtggtgctgctgatggttcctctgaacatgtacattctgcctaattacgagagcgatccaggcgagcatagcttttggaagttgatagccctgccaaaggtcggactgatcgcattcgtcatcaattcactgtcaagctgtttcgggttcctggatcctaccctgtcattattcgtactcgagaagttcaacctccctgctgggtatgtgggcctggtatttctaggcatggcgctgtcttacgctatatcttccccactgtttggtctcctatcagataaacggccgcctcttagaaaatggctacttgtgttcgggaatctcatcactgcgggatgctatatgctccttggcccagtccctatcctgcacatcaagtcccagctctggctgctggttctcatccttgtagtcagtggtcttagcgcaggcatgtcgattatcccaacctttcccgagatcctgtcttgtgctcagtag

SEQ ID NO: 112327 - DNA, 654 bp, synthetic construct
  misc_feature 1..654: note = Description of Artificial Sequence: Synthetic coding sequence
  source 1..654: mol_type = other DNA
atggatgccccacgtcggttccctaccctggtgcagctgatgcagccaaaagccatgcctgtagaggtcctgggccacctgcccaagagattctcatggttccactccgagtttctgaagaaccctaaagtcgtcagattagaggtctggctagtggaaaagattttcggtagagggggcgaaagaatcccgcacgtccagggcatgtctcagatccttattcacgtcaaccgcctggatcctaacggcgaagcggaaattctagtatttggaagaccttcctaccaggaagacactataaagatgattatgaacttagcggactaccataggcagctgcaggccaagggaagcggtaaggcactcgcacaggacgtggcaacacagaaagctgaaacccagagaagtagtattgaagtgcgggaagccggcactcagcgaagcgttgaggtcagggaagctggcacgcagaggagtgttgaagttcaggaagtggggacacagggatcccccgtggaagtacaggaggctggaacacagcaaagtctacaggccgcaaataagtccgggacgcaaagatccccggaagccgccagcaaagctgtgactcagagatttcgcgaagacgcaagagatcctgtaactaggctctag

SEQ ID NO: 112328 - DNA, 1416 bp, synthetic construct
  misc_feature 1..1416: note = Description of Artificial Sequence: Synthetic coding sequence
  source 1..1416: mol_type = other DNA
atgcctagcgaaacccacgcgatgctcgcgacactagcccgcgttgcagccctccgccgtacctgcttgttctccggaagagggggaggaagggggctgtggactggcaggccgcaaagcgatatgaataacatcaaacccctggagggggttaaaatactggatttgacccgagtcctggccggaccttttgcaacaatgaacctcggagacctgggggccgaagtgattaaagtggagagaccaggggcaggggatgatacaagaacgtggggacccccttttgtcggaacggaatccacttactatctcagtgtgaaccgaaataaaaaaagtatcgctgtgaacatcaaagatcccaaaggcgttaagattattaaggaacttgctgctgtgtgcgacgtgtttgtcgaaaattatgtgcccgggaagctgtctgccatggggctcgggtacgaggatatcgacgagatcgcccctcacattatctattgttctattacgggctacggtcagaccgggcccatatcacagcgggcaggctacgatgctgtggctagcgccgtgtctggcctaatgcatattactgggcccgaaaatggcgatcccgtacgccccggggttgcgatgactgatctagctacaggcctgtacgcgtatggtgctatcatggccgggctgatccagaaatataaaacaggtaaggggctgttcatcgactgtaacctcttgagttcacaggttgcctgcctgtctcacatcgcagcaaattatctcataggacagaaggaggcgaagaggtggggtactgcacacggatctatagtcccctaccaggctttcaagaccaaggatggttatattgttgtcggcgccgggaacaatcagcagttcgccactgtgtgcaaaattctggatctcccagagctgatagataattctaagtacaagactaatcatctccgggtgcacaaccggaaggagctcatcaagatcctatcagagcgttttgaagaagaactgacgagcaaatggctctatctttttgagggaagcggagtcccttatgggccaattaacaatatgaagaacgtgttcgcagaacctcaaaatgccgtttctggattccagtctttgctccattcattggcccacggaccgtttttacatttgcagggtagtgctcgggtgcttcacaatggacttgtgatggagatggagcaccctacagtcgggaaaatatccgtgcccggacccgcagtccggtactccaaattcaaaatgagcgaagcccggccccctccacttctgggccagcacacaactcacatcctgaaagaggtactgaggtacgacgaccgggctatcggagagctactatctgctggggtggtggatcagcacgagactcactag

SEQ ID NO: 112329 - DNA, 1338 bp, synthetic construct
  misc_feature 1..1338: note = Description of Artificial Sequence: Synthetic coding sequence
  source 1..1338: mol_type = other DNA
atgcctagcgaaacgcatgccatgctcgctactctcgcccgggttgccgctttacggcggacgtgtcttttctctggcagaggtggagggcgggggctctggaccggaaggcctcagagcgacatgaacaacataaagccgctcgaaggcgtcaagatattggacctaactagggttctggccgggccttttgctactatgaatcttggcgacctgggagccgaagtcatcaaggttgaacgtcctggggctggcgatgatacgcgaacttggggaccaccttttgttggcaccgaatcaacatactatttatccgtgaatagaaacaaaaaaagtatcgcagtgaacatcaaggaccctaaaggcgtgaaaataataaaagagctggctgccgtgtgcgacgtgtttgttgagaattacgtcccaggcaagctcagcgctatgggcctgggttacgaagatatcgacgaaatagctccacacataatctactgctctatcactggatacggccaaacgggtcccatcagccagagagcggggtacgacgctgtggcgtcagccgtatccggtctgatgcatatcacaggccccgaaaacggtgacccagtccgccctggagtggctatgacggatctggccacaggcttgtacgcctacggcgctataatggctggattaatccagaagtacaagaccggcaaggggctctttatcgattgcaacctcctttcctcacaggtggcctgcctgtctcatattgctgcaaattacctgatcggacagaaggaggccaagcgatgggggacagcacacggctccatagttccctatcaagcgttcaagaccaaggacggatacatcgtggtgggcgccggtaacaaccagcagtttgcaaccgtgtgtaagatcctcgacctcccagagctgattgacaattctaaatacaaaacaaaccatttaagggtgcataacagaaaagagctcattaaaatattaagtgagagattcgaggaggaactgacttccaaatggctgtatctgttcgagggaagtggcgtgccgtacggtcctatcaacaatatgaaaaatgtgttcgcagaacctcaggtcttgcataatggtctcgtgatggagatggaacacccaactgtcggcaaaatttcagtgcccggaccagccgtccggtactcaaaatttaagatgtcagaagcacgcccacctcctttgctgggacagcatacaacacacatcctaaaagaggtgctccggtatgacgatcgcgcgattggtgagctcctttccgcgggcgtagtcgatcagcacgagacacactag

SEQ ID NO: 112330 - DNA, 609 bp, synthetic construct
  misc_feature 1..609: note = Description of Artificial Sequence: Synthetic coding sequence
  source 1..609: mol_type = other DNA
atgctggccacactcgcgagagtggctgccctacgccggacttgcttgttttcaggcaggggcggcggccggggtctttggacaggcagaccccagagcgacatgaataatatcaagcccttggagggagtcaagatccttgacctgacgagggttctggcaggtccttttgccacaatgaatttgggagacctcggggcagaagtcataaaagttgagcggccaggagccggcgacgatacgcgtacgtggggccctccatttgttgggaccgagtctacctactacctgtccgtgaatcggaacaagaaatcgattgcggtcaacatcaaagaccccaaaggcgtcaagattatcaaagagctagctgcggtttgcgacgtgttcgtggagaattacgtcccagggaaactcagtgccatgggtctgggctatgaagatatcgacgagatagccccacacatcatttattgttctattaccgagaaaggcttcagccacgtggcgcaggacggtctcgatctgcagacatcaagcaaccttcctgcgttggttagtcagtccgccggcatcacaggaatgagtcaccgtgcttggcccactagctag

SEQ ID NO: 112331 - DNA, 1194 bp, synthetic construct
  misc_feature 1..1194: note = Description of Artificial Sequence: Synthetic coding sequence
  source 1..1194: mol_type = other DNA
atgccctcagaaactcacgccatgctggccactctggcccgcgtggctgcactcagacgaacctgtctgttcagcgggcgcggaggaggacgggggctctggacaggcagaccacaatctgatatgaacaacattaagcctcttgaaggtgtgaagattctcgatctgactagggtgctggccgggcccttcgctactatgaacctgggcgatctgggtgccgaggtaatcaaggtcgagagaccgggagcaggggacgataccagaacatggggacccccatttgtgggcacggaaagtacctattatctatcagtgaaccgaaacaagaaatctattgcagtgaatatcaaagatccgaaaggggtgaagatcatcaaagaactcgccgctgtgtgtgatgtctttgtggagaactacgttcccgggaagctgtcggcaatggggctcggctatgaggatatcgacgagattgctccccatatcatctactgctccattaccggatacggccagaccggccccatatcacagagggccggttacgatgctgtagcttccgcagtgagtgggttgatgcatattacaggacctgaggtggcatgcctcagccacatcgccgctaattatctgatcgggcagaaggaggcgaagagatggggaacagcgcatggcagcattgtgccttaccaagccttcaaaactaaagacggatatatagttgtgggggctggaaataaccagcagttcgctaccgtctgtaaaatactggacttaccagaactgatcgataacagcaagtataagaccaaccatttaagggtccacaatcggaaagagttaattaagatccttagtgaaagattcgaagaggaattgacgagcaaatggttgtatcttttcgaagggagcggggtgccgtatgggcctataaacaatatgaaaaacgtgttcgcagaacctcaagtgctccacaacggcctcgtaatggagatggagcatccgacagttggcaaaatcagcgtccctggacccgctgtgagatattctaagtttaagatgtcggaggccaggcctccacccctattgggacagcataccacgcatatcctcaaggaagttctgagatatgatgatagggcgatcggggagctgctctcagctggagttgtggatcagcatgaaacgcattag

SEQ ID NO: 112332 - DNA, 540 bp, synthetic construct
  misc_feature 1..540: note = Description of Artificial Sequence: Synthetic coding sequence
  source 1..540: mol_type = other DNA
atgcaacgccagaattttaggccgccaacccccccttatcccggacccgggggcgggggatggggctccgggagttccttccgggggacccccggcgggggcggccctcgcccgccgtcacctcgggacggatacggcagtccccatcacaccccaccttacggcccccggtcccgcccctacggatcaagtcatagtcctaggcacggagggtcgttcccaggaggcaggtttggctccccgtctcctggcggatatccaggtagttacagtaggagtccagctggctctcaacagcagtttggatacagcccaggacagcagcagacacacccccagggaagcccccgcacatccactccctttggttctggccgggtccgggaaaagcgaatgagtaatgaactcgagaactacttcaagccatccatgctcgaggacccatgggccggcctggaaccagtctcagtggtggacatctcacagcagtacagtaacacccaaacattcacaggcaagaaggggcgttatttctgctag

SEQ ID NO: 112333 - DNA, 480 bp, synthetic construct
  misc_feature 1..480: note = Description of Artificial Sequence: Synthetic coding sequence
  source 1..480: mol_type = other DNA
atgaaaatcgtggacgagagggagaaaaacctggacgacaaggcctaccggaatattaaagagctcgaaaactatgcggaaaacactcagtcttcactgctgtatctgaccctggagatcttgggtatcaaggatttgcacgcagaccacgcggcatcccatatcggcaaagctcagggaatcgttacatgcctgagagcaacaccttaccacggaagccggaggaaggttttcctgcctatggatatctgtatgttgcatggtgtgagtcaggaggacttcctgaggagaaatcaggacaaaaacgtccgggatgtgatctacgacattgcctcccaggcccatctgcacctgaaacacgcccggtccttccacaagacagtgcctgttaaggcctttcccgccttcctccaaactgagattaaggacgccgatactcagggggtatgtctcgcccagcccgcaagtttgggcaaatag

SEQ ID NO: 112334 - DNA, 1002 bp, synthetic construct
  misc_feature 1..1002: note = Description of Artificial Sequence: Synthetic coding sequence
  source 1..1002: mol_type = other DNA
atggccgccagtgctcacggatccgtttggggcccactcaggctcgggattcctgggctgtgctgccggcgtcctcctctggggctctatgcccggatgagacggctgccaggtccggaggtctccggaagatccgtggctgccgccagcggacctggcgcgtggggcaccgaccactattgtctagaattattacgcaagcgagactatgaggggtacctgtgcagcctcctcttgcctgctgagtctcgctcttctgtattcgctctgagagccttcaatgtggagttggcacaagttaaagatagtgtgtccgagaagaccattggcctgatgcggatgcagttttggaagaagacagtcgaggatatttactgcgacaatcctccccaccagccggtcgcgatcgagctctggaaagctgtcaaaagacacaatctcaccaaacgttggctgatgaaaatagtggatgaacgagaaaagaatttagacgataaggcttaccgcaatatcaaggagctagaaaattatgccgaaaacacccaaagttccctgctctatctgaccctggaaattctgggtattaaagacttacacgctgaccatgctgcctcccacatcggcaaggcacagggaatcgtaacctgcctgcgggcgaccccttaccatggctctagaaggaaagtctttctgccaatggacatttgcatgctccacggcgtctctcaggaagactttctgcgtagaaaccaagataaaaatgtgagggacgtgatttatgacatcgctagccaggcgcatttacacctgaagcacgcccggtcattccacaaaaccgttcccgtcaaggccttccctgcgttccttcagactgtttcactggaagacttccttaaaaaaatccagagagtggatttcgacatatttcacccaagtttgcagcagaagaacacactgttgccactatacctgtacatccagtcctggcggaagacctattag

SEQ ID NO: 112335 - DNA, 846 bp, synthetic construct
  misc_feature 1..846: note = Description of Artificial Sequence: Synthetic coding sequence
  source 1..846: mol_type = other DNA
atgcctatcagcataagtcacagctcctggctagtgcaaaggaagagggactatgagggttacctgtgctctcttctgttgcctgcggagtcacggagctctgtgtttgcgctgcgggcgttcaatgtggaactcgctcaagtgaaggattcagtctcggaaaagacaatcgggctgatgaggatgcagttttggaaaaagactgtcgaggatatctactgcgataatccacctcatcaacctgttgctatcgagctgtggaaagccgttaaacggcataatctcaccaaacggtggctaatgaagatcgtagatgagcgtgagaaaaacctggacgacaaagcttaccgcaacatcaaggagttggaaaattatgctgagaatacacagtctagcttgctgtatctgaccctggaaatcctgggcatcaaggatctgcacgccgaccacgccgcttcccacatcggcaaggcacagggaatagttacgtgtctcagggcaactccttaccacggctccaggcgcaaggttttcctccctatggatatttgtatgctgcacggagtttctcaggaagatttccttcgccgaaaccaggataaaaatgtcagagacgtgatatatgatatcgcctctcaggcccatcttcatctgaaacacgctcgctctttccacaagaccgtgcccgttaaggctttccccgccttcctgcagaccgtctctctggaagacttcctcaaaaaaattcagcgagttgattttgatatcttccatccgtccctccagcaaaagaataccctgctccctctctacctatacatccaaagttggaggaagacctactag

SEQ ID NO: 112336 - DNA, 321 bp, synthetic construct
  misc_feature 1..321: note = Description of Artificial Sequence: Synthetic coding sequence
  source 1..321: mol_type = other DNA
atgaaggctaaacgttcacaccaggccgtgattatgagcacaagtctacgagtgtccccgtctatccacggataccattttgacaccgcgtctcgaaaaaaggctgtgggcaatatattcgagaacacagaccaggaatcactggaaagattgtttagaaactccggggacaagaaagctgaagagagggcgaagatcatttttgcaattgatcaagatgtagaggagaagaccagggctcttatggccctcaaaaagcgaaccaaggataaattattccagttcctgaagctcagaaaatactctattaaggtgcactag

SEQ ID NO: 112337 - DNA, 1185 bp, synthetic construct
  misc_feature 1..1185: note = Description of Artificial Sequence: Synthetic coding sequence
  source 1..1185: mol_type = other DNA
atggccggagccgcgatggctgagagagggagagtgcctccgccagctcctgccccttccactgaaggacttccccgagcctttctccagtccctgagaaccctgtttgacatcctggacgacaggcgtcgaggctgtgtccacctgcgtgaaatcgagtcaaggtggcagggaacagatgcccgcgagttacctagaggagtactcgaaggactgcggcaggttgcccccgcatctggttatctaaccttcgaaaggtttgtcgctgggctgcggacgagccttctcagcgctgacgggggcccaagagaccctaccagagccccagcacgacctggtgatcagccaccaccacccccacagaggctggtgtttgcccccgccgacgaacctcggacagttctcgagcgaaagccgctaccccttggcgtacgggcaccgctggctgggccctctgcagccgcacggagccctgaacagctctgcgctccagctgaagctgcgccatgccccgccgaacctgaaaggtctcagagtgctgcccttgagccgtcaagcagtgcggatgctggcgctgtggcatgtagagccctggaggccgattctggcgacgctaggcgagccccacgtgccagaggggaaagaaggcgccacactatcgccagcggggtggactgcggccttctgaagcagatgaaggagctggaacaggaaaaagaggtgctactgcaaggccttgagatgatggctcgcgggagagactggtatcaacagcagcttcagagggtccaggaaaggcagcgcagactcggccagtcgcgcgcctccgctgactttggggccgcaggttccccccgtcctctggggcgccttctcccaaaggtgcaggaagtggctcgttgcttgggagaacttctagctgcagcttgtgcgagccgcgccctgcctccctccagctctgggccaccgtgtcctgctctgacctcaactagtccgcctgtgtggcaacagcaaaccatcctgatgctgaaggagcaaaaccggctgctgacacaggaggtgactgagaagtcagaacgcataacacagctagaacaagaaaagtcagctctgattaagcaattattcgaagcccgggctctgtcccagcaggatggcggcccactagactctacttttatttag

SEQ ID NO: 112338 - DNA, 1035 bp, synthetic construct
  misc_feature 1..1035: note = Description of Artificial Sequence: Synthetic coding sequence
  source 1..1035: mol_type = other DNA
atgcgcagaccaagacagggcggtgggggcgctggggggagtgccgccgctagagctcgagcggggggattaggaggcggaagcgttccagcgagagcccggggagcgcccgctgcagcaagggcagcctggcttagagatctgtgtgcacgcatggcaagaccacctagacaacatcctggagtttgggcatctctgttgctcctactgctaaccggccctgccgcgtgtgcagccagtcccgcggacgatggtgccggtcctggggggcggggaccacgaggtcgggctagaggagatactggggcagacgaggcagtcccaaggcacgacagttcttatggtacgttcgccggtgagttttatgacctacgctacctctctgaagagggctatccgtttccaaccgccccaccagtggacccgttcgccaaaatcaaagtggatgactgtgggaagacgaaaggctgctttaggtacggcaagcccggctgtaatgccgagacttgtgattatttcctgtcataccggatgataggcgccgatgttgagttcgaactgtctgcagacacagacgggtgggtggccgtgggtttttcatccgataaaaagatggggggggacgatgtgatggcttgtgtccatgatgacaacgggcgggtgcgaattcagcatttctataacgtcggccagtgggccaaagaaatacaacggaaccccgccagagacgaagaaggcgtctttgaaaataatagggttacttgtagatttaaacggcccgtgaatgtgccaagagatgagactatcgtcgacctgcatctcagctggtattacttgtttgcctggggtcccgcaatacagggttctatcacgcgccatgacatagacagcccaccggccagcgagcgtgtcgtgtccatctacaagtatgaggatatttttatgcccagtgccgcctaccagactttctcaagtcccttttgcttgctcctgatcgtcgccctgactttttatttactgatgggcactccatag

SEQ ID NO: 112339 - DNA, 393 bp, synthetic construct
  misc_feature 1..393: note = Description of Artificial Sequence: Synthetic coding sequence
  source 1..393: mol_type = other DNA
atgtcatcctccgggggtgcccccggcgcatctgcaagttcagcccccccggcacaggaagagggtatgacctggtggtatcgatggctgtgccgtctctctggggttttgggggcagtttcttgcgctatcagcggactgttcaactgtatcaccattcaccccttgaatattgcagccggcgtatggatgatgatggccgtggtgccaatcgtgatcagtctcacgctcacgacacttctaggaaatgcgattgccttcgccacaggggtgctatacgggttgtctgcactcggcaagaaaggggacgccatatcttacgctcgaattcagcagcagcggcagcaagcggatgaagagaagctagccgaaactctggagggcgagctctag

SEQ ID NO: 112340 - DNA, 519 bp, synthetic construct
  misc_feature 1..519: note = Description of Artificial Sequence: Synthetic coding sequence
  source 1..519: mol_type = other DNA
atgtctagtagtggcggggcccctggcgcgtccgccagtagtgccccacccgcccaggaagaaggcatgacttggtggtaccgctggctgtgcagactgtcaggcgtgttaggagctgtgagctgcgccatctcaggactgttcaattgtattacaattcatccgttgaacatagccgcgggggtctggatgatcatgaatgccttcattctattgttgtgcgaggccccgttttgctgtcagtttattgagtttgcgaatacggttgctgagaaagttgataggctgcgctcctggcaaaaggccgtcttttattgcggtatggcggtggtcccaatcgtgatctctctgactttaactaccctccttggcaatgcgatcgcgttcgctaccggagttctctatgggctctctgccttggggaaaaagggagatgccatctcttatgcacgcatacagcaacagcgacagcaggccgacgaagagaaactagcggagactctggagggcgaattgtag

SEQ ID NO: 112341 - DNA, 345 bp, synthetic construct
  misc_feature 1..345: note = Description of Artificial Sequence: Synthetic coding sequence
  source 1..345: mol_type = other DNA
atgctcaccgcggcggggtccacggctgaattgtcagcctgtgcgattagcggcctgtttaattgcattactatacacccgttaaatattgcagcaggagtatggatgattatgaatgcctttattctgcttctctgcgaagcaccattttgctgccagttcatcgaattcgctaataccgtggccgagaaagtcgacaggctgcgcagttggcagaaagccgtgttttattgtgggatggccgtggttccaattgtgatatcgctgactcttacaacgctgctgggcaatgccatcgcattcgctacgggggtcttgtatggcctgagcgccctgggcaagtag

SEQ ID NO: 112342 - DNA, 489 bp, synthetic construct
  misc_feature 1..489: note = Description of Artificial Sequence: Synthetic coding sequence
  source 1..489: mol_type = other DNA
atgagctctagtgctccaccagcgcaagaagagggaatgacatggtggtaccggtggctttgtaggctctcgggagtgttaggcgctgtttcctgcgccatcagtggcctgtttaattgtattactattcatccactgaatatcgccgctggcgtatggatgatcatgaatgctttcattttgctgttgtgcgaggcaccattctgttgccagtttatagagttcgctaataccgtcgccgaaaaggtcgaccgtttaaggtcttggcagaaggctgttttctactgtggcatggccgtggtgcctatcgtaatctcattaacactcactactcttctgggaaatgcgattgcttttgccactggcgtgctgtatggactctccgccctgggaaaaaaaggtgacgcgatatcatatgcaagaattcagcaacaaagacagcaggccgacgaggagaaactcgccgagacactggagggggagctctag

SEQ ID NO: 112343 - DNA, 702 bp, synthetic construct
  misc_feature 1..702: note = Description of Artificial Sequence: Synthetic coding sequence
  source 1..702: mol_type = other DNA
atgagctccagtggaggtgcacccggtgcgagtgcctcatctgcccccccggctcaggaggagggcatgacctggtggtatcggtggctctgccgtctctccggtgtcttgggcgcagttagttgcgccatctccggactgtttaattgcataactatacatcccctgaatattgctgcgggcgtctggatgataatgaatgcttttattttactactgtgtgaagcgcctttctgctgccaatttatcgagtttgctaacacggtcgcagagaaagtcgacagactccggtcatggcaaaaggcagttttctattgcgggatggccgtcgtgccgatcgtgatttctctgaccctgaccacactgttgggcaacgccatcgcattcgccactggagttttgtacggcctgtccgctctcggtaaaaaggcccaaacggaagctggaagcttcgcagcccagcatccgagggaaccaggaccattttcagaaggcacgcggcaggccttcgcaactcctgccgtggttagtggtgaaatccgcatgccagccggggccatgaggagccccatgcccggatcgagctccaggggctctaggaggatgcgtcggagcagcagacgtccttggcggggttcctgcgaagggctgggtgcccccccctcactaagccctttactggctctttgtggtagcaagtag

SEQ ID NO: 112344 - DNA, 576 bp, synthetic construct
  misc_feature 1..576: note = Description of Artificial Sequence: Synthetic coding sequence
  source 1..576: mol_type = other DNA
atgtcaagctccgggggtgcaccgggagcatctgcgtcaagtgcaccccctgcacaggaggaggggatgacttggtggtatcgctggctctgtcgcctgtccggtgtgcttggagccgtaagctgcgccattagcgggttgtttaattgtattactatacacccactgaatatcgccgcaggtgtttggatgatgatggctgtggtcccaatagtcatttctctaacactcacaacactgctaggcaacgccattgcattcgctaccggcgttctgtatgggctttccgccctgggtaaaaaagcccagacagaggccggatcctttgcagctcagcatccccgggagccaggtcctttcagcgagggaacaaggcaggctttcgcaactcctgcggtcgtgtccggggaaatcaggatgccagccggcgctatgagaagccccatgcctggtagttcttctcggggctcaagacggatgaggcggagtagtcgtagaccatggcgcggctcatgcgagggccttggcgcccctcccagcttgtcaccccttctggccttatgcgggtccaaatag

SEQ ID NO: 112345 - DNA, 669 bp, synthetic construct
  misc_feature 1..669: note = Description of Artificial Sequence: Synthetic coding sequence
  source 1..669: mol_type = other DNA
atgagtactctgtgtccaccccccagtcctgctgtcgctaaaacagagattgcgctgagtggaaagtctcctctgctggcagccacatttgcatattgggataatatcctgggacctcgcgttcggcacatttgggcccccaaaaccgagcaggttttgctctccgacggagaaatcacgtttctcgcaaaccataccctgaacggcgagattcttaggaacgccgagtctggtgccatcgatgtaaaatttttcgtgctgtcagaaaagggtgtgatcattgtgagcttgatctttgacggaaattggaatggtgaccggtccacatacgggctcagtattatcctgcctcaaactgagctgagcttttacttaccactacacagagtgtgcgtagatagactgacacacatcatccgcaaaggtcggatatggatgcataaggagcggcaggaaaacgtacagaaaataattcttgaaggcacggaacgcatggaggatcaaggccaatcaatcattccaatgcttactggggaagttatccccgtgatggagctcctctcaagtatgaaatctcattccgtgcccgaggagatcgatatcgcagacacagtcctcaatgatgatgacatcggagactcatgccatgagggatttcttctcaagtag

SEQ ID NO: 112346 - DNA, 669 bp, synthetic construct
  misc_feature 1..669: note = Description of Artificial Sequence: Synthetic coding sequence
  source 1..669: mol_type = other DNA
atgtccaccctttgccccccccccagccccgcagtagcgaagacggagattgccctatcagggaaatcacccctgttggcggctacgtttgcctattgggacaacattttgggcccccgggtcagacacatctgggctccgaagaccgagcaggtgttactgagtgatggcgaaatcaccttcttggcgaaccacacactgaacggcgaaattcttagaaacgccgagagcggtgctatcgacgtaaaattctttgtcctatccgaaaaaggcgtgataatagtatctttgattttcgacggcaattggaatggcgatcggtcaacctacggcctctctattatcctgccccagacagagcttagcttctacctgcccctgcatcgcgtctgtgtggatcggctaacacacattatcaggaaaggccgaatctggatgcataaagaacgccaagaaaacgtgcagaagatcattctggaagggaccgagcgcatggaggaccagggccagtcaatcatccccatgctgacaggagaggtgatccctgtgatggagttattgtcttctatgaagagtcattccgtaccagaggaaattgacatcgccgatacagtgctgaatgacgacgacattggggactcatgccacgagggcttcctcctcaagtag

SEQ ID NO: 112347 - DNA, 1446 bp, synthetic construct
  misc_feature 1..1446: note = Description of Artificial Sequence: Synthetic coding sequence
  source 1..1446: mol_type = other DNA
atgtcgaccctctgccctccgccctcacctgctgtggctaagacggagatcgccttgtcaggaaagtcacccctcctcgcagccacctttgcttactgggataacattctggggccaagagtgaggcacatttgggctccaaaaactgaacaggttctcctgagtgacggggagatcacatttttagccaatcatacattaaatggagagatactaagaaacgcggaatctggcgccattgatgttaagttcttcgttttgtctgagaaaggagtgatcatagtgtccctgatcttcgacgggaattggaatggcgatcggagtacttacgggcttagcatcatcctgccacagaccgaactgtccttctacctcccactgcaccgggtgtgcgtcgaccggctgacacacattatcagaaaaggcagaatctggatgcacaaggagagacaggaaaatgtgcagaaaatcatcttagagggaaccgaaaggatggaagaccagggacaaagcattattcccatgctgaccggagaagttattcccgtgatggaactgttatcttctatgaagtcgcattctgtgcctgaggaaatcgacatagccgacacggttttaaatgacgacgatataggggactcttgccacgaaggctttctgttgaatgcgatcagttcccacttgcaaacatgcggttgttcggttgtggtcggttcttccgccgagaaagttaataagatcgttcggaccctctgtctgttccttactccagcagagcgtaagtgttccaggctttgcgaggccgaatctagctttaagtacgaaagcggcctttttgtgcagggtttattgaaagatagcacggggagcttcgttttgccatttagacaagtgatgtacgcgccatatcccacgacacatatcgacgttgacgtgaataccgtcaagcaaatgcccccctgccacgaacatatttacaatcagcgtcgttacatgcgttccgagctgactgccttttggagggccacttcggaggaggacatggcccaagacacaattatctacacagatgaatctttcacccccgatctgaatattttccaggacgttttacatagggacacccttgtgaaagccttcctggatcaggtgttccaactcaaacccgggctcagcctgcgcagcacttttctggctcagttcctgctggtcctgcacaggaaagccctgacacttattaaatatatcgaggatgacactcaaaagggcaaaaagcctttcaagtcactaaggaacctaaagatcgacctggaccttacagcggagggggacttgaatatcataatggcactggctgagaagatcaaacccggattgcactcattcatcttcggcagacccttttacacctccgtccaggagcgggatgtgctgatgaccttctag

SEQ ID NO: 112348 - DNA, 168 bp, synthetic construct
  misc_feature 1..168: note = Description of Artificial Sequence: Synthetic coding sequence
  source 1..168: mol_type = other DNA
atgcaaaaccagagcagcacaaatcatcctggcgccagcatgcttatgcacatccacctggatacaagctctttaaagacgctgcacttgggaaccctgttttttttattttatctcgcacttacgcagaacgaggagaatatttgcgacggaaaggtgaccctctag

SEQ ID NO: 112349 - DNA, 225 bp, synthetic construct
  misc_feature 1..225: note = Description of Artificial Sequence: Synthetic coding sequence
  source 1..225: mol_type = other DNA
atgcagaatcagtcttctaccaatcatcccggggccagcatagccctcagccgcccttcattgaacaaagacttcagggaccacgctgagcaacagcacatcgccgcccagcagaaggccgccctgcagcacgcccatgcgcattcctcaggctatttcattactcaggatagcgcattcgggaacctaattctccctgtcctcccccgtttggatccggaatag

SEQ ID NO: 112350 - DNA, 168 bp, synthetic construct
  misc_feature 1..168: note = Description of Artificial Sequence: Synthetic coding sequence
  source 1..168: mol_type = other DNA
atgcaaaatcagagctctaccaatcacccaggagcctccatgttaatgcacatccatctggacaccagttctttaaaaaccctccatctggggaccttgttctttctgttctaccttgcccttacacagaatgaggagaacatctgtgacggcaaagtaacgctgtag

SEQ ID NO: 112351 - DNA, 315 bp, synthetic construct
  misc_feature 1..315: note = Description of Artificial Sequence: Synthetic coding sequence
  source 1..315: mol_type = other DNA
atggccgcgaacagtagcggacagggctttcaaaacaaaaatagggtggccattttggcagaattagataaggagaagaggaagttgctcatgcagaatcaatcctccaccaaccacccgggcgcctcaatcgccctatcccggccttccctcaataaggactttcgcgatcacgctgaacagcagcacatagcggcccagcagaaggctgccttgcagcatgcccatgcacactcgtcaggctacttcatcacccaggactccgcttttggtaatctcatactcccagtgcttcctagacttgatcccgaatag

SEQ ID NO: 112352 - DNA, 2190 bp, synthetic construct
  misc_feature 1..2190: note = Description of Artificial Sequence: Synthetic coding sequence
  source 1..2190: mol_type = other DNA
atgttctccgctctgaagaagctggttggctccgaccaggctcctggcagggacaagaatatccccgcggggctacagtctatgaatcaggccctgcagcggcgttttgccaagggcgtgcagtacaacatgaaaattgtgatcaggggcgaccgtaacacaggtaaaactgccctgtggcatagactgcagggtcgtccctttgtagaagaatacatccctacccaggagattcaggtgaccagtattcactggagttacaaaaccacagatgatattgtcaaggtggaggtttgggacgtggtagataagggtaagtgcaagaaaagaggagacggcctgaagatggagaacgaccctcaggaggcggagagtgagatggctttggatgccgaattccttgacgtatataagaattgtaatggcgtagtcatgatgtttgatataacaaagcagtggaccttcaattatatacttcgtgagctgccaaaggtgcctacgcacgtgccagtctgtgtgctggggaactatcgtgatatgggcgaacaccgcgtaattttgcctgacgatgtgcgtgacttcattgacaatttggaccggccccctggatccagctactttaggtatgccgagtcttcgatgaaaaacagttttggcttaaagtatctgcacaagttctttaatataccctttctgcaactgcagcgggaaaccctcttaaggcagctggagaccaatcaactggacatggacgctaccctggaagagctctctgtccagcaggagacagaagatcagaactatggcatcttcttggagatgatggaggcaaggtctcgtgggcacgcttcccccctggccgcgaatggacagtcgccttctccaggctcacagagccccgtagtgcctgcaggagctgtgtcaacaggttctagcagcccaggcacccctcaacctgccccacaactgcctctgaacgccgctccaccttcaagcgttcccccagtgcccccatccgaagcactcccacccccagcatgtcctagcgcccccgcaccacgacggtcaattatttcacgcttgttcggaacctctccggcgaccgaggcagctcctcctccgccggagccggtccccgccgccgaggggcctgcgaccgtccagtctgtggaagattttgttccagacgatcggctggaccggtccttcctggaggacacaactcccgcccgagacgaaaagaaggtgggagcaaaagccgcacagcaggattctgactctgatggggaggcattaggggggaaccccatggtggcaggcttccaggacgacgtggacttagaagatcagccccgcggcagtcctccccttcccgccgggcctgtaccatcgcaggatattacccttagcagcgaagaggaggctgaagtcgccgcccccaccaaaggacccgccccagctcctcagcagtgttctgagccagagaccaaatggtcaagtattcctgcttcgaagccgagaagagggacggctcctactcgcacggctgcccctccttggcccgggggcgtgtcagtaagaaccggccccgagaagcgcagttcgacccgcccccccgccgaaatggaaccgggaaagggcgagcaggcttcaagctccgagagtgatccggaaggacccattgcagcccagatgctgagttttgtgatggatgacccagactttgaatctgaaggaagcgatacacaacgccgagccgatgacttccctgtgagggacgatccatctgatgtgaccgacgaggacgaagggcccgctgagcctccccccccaccaaaactccccttacccgcattccgactgaagaacgactctgacttgttcggattaggtcttgaggaggcaggccccaaagaatccagcgaggagggcaaagaagggaagacgccctctaaagaaaaaaagaagaagaagaaaaaagggaaagaggaagaggaaaaagccgccaaaaagaaaagtaagcataaaaagagtaaggacaaggaagaaggaaaagaggagcgcagacgccgtcagcagcgcccacccagatctagggagaggactgctgccgacgaactggaggcgttcctgggtgggggagcccccggcggccggcacccgggtggcggcgattacgaggagctgtag

SEQ ID NO: 112353 - DNA, 1563 bp, synthetic construct
  misc_feature 1..1563: note = Description of Artificial Sequence: Synthetic coding sequence
  source 1..1563: mol_type = other DNA
atgttcagcgcgctgaagaagctggtgggcagtgatcaggcccccggccgcgataaaaacatccctgccggactacaaagcatgaatcaggctttacagagacgattcgcaaagggggtgcagtataacatgaaaatcgtgatccgaggagaccgcaatactggaaaaaccgcactctggcatcgtttacagggaagacctttcgtcgaggagtatatccctactcaagaaatccaggtgaccagcattcactggagctacaaaacaactgatgacatcgtgaaggtggaagtctgggatgtggtggataaggggaagtgtaaaaagaggggcgatggtctgaaaatggaaaatgatccccaggaagcagaatccgagatggcgctggacgctgaatttctggacgtttataaaaattgtaacggcgttgtcatgatgtttgacataaccaagcagtggacgttcaactatatcctgagggaactgccgaaagtccctactcacgtccccgtgtgcgtccttggaaattatcgggacatgggtgagcatagggtaatactgccagacgacgtgcgtgacttcatcgataatttggatcgcccgcccggttcttcctatttccgctacgccgagtccagtatgaagaactcattcgggctgaagtatctgcacaaattctttaatatacccttcctgcagctgcagcgggagacgctgctccggcagcttgagaccaaccagctggacatggatgccacattagaggagttatccgttcagcaggagaccgaagaccagaattacggtatatttcttgaaatgatggaagcgagaagtcgcggtcacgcatctcccttggcagcaaatgggcagtctccatctccaggctcacaatcgcccgtcgtgccagccggtgctgtgagtaccggttcctcaagccctggcaccccccagcctgcaccccagctccccctgaatgcggccccgcccagtagcgtcccccctgtccccccaagcgaggctctgccaccaccagcttgcccctctgctcctgccccccgcagaagcataataagccggcctcccccctggggctggcgcctgagaggagccctcggaagaagagggcagtggcccccttggggcggaggacgggcctgtcactgtttaggcagacacctgccgctgtaccaccgcttatgccgatgccccgttgccgcagtctgcgcttctgagctggaagaggctggccactggtggtctccgggctgggcgctgcaggtactgggcctccaggcgcagtgcgagcccgccttgcaggagggccgagggcagctggctagtgcccggctgggtgggcaccctgggccacttggcgccgaacctcccgtgtttctgagagacgtgacagaggctcaggagggacccgtccgcgtatgcctgcagcggttgggccgcgggaggctcgccgtgggatgcgctctgccccgccatctcctagcactgagagctcatcttggtcctcaacacgcttacggatccgcatctgggagagaaccctag

SEQ ID NO: 112354 - DNA, 2193 bp, synthetic construct
  misc_feature 1..2193: note = Description of Artificial Sequence: Synthetic coding sequence
  source 1..2193: mol_type = other DNA
atgtttagtgccctgaagaaactagttggctccgatcaggcacccggacgcgacaaaaacattccagccggcctacagtccatgaatcaggccctgcagcgaagattcgctaagggggttcagtataacatgaagattgtgattagaggcgaccggaataccgggaagactgccctttggcatagactacagggaagaccattcgtcgaggagtatattcccacacaggaaatccaggtaacatccattcattggtcatataaaaccacagacgatatagtgaaagtagaggtgtgggatgttgtcgacaaggggaagtgcaagaagcgcggcgacgggctgaagatggagaatgatccccaagaggctgagtcagagatggccttagacgcagaatttctcgacgtgtataagaattgcaatggagtggtgatgatgtttgacattaccaagcaatggacctttaactacatcttgagggagttacctaaggtaccaacccatgtccctgtctgtgtgctgggtaattatagagacatgggagaacacagagtcattttgccagatgacgtcagggatttcatcgataatctggactcccgacccccaggctcatcatacttcaggtatgccgagagctcaatgaaaaactcatttggattgaagtatttgcacaagttcttcaacatacctttcctgcagctgcagagggaaacgttgcttagacagctcgaaaccaatcagctcgatatggatgctacgctggaggagttatcagtgcagcaggagacagaggaccagaattacggcatcttcctggagatgatggaggcccggtctcgcggccacgcctcacctcttgcagccaatgggcaatccccttctcctgggtctcagtctccagtcgtgcctgctggtgctgtgtcaacaggatccagttctcctggcaccccacaaccagccccccaactccccctgaacgctgcacctccctcctcagtacctcccgtgccaccctctgaagcacttccgcccccagcctgcccaagcgcgcccgctccaaggcggagcatcatctcccgactgttcgggacatcccctgcgacagaagccgctccccccccaccagaaccagtccccgcggctgaagggccagccacagtacagtccgtagaggacttcgtgccggacgaccgtctagataggagttttctggaggataccacccctgcaagggacgagaagaaggtgggcgccaaggcagctcagcaggacagtgactcagacggggaagctctaggtggtaatccaatggtagccggctttcaggatgacgtcgacctcgaggaccagccacgcggctccccacccctgcctgctgggccggtgccctctcaggacattaccctgtcatccgaggaggaggccgaggtggccgctcctactaaaggccccgcacctgccccccaacaatgcagcgagccggagaccaaatggtcttctatccccgcatctaaaccgcgccgggggacagcaccgaccaggaccgccgctcctccttggccgggtggtgtgtcagttcgaaccggcccggaaaagaggagtagcactaggcccccagccgagatggaacctggcaagggggagcaggcgagcagctccgaatctgatcccgaaggtcctatagccgcccagatgctgtctttcgtgatggacgatcctgactttgagagcgagggatctgatacccaaagaagagcagacgactttcctgtgagagacgacccgagcgatgtcacagatgaggacgaaggacccgccgaacctcctccaccaccaaagttgccactacccgcctttcgactcaagaatgattcagacctgtttggcctcggactggaagaagccggcccaaaggagtcatctgaggaaggtaaagaggggaaaaccccatcaaaggagaagaagaagaagaaaaagaaggggaaggaagaagaggaaaaggccgcaaagaagaaaagcaagcacaagaagagcaaggacaaggaggaaggcaaggaggaacggcggaggcgccaacaacggcctcctcgctcccgcgagaggacggcggccgacgaactggaggcatttctcggcggcggggcccccggcggccgccatccgggagggggggactacgaagaattatag

SEQ ID NO: 112355 - DNA, 945 bp, synthetic construct
  misc_feature 1..945: note = Description of Artificial Sequence: Synthetic coding sequence
  source 1..945: mol_type = other DNA
atgtttagtgccctaaagaaactcgtgggctcggaccaggcacctggccgcgacaagaacattccggctggactgcagagtatgaatcaggctttgcagagaaggtttgcaaaaggcgttcaatacaatatgaaaatcgtgattaggggtgatagaaatactggaaaaactgccctctggcatcggctccagggccggccattcgtggaagaatatatccccacacaggagatccaggtcacttccattcactggagctataaaactaccgatgatattgtgaaagtcgaggtctgggacgtggtcgacaaggggaaatgcaagaaacggggggacggcctgaaaatggagaacgacccccaggaggctgagtctgagatggctctggacgccgaattcctggatgtttacaaaaactgtaatggcgtggtcatgatgtttgatattacaaagcagtggaccttcaactatattttgcgagagcttccaaaggtgccaacccacgtaccagtgtgtgtgctgggaaattatcgcgacatgggggagcaccgcgttatcttgcccgacgacgtgagagactttatcgacaacttagacagaccacctggctccagttactttagatatgctgagtcgtcaatgaagaacagttttggactcaaatatctgcacaaattttttaatattccctttctgcagttgcagaaagatgttagacttgcacaggaaaggggatgcgctgtcgtgcttgtttctgaggaagttcgtatgccggcaggctgggactgttgttggggacggttgggttggaaggaggggggctcccagacctgcccggtaccagctcttttaggacggccgcttctgccagccgagccaagtccacaccattgggtggactatagccttgaatcctcccccttgctctcatgctctatcccctag

SEQ ID NO: 112356 - DNA, 1566 bp, synthetic construct
  misc_feature 1..1566: note = Description of Artificial Sequence: Synthetic coding sequence
  source 1..1566: mol_type = other DNA
atgttcagtgcactgaaaaagctcgtcgggtccgatcaggctccgggacgggacaagaatatccctgctggcctccagagcatgaaccaggctttgcagcggaggtttgctaagggtgtccaatacaacatgaagattgtgattagaggggacagaaacactggcaagacagccctgtggcaccggctccagggtcggcctttcgtcgaggagtacattccaactcaagagatccaggtcacaagcatccattggtcctacaagaccacggatgatatagtcaaagtggaagtttgggacgtcgttgacaaggggaagtgcaaaaagcggggcgatggcttaaagatggagaacgatccacaggaggcagagagtgagatggccctggatgctgaatttttggatgtatacaagaactgcaacggcgtggtcatgatgttcgatataacgaaacaatggacctttaactatatcctgcgcgagctcccaaaagtgcctacccacgtccccgtgtgcgttctcgggaactacagggatatgggggagcaccgcgtgattctacccgatgacgtgagagacttcattgataatctagacagcagaccgccgggaagcagctacttcaggtatgccgagagcagcatgaaaaacagcttcgggctgaaatatctgcataagtttttcaatattccttttctccaactgcagcgcgagaccttactgagacagctggagacaaaccagctcgacatggacgcgaccctggaggagctgtccgtccagcaggagaccgaagaccaaaattacggcatcttcctggagatgatggaggccaggtcaagggggcacgcttccccattggccgcgaacgggcaatctccaagccctggaagccagagtcctgttgttcctgccggggccgttagcacaggctccagctcaccaggcaccccacagcccgcacctcagctccccctcaatgctgcgcctccttcttcagtgcccccagtgcccccaagtgaggcactacctcctcccgcctgcccatctgccccagcgcctcgccggagcattatcagccggcctcctccgtggggctggagactccgcggcgccctgggacgccgaggccagtggccaccctggggcggcggtagggcctgccattgcctggggcgacatctccccctttaccatcgcttatgccgctgccccgtcgcagctgtgtgtgctagtgagctggaagaggcggggcactggtggtcgccaggctgggctttacaggtgcttgggctgcaagcccagtgcgagcctgccttgcaggagggacgtggtcaactggctagcgcccgcctggggggccatcctggtcctttaggggccgaaccacccgtgttcctgcgcgacgtcaccgaggcacaagagggcccggtccgcgtatgcctacaaaggttgggtcgtggccgcttggccgttggctgtgcactccctagacatctccttgctctcagggcccaccttggtcctcagcacgcatatggcagcgcatcagggcgtgaaccttag

SEQ ID NO: 112357 - DNA, 1845 bp, synthetic construct
  misc_feature 1..1845: note = Description of Artificial Sequence: Synthetic coding sequence
  source 1..1845: mol_type = other DNA
atggaaaacgatccgcaggaggcagagtccgagatggctctggatgcagaattcctggatgtctacaaaaattgcaatggtgttgtgatgatgtttgacatcaccaagcagtggacttttaattatatcttgagagagctccccaaagtacctacgcacgttccagtgtgtgtgctgggcaactacagagacatgggcgagcacagagttatacttccagacgatgtgagagactttatcgacaacctagaccgtccgcccggttcgtcttatttcaggtacgcagagtcctcaatgaagaacagctttggcctgaaatatctgcacaaatttttcaacatcccttttctacaactgcagcgtgagaccctgttgaggcaacttgaaaccaatcagctagacatggacgccacactcgaggaattgtccgtgcagcaggaaactgaggaccagaactacgggattttcctcgaaatgatggaggccaggtcccgaggtcacgccagtccactcgccgccaacgggcaaagcccctcccctggatcccagagcccggttgttcccgctggagccgtaagtaccggctcgagcagtcccggaacccctcagccagctccacaactccctctgaacgccgcgccaccaagtagtgtgcccccagttccacctagtgaggccctgcccccgcccgcatgcccgtctgcacctgcaccccggcgctcgattatcagtcgactgttcgggactagtccagctacagaggccgcacccccacctcctgaacctgtcccggccgctgagggccccgcgacggtccagtcggtggaagatttcgttccagacgatcgattggaccggtctttcttagaggacactacacctgcccgagacgaaaagaaagttggggctaaggcggcccaacaggactcagactcggatggggaagccctcgggggcaatccaatggtggccgggttccaggacgacgtcgaccttgaggaccagccacgcggtagccctccgttacccgcgggcccggtgccaagccaggatattacacttagttctgaggaggaagcagaggtggccgcacctacaaaggggccagcccccgcgccccagcagtgcagcgaacctgagaccaaatggagcagcattccagcgagcaagccccggcgtggtacggcgccaacccggacagccgcgcctccatggcctggtggggtaagcgtacgtacaggccctgagaagcgcagttccacacgtccaccagccgagatggagcccgggaagggcgagcaagctagctcttctgaatccgatcctgagggccctatcgctgcacagatgttgtcatttgttatggatgatcccgatttcgaatcggaggggtccgatactcagagacgcgccgatgacttccccgttcgggacgatccttctgacgtgactgacgaagacgaggggcccgctgaacccccccctcctccaaaactgcctttgcccgcattccgattgaagaatgactcagacttgtttggcctaggtcttgaagaagccggcccgaaggagtcctcagaggagggtaaggagggaaaaacacccagtaaagaaaaaaagaaaaaaaagaagaagggtaaagaagaggaagaaaaggctgccaagaaaaaatcaaagcataaaaaatctaaggacaaggaggagggaaaggaggagcggcgtcggcggcaacagcgtccgccacgctcacgtgaaagaacagctgctgacgaactggaagctttcctaggcggtggcgccccaggagggcgccatcctggtggaggagactacgaggaattgtag

SEQ ID NO: 112358 - DNA, 678 bp, synthetic construct
  misc_feature 1..678: note = Description of Artificial Sequence: Synthetic coding sequence
  source 1..678: mol_type = other DNA
tgagacgacattgtcaaggttgaggtgtgggatgtggtggataaggggaagtgtaaaaagcgcggcgatggactgaagatggagaacgacccccaagaagccgaatcagagatggccttggacgctgagtttctcgatgtttataagaattgcaacggggtcgtcatgatgtttgatataaccaaacagtggacctttaactatattcttagagaactcccaaaggtgccgacccacgttcccgtttgtgtactggggaattatcgggatatgggcgaacatagggttatacttcccgatgacgtgagggacttcatcgataacctcgacaggccaccagggtcatcttactttcgctacgccgaaagtagtatgaagaactcttttggtctgaagtacctgcacaaattttttaacattcctttcctgcagctccagaaggatgttcggttagcccaggaacgaggttgcgctgtggttctggtcagcgaggaggtgagaatgccagctggctgggactgctgctggggcaggctgggttggaaggagggagggtcccagacctgccccgtgcctgcactcctggggaggccactccttcccgctgagccttcgccacaccactgggtggattattccctcgaatcttcccctctcttgagttgttccattccttag

SEQ ID NO: 112359 - DNA, 1416 bp, synthetic construct
  misc_feature 1..1416: note = Description of Artificial Sequence: Synthetic coding sequence
  source 1..1416: mol_type = other DNA
atgaccgtgggaacagtgaaaattgtcataagaggagatcggaataccgggaagacggccttgtggcatagactgcagggacgcccttttgtcgaagagtacattcctactcaggagattcaggtaactagcattcactggtcgtataaaacaaccgacgatattgttaaagtagaggtgtgggacgtcgtcgataagggcaaatgtaagaagcggggtgatggactgaagatggagaatgatccgcaagaggccgagtccgaaatggcactggacgccgaattcctcgacgtctacaaaaattgtaacggagtagtgatgatgtttgacatcacaaaacagtggacctttaactacatcctgcgcgaactgccaaaagtgcccactcacgtgcctgtatgtgttctggggaactacagagatatgggcgaacaccgcgtgatcctgccagatgatgtgcgggacttcattgacaatctggacaggccccccggttcctcatacttccgatacgctgagtcatccatgaagaactctttcgggctgaagtacctgcacaaatttttcaatataccttttcttcaactccagcgtgagacactactaagacagctggagaccaaccagctagatatggatgctaccttggaagagctatctgtacagcaggagaccgaagatcagaactacggaatttttctggaaatgatggaggctaggtcaaggggtcatgcgagtccactcgcagctaatggacagagtccctcacccggctctcagagcccagtcgtgcccgcgggtgcagtctcgactggcagctcatctccaggcactcctcagcctgctccccaactgccgctgaatgcagcccctccctcgagtgtaccccctgtgcctccctcagaggcactgcccccacccgcatgcccaagtgccccggcacccagacgatccattattagccggctttttggtaccagccccgccacggaagccgctccccccccaccggagcctgtgcccgccgcggagggcccagcaacagtgcagagtgtcgaagatttcgtgcctgacgatagactggaccgctccttcctggaggacaccacccccgcaagggacgaaaagaaggtgggcgcaaaggctgctcagcaggattccgactcagatggagaagccctcggggggaatcccatggtcgcggggttccaagacgatgtggatctggaagatcagcctcggggcagtcctccactgcctgctggccccgtgccatcccaggacatcaccctcagttctgaagaggaggcggaggtggcggccccaaccaaagggcccgcaccggcaccccagcaatgctcagaacctgaaacaaaatggtcgggcgaagcccagcagcaccaggcgccttgttag

SEQ ID NO: 112360 - DNA, 1347 bp, synthetic construct
  misc_feature 1..1347: note = Description of Artificial Sequence: Synthetic coding sequence
  source 1..1347: mol_type = other DNA
atgtcacacagagcatggctagctctgttacccttggaggtggatggagacgacggcctctgcggcgccggaggtcccgagcattctgggtcctcccagccacaacagcagcaacaacgggctccctgccacctccgggcctcaggcagaggacgcggagcccgcttgttaacccgcttattgccgttctctttcctggaaatgatggaggcccgctccagggggcatgctagccctctggctgctaatggccagtccccctctcccggctctcagagccccgttgttccggccggtgcagttagcacgggctccagtagcccaggtacgccccagccagcccctcagctccctctcaatgccgcacccccttcctccgttcccccagtccctccttcggaagctctgccaccccccgcatgtccttcagcacccgcgcccagaagatccattatctcgcggctgttcgggacatctccagcgacggaggcggcccctccaccacctgagcctgttcctgccgccgaggggcctgccactgtacagtcagtggaagattttgtgccagatgataggcttgacagatcattcctcgaggacaccacacccgctagagacgagaaaaaggtgggggctaaggctgcgcagcaagattccgatagtgatggggaggctcttggaggaaacccaatggtggccggcttccaggatgacgtcgacctggaggatcagcctagggggtctcctcctttgccagccggccctgtcccctctcaggacattaccctctcctccgaggaggaggccgaggttgccgcccctacgaagggccccgccccagctccccaacaatgttctgagcccgagaccaaatggtctagcattcctgcctccaagcctaggcgagggactgcacctactcgtaccgctgctcctccctggcccggcggcgtgtctgtacgcacggggccagagaagcgcagcagcacacgccctccggccgaaatggagcccggcaaaggcgagcaggcctcttcttccgagtccgaccctgagggcccaatagccgcccagatgttatcattcgtgatggatgaccctgactttgagagtgaaggaagcgacacacagcggagggcagacgactttccagtacgggatgaccccagtgatgtaaccgatgaagacgaagggccagccgaaccaccaccaccaccaaaactgcctcttccggccttcaggctgaaaaacgactctgacctgtttggcttaggcctggaagaggccgggcctaaggaaagctcagaagagggtaaggagggaaagaccccctccaaggagaaatag

SEQ ID NO: 112361 - DNA, 648 bp, synthetic construct
  misc_feature 1..648: note = Description of Artificial Sequence: Synthetic coding sequence
  source 1..648: mol_type = other DNA
taaaaaattgtgatcagaggcgacaggaatactggcaagacggcactgtggcatagactccagggcaggccctttgttgaggagtatatccccactcaagaaattcaagtcacctccatacactggtcctataagacgacagatgatattgtgaaagtggaggtgtgggatgtggtcgacaaagggaagtgcaagaaacgcggggatggtttgaagatggagaatgaccctcaggaggctgagtcagaaatggcccttgatgccgagttcctcgatgtctacaagaactgcaatggggtcgtgatgatgtttgacatcaccaagcaatggactttcaattacattctgcgcgaacttcccaaggtgccaactcatgtgccggtttgcgtgctgggaaattaccgtgacatgggtgagcatagagtgatcctgccagatgacgttagggatttcatcgataatctagatagtcggccgcccggtagttcttatttccggtacgctgagtcaagcatgaaaaactcctttggcttaaagtacttacacaagttttttaacatcccattccttcagctgcaggtatctacgcatcatgtaggttggagcgggtgctggagtctgacaagctttcaggtttcccccgtttag

SEQ ID NO: 112362 - DNA, 336 bp, synthetic construct
  misc_feature 1..336: note = Description of Artificial Sequence: Synthetic coding sequence
  source 1..336: mol_type = other DNA
atgtatagcagactgttctatctgaaaagctcatacatcatctactttgaaccattattttctaacgcgattattaatatcctgtcctttataaactccctggcctctcctctcaccattttctgttttgccctgagtgcccaggccctgtctacgatattctacttcagaatctttatcttcatctttcattcatggatcctgttgttccatttttacttcacctgcagctttaagacttatgagcaccagcattccaagatggtgccagcctacaggatgcagtctcccagagcattacctcgcacctacctatatgtctggccatataaatag

SEQ ID NO: 112363 - DNA, 342 bp, synthetic construct
  misc_feature 1..342: note = Description of Artificial Sequence: Synthetic coding sequence
  source 1..342: mol_type = other DNA
atgaacttttacctgctgttagcctcctccatcttgtgcgccttaatcgtcttttggaagtacagacggttccagaggaacaccggggagatgtcttcgaactctactgcgctggccctagtgaggccaagtagttccgggttgataaactccaatactgataacaaccttgccgtatacgacctgagtcgcgatattctaaacaatttccctcacagtattgctcggcaaaaacgcatccttgttaatctctcaatggtggagaacaagcttgtggagctggagcacacactcctgtcaaagggatttcgcggggcatctccccaccggaagagcacttag

SEQ ID NO: 112364 - DNA, 2853 bp, synthetic construct
  misc_feature 1..2853: note = Description of Artificial Sequence: Synthetic coding sequence
  source 1..2853: mol_type = other DNA
atgacatggcgaatgggcccgaggtttacgatgctgctggccatgtggctcgtatgtggttctgagccccatccccacgccaccatcagggggtctcacgggggcagaaaagttcccttagtgagcccagattcatctcggcccgcccggtttttgcggcataccggcaggagcagaggcattgaacgctcaaccctggaggagcctaacctgcagcctctccagcgaaggcggagcgtgccggtccttaggctagcaagacccacagagccgccagctaggtcagacatcaacggagcggccgtgagaccagaacaaaggcccgccgcgagaggaagtcccagggaaatgatcagggacgagggcagttccgccagaagccgtatgctgcgtttcccttcgggaagcagtagtcctaatatcctggcaagcttcgccggtaaaaaccgggtctgggttatctcagctccccatgcttctgaaggttactatcgattgatgatgtccctgctcaaagacgatgtgtactgcgaactagccgagaggcacattcaacagatcgtcctcttccaccaggctggggaagagggcgggaaggtgcggcggatcacttccgagggacagatcctagaacagcctctcgatccttcactgatccctaaactcatgtctttcctgaagctcgagaagggcaagtttgggatggtcctccttaagaagacactgcaggttgaggagcggtacccataccctgtgagactcgaagccatgtacgaggtcattgaccaggggcccataagacggattgagaaaattcggcaaaagggtttcgtacagaaatgtaaggccagtggcgtagagggtcaggtggtggccgagggaaatgatgggggcggaggagcaggcaggccctccctgggtagtgagaagaaaaaggaggatcccaggagggctcaggtgccccccacacgggaatcaagggtgaaggtcctgcgaaaattagccgccactgcccccgctttaccacagcctccctctacacctagggccaccaccttgcctcccgcccctgcaaccacggttacacgctccacgtctcgtgctgtcacggtggccgcccgtcccatgactacaaccgcattcccaactacacagcgcccgtggacccctagtccttctcaccgaccccccaccaccactgaagtgatcacagcccggagaccatctgtcagtgaaaatttatatccaccgtccagaaaagatcagcacagggagaggccccaaacgacgcgaagacctagcaaggcaaccagtctcgagagctttacaaatgctccccctactaccatcagcgaacctagcaccagggccgcgggccccggcagattcagggataatcgtatggatcggcgagagcatggacatagagatcctaatgtggtacccggccctcctaaaccagctaaagagaaacctccaaaaaaaaaggcccaggataaaatcttgagcaacgagtacgaggagaagtacgacttgagtcgccccaccgcaagccaattggaggacgagctgcaggtggggaacgtgcctttgaagaaggcaaaagagtccaagaagcacgaaaaactcgagaagccagaaaaagaaaaaaaaaaaaaaatgaagaacgaaaacgccgataagctgttgaagagcgagaaacagatgaaaaagtccgagaaaaagtcgaagcaagagaaagaaaaatcaaagaaaaagaaaggaggcaagacagaacaagacggctaccagaaacctacaaataaacatttcacacagagccctaagaagtcagttgcagatctgctgggttccttcgaaggtaagcgccgcttactgctgattactgctcccaaggccgagaataacatgtacgtgcagcagagggatgagtacctcgaaagtttttgtaagatggctaccagaaagatttcagtcataactatttttggccctgtaaacaactccacaatgaagatcgaccatttccagctggataacgagaagcccatgcgggtggtggacgatgaagatcttgttgaccagcgactcatctctgagctcaggaaagaatacggaatgacttacaacgatttttttatggtgctgaccgatgtcgatttgcgcgtcaagcagtactatgaggtcccaattaccatgaaaagtgtctttgacttgatcgatacctttcagagcaggattaaagatatggagaagcagaagaaggagggcatcgtatgtaaggaggataaaaagcagagtctcgagaactttcttagcaggtttaggtggaggcgcagactgttggttataagcgcccccaatgacgaagactgggcatattcgcagcagctttcagccctgtccggccaggcatgcaatttcggcctccgtcacatcacgatcttgaagctgctgggcgttggagaggaggttggcggagtactggagctgttcccaattaatgggtctagtgttgttgagcgagaggacgtgcctgcccacctggtaaaagacataaggaattacttccaagtgagtcccgaatacttcagtatgttattggtcggtaaggatggcaacgtgaagtcctggtatccatctccgatgtggtctatggttatcgtgtacgaccttattgactctatgcagctgaggcgccaggagatggctatccaacagagtctcggcatgcggtgccctgaagacgagtacgcagggtacggctatcactcttatcaccagggttaccaggatggatatcaagatgactatcggcatcatgagtcttaccatcatggctatccatactag

SEQ ID NO: 112365 - DNA, 744 bp, synthetic construct
  misc_feature 1..744: note = Description of Artificial Sequence: Synthetic coding sequence
  source 1..744: mol_type = other DNA
atgctactcctacccctccccctgctgctttttctgctctgttcccgagctgaggcaggagagataattgggggcaccgagtgtaagccgcacagtaggccatatatggcctacctggagattgtcacatcgaacggacccagcaaattctgcggcggattcctgattcgccgaaactttgtgctcacagccgcccattgcgccggacgatctattactgtgactctgggagcccacaacatcacagaggaggaggacacatggcagaaacttgaagtgataaaacaatttcgccatccaaaatacaacacctctaccctgcaccacgatataatgctgctgaagctgaaagaaaaggccagtctcaccctcgcagtgggaacgctaccttttccttcacagttcaactttgttcctcctgggcgcatgtgccgggtggcaggctggggaaggacaggggtcctgaagccaggctcggacaccctgcaggaggttaaactgaggctgatggatccccaggcctgctcgcactttagggacttcgatcacaacctgcagctttgtgtaggaaatccaaggaaaactaagagtgcgtttaaaggagactctggaggtccgttgctatgtgccggggtagcgcagggaatcgtgtcctacggtagatcagacgctaaaccacctgcagtgtttaccagaatcagtcattataggccctggataaatcagatcctacaggccaactag

SEQ ID NO: 112366 - DNA, 210 bp, synthetic construct
  misc_feature 1..210: note = Description of Artificial Sequence: Synthetic coding sequence
  source 1..210: mol_type = other DNA
atgctcggcatcacggtcttggcagccctgctggcgtgtgccactccgggcccgacggtgtggccatgggagaggactacctggcggtggaaaaccaaaaaggacccgtgcctgtgggtgtggacccctagtactagcaccagagacggcatgccttcatgctgtgccatgattttaccaagttctagcctccagagcatgtggagctag

SEQ ID NO: 112367 - DNA, 807 bp, synthetic construct
  misc_feature 1..807: note = Description of Artificial Sequence: Synthetic coding sequence
  source 1..807: mol_type = other DNA
atgctcggcattaccgtgcttgctgcattgctggcatgtgcttcctcctgcggagtcccctctttcccgcccaaccttagtgcacgtgtggtgggcggagaggatgctaggcctcatagctggccatggcagatctccctgcagtacctgaaaaatgatacttggcgccacacttgcggagggacgctcattgcctctaactttgtgctgaccgcagcacactgtatctcgaataccagaacctaccgagtagcggtcgggaaaaacaacctcgaagtcgaggacgaggagggatcactctttgtgggcgtggatacaatccatgtgcataagagatggaacgccctgctgttgcggaatgacattgctctgattaagttggccgagcacgtggaactgtcagataccattcaggtagcatgcctgccagagaaggactctcttctgccaaaggactacccgtgttacgtcactgggtggggtaggctctggaccaacgggcctatcgcagacaagctgcagcagggtttacaaccagtggtggaccacgccacatgcagccggatcgactggtggggttttcgtgtgaaaaagactatggtgtgtgccggaggggacggcgtgatctcggcctgtaacggggatagcggagggccattaaactgccagctcgaaaatgggagctgggaggtgtttgggatagtgagctttggctccagaagaggttgcaatacgaggaaaaagccggtagtgtatactagggtatccgcgtacatcgactggatcaatgagaagatgcagctgtag

SEQ ID NO: 112368 - DNA, 795 bp, synthetic construct
  misc_feature 1..795: note = Description of Artificial Sequence: Synthetic coding sequence
  source 1..795: mol_type = other DNA
atgcttctgttatctttgaccctgtctctcgtactcctggggagctcttggggatgcggaattccggccatcaaacccgccttgagtttttcccagaggattgtcaacggtgagaatgctgtgctgggcagctggccatggcaggtatccctccaggactctagcggcttccatttttgtggagggagcctcattagccaaagctgggtcgtgaccgcggcccattgcaacgtttcccccggacgccatttcgttgtgttgggtgagtacgataggtcctccaatgccgagcctttgcaggtgctctctgtgtcccgagccatcacacatcccagctggaattcaaccacgatgaacaacgatgtcaccctactgaagctcgcgtctcccgcccagtatactactcggatcagcccggtgtgcctggcctcctctaatgaagctctcacagaggggctcacatgcgtgacaacagggtggggccgactctctggagtgggcaacgtgactcctgcccacctgcaacaggtggccctcccgctggttaccgtgaaccagtgccgacaatattggggcagttcaatcaccgatagcatgatttgcgccggcggggccggagcctcttcctgtcagggggacagcgggggccctctggtatgtcagaaaggcaacacctgggtgctaattggcatcgtttcttgggggactaagaattgcaacgttagagccccagcagtgtacacccgagtaagcaaattctccacctggatcaaccaagtgatcgcatacaattag

SEQ ID NO: 112369 - DNA, 795 bp, synthetic construct
  misc_feature 1..795: note = Description of Artificial Sequence: Synthetic coding sequence
  source 1..795: mol_type = other DNA
atgctcttactctctctgaccttgtctcttgttctgctgggttccagctggggctgcggtatccctgctatcaaaccagcgctgagcttttctcagaggatcgtaaacggggagaacgcagtacttggcagctggccttggcaggtaagtctacaagactcatctggcttccatttctgcgggggcagcctgatctcccagtcgtgggtagtgacggctgcacattgtaatgtgtcacctggtagacatttcgtggttttgggtgagtatgatcgcagttcaaatgccgagcctcttcaggttttgtcggtgtcccgggctatcactcacccttcctggaatagtactacaatgaacaacgacgtaacactccttaaacttgcctcccccgctcaatacacaacacgcatcagtccagtctgcctcgcaagcagcaacgaggctttaaccgaagggctcacgtgtgtgaccactggctggggccgccttagcggagtcggtaatgtaacccccgcacatctgcagcaggttgctctgcccttggtgacggtaaatcagtgccgccagtactgggggtcttctataacggattcgatgatttgtgccgggggagctggagcctcgtcttgccaaggagacagcggcggccccttggtttgccagaaggggaacacttgggtactgatcggtattgtgagctggggaaccaagaactgtaatgtcagagccccagccgtgtacactagagtgagtaaattctccacatggatcaaccaagtcattgcctataattag

SEQ ID NO: 112370 - DNA, 792 bp, synthetic construct
  misc_feature 1..792: note = Description of Artificial Sequence: Synthetic coding sequence
  source 1..792: mol_type = other DNA
atggccagcctctggctgttgtcctgttttagtctcgtcggagccgccttcggatgtggggtgcctgccattcacccggttctcagcggtcttagtcggatagtgaatggcgaggacgcagtgcccgggtcgtggccttggcaagtgtccttgcaagataaaacagggttccacttttgcgggggatcacttattagcgaagactgggtggtgaccgccgcccactgcggcgtccgaacttcagatgtagtggttgcaggggaattcgaccagggctccgatgaggagaatatccaggtgctgaagatcgcaaaggtctttaaaaatcccaaattctctattcttactgtgaacaatgatatcacactcctgaagctggcgacgccagctagattcagccaaacagtgtccgctgtctgcttgcctagcgccgacgatgattttcctgctggaaccttgtgtgccacaaccgggtggggcaaaaccaagtacaatgccaacaagacaccagacaaactgcagcaagcagcgctcccgctgctaagtaacgccgaatgcaagaaatcttggggcagacgcatcacagatgtcatgatttgcgcaggtgctagcggggtttcctcttgtatgggggattccggcgggccgctcgtgtgccagaaagatggcgcctggaccttggtcgggattgtcagttgggggtctgatacctgcagtacttcttcacccggggtgtacgccagagtaaccaagctgatcccttgggtgcaaaaaattctggccgccaattag

SEQ ID NO: 112371 - DNA, 1119 bp, synthetic construct
  misc_feature 1..1119: note = Description of Artificial Sequence: Synthetic coding sequence
  source 1..1119: mol_type = other DNA
atggccgctcctgtaccctgggcctgctgcgcggtgctcgcggcagccgcagcagtggtgtatgcccagagacactccccccaggaggcccctcacgtccaatatgagcggttagggagcgatgtgaccctcccctgtggtaccgctaattgggacgcagccgtgacttggcgggtcaatggcactgatctggctcccgacttgctgaacggctcacaacttgtcctgcatggcttagaattggggcattctggcctctacgcatgtttccatcgggactcatggcaccttcggcatcaggtgctgctgcacgtaggtctgccccctagagagccagtgctttcatgtcggtcaaacacttatccaaaggggttctactgcagctggcatctgccaacccccacttacattcccaacaccttcaatgtaacagttctgcatggctcaaagatcatggtctgcgagaaggatcctgcccttaaaaatcgctgtcacatccgctacatgcaccttttcagcactattaagtacaaagttagcatttctgtaagcaatgctctgggacacaacgccaccgccattacctttgatgagttcacaattgtcaagccagacccacccgaaaacgtggtggcacgcccagtcccttccaatccgcgtagactcgaggttacttggcaaaccccaagcacatggcctgatccggagagctttcccttgaagttctttctgcgctaccggccgttgattttggaccagtggcagcacgtcgaactgtcagacggaacagcacacactatcacagacgcctatgcagggaaggaatacattatccaggtggcggccaaggacaacgagataggcacctggtccgattggtccgtggctgcgcacgcaactccttggactgaggagcctcgccacctgaccacggaggctcaggctgcggagaccacaactagcacaaccagcagtctggctccaccccccaccacaaaaatctgtgatccaggcgaactcgggagcgggggagggccgtccgctccctttttagtgtccgttcctataacactggccctagccgcggccgccgccactgcatctagcttgctcatctag

SEQ ID NO: 112372 - DNA, 1119 bp, synthetic construct
  misc_feature 1..1119: note = Description of Artificial Sequence: Synthetic coding sequence
  source 1..1119: mol_type = other DNA
atggccgcccctgtgccatgggcctgttgcgcggtgctggccgccgcagcagcagtcgtctacgcccaaaggcattcaccccaggaggcccctcacgtgcagtacgaacggcttggttctgacgttacgctgccctgcggcactgcaaattgggacgcagcggtgacttggcgcgtcaatgggaccgacctggcccccgatctgctgaatggaagccaattggtcttacacgggcttgaattggggcactctggcttgtatgcctgttttcaccgcgattcgtggcacctccgccaccaggtgctgctgcacgttggcttacctccgcgcgagccagtcctctcttgtcggagcaacacatatcccaaaggcttttactgttcatggcacctgcccacaccgacctacatccctaatacttttaacgtcactgttttacatggctcaaagattatggtatgtgaaaaggatccagctctgaaaaacaggtgccatatccgatacatgcacctgttcagcacaataaagtataaggttagcattagcgtgagcaacgctctgggtcataatgcgactgctatcacatttgacgagttcacaatcgtgaaaccggatccgcctgagaacgttgtcgctcggccagtacccagtaaccctcgacggcttgaggtcacttggcagacccccagcacgtggcccgaccctgagagttttcctctgaagttctttttgcgatataggccgctaattctggatcagtggcagcacgtggaactgtctgatggaacagcccacacaatcactgacgcgtatgccggcaaggagtacatcattcaagtggctgctaaagataacgagattggaacctggagcgactggagcgtggcagcacacgctactccctggaccgaagaacctcgacatctaaccaccgaggcccaggctgcagagaccacaacaagcacaacctcctcactagctcccccacctacaaccaaaatctgcgaccctggggaattgggaagcggcggaggtccttctgccccatttttagtgtccgtgccaatcacacttgcactggcagccgctgccgctactgcttctagcctgttgatatag

SEQ ID NO: 112373 - DNA, 771 bp, synthetic construct
  misc_feature 1..771: note = Description of Artificial Sequence: Synthetic coding sequence
  source 1..771: mol_type = other DNA
atggccgccccagttccttgggcctgttgcgccgtgctggccgccgcagcagctgtggtttacgcacaacgccattcaccccaggaagccccccacgtgcagtacgagcggttgggctccgatgtcaccctgccatgtggcactgccaactgggatgccgcggtaacctggcgggtgaacggcacagatctcgctccggatctactgaatggatctcagctcgtgttacatggcctagagctgggacacagcggactatacgcatgttttcatagagattcatggcacctcagacaccaggtgctactgcatgttggcctgccacccagggagcccgtgctctcttgccggtctaacacctaccctaaggggttttattgcagctggcacctgccaactcccacatatatacccaacacgttcaacgtaacagtgctccacgggtccaaaattatggtgtgtgagaaggatcccgccctcaagaatcgatgccatatccgctacatgcacctgttctcaacaataaaatacaaagtgtccatatctgtcagcaatgccttgggtcataacgctacagctattacttttgacgaatttactatcgtgaaaccagatccccccgaaaacgtggtggcacgaccagtaccctctaatcccagaaggttggaggttacttggcagaccccatctacctggccagatccggaatcatttccactgaaattcttcttgcgataccgcccactcatccttgatcaatggcagcactag

SEQ ID NO: 112374 - DNA, 3909 bp, synthetic construct
  misc_feature 1..3909: note = Description of Artificial Sequence: Synthetic coding sequence
  source 1..3909: mol_type = other DNA
atggagctctatttcggagaatatcaacacgtgcaacaggagtacggagtgcacctccgcctagccagcgacgacacgcagaaatctagaagtagccaaaatagtaaagcgggtagctatggggtctccattagagtgcagggcattgacgggcatccctacatcgtcctgaacaatactgagcggtgtctcgcaggtacttccttttccgaaaacgggcccccattcccgcctcctgttatcaacaacttgccccttcactccagcaacggttcggttcccaaagaaaatagcgaggagctccagcttcctgagaatccctatgcccagccttcgccaataaggaatcttaagcaacccctgctgcacgagggcaaaaacggtgtcctcgatcgtaaggacggtagcgtcaaaccctctcatttgttgaatttccagcgccaccctgaactgcttcagccctatgacccagaaaagaacgaactgaatctgcagaatcatcagccaagcgaatctaactggctgaaaacactgactgaggaaggcatcaacaataagaaaccatggacctgctttcctaagccttccaactcccagcctacatccccgagcctggaggatcctgcaaagagcggggtgacggcaatcagactgtgttcaagcgttgtcattgaggatcccaaaaaacaaacctctgtctgtgtcaacgtacagtcttgcactaaggaaagagtcggcgaggaagccctgttcacatccgggcggccgcttaccgcccactcacctcatgcccatcctgagacaaagaagacccgcccagacgtgttaccattccgaagacaggacagcgctggcccagtgttggatggtgccagatcacgaaggtctagctcgtcaagcacgacccccacttctgccaactcactgtataggttcctattggacgaccaagagtgcgccatccacgctgacaatgtcaacagacacgagaacaggaggtatatcccctttctgccgggaactgggagggatatcgataccggtagtatcccaggcgtcgaccaacttatagagaagttcgaccagaagccaggactgcagaggcgtggccgatcaggcaagagaaacagaattaatactgatgataggaaacggagccgcagcgttgattctgcttttccctttggcttgcagggaaatagcgaatacctcatcgaattcagcagaaacttgggcaagagtagcgagcacctgctcagaccttcccaagtctgtccacagagaccactgagtcaagaacggcgtgggaagcagtctgtgggccgaacatttgccaagttgcagggcgccgcacacggggcaagctgtgctcattcccgccccccgcagcctaacatcgatggaaaagtgttagagaccgagggatcgcaagagagcacagtgatccgcgcgccgtccctcggtgcgcagagtaaaaaggaagaggaggttaagacagctaccgcaactctgatgctgcagaaccgggctaccgccacaagcccagattcaggggctaagaaaatttccgttaaaactttcccttccgcgtctaatactcaggccacaccagacctcctgaaaggccagcaggagctcacccagcagactaacgaggaaacagccaagcaaattctttataactacctcaaggagggatccacagacaacgacgatgctaccaaacggaaggtcaaccttgtttttgaaaaaattcagactctcaaatctagagctgcagggagtgcccaaggcaataatcaagcctgcaattccaccagcgaagtgaaagatctgcttgagcaaaagagcaagctcaccatcgaggtagccgaactccaaaggcagctacagctagaggtgaagaatcagcagaatatcaaggaggaacgggaaagaatgagagctaacctcgaagagctgaggtcccagcacaacgaaaaggtcgaggaaaattcaaccctgcagcagagactggaggaatctgagggcgagttaagaaaaaacctcgaggagctcttccaggtgaagatggaacgtgaacagcaccagacagagataagggacctccaggaccagctgtcagaaatgcatgacgagttagattctgccaaacgcagcgaggaccgcgagaaaggcgccttaattgaggagttgctccaggccaagcaggaccttcaggatcttctgatcgccaaagaagagcaggaagatcttctaaggaaacgcgagagagaactcaccgcccttaagggcgcactcaaagaggaggtttcttcacatgaccaggagatggataagctcaaagagcagtatgacgccgagctacaggcactgcgggaatccgtggaagaggctacgaaaaacgtcgaggtgctcgcgtctcggtccaacacttctgagcaggaccaggcaggtacggaaatgcgggttaagctgctacaagaagagaacgaaaaactacaggggcgctcagaagagctcgagaggcgggttgcgcagttgcagcggcagatagaagatctaaagggcgatgaggcgaaagccaaggagacattgaagaagtacgaaggggagattcgccaactggaggaggccctagttcatgctcggaaggaggagaaggaagctgtgtcagcccgacgggcgttagaaaatgagctcgaggccgcacagggcaatctgagccaaacaacccaagagcagaagcaactgtcagagaagctgaaggaggagagtgaacagaaggagcagctgcgcaggctgaagaatgaaatggagaacgaaaggtggcatctcggcaaaactatagagaagctgcagaaggaaatggccgacatcgtcgaagcttcaaggacttccaccctggaactccaaaatcaattggatgaatacaaagagaagaacaggagagaactggcagagatgcaacggcagttgaaagaaaaaaccttggaagcagaaaaatctcgcttaacggctatgaagatgcaggacgaaatgaggctgatggaggaggagctccgcgactatcaacgtgcccaggatgaggccctgaccaaaaggcagttgcttgaacaaacactgaaggacttggagtacgagttggaggctaagagccacttaaaggatgaccgaagccggctcgttaagcaaatggaagacaaggtgagccagctggagatggaacttgaggaagagagaaacaattccgacctgctctctgagcgtatttctcgctcccgtgagcagatggagcagctgagaaatgaacttttacaggaaagggccgcgcggcaggatctagagtgtgacaagattagcctcgagcggcagaacaaggaccttaaatccaggattatccacctggaaggctcgtatagatcctccaaagagggactggtcgtgcagatggaggcccgcatcgccgagttggaggatcgcctggagtccgaggagagagatcgagccaatttacaattgagtaataggagactcgagagaaaagtcaaggaactggtgatgcaggtggatgatgaacacctctcgctcactgatcaaaaagatcagctgagcttacgactcaaggcaatgaaacgtcaggtggaagaggctgaagaagagattgacagattggaatccagcaagaaaaagctgcagcgagagctggaagagcaaatggacatgaacgaacatctacagggtcagctcaacagcatgaagaaagatctcagattgaagaagctgccatcaaaggtactggatgacatggacgatgacgacgacctttccactgacgggggatctctgtacgaggcccctgtgagttatacttttagcaaggactcgacagtggcctcccagatttag

SEQ ID NO: 112375 - DNA, 2061 bp, synthetic construct
  misc_feature 1..2061: note = Description of Artificial Sequence: Synthetic coding sequence
  source 1..2061: mol_type = other DNA
atgggagaattcaaagtgcacagggtcagattttttaactacgtcccgagtggtatccgatgcgtggcctataacaatcagagcaaccggctcgccgtctcccgtaccgacggtaccgttgaaatttacaacctgtccgcgaattattttcaggagaagtttttccctgggcatgaaagtagagcaaccgaggcactatgctgggctgaggggcagaggcttttcagcgctgggttaaacggcgaaattatggagtatgacctgcaggccctgaatatcaagtatgctatggacgcgttcggcggaccaatttggtctatggccgccagtccgtcagggagccagctattggtgggctgtgaggatgggtcagtaaaactgttccaaattacaccagataaaattcagttcgagaggaactttgatcgccagaaatccaggattctgagcctatcctggcatcctagcggcacgcatattgcggcaggaagcatcgattacattagcgtttttgacgtgaaaagcggatccgccgttcataaaatgatcgttgatagacagtacatgggagtctcaaagcggaaatgcattgtatggggtgtcgctttcttgtctgacggcacaataatttccgtggactccgccgggaaagtccagttttgggattcagccaccggaaccctggtcaagtcccacctaatagcgaacgctgacgtccagtccatcgctgtcgcagaccaggaggatagttttgtggtgggcacagcggaagggaccgtcttccatttccaactcgtgccagtcacgagcaatagctccgaaaagcaatgggtgcggactaaaccattccagcaccacacacatgatgtcagaacagtggcacattctccaaccgccttaatctctgggggcaccgacacacacctcgtgttcaggccacttatggaaaaagtggaagtgaagaattacgacgctgccctccgaaagatcacatttcctcatagatgcctcatatcttgtagcaaaaaacgccagctgcttctcttccagttcgctcaccaccttgaactctggcggttaggctcaaccgtcgccacaggcaagaatggtgacactttgcctctgagcaaaaatgccgaccaccttttgcacctcaagacaaagggccccgagaacattatctgctcctgcatcagcccatgtggatcttggatcgcttactctactgtctcgcgtttttttttgtaccggctgaactacgagcacgacaacatcagcctcaaaagggtctctaagatgcccgcctttctgagatcggccctgcagatattgttttccgaagatagcacaaagctcttcgttgcatccaaccagggcgcgctccacattgttcaactctcaggcggaagcttcaagcatttacatgcatttcagcctcaaagcggcaccgttgaggccatgtgtctcctggccgtgtctccagatgggaattggctggccgcctcaggcacttccgcaggggtacacgtgtacaatgtaaagcagcttaagctccattgtacggtgccggcctacaacttccctgtgaccgcaatggcaatcgctcctaacaccaataacctcgtgatagcccacagcgatcaacaggtgttcgaatatagcatacctgataaacagtatacagactggagccgaaccgtgcagaagcaggggtttcatcacctgtggctgcagagggacacccccattacacatatctcgttccaccctaaaagaccgatgcacatcctgctacacgatgcatacatgttctgtattatcgacaaatccctgcctctgcccaatgataagaccctcttgtacaacccctttccgccaaccaatgaatcagacgtgattaggaggagaaccgcccatgcttttaaaatcagcaagatctataagcccctgctgtttatggacctgctggatgaaaggacactggtggcggtcgaacgtccgctggacgacatcatcgcccagctacctcctccaattaagaagaagaagttcggcacttag

SEQ ID NO: 112376 - DNA, 1716 bp, synthetic construct
  misc_feature 1..1716: note = Description of Artificial Sequence: Synthetic coding sequence
  source 1..1716: mol_type = other DNA
atgggagagtttaaggtccacagggtccgctttttcaactatgtaccctctggcatacgttgcgtggcttataacaaccaaagtaataggcttgctgtgagtagaacagatgggaccgtggagatttataacctctctgccaactacttccaagagaagttcttccccggccacgagtctcgagcaactgaagccctctgctgggccgaagggcaacggttgtttagtgctggactgaacggcgagattatggaatacgacctgcaggccctaaacatcaaatatgcaatggacgctttcggcggaccaatatggtcaatggccgcgtccccttcgggaagccaactactggttggctgtgaggacgggtccgtgaagttgttccaaataaccccagacaagattcagtttgagcggaatttcgatagacagaaaagtagaatactgagtctctcctggcaccctagtggtactcacattgcagccggaagtatagactacattagcgtgttcgatgtgaagagcggcagcgccgtgcataaaatgatcgttgatcggcagtacatgggtgtgtcaaaacgtaagtgcattgtgtggggcgtcgccttcctgtcggatggaactatcattagtgtggattccgctggaaaggttcagttctgggatagcgccaccggtacactggttaaaagtcacctgattgcgaatgctgatgtgcagagcatagccgtggcagatcaggaagattcctttgttgtgggcactgccgagggcaccgtgttccattttcagctagtgcccgtgacgtctaatagctctgagaagcaatgggtgcgcacaaaaccgttccagcatcacactcatgatgtgcggactgtggcacatagccctaccgccctcatatctggcggaactgacacacacttggtgtttaggcctctgatggaaaaagtcgaagtgaaaaactacgatgccgcactgcgcaaaataacattcccacacaggtgcctcattagttgtagcaaaaagcgccagctgctactattccagtttgctcaccacctggaactctggcgtctggggtcaactgtcgccaccgggactgtggaagctatgtgcctgctagcagtttctcctgacggtaactggttagccgcatccggtacatccgcaggggtccatgtttataatgtgaaacaactgaaattacactgcacagtaccggcatataattttcctgtcacagcaatggctattgcgcccaatacaaataacctagtcattgcacactcggaccagcaggtttttgagtatagcatccctgataagcagtacacggactggagtcgaaccgttcagaagcagggcttccatcacctgtggctgcagcgcgatacgccaatcacacacatttccttccaccccaagaggcccatgcatatcctgttacatgacgcatacatgttctgcattatcgataaatcactccccctgcccaacgacaaaacacttctttataatcctttcccccctacgaacgagtccgacgttatccggaggagaaccgcacacgcctttaaaataagtaagatctataaacccttgttatttatggaccttctggacgagcgcacactggtcgctgtcgaaaggcctttagacgatataatcgcgcagctgcctccccccatcaagaaaaagaagtttggcacttag

SEQ ID NO: 112377 - DNA, 1023 bp, synthetic construct
  misc_feature 1..1023: note = Description of Artificial Sequence: Synthetic coding sequence
  source 1..1023: mol_type = other DNA
atggcactgcgcctgctccggagggctgcacgaggcgccgcggcagctgctcttcttagattgaaggcctccctggcagcagatatccctcggctgggctactcgagctctagccaccacaaatacattcctaggcgcgccgttctctatgttcctgggaatgatgaaaagaaaattaagaagatacccagtctgaatgtggactgtgccgtgctcgattgcgaagacggggtagccgcgaacaaaaagaacgaggctcgacttcgtattgtaaagacgttggaagatattgatctcgggccaacggaaaagtgtgtgagagtgaactcagtgtcatccggacttgctgaagaagatctggagacattgttacaatctcgggtcttgccctccagcttgatgctgccaaaagtggagtcccctgaagagattcagtggtttgccgataagttctcctttcacctgaagggaagaaaattggaacaacccatgaatctgatccccttcgtggagacggcaatgggcttgttgaatttcaaagcagtctgcgaggagacactcaaggttggaccccaagtgggactattcctggacgcagtcgttttcggaggggaagattttcgagctagtataggagccacatctagtaaagagacattggacatcttgtacgccagacagaaaatcgtggtgatcgccaaagctttcggcctgcaggccattgatttggtatacatcgacttccgcgacggtgccggactgttgagacagtcaagggagggcgcggctatgggattcacagggaaacaggtgattcaccctaaccagatcgccgtcgtgcaagaacagttctcaccatctcctgaaaagataaagtgggctgaggaactaatcgcggccttcaaagagcaccaacagttggggaaaggggcttttaccttccagggctcgatgatagacatgcctctgttgaagcaggcacagaacacagtgacccttgccacttctataaaagagaagtag

SEQ ID NO: 112378 - DNA, 921 bp, synthetic construct
  misc_feature 1..921: note = Description of Artificial Sequence: Synthetic coding sequence
  source 1..921: mol_type = other DNA
atggctctgcggcttctcagaagagctgctaggggagccgcggcagcagccttgttacgtctgaaggccagtctggctgccgacatacctcggctcggatatagttcctcatcccaccacaaatacatcccacggagagcagtgttgtacgtgcctggaaatgatgaaaaaaaaattaaaaagataccctctcttaacgtcgactgcgcagtgctggactgcgaggatggcgtagcagccaacaagaagaatgaagccaggctgcggattgtcaaaacactggaagatattgacctgggtccaactgagaagtgcgtgcgggtaaattcagtctcatccgggcttgctgaggaggatttagaaacactgcttcagtccagagtgctgccaagctctttgatgctgcctaaggtggagagtccggaagaaatacagtgggctgtgtgtgaagaaaccctcaaggttgggccccaggtcgggttgtttctggacgcagtggtgttcggaggggaggactttagggcttctattggcgcaaccagcagcaaggaaactctagacatcctttatgctaggcaaaagattgtagttattgctaaagcttttggcctccaggcaatagacctggtttatatcgacttccgcgatggcgcaggtttgctcaggcagagcagagagggcgccgctatgggctttaccggcaagcaagtaatccatccaaatcaaatagctgtggtgcaagaacagtttagccctagccccgagaagatcaaatgggcagaagaattgatcgctgccttcaaggaacatcaacagctcggtaagggagcatttacctttcaggggagcatgattgatatgcctctgttaaagcaggctcaaaacactgtcactctcgccactagcatcaaagagaagtag

SEQ ID NO: 112379 - DNA, 921 bp, synthetic construct
  misc_feature 1..921: note = Description of Artificial Sequence: Synthetic coding sequence
  source 1..921: mol_type = other DNA
atggccctgaggctgctgcgtcgggcagcccggggtgccgctgccgcagctctgctgcgcttaaaagcctcactggctgcagatatccccagattggggtacagctcctccagtcatcacaaatatattccacggcgagctgtactgtatgtgcccggcaacgatgagaagaagataaagaaaatcccttcattaaacgtggactgcgccgtgttggactgtgaagacggtgttgctgctaataagaagaacgaggccaggctgcggatcgtgaagaccctggaagacatcgatctgggcccaaccgaaaagtgtgtgagggtcaactcagtgtcctcgggcctagccgaggaggacctggagaccctgctgcagtccagagtgcttccatcttccctgatgctacctaaggtggagagccctgaggagattcaatgggccgtttgcgaagagacactcaaagtcggaccccaggttggcctgttcctggacgcagtggtgttcggaggcgaagactttagggcatccatcggtgcaaccagtagcaaggaaacgctggacattctgtatgcacgccaaaaaatcgtggtcattgcaaaagccttcgggctacaggcaatagacttggtctacatcgactttagagacggcgccggtcttctcagacagtcacgtgaaggagctgctatggggttcacagggaaacaagtaatccatccaaaccagatcgctgtcgttcaggagcagtttagcccatcgcccgaaaaaatcaaatgggctgaggagctcattgctgcatttaaagagcaccagcagctgggtaaaggcgccttcacgtttcagggctcgatgatagacatgccgctgttaaagcaagctcaaaatacagtgacactggctaccagtatcaaggagaaatag

SEQ ID NO: 112380 - DNA, 1023 bp, synthetic construct
  misc_feature 1..1023: note = Description of Artificial Sequence: Synthetic coding sequence
  source 1..1023: mol_type = other DNA
atggctcttaggctgctccgcagagctgctaggggggccgccgccgccgcactcttaagactgaaagcgagccttgctgccgatattcctcgcctcggatacagtagctcaagtcatcacaagtatataccaagacgagcagtcctgtatgtccctggcaatgacgaaaagaaaatcaaaaaaataccctccctgaatgtcgactgcgctgttcttgattgtgaggatggcgtggccgcaaacaagaagaacgaggcgagactgagaatcgtcaaaaccctggaggacatagaccttgggcctaccgaaaagtgcgttcgggttaattcagtttcatccggcctggccgaggaggatctcgagactctgcttcaatctcgcgtgctcccctccagcctgatgttgccaaaagtggagagcccagaggaaatccagtggttcgctgataagttctcatttcacttgaagggccgtaaactggagcagccaatgaatcttattccatttgtggagactgccatgggattactgaacttcaaggccgtgtgcgaggagacactgaaagtggggccgcaggttggtctttttctagacgcggtcgttttcggtggagaagattttagggcttcaattggagcaacgtcgagtaaggaaacccttgatatcctgtatgcaagacagaagattgtggtgattgcaaaagccttcggtctgcaggctatcgatctggtgtatatcgatttcagagatggcgctggattgttgaggcagtctagggaaggagctgccatgggctttacaggaaagcaggtcatacatcccaaccaaatcgccgttgtacaggagcagttcagtccttctccagagaagattaaatgggccgaagaactcatagctgccttcaaagagcatcagcagttgggcaagggagctttcaccttccaaggatctatgatcgacatgcctctcctgaagcaggcacagaataccgttacgctggccacctccataaaggaaaaatag

SEQ ID NO: 112381 - DNA, 546 bp, synthetic construct
  misc_feature 1..546: note = Description of Artificial Sequence: Synthetic coding sequence
  source 1..546: mol_type = other DNA
aatgaggcacggcttaggattgttaagacccttgaggacattgatctcggtccaacagagaagtgcgtcagggtcaattcagtgagctcgggcctggcagaggaggatctggagaccttactgcagagtcgtgtgttaccttctagcctgatgctgcctaaggtcgaatccccagaggagatccagtggtttgcagataaattctcatttcatctgaaagggcgaaaactagaacagccgatgaacctcattccatttgtcgaaacagcaatgggtctgctgaatttcaaggccgtatgtgaagagactcttaaggtggggccccaggttggcttatttctcgatgccgtcgtgttcggcggcgaggatttccgggcttccatcggggtcaaggatatctctttgagcctttttctctgtgtgtgcgtctatatgtgcgtttatatcttttccctgcccctaaaggacggtcacctgcacaataacgtgtatctgccaaccatgacaatggttttccacgataatggcatggacacaacttcatag

SEQ ID NO: 112382 - DNA, 312 bp, synthetic construct
  misc_feature 1..312: note = Description of Artificial Sequence: Synthetic coding sequence
  source 1..312: mol_type = other DNA
cttcaggctatcgacctcgtctacatcgactttagggacggtgccggtttgctgcgtcagtcgagagagggagccgccatgggattcacaggcaagcaggtcattcaccctaaccagatcgctgtcgtgcaggagcagtttagcccttctccagagaagattaagtgggcggaggagctgatagctgcattcaaagagcaccaacagttgggaaaaggagccttcacatttcagggcagcatgatagatatgcctctgttgaaacaggcccaaaacactgtaactctcgcaacctccatcaaggagaaatag

SEQ ID NO: 112383 - DNA, 270 bp, synthetic construct
  misc_feature 1..270: note = Description of Artificial Sequence: Synthetic coding sequence
  source 1..270: mol_type = other DNA
gaagaactgatcgccgcattcaaggagcaccagcagctgggtaaggttgggaggtactgctgcagttggttatgtattcagccttttcctagtagccctggacaacgatcacagtcgatttcacgagttcccggaagatactgggtgctgggtgcgagatcctgggaatccaagggcgcatttaccttccaagggtcaatgatcgacatgccactactgaaacaggcacagaacactgtcactctggcaactagtataaaggagaaatag

SEQ ID NO: 112384 - DNA, 444 bp, synthetic construct
  misc_feature 1..444: note = Description of Artificial Sequence: Synthetic coding sequence
  source 1..444: mol_type = other DNA
aacgaagctcgcttgaggatcgttaagactctagaggatatcgacctaggtcccacagagaagtgcgtccgagtaaactcggtgtcaagcggccttgccgaggaggacctggagaccctgttgcagtcaagagtccttccttcaagcctcatgctgcccaaggtcgaaagtccagaggagatccagtgggccgtttgcgaggaaacactgaaggtcggaccacaggtggggctgttcctggacgctgtggtgttcggtggcgaagattttcgggccagtattggcgtcaaagatatatcactcagcttgttcctgtgtgtttgtgtgtacatgtgcgtgtacatttttagtcttccactaaaggacggccaccttcacaacaacgtctacctgccaaccatgaccatggtgttccacgacaatgggatggacacaacgagctag

SEQ ID NO: 112385 - DNA, 909 bp, synthetic construct
  misc_feature 1..909: note = Description of Artificial Sequence: Synthetic coding sequence
  source 1..909: mol_type = other DNA
atggcactaagactgctgcgccgggccgctcgaggggccgccgccgcagccctgcttaggctgaaagcgagtttggctgctgacattccacgcctcggctatagctcgagttcacatcataaatacatcccaagaagggcagtcctctacgtacccgggaacgatgaaaagaagataaagaaaatcccctcccttaatgtcgattgcgcagtgctggactgtgaagatggggtggctgcaaacaagaagaatgaggcacgactgaggatcgttaaaaccctcgaggacattgatttgggtccgaccgagaaatgcgtccgagttaacagcgtgagcagtgggctcgccgaggaagatctcgaaaccctcctgcagtctagagtcctgccaagttccttgatgctcccaaaagtggagtcccccgaggaaattcagtgggctgtctgcgaagaaacgcttaaagtgggcccccaggtgggcctgttcctcgacgctgtcgtgtttggaggagaggattttcgggcttctatcggcgcaaccagttccaaggagactctggatattctatacgccaggcagaagatcgtggtcattgctaaagcattcggcttacaggcgattgacctggtctatattgacttccgggacggcgcgggattgctgcgacagagccgcgagggggcagcgatgggcttcacaggtaagcaagtaatccacccaaaccagattgctgtcgtgcaggagcagttttcccctagtcccgagaagatcaagtgggctgaggaacttattgctgcgtttaaggagcatcagcagcttggcaagaccgtcagttgttcagcttcccaggcaggagtgcagtggagagatctgggatcactgcagccccctccccccggatttaagtag

SEQ ID NO: 112386 - DNA, 1401 bp, synthetic construct
  misc_feature 1..1401: note = Description of Artificial Sequence: Synthetic coding sequence
  source 1..1401: mol_type = other DNA
atggccttattaacagcagctgctagattactcggcacaaagaacgcaagctgcttggttctggctgcaagacatgccagcgcgtcctcgactaatctcaaggacattctcgcagatttgataccaaaggagcaggctagaattaagaccttcaggcaacagcacggcaagactgtggttggtcagattacagtggacatgatgtatggaggaatgcggggtatgaaaggcttggtctatgagacttccgtgttagatcctgacgaaggcattcggttccggggcttctcgatccccgagtgtcaaaagctcttgcccaaggcaaagggaggggaagagccattgcctgaggggctgttttggttgttggtgactggacatatacccaccgaggagcaagtttcttggctaagcaaggagtgggccaagagggcagcactgccgtcccatgttgtaaccatgctagacaacttccctacaaaccttcatccaatgtctcagttgtcggcagccgttaccgccttaaactccgagtcaaactttgcccgggcctatgctcaggggatcagccggactaaatactgggaattaatctacgaggattcaatggacctcattgccaaactcccttgcgtcgctgcaaagatttataggaatctttaccgagagggatccggaattggagccattgattcgaacctcgattggtctcacaactttaccaatatgctcggatacaccgaccaccagttcaccgagctcaccagactctaccttactatccattccgaccacgagggcggtaatgtctcagcccatacctctcaccttgttggaagcgctttgtccgacccttatctctcttttgccgccgcgatgaacggcctggcggggccactgcatggactcgctaaccaggaagtccttgtttggctgacgcaattgcagaaagaagttggtaaagacgtgagcgacgaaaagctccgagattacatctggaacactctcaattccgggagagttgtcccgggctacgggcacgcggtcttgcggaaaaccgatcccagatacacttgccagagagagttcgccttgaaacatctgccgaacgatccaatgttcaagctggtcgcccagctgtacaagatcgttcccaatgtgctgctggaacagggcaaggccaagaatccatggcctaacgtggacgctcatagcggggtcctgttgcagtattacggtatgacggagatgaattattatacagtgttgttcggcgttagccgtgccctaggtgtgcttgcccagttaatctggtctcgtgcactcggcttcccgctggagaggcctaagtctatgtcaacggagggcctgatgaaatttgtagactccaaatccgggtag

SEQ ID NO: 112387 - DNA, 537 bp, synthetic construct
  misc_feature 1..537: note = Description of Artificial Sequence: Synthetic coding sequence
  source 1..537: mol_type = other DNA
atggctctgttgacggcggcagctagactactgggaaccaagaacgccagctgtctggttcttgccgcgcggcatgccagcgcctcaagtaccaacctgaaggatattctggccgatctgattccaaaggagcaggctcgaatcaagacttttcggcagcagcacggcaagacggtggtcggccagatcactgtggatatgatgtatgggggtatgcgtggcatgaagggtctggtctatgaaacttctgtcctggatcctgacgaaggaatccgatttaggggtttctccattcctgagtgccagaaactgctgcccaaggctaagggcggtgaggagcctctaccggagggtctcttttggctcctcgtcaccggccacatccccaccgaggaacaggtgtcatggctgtccaaagagtgggccaaacgtgctgcccttccgagccacgtggtcacaatgcttgataactttcctacaaatctgcacccaatgagccagttgtctgccgccgtgaccgccctaaattccgaatag

SEQ ID NO: 112388 - DNA, 6084 bp, synthetic construct
  misc_feature 1..6084: note = Description of Artificial Sequence: Synthetic coding sequence
  source 1..6084: mol_type = other DNA
atgttgaagtttaagtacggcgcccgaaatcctctggacgccggcgccgctgagcctattgcaagccgagctagcaggctgaatttattttttcaagggaagccaccattcatgacacaacagcagatgtctcccttgagccgggaaggtatcctggatgcactgtttgtgctgtttgaggagtgcagccagcctgctctgatgaaaattaaacatgtgtcaaatttcgtgagaaagtattccgacactattgctgagctccaggagcttcagccaagcgctaaagactttgaggtgcgttccctcgtgggatgcggccattttgctgaggtgcaggtagtgcgagagaaggcaactggggatatatacgccatgaaggtgatgaagaagaaggcattacttgcccaggagcaggtgtctttctttgaagaagagagaaacattctatcccgatcaactagcccgtggatccctcaactccaatacgcctttcaggacaagaatcatttgtaccttgtaatggagtaccagccaggtggtgacttgctttcgttactgaaccgttatgaggatcaattggatgagaatctaattcagttctatctggccgaactgatcctggccgtgcactctgtgcatctcatgggttatgtacacagggacatcaaacctgaaaatattctggtcgaccgcaccgggcatatcaagctcgtcgacttcggtagtgctgccaaaatgaactctaacaagatggttaatgccaaattacccatcggcactccggactacatggcgccggaagtgttgacagttatgaacggcgatggaaaggggacttatggtctggattgcgactggtggagtgttggggtcatagcctacgaaatgatttatgggagatcaccattcgccgaggggactagcgcccgaactttcaacaacatcatgaactttcagaggtttctcaaattccccgatgatccgaaggtgtcctccgactttctggacctgatacagagtctcctatgtggacagaaagagcgtctcaaattcgagggcctgtgttgtcatccctttttttccaaaattgactggaataatatcagaaactccccaccccctttcgtgcctacacttaagtcagatgacgacacatctaactttgatgaacccgagaagaattcctgggtcagttcatctccctgccagttatctccatccggatttagtggcgaggagctgccttttgtgggtttttcctacagcaaggcactggggatccttggtaggtctgaatctgtggtgagcggtctggacagccccgccaaaaccagttctatggaaaagaaacttcttatcaaatcaaaggaactgcaggactcccaggataagtgccacaagatggagcaggaaatgacgcgacttcacagaagagtctccgaggtggaagccgtcctcagccagaaggaagtcgagctcaaagctagtgaaacccagagatctctcttggagcaggaccttgccacctacattaccgagtgtagctctctgaaacgaagcctggagcaagccagaatggaggtgtcccaggaggatgataaggctctacagctgcttcatgatatacgcgagcaatccagaaaattgcaagaaatcaaggaacaggagtatcaggcccaagtggaggagatgaggctgatgatgaatcagctggaggaggacttggtctctgcaaggcggcgctctgacctgtacgaatctgagctccgggagagccgacttgctgccgaggagtttaaaaggaaggccacagagtgccaacacaaattacttaaagcgaaggatcaaggaaaaccagaagtgggggagtatgctaaactggaaaaaatcaatgccgagcaacagttgaaaatccaagaactccaggagaagctggagaaggccgtgaaagcttccactgaggctacagagcttttgcaaaatatccgccaggccaaggagagagcagaacgcgagctcgaaaagttgcagaatcgcgaggattcctcagaggggattcggaaaaaattagtcgaggcagaggagctggaggaaaagcatcgcgaggcccaggtgagcgctcagcatttagaggtgcacctgaaacagaaggagcaacactacgaagagaagataaaagtgctagacaaccagattaaaaaagatctcgctgacaaagaaacactggagaacatgatgcaacgccacgaggaagaggcccatgagaagggaaagatcttgtccgaacagaaggccatgattaacgctatggattctaagatcagatctctcgagcaacgcattgtggagttgagcgaggcgaacaaactcgctgcaaacagcagtttattcactcagcggaatatgaaggcacaggaagaaatgatcagtgagctgcgccagcaaaagttctacctggaaacgcaggcagggaagctggaggcccaaaacagaaagctggaggaacagttagagaagattagtcaccaggaccactccgataaaaaccgcttactcgaactagagacgaggctgcgggaggtttccctggagcacgaagagcagaagctagagctaaagcgacagctcacagagttgcagctctcactgcaggagagagagagccagctgacagcactccaggccgctagagctgcgttggagagccagctgcggcaggcgaaaacagagctggaggaaactacagccgaagctgaagaggaaatccaggcacttacagcccacagagacgaaatccagcgtaaatttgatgccctccgaaacagttgtactgttatcaccgatctggaagaacagcttaaccagttgacagaggacaacgcagaactcaataaccagaatttttacctctccaagcaattagacgaagcaagcggggcaaacgatgagattgtgcagcttaggtctgaagtggatcatctgcgccgggagattacggaaagggaaatgcagcttaccagccagaagcagactatggaggcactgaagactacctgcacaatgctcgaggaacaagtgatggatttggaagccctgaacgatgagttgctcgaaaaagaacggcagtgggaagcatggcgatccgtgttgggcgacgaaaagagtcagtttgagtgtagggtgcgcgaactccaacgtatgctggacactgagaagcagtcgagagcccgggcagaccagcgtataacagaatcacggcaagtggtagagctggccgtgaaggagcataaggcagaaatcttagcactgcaacaggcgctgaaggagcagaagttaaaagccgagtccctaagcgataagctgaatgacctagaaaagaagcatgccatgctggaaatgaatgcccgctcacttcagcagaaattggaaactgagcgtgagttgaaacagaggctgctggaagaacaggcaaaactccagcaacagatggatcttcagaaaaaccacatctttaggttaacacaaggactgcaggaggctctggatcgcgcagatctccttaaaaccgaacggagcgatttggagtaccagctggagaatatccaagtcctctactcccatgagaaggtgaagatggaggggaccatcagccagcagactaaattgattgattttcttcaggcgaaaatggaccagccggcgaaaaaaaagaaaggcctcttctcgcgtaggaaggaggatccggcactgcctacccaggtgccattgcagtacaacgagctaaagttagctctagagaaggagaaagccaggtgtgccgaattagaagaggctctccagaagacacggattgaactccgaagcgcccgggaggaggctgcacacaggaaagcaacagaccatccgcacccatcaactcccgccacagcaaggcagcagatcgccatgagcgctatcgttcggtcacccgagcatcagccatcggctatgtcccttcttgcaccaccctcgtcaaggagaaaggaatccagtactcccgaagagttctcccgaagactgaaagaacgaatgcatcacaatataccccacagatttaatgtgggattgaacatgagggcaacgaaatgtgccgtctgtcttgatacagtgcactttgggcgccaggcgagcaagtgccttgaatgccaggtcatgtgtcaccctaagtgcagcacatgtctgccagctacttgtggactccctgccgaatacgcaacgcactttacggaggcattttgcagagacaagatgaatagcccaggcctgcaaaccaaggaaccctcctcatcattacatttggagggatggatgaaggtgccacgaaacaataagcgcggccagcaggggtgggaccggaaatatatcgtcctggagggcagcaaggtgttgatctatgacaacgaggcccgggaggccggacagcgtccagttgaagaattcgaactgtgccttccggacggcgacgtttcgattcatggggccgtgggggcttccgagctggctaacactgctaaggccgatgttccatacattctcaaaatggagtcacaccctcacaccacgtgctggccggggagaaccttataccttctcgctccctcttttccagataaacagcgatgggtaactgctctggagagtgttgttgccggcgggagggtgtctagagaaaaagccgaggccgatgccaaactgctcggtaatagtctgctcaaactggaaggcgatgaccggctggacatgaattgtactcttccattcagtgaccaagtagtgctggtggggaccgaagagggcctgtacgccttaaatgtgctaaaaaactctcttactcatgtgcctgggatcggggcagtgtttcagatctacatcatcaaggatctcgaaaaactgctgatgatcgccggggaggaacgagcactgtgcttggttgacgtcaagaaagtaaagcagagtctggcccaatcccacctgcccgctcaaccggatattagtcccaacatatttgaggctgttaaggggtgtcatctgtttggtgcaggcaaaatcgaaaatggtctctgtatttgcgccgctatgcccagcaaagtggtgatcctgaggtacaacgagaatctatcaaagtactgtattagaaaagagattgagacatcggaaccctgttcctgcatccactttacaaactactccatccttattgggaccaataagttctacgaaattgatatgaagcagtacaccctggaggagtttctggataagaatgatcactcactggcccctgctgtctttgctgcctcttccaactcttttcccgtcagcatagtgcaggtcaactccgccgggcaaagggaggaatatcttctgtgttttcatgaattcggagtgtttgttgatagctacggcagaagaagccgtactgacgatctaaagtggtcaaggcttcctctggccttcgcttaccgggagccgtacctgttcgtaacccattttaattcactcgaggtgatagagattcaagcacggagttctgctggaacacccgctcgcgcctacctggatattccgaatcctcgctatctgggacctgccatatcttcaggagctatctacctagcctcgagctaccaagacaaattgcgcgtaatttgttgtaaggggaatcttgtaaaagagagtgggacagaacatcacagaggacccagcactagtaggtcatcccccaataagcgggggccaccaacctataatgagcacataacaaagcgcgtcgcaagctcacccgctcctcctgagggaccctcgcatcctagggaaccctccacccctcaccgttatcgtgaagggcggaccgagctcaggcgggacaaatcaccagggcgccccctggaacgcgagaaaagcccgggcaggatgctctcaactcgccgggagcgtagtcccgggcgcctgtttgaagactcttcgcgtggtcgcctccctgctggggcagtcagaacacctctgtcccaggtgaataaagtgtgggatcagagttccgtgtag

SEQ ID NO: 112389 - DNA, 6210 bp, synthetic construct
  misc_feature 1..6210: note = Description of Artificial Sequence: Synthetic coding sequence
  source 1..6210: mol_type = other DNA
atgctgaaatttaagtacggcgcaaggaatccactggacgctggtgccgcggaacctattgcctctcgcgcaagcaggctcaatctgtttttccagggaaagcctccctttatgacacagcagcagatgtctccactgtcccgagaggggatactcgatgcactctttgtcttattcgaagaatgcagtcaacccgcactgatgaaaatcaaacacgtctctaactttgtgagaaagtattcagacactattgccgaacttcaggagctgcaaccatccgcgaaggacttcgaggttcgcagcctggtgggatgcggccacttcgccgaagtgcaggtcgtgcgcgaaaaggctaccggggatatctacgcaatgaaagttatgaagaagaaggccctattggctcaggaacaggtttccttttttgaggaggagcggaatattctgtctagatccaccagtccatggattccccagctgcagtatgctttccaggacaagaatcatttgtacctggttatggaatatcagccaggcggggatcttctcagcctacttaaccgctatgaggatcagctggatgagaatctgattcagttttatttagccgagttaatactggccgtacattccgtacacttgatgggctacgtgcatcgcgacatcaagccggaaaatatcctagtggatagaacaggtcatatcaaactagttgactttggtagcgctgccaagatgaattcgaacaaaatggtcaacgctaaattaccgatagggactcctgactacatggcacccgaggttctcacagtgatgaatggtgacgggaagggcacttatggactggattgcgactggtggagtgtgggcgtgattgcctacgagatgatctatggccgcagtccttttgctgaaggaaccagtgctcggacatttaataacattatgaactttcaacggttcctgaagttccccgacgatccaaaagtcagttccgacttcctggacctaattcagtccctcctgtgtgggcagaaagagaggctgaagtttgaagggctgtgttgccatccattcttctcaaagattgactggaataacattagaaactcaccgccacccttcgttcccacgctgaagagcgacgacgatactagtaacttcgacgaaccagagaagaattcttgggtgtcatctagtccatgccagcttagccccagtggtttcagtggtgaggaactacccttcgttgggttctcgtatagcaaagcgctcggcattctgggccggtcagagagcgttgtctcggggttggattcccctgcaaaaacgagcagcatggaaaagaaattgctgattaagagcaaagagctacaagactctcaggacaagtgccacaagatggagcaggaaatgacccggcttcatcggcgagtcagcgaagtggaggccgttctgtcacagaaggaggtcgaactcaaagctagcgaaacccagagatcccttctggagcaggacctggcgacctatattaccgaatgttcctcactgaagcgctctctagagcaagcgaggatggaagtaagccaggaagacgacaaggcccttcagctcctgcatgacatccgagaacagtcacgcaagctgcaagagataaaggaacaggagtaccaggctcaggtggaagaaatgaggctgatgatgaatcagcttgaagaggatctggtttccgctcgccgaagaagcgatctgtatgaaagcgaactgagagaatctagactggccgccgaagaattcaagcgcaaagctactgaatgccaacacaaactcctgaaggcaaaggatcaggggaagcccgaagtgggcgagtacgctaaactggagaaaataaacgctgagcagcagttgaagatccaggaactccaggagaagttagaaaaggcagtcaaggcctctaccgaagcaaccgaactactgcagaacatcaggcaggcaaaggaacgcgccgagagggagctggaaaaattacagaatagagaggattcaagcgaaggcatccgtaagaaactggtcgaagctgaagaaaggaggcacagcctggaaaacaaagtcaaacgcttggagacaatggaaaggagggagaaccggctgaaggacgacatccagacgaagtcacagcagatccagcagatggccgataaaattcttgagctggaggagaaacatcgtgaagcacaagtgtccgctcagcacctcgaggtgcacctcaaacagaaagagcagcactatgaggagaaaataaaggtgctggataaccagataaaaaaagatctcgccgataaggagacactcgaaaacatgatgcagcgccacgaggaggaggcgcacgaaaaaggaaaaatcctgtctgagcaaaaggctatgataaacgctatggactctaaaattcgctccctggaacagcggattgtggagctcagtgaagccaataaacttgcagccaattcatccctcttcacgcagaggaatatgaaggcccaagaagagatgatatccgagttaaggcagcagaaattctatctggagacacaggctggaaagttggaggctcaaaacaggaagttggaggaacaattggaaaagatcagtcatcaagaccactctgacaagaatcgcctcctggagttagagacgcgtctgcgggaggtcagtcttgagcacgaggagcagaagctcgagcttaagcgccagctgaccgaactccagctgagcctgcaggagagagagtcacagctgactgcccttcaggcagcccgcgcagccttagagtcccagctgagacaggccaagacggagctggaggaaactacagccgaggcagaggaggagatccaggctctaactgcccatcgggacgagattcagcggaagtttgatgccctgagaaattcttgcacagttatcaccgatctcgaggaacaacttaatcaactcactgaggataacgctgagctgaacaaccagaatttttacctgagtaaacagcttgacgaggctagcggcgccaatgacgagatcgtgcaattacgcagtgaggttgaccatctgcgtagggaaattactgaaagggagatgcaactgacctctcagaaacagaccatggaggcattgaagaccacttgcaccatgctagaggagcaggtgatggatctggaggcattaaacgacgagctcctcgaaaaggagcgccagtgggaagcctggcggtcagtactgggcgatgagaagagccaattcgaatgtcgcgtcagggaactgcagagaatgttagacacggaaaaacagtcccgagctcgtgccgatcagcgcattactgagtcgaggcaggtagtggagctcgccgtaaaagagcacaaggcggagattctagcccttcaacaagcgttgaaagaacaaaagcttaaggccgaatctcttagcgataaactaaatgatctggagaaaaaacatgccatgctggaaatgaacgcacgatcactccagcagaagctcgaaactgaacgggaactgaagcagaggctgctcgaagagcaggccaagcttcagcagcagatggacctgcaaaaaaaccatatctttagattgacgcagggcctgcaggaagccctggaccgagcggacttgttgaagacagagaggtcagacttggaatatcagctagagaatatccaggtgttgtacagtcacgagaaggttaagatggaaggcactatcagccagcaaaccaaattaatagacttcctccaggctaagatggaccagcctgccaaaaaaaagaagggactgtttagcaggaggaaagaggatcccgccctacctacccaggttcctctccagtacaacgagcttaaactcgccttggagaaagagaaagcgagatgtgcagaactcgaggaagctctgcagaaaacaaggatcgaactacgctctgctcgcgaggaggcagcccaccgaaaagccaccgatcacccgcaccccagtacgcccgccactgccagacagcagattgctatgagcgccatcgttcgatcccctgagcatcagccatccgcaatgtcactgctggcaccccctagtagtagaaggaaagagagtagcacccctgaggagtttagccgtcgactgaaagagcgcatgcatcacaacatcccacaccggttcaacgtgggcctgaatatgagggccacgaagtgtgctgtgtgccttgacacggtgcactttggccggcaagcgagcaaatgcctggagtgccaagtaatgtgtcatccaaaatgcagtacctgcttgcctgctacttgcggactaccagccgagtatgctactcacttcaccgaagccttttgtcgcgataaaatgaattctccgggcctgcagactaaggaaccctccagtagccttcacctggagggctggatgaaagttccccggaacaacaaacggggacagcagggatgggacagaaagtacatagtgctggagggaagcaaggttttgatatatgataacgaagccagggaggcaggccaacgtccagtggaagaattcgagttgtgcctccctgacggagacgtgtctatccacggcgccgtcggagcttcagaactggccaacactgccaaggccgacgttccgtatatcctcaagatggaatctcaccctcacacaacctgttggcccgggaggaccctgtacctccttgcaccctccttcccggacaaacaaaggtgggttacagcccttgagtccgtggtagctggcggcagagtcagcagagagaaagccgaagcagacgctaagttgttggggaatagtttgctcaagctggaaggtgatgaccggctggacatgaattgcaccctcccctttagcgatcaagtagtcctcgtgggcacagaggagggtctatacgctctcaacgtgctcaaaaacagtctgacgcatgtgcctggcatcggcgctgtgttccaaatttacatcatcaaggacctcgagaagctcctaatgatcgcaggggaggaacgtgcactttgcctggttgatgttaaaaaagtgaagcagtccctggctcagagtcacctgcccgcccagcccgacatcagtccaaacatcttcgaggcagtgaaagggtgccatctgtttggagccggcaagatcgaaaacggtctatgcatctgtgccgccatgcctagcaaggtggtgatcctgcgctacaatgaaaatctaagcaaatactgtatccggaaggaaattgaaacctcagaaccctgctcatgcattcactttactaactattccatcctgataggaacaaataaattctatgaaatagatatgaagcaatatactctcgaagagttcttggacaagaatgaccacagcctggcaccggccgtgttcgctgcatccagcaactcctttcccgtcagtattgtgcaggtgaacagtgccggccagagggaggaatacctactgtgtttccatgaatttggggtgttcgttgattcttacggccgcagatcccgcaccgacgacctgaagtggtctagattacccctagcgtttgcctaccgggagccgtacttattcgtgacgcattttaactctctcgaagtgattgaaattcaagcccgaagctccgctggcacccccgcccgggcttacctggatatcccaaatccccggtatctgggcccggcaatttccagtggggctatttacctcgcctcctcttaccaagataagttgcgggtgatctgctgcaagggaaatctggtgaaagagagcggaaccgaacatcatcggggcccatccacctctaggtctagccctaataaaaggggccctccaacttacaatgagcacattactaaaagagtggcctcgtcaccagcacctcctgagggcccgagtcacccacgggaaccgtccacaccacacaggtacagggagggacgcactgagctccgccgagacaagtctccaggtcgccccctggagagagaaaagagccctggcagaatgctgagcacgcgtcgcgagcgatctccggggagactgttcgaggacagctcccgtggccgccttccggcaggtgccgtgcgtactccactgagtcaggttaataaggtctgggaccagtcatcagtgtag

SEQ ID NO: 112390 - DNA, 696 bp, synthetic construct
  misc_feature 1..696: note = Description of Artificial Sequence: Synthetic coding sequence
  source 1..696: mol_type = other DNA
atggaccctgaacatgcaaaaccggaatcctcagaagccccgagcggcaacctgaaacagcccgagacagctgcggcactggcatcatccgggtccgttgtttctagtgtacctaaggctcaacggaacatcagtgcaaagaccgccccacggaagcacccagccgtgagtatccggagtgcccagagcgcggcggctgcaagacctcaagggagcgaagggaccgccccgtctcgaaaagcaacgacgagacctccacctaagcctaccctccctcctcctacccccagtgcccacacggaatccaagcttctcaatgagatggccatcaaggaacgagtggagggacgtgccaaagtaccttataagttcagggatagtctgaagcgatttagcttctcgcctaccggcatgctgaagatactgaggctgtctttaattctcggcgctttagcctgcttcataatcacgcaggcaaatgaaagctttatcaccatcacttcattagagatctgtatcgtcgtcttttttatcctgatctacgttttaacgctgcaccatctgctgacttacctgcactggcccctactggacctcaccaatagcattattaccgcggtctttctctctgttgttgctatactcgctatgcaggaaaagaagagacgccacctcctgtacgttggcgggaggtag

SEQ ID NO: 112391 - DNA, 369 bp, synthetic construct
  misc_feature 1..369: note = Description of Artificial Sequence: Synthetic coding sequence
  source 1..369: mol_type = other DNA
atggaccctgagcacgccaagcccgagagctccgaggcgccttctggcaatctgaaacagccggagacggccgccgccttggcctcctcgggctcagtagacctgacaaactcaatcatcactgctgttttcctttcagtggtggctatactggccatgcaggagaagaagagaagacatcttctttacgtcgggggctccctctgcctgactgccgtgattgtgtgctgcattgacgcttttgtggtgaccaccaagatgcgaaccaatctgaagcggtttctgggggtggaggtagagaggaagctctctcccgcaaaggatgcctacccagaaactggacctgatgctcctcagaggcctgcatag

SEQ ID NO: 112392 - DNA, 351 bp, synthetic construct
  misc_feature 1..351: note = Description of Artificial Sequence: Synthetic coding sequence
  source 1..351: mol_type = other DNA
atggatccagagcacgccaagcccgaaagcagtgaagcaccatcgggcaacctcaaacaaccagaaactgccgccgcacttgacctgacgaacagtataatcacggcagtgtttctgtccgtcgtggccatactggccatgcaagaaaagaagaggcggcacctgctgtatgttggggggagcctgtgtctaaccgccgtcatagtgtgctgcattgacgcctttgtggtgaccaccaagatgcgcaccaatttaaagagatttcttggtgtggaggttgagagaaagctatctcctgccaaagacgcatatcctgagacaggccccgacgctccccagcgccctgcttag

SEQ ID NO: 112393 - DNA, 279 bp, synthetic construct
  misc_feature 1..279: note = Description of Artificial Sequence: Synthetic coding sequence
  source 1..279: mol_type = other DNA
atggatccagaacatgctaagcctgaatcttccgaagccccttccggcaatctgaaacagccagagaccgcggcagcgctcgcctctagtggtagtgtagtgtcctctgtgcctaaagctcaacgaaatatcagtgccaagaccgccccaaggaaacacccggccgtctcgattcgttctgctcagagtgccgccgccgccaggccgcagggtagtgaaggaaccgctccatctcgtattttgccgacagtctcattgcagctttgcagctttcagtag

SEQ ID NO: 112394 - DNA, 861 bp, synthetic construct
  misc_feature 1..861: note = Description of Artificial Sequence: Synthetic coding sequence
  source 1..861: mol_type = other DNA
atggacccagagcacgccaaacccgagtcatcagaggcgcccagcgggaacctaaagcagcccgagacggccgctgcactcgcaagttcaggctcagtagtctcatcagttcctaaagctcaaagaaacattagtgcaaagactgccccaaggaaacatcctgctgtgtcaattagatccgcacagtctgccgcggccgcacggcctcaagggagcgagggaacggctccctcccgcaaggctacaacgcgtccacctcctaagccaaccctcccaccgcccacaccatctgcccacacggaatcgaaactcttaaatgagatggccattaaggagcgcgtggagggacgcgccaaagttccctacaagttccgcgactcactaaagagattctctttttcccctacaggaatgttgaagattctgcggttgtccctgatccttggcgctctggcttgctttatcatcacgcaggcaaatgaatcttttatcacgattacgtcactagaaatttgtatcgtcgtgttcttcatactgatctatgtactcacactgcatcacctactgacatatcttcattggcccctgcttgatctgacgaattcaatcattacggccgttttcctttctgtagtggctatcctggccatgcaggagaagaaaagacgccacctgctctatgtgggcgggagcctttgtctaacagcagtcatagtgtgctgcatcgacgcttttgttgtgacgacaaaaatgaggaccaacctgaagcgattcctcggagtggaggtggagcgaaagttatcgccagctaaagacgcctaccccgaaacaggcccggatgccccacagcgccccgcatag

SEQ ID NO: 112395 - DNA, 510 bp, synthetic construct
  misc_feature 1..510: note = Description of Artificial Sequence: Synthetic coding sequence
  source 1..510: mol_type = other DNA
atggatcccgaacacgccaagcccgagtcctcagaggccccttccggaaaccttaagcagccggagaccgccgccgctttatcgctgattctgggtgccctcgcgtgttttattattactcaggcgaatgagtcgttcataacaattacctcactggagatatgcatcgtagtcttctttattctgatttatgtgctgaccttgcaccacctgcttacataccttcattggcccctcctggatttaaccaactcaattatcaccgcagtgtttctctccgtggtggcaattctggctatgcaagaaaaaaagcggcgccacctgctctatgtgggaggaagcctgtgcttgaccgccgtgatagtgtgctgcatcgacgcctttgtggtgacaacgaagatgagaacaaatttgaagcgcttcttaggcgttgaggtggaaagaaaattatcacctgccaaagacgcttacccagaaaccggacctgacgctccccaacggccggcttag

SEQ ID NO: 112396 - DNA, 345 bp, synthetic construct
  misc_feature 1..345: note = Description of Artificial Sequence: Synthetic coding sequence
  source 1..345: mol_type = other DNA
atggaccccgaacacgcgaagcccgagagtagcgaagctccttcaggtaaccttaaacagcctgagacagcagccgccctctcattgatcttaggcgcactcgcttgtttcatcatcactcaggcaaacgagagctttatcacaatcacttccctcgagatttgcatagtcgtgttctttattctgatatacgtcctgactctacaccatctgctgacttatctgcactggccgctgctcgatcttactaacagtatcattacggccgtatttttaagcgtcgtggcaattctcgccatgcaggagaaaaaacggaggcaccttctttacgtcggggggcgatag

SEQ ID NO: 112397 - DNA, 117 bp, synthetic construct
  misc_feature 1..117: note = Description of Artificial Sequence: Synthetic coding sequence
  source 1..117: mol_type = other DNA
atggacccagaacatgctaaacccgaaagtagcgaggcccctagcggcaacctgaagcaacccgagactgctgcagcgttggaggccgataaagctaatatgagcaattttaattag

SEQ ID NO: 112398 - DNA, 87 bp, synthetic construct
  misc_feature 1..87: note = Description of Artificial Sequence: Synthetic coding sequence
  source 1..87: mol_type = other DNA
atggacccggagcacgctaagcctgagtcttcggaggccccttcaggcaacctcaaacaacccgagaccgcagcagctttgcggtag

SEQ ID NO: 112399 - DNA, 747 bp, synthetic construct
  misc_feature 1..747: note = Description of Artificial Sequence: Synthetic coding sequence
  source 1..747: mol_type = other DNA
atggctcctaaggcggctaaaggcgctaagccggagcccgcccccgccccacctccacccggtgctaaaccagaagaggacaagaaggacggcaaagaaccatctgacaaaccccagaaagccgtgcaagaccacaaagagccctccgacaaaccacagaaagccgtacaaccaaaacatgaagtgggaactagaagagggtgcagacggtacagatgggaactgaaggactcaaataaagagttctggctgctcggccatgcggagatcaagattcgaagcctcggatgcctgatcgcagctatgattctactctcctccctcaccgtgcatcccatactgcggctgattattaccatggagattagcttctttagcttctttattctactttactccttcgcaattcatcgctatattccatttattctatggcccatttccgacctttttaacgatctgatcgcctgtgcctttctggtgggagcagtggtgttcgcagtccggtctagaaggtctatgaatttgcattatctgctggccgtcattctgatcggggctgccggggttttcgccttcatcgatgtgtgcttgcagaggaaccattttcggggtaagaaagctaaaaaacacatgctggtgcctccgccaggaaaagaaaagggcccacaacaggggaaaggaccagaacctgccaaaccgcccgaacccggaaagcctcccggaccagctaaggggaagaagtag

SEQ ID NO: 112400 - DNA, 588 bp, synthetic construct
  misc_feature 1..588: note = Description of Artificial Sequence: Synthetic coding sequence
  source 1..588: mol_type = other DNA
atggctcctaaggctgccaagggcgctaagccggagcctgcccccgcgccaccccctccaggagccaaacccgaggaggacaagaaggacggaaaggagcccagtgacaaaccgcagaaggccgtgcaagatcataaggagccgtccgataagccccagaaggccgtgcagcccaagcacgaggttggaaccagacgggggtgccggagatatagatgggagctgaaggatagtaataaggagttctggctgctgggccacgcagaaattaaaattcggtctttagatctattcaatgatctcattgcctgtgcattcctcgtaggggctgtggtgtttgctgtgagaagtcggaggagcatgaatctacactatcttctcgcggtcatcctgataggtgcagcaggggtctttgcttttatcgacgtgtgccttcagcgaaaccatttcagggggaagaaggccaagaagcacatgttggtcccacctcctggaaaggagaaaggcccgcagcagggaaagggacctgagccagctaagcctcctgagcccggcaaacccccaggtccagcaaaggggaagaaatag

SEQ ID NO: 112401 - DNA, 180 bp, synthetic construct
  misc_feature 1..180: note = Description of Artificial Sequence: Synthetic coding sequence
  source 1..180: mol_type = other DNA
atgtggccacctgaccccgatccagatcctgatcctgagccagcggggggtagccggcccggccccgctgttcccgggctaagggccctcctgcctgctcgcgcctttttgtgcagtctcaaggggccgggcggtttcgtctgcacatggtgctcctgcccacaccagcccctttggtag

SEQ ID NO: 112402 - DNA, 549 bp, synthetic construct
  misc_feature 1..549: note = Description of Artificial Sequence: Synthetic coding sequence
  source 1..549: mol_type = other DNA
atgtggccccccgatcccgatcccgatcctgaccccgagcccgccggtggttcccgacctggtcccgcagttcccggcctgcgggctctgctgcctgcacgggccttcctctgctctttgaaagggcgcttgctactggcagaatcgggacttagctttattacatttatatgctatgtcgcatcaagtgccagtgcgtttcttacagccccactgcttgagttcctcctggctttgtatttcttattcgcagacgccatgcaactcaacgacaaatggcagggcctgtgttggcccatgatggatttcctgagatgtgtgacagccgctttaatttacttcgccatttcaatcactgcaattgccaaatactcggatggcgcttccaaagccgccggcgtgtttgggttttttgctaccatagtgttcgcaaccgacttttacttgatattcaatgacgtagcaaaattccttaaacagggagactccgctgatgaaaccaccgcccataagaccgaagaggaaaactcagatagtgactccgactag

SEQ ID NO: 112403 - DNA, 549 bp, synthetic construct
  misc_feature 1..549: note = Description of Artificial Sequence: Synthetic coding sequence
  source 1..549: mol_type = other DNA
atgtggccacctgatcccgatcccgaccctgaccccgaacctgcggggggttcccgaccaggtcctgccgtgcccggactgcgcgcactactgcccgccagggccttcctttgcagcctcaaagggaggctcctgctggcagagtcaggactgtcattcattacttttatttgttacgttgcatccagtgcctcggcctttctcaccgcccctctgcttgaatttttattagccctgtacttcctatttgccgacgctatgcagctgaatgataaatggcaaggcttatgctggcctatgatggactttctgaggtgtgttaccgccgcattaatctactttgcaattagtataaccgcgattgccaaatactcagacggggcatccaaggccgcaggcgtgtttggtttttttgccactatcgtctttgccactgacttctacctgatcttcaatgacgtggccaaatttctgaagcagggagattcagccgatgagacaacggcccataaaactgaggaagagaacagtgacagcgactctgattag

SEQ ID NO: 112404 - DNA, 549 bp, synthetic construct
  misc_feature 1..549: note = Description of Artificial Sequence: Synthetic coding sequence
  source 1..549: mol_type = other DNA
atgtggcctccggatcctgatccagaccccgatccagaacccgcaggtggttctcgccctggacccgccgttcccgggctgagggctttactgccagctcgggcgttcttatgttctttgaagggcaggctgttgttagccgaatcaggtttgagctttattaccttcatctgctacgtggcgtcatctgcttccgcctttctcactgcccccttactggagtttttgctggccctgtacttcctgttcgccgatgcgatgcaactcaatgataagtggcaaggactctgctggcctatgatggacttcctgaggtgcgtcaccgctgcgctgatttatttcgcaatcagtatcaccgccatcgctaaatatagtgatggcgcctcaaaagccgcaggagtctttggctttttcgctacgattgtgttcgcgaccgacttttatctgatctttaatgacgtagccaagtttctcaagcagggtgattcggctgatgaaacgactgcgcacaagaccgaggaagagaactctgattccgattctgattag

SEQ ID NO: 112405 - DNA, 705 bp, synthetic construct
  misc_feature 1..705: note = Description of Artificial Sequence: Synthetic coding sequence
  source 1..705: mol_type = other DNA
atgcgttcgggggaggaactagacggcttcgaaggcgaggctagcagtactagcatgatcagcggtgctagttcaccctatcagccaactacagagcccgtgtctcagaggcgcggcctggccggcttacggtgtgacccggactatctgcgtggcgccctagggaggctgaaggttgcacaggtcattctcgcccttattgccttcatctgcatcgagacgataatggcctgttcgccttgcgaaggactgtatttctttgagtttgtcagctgttccgcgtttgtggtcacaggagtgcttcttattatgttctcactcaatctgcacatgcgaattcctcaaattaattggaatctgacggacctggtgaacacaggcctgagtgcattcctattcttcatcgccagcatcgtattggccgcgctcaaccatagagccggtgccgaaattgccgccgtgattttcggcttcctggctaccgcagcttatgctgtcaatacgttcctggcggtccagaaatggcgcgtaagtgtgcgtcagcaatctacaaatgattacatccgggctagaacagagtcaagggacgtcgacagcaggcctgaaattcagcggcttgatacttttagctattccactaacgttactgtgcgcaagaagtcgccaactaatctgctgtccctgaatcattggcagcttgcgtag

SEQ ID NO: 112406 - DNA, 627 bp, synthetic construct
  misc_feature 1..627: note = Description of Artificial Sequence: Synthetic coding sequence
  source 1..627: mol_type = other DNA
atgaggagcggggaagagttggacggattcgaaggagaagcttcctcgacatcgatgatctctggggcctccagcccctaccagccaacaaccgaacccgtcagccagcgtcgcggcctcgccggactgcgctgcgatccagactatctaaggggtgcactgggccggctcaaggtggcccaggtgatactagcactgatcgccttcatatgcatagagacaattatggcttgctcaccttgcgagggactctactttttcgaatttgtgagttgttcagctttcgttgtcaccggtgtacttctcatcatgttttcgctgaatttgcacatgcgaataccgcagattaactggaatctgactgacctagtgaacactggtctctctgccttccttttctttatcgccagcatcgtcttggctgccctgaaccaccgggctggggcggagattgctgcagtgattttcggattcctggcgaccgccgcgtacgcagtgaacaccttcctggcagtccaaaaatggagggtgagcgtgcggcagcagagcacaaacgactatatcagagcaaggacagagtcccgcgacgtggatagcaggccagagattcaacgcctcgacacttag

SEQ ID NO: 112407 - DNA, 672 bp, synthetic construct
  misc_feature 1..672: note = Description of Artificial Sequence: Synthetic coding sequence
  source 1..672: mol_type = other DNA
atgctctcagccagagaccgtcgggatagacaccctgaggagggagtggtggccgagctgcagggtttcgcagtcgataaagcattcctgacgtcccataagggtatcctgttagaaacagagctggctcttaccttaatcatttttatctgcttcactgccagtatctccgcctacatggccgccgccctgctggagttctttatcacattggccttcctctttctgtacgcaactcaatactaccagcggtttgataggattaattggccgtgtctactgcaaggtcatggacagtccgggggcccacacccgcttgatcttctcagccactctgccaaggttcagccccagccatggcccgggttgactccccctgggtggcacactcctgcagctgttccgtgggttccggctcccgccccagggttctggagctggttactgtggtttatctgttttcacagtcttggctccagcgattttctgcgatgtgtctcagccattatcatcttcctggttgtgagcttcgccgccgtgacctcaagggacggtgcggcaatcgctgcgttcgtctttggaatcattcttgtctcgatcttcgcctatgatgccttcaaaatttaccgaactgagatggcccctggggccagccagggtgaccagcaatag

SEQ ID NO: 112408 - DNA, 225 bp, synthetic construct
  misc_feature 1..225: note = Description of Artificial Sequence: Synthetic coding sequence
  source 1..225: mol_type = other DNA
atgttgagcgccagagaccgcagggaccgccaccccgaagagggtgtagtagctgagctacaaggattcgccgttgacaaggccttcctgacctctcacaaggggatcctcttagagacagaactcgtgttcggaatcatcctggtgtccatctttgcctacgacgcgtttaagatctataggaccgagatggccccaggggcatcccagggcgatcaacagtag

SEQ ID NO: 112409 - DNA, 471 bp, synthetic construct
  misc_feature 1..471: note = Description of Artificial Sequence: Synthetic coding sequence
  source 1..471: mol_type = other DNA
atgctttccgctcgtgataggagagacaggcacccggaggagggagttgttgcggagcttcaaggattcgccgtggataaagcttttctcactagccataaaggaattctcctggagacagagttagcacttacgcttattatttttatatgtttcacagccagtatctccgcctatatggccgccgccctcctggagttttttattacactggcattcctttttctgtatgccacacagtattatcagcgcttcgaccgaattaactggccatgcctggactttcttcggtgcgtctcagctattatcattttcctggtggttagctttgctgctgttacatcaagggacggggcagccattgctgccttcgtgtttggtattatcctggtctccatttttgcatacgatgcatttaagatctatcgaacggaaatggcacccggcgcttcccagggtgaccagcagtag

SEQ ID NO: 112410 - DNA, 378 bp, synthetic construct
  misc_feature 1..378: note = Description of Artificial Sequence: Synthetic coding sequence
  source 1..378: mol_type = other DNA
atgctgtctgcaagggatcggcgagacagacaccccgaggagggggtcgtggccgagttacaaggttttgccgttgataaggcatttctgacttcccataaagggattcttttggagactgaactggcattgaccttgatcattttcatctgctttacagcatccatctccgcttacatggcagccgcactcctggaattctttattaccctagctttcttgttcctgtacgcaacccagtactatcagaggttcgatcgcattaattggccctgcctcgtttttggcatcattttggttagcatcttcgcttacgatgctttcaagatctatagaaccgagatggcccccggagcaagccaaggagatcaacagtag

SEQ ID NO: 112411 - DNA, 318 bp, synthetic construct
  misc_feature 1..318: note = Description of Artificial Sequence: Synthetic coding sequence
  source 1..318: mol_type = other DNA
atgctgtcagcccgggataggcgcgacagacaccctgaggaaggggtcgtagccgagttacagggatttgccgtggataaggccttcctgacatcccacaaagggatcttgctggagacggaactggactttttgcgctgtgtcagcgcgataatcatattcctagtggttagttttgcagcggtgactagccgggatggagccgccatcgcagcctttgtgttcggcataattcttgtgagcatctttgcctacgatgcctttaaaatttaccgaacagagatggcacccggtgccagtcagggggaccaacaatag

SEQ ID NO: 112412 - DNA, 1326 bp, synthetic construct
  misc_feature 1..1326: note = Description of Artificial Sequence: Synthetic coding sequence
  source 1..1326: mol_type = other DNA
ccctcacctgccatcggcctattcgcttccatggcagcagtgcttctgggcggcgctagagccagtcggttgttatttcagaggttgctctgggacgtggtccggtcacctatttccttctttgaaaggacccccattggccacctgctcaatagattctcaaaggagacggacacagtagacgttgatatccctgataagctgcggtctctgctcatgtacgcctttggcctcctggaggtctccctagtggttgccgtggcaactcccttacctctctggccgtcctgccattgtttttcctccacgcttggcttcagatggctggctgcaaacgttgagctcctcggaaatggacttgtatttgccgccgcgacctgtgcggtcctgagcaaggcccacttaagcgctggcctcgtcgggttcagtgtgagcgccgctctgcaggtcacacagacccttcagtgggttgttcgcaattggacagatctagaaaacagcatcgtgagcgtcgaacggatgcaggattacgcatggactcctaaagaagccccatggaggctgcccacatgtgcagcacagccaccgtggccccaaggaggacagattgagttccgtgacttcggactgcgttacagaccggagctccctctcgccgtccagggtgtgtcatttaagatccatgccggcgaaaaagtggggattgtaggccgtactggtgctggtaagagctccttggccagcggactactgcggcttcaggaagccgctgaaggtggtatttggatcgatggtgtaccgatcgcacacgtggggctacataccttaaggagtaggataagcatcattccacaggatcctatactgtttcccggctcacttcggatgaaccttgacctgttgcaggagcatagcgatgaggcaatttgggccgcactcgaaaccgtgcagctgaaggcactggtggcaagtctgcctggtcagcttcagtacaagtgtgccgaccggggcgaagatttatctgtgggtcagaaacagctgctttgtctggcccgcgcccttctgcgtaaaacgcagatccttatcttggacgaggccaccgcagcagtggatcctgggacggagctccagatgcaggcgatgttaggcagctggtttgctcagtgtacagtccttctcattgcccacagattacgatccgtgatggactgtgcacgagtgttggtgatggacaaaggtcaggttgcggagtccggcagtcccgcacagctactagcccagaagggcctcttttaccgattggcccaggagtctgggctagtttag

SEQ ID NO: 112413 - DNA, 528 bp, synthetic construct
  misc_feature 1..528: note = Description of Artificial Sequence: Synthetic coding sequence
  source 1..528: mol_type = other DNA
atgagccatggcgctggattagtaagaaccacctgttcatctggctctgcactgggtcctggggccggtgccgcacagccctccgccagccccctggagggactcctggacttgagttaccctagaacacacgcagcccttctgaaggtggctcagatggtgacactgcttattgcctttatatgtgtacggagtagcctgtggactaactactctgcctactcatattttgaggttgttacaatttgcgacctaatcatgatattggctttctatctggtccacctgttccggttctacagggtgctcacatgcattagttggccactctctgagctactgcattatctgatcgggacattgttgctcctgatcgcctccatagtggccgcaagtaagagctataaccagtcaggcttggtggctggtgccatctttggctttatggccacgttcctgtgcatggcttctatctggctaagctacaaaataagctgcgtcacccagtctacagacgccgcagtatag

SEQ ID NO: 112414 - DNA, 429 bp, synthetic construct
  misc_feature 1..429: note = Description of Artificial Sequence: Synthetic coding sequence
  source 1..429: mol_type = other DNA
atgagccacggcgcgggtttagtgagaacgacctgttcttccggcagcgcgctaggcccgggtgcaggcgccgcacagccgtctgcctcccccctggaggggctgctggacctgagttatcccaggacacatgccgctctgctgaaagttgctcagatggtcactttgctcattgcatttatctgcgttcgctcgagcctctggacaaactatagcgcatattcctatttcgaggtcgtgacaatctgcgatctcattatgatcctggccttttatttggtgcacctgtttagattttaccgtgtacttacctgcatttcatggcctctctccatctttggtttcatggccactttcctatgtatggcatccatttggttgtcctataagatctcatgcgttactcagtctactgatgcggctgtttag

SEQ ID NO: 112415 - DNA, 522 bp, synthetic construct
  misc_feature 1..522: note = Description of Artificial Sequence: Synthetic coding sequence
  source 1..522: mol_type = other DNA
atggaggagccccagagggctcgctctcatactgttaccaccactgcatcatctttcgcagagaatttttctacttcctctagcagctttgcttatgatcgagaattcttacgaactttgcctggattcctgattgtagcagagatcgtactgggcttgctggtgtggactctgatcgcgggaaccgaatacttccgagtccccgcattcggttgggtgatgtttgtggccgttttttactgggtattaaccgtgtttttccttatcatatatatcactatgacatacacgagaatcccacaggtcccgtggacgactgtagggctttgctttaatggttctgcattcgttctgtacctttccgccgcagtcgtcgatgcttcttccgtatctcccgagcgcgatagccacaactttaactcctgggcagcaagttccttttttgcctttctggtgaccatttgttacgccggcaacacctatttttccttcatcgcctggcgaagccggacaattcagtag

SEQ ID NO: 112416 - DNA, 363 bp, synthetic construct
  misc_feature 1..363: note = Description of Artificial Sequence: Synthetic coding sequence
  source 1..363: mol_type = other DNA
atgcaggctctacagcagcagccggtcttccctgatctcctgaaagcaatccctgtcagtatacatgttaatgtgatcctgttctccgccatcttgattgtgctgactatggtggggactgctttctttatgtacaacgcattcggaaagccttttgagacgctgcatggtcccctgggcttataccttttgagcttcatctcagggtcctgtggatgcctcgtcatgatcctctttgcttccgaggtcaagattcatcatctctctgagaaaattgccaactataaagagggtacttatgtctataagacacagtcagagaaatacaccacttccttttggctgaccaaaggccatagttag

SEQ ID NO: 112417 - DNA, 699 bp, synthetic construct
  misc_feature 1..699: note = Description of Artificial Sequence: Synthetic coding sequence
  source 1..699: mol_type = other DNA
atgcccagccagcagaagaaaataatcttctgtatggccggcgtctttagtttcgcctgtgcactgggcgtcgtgactgcgctaggaacgccactctggattaaggcgaccgtgttatgcaaaacaggcgctcttttggtgaacgcttccggccaggaacttgataaattcatgggcgaaatgcagtacggtctgttccacggtgagggtgtccgacagtgcggtctcggggctagaccatttagatttagcttctttcccgacttgctcaaggccattcctgtgtcaatccacgttaacgtgatcctgttctctgccatcctgattgtcctgacgatggtgggcacagccttttttatgtacaacgcattcggcaagccttttgaaacgctacacggccctttgggcctgtaccttctgagcttcatcagtggctcctgcggatgcctggtaatgatactcttcgcatccgaggtcaaaatccatcatctgagcgagaaaatcgccaactacaaagagggaacttacgtgtataagacacagtctgaaaagtacacaactagcttttgggtgatttttttttgcttttttgtccattttctaaatggactgctgatccgcttagcaggattccagtttcctttcgctaagagtaaagacgctgagaccaccaacgtcgctgctgacttgatgtattag

SEQ ID NO: 112418 - DNA, 738 bp, synthetic construct
  misc_feature 1..738: note = Description of Artificial Sequence: Synthetic coding sequence
  source 1..738: mol_type = other DNA
atgccttcccagcagaaaaagatcattttttgtatggctggtgtgttctccttcgcttgcgctctgggcgtggtgacggcactcggcacaccgctgtggatcaaggccacggttctctgcaaaactggcgcgctcctggttaacgcttccggccaggaattggataaatttatgggagaaatgcagtatggcctgtttcacggagagggtgttcgccaatgtgggctgggcgcgaggccttttcgcttctcctttttcccagatttgctgaaggccattccggtaagcatccatgtcaacgtgatattgttcagcgcaatcttaatcgtgctgactatggtcggaaccgccttctttatgtacaatgcttttggtaagccctttgagactttacacggcccattggggttgtacctgctctcgtttatctcggtggccctgtggcttccagccacgaggcaccaggcccagggaagctgtgggtgcttggtgatgatactattcgcttctgaagtcaaaattcaccaccttagcgaaaagatagccaactacaaggaggggacatatgtatacaagactcagtctgagaagtataccacgtccttctgggttatttttttctgcttttttgtgcacttcctgaatgggctgctgatccgtctggcggggtttcaatttccctttgcgaaatctaaggacgccgagacaactaatgtggcggccgacttaatgtactag

SEQ ID NO: 112419 - DNA, 348 bp, synthetic construct
  misc_feature 1..348: note = Description of Artificial Sequence: Synthetic coding sequence
  source 1..348: mol_type = other DNA
atgcaggcattgcagcagcagcccgtcttccccgatcttttgaaggccatccccgtgagcatccatgtgaatgtgatactcttcagcgctattctgatcgtcctgactatggtggggacggctttcttcatgtataacgcctttggaaaaccgtttgagactttacatggacccctggggctgtacttgctatcttttatttcgggctcctgcggctgtctcgtaatgatcctgttcgcatcggaagtgaagatccaccatctttcagaaaaaatcgctaactataaggaggggacctatgtctataaaacacaatcggaaaagtatacaaccagcttctgggtctag

SEQ ID NO: 112420 - DNA, 1878 bp, synthetic construct
  misc_feature 1..1878: note = Description of Artificial Sequence: Synthetic coding sequence
  source 1..1878: mol_type = other DNA
atgaattactcagaaatcgagagtaaagtgcgagaagccactaatgatgatccctggggcccctctggccagctaatgggggaaatcgccaaggccacatttatgtatgaacaattccctgaattgatgaacatgctgtggagccggatgctcaaggataacaaaaagaactggcggagagtgtataagagtctgctcttgctggcatatttgattcgcaacggatctgagcgcgtcgttacctcagcccgtgaacacatatacgacttgcggagcctggagaactatcacttcgtcgacgagcatggcaaagatcaaggcatcaatatcaggcagaaggtgaaagaactggtcgagtttgcacaagatgacgaccgacttagagaagaacgtaaaaaggctaagaagaataaggacaagtatgtcggagtgagctccgattccgtggggggttttcggtatagcgagcgttatgacccggaaccaaaatcaaagtgggatgaggagtgggacaaaaacaaatctgcctttcccttcagtgacaaacttggcgaactgagcgataagattggaagcacaattgatgataccatcagtaaattccgcagaaaggacagggaggacagccctgaaaggtgctccgacagcgacgaggagaaaaaggccagaaggggccgctctcctaagggcgagtttaaagacgaagaagagactgtcacaacaaaacatatccatatcactcaggccactgagactaccacaacaagacataaaaggactgccaacccatcaaaaactatcgacttgggtgctgccgcgcactataccggggataaggccagccccgatcagaatgcctcgacacacaccccacagagctccgtcaaaaccagcgtcccgagctccaaaagcagcggcgacctggtagatttgttcgacggcacatctcaatcaactggcggcagcgccgacctgttcggaggtttcgccgatttcggatcagctgcggcatctgggagcttccctagtcaagtcaccgctacctcaggcaatggggattttggcgactggtctgcattcaaccaggcgccttccggaccagtcgcgtcatccggggagttcttcggatcagccagccagccggctgtggagctcgtcagtggttctcagagcgcactgggcccacctccagcggccagcaacagctcggacctgtttgatcttatggggtcttcccaagctacgatgactagtagtcagtccatgaacttctctatgatgtccacaaacacggtgggcctaggacttccgatgagtcgctctcagcccttacagaatgtttctaccgtgttgcaaaagcctaacccactgtacaaccaaaacactgacatggtccagaagtctgtgagcaaaacactgccctcaacctggtccgacccgagcgtcaacatttccttggacaacctgctgcccggaatgcagccaagtaaaccccagcagccttcactgaatactatgatccagcagcagaatatgcagcagcctatgaacgtgatgactcaaagctttggcgccgtcaacctatcctcccccagtaatatgctaccggtgcgccctcaaactaacgctctgattggcggacccatgcccatgtccatgcccaacgtgatgacgggaacaatgggaatggcccccctgggtaatactccaatgatgaatcagtcaatgatgggaatgaatatgaacattggtatgtcagccgccggaatgggactgacaggtacaatgggcatggggatgcctaatatagctatgacctccggaacagtgcagccaaaacaggatgcatttgccaacttcgccaacttttcaaaatag

SEQ ID NO: 112421 - DNA, 1878 bp, synthetic construct
  misc_feature 1..1878: note = Description of Artificial Sequence: Synthetic coding sequence
  source 1..1878: mol_type = other DNA
atgctgaatatgtggaaggtgagggagcttgtggacaaggctactaatgtagtgatgaactacagcgagatcgaaagtaaggttcgcgaagccaccaatgatgatccatggggaccgagtggacagttaatgggggagattgctaaagcaactttcatgtatgagcagtttcctgagctgatgaatatgctttggagcaggatgcttaaagacaataaaaaaaattggcgaagggtgtacaagagccttctgctgctggcctatctcattaggaatgggagcgagagggttgttactagcgctcgtgagcatatttatgatcttcgtagcctagagaactaccattttgtggatgagcatggcaaggaccagggtattaacatcaggcaaaaggtgaaagaactggtggagtttgcccaggatgacgatcgactccgcgaggagagaaagaaagctaagaaaaacaaagataaatacgtgggtgtatcatcagactcagttggagggtttcgatactccgaaaggtacgatccagagcccaaatccaaatgggatgaggagtgggacaagaataaaagcgcttttcccttttctgacaagctgggggaactcagcgacaagatcggcagcacaattgacgataccatttcgaaatttagacgcaaggacagagaagacagccctgagcgctgttcagactcagacgaggaaaagaaggctcgaaggggtaggtcaccgaagggagaattcaaagatgaggaggagaccgtgacgacaaagcatatccacatcacacaagctacagaaacgacgaccaccaggcacaaaaggacggccaatccgagcaaaactatagatctgggcgcagcagctcactatacaggagataaggcttcccccgatcagaacgcctctactcatactccccagtccagcgtgaagaccagcgttccttcctctaagagcagcggagacctcgtggacctgttcgacgggacaagccagagtacagggggctccgcggacctgtttgggggatttgctgattttggatcggcggctgcatctggctcgttcccttcccaggtaacagctacaagcggcaacggcgacttcggtgactggtcagcttttaaccaggccccgtccggcccagtggcctcttctggtgaatttttcggtagtgccagtcagcccgctgtcgaactcgttagtggatcccaatccgctttgggtccacctccagctgcgagcaatagcagtgatctattcgatctcatgggtagcagccaagcaaccatgacctctagtcagagtatgaactttagcatgatgagcacgaacaccgtcggtctaggcctgcctatgtctcgtagtcagaatacggacatggtccagaaatccgttagcaaaacactaccctctacatggtctgatcccagtgtgaatatctccttggacaaccttctcccgggcatgcagccctcgaaaccccagcagcccagcctgaacaccatgatacagcaacagaacatgcagcaacccatgaacgtaatgacccagtcatttggagcggttaacctgtcctctccctccaacatgctgccggtgcggcctcaaaccaatgccctaattggtggcccaatgcctatgagcatgcccaacgtgatgactggcaccatgggcatggcaccattgggcaacacacccatgatgaaccagagcatgatgggaatgaatatgaatatcggcatgtcggcagcagggatggggttgaccggcaccatgggtatggggatgccaaacattgcaatgacctccggcacagttcaaccaaaacaagacgcttttgcaaacttcgccaacttttccaaatag

SEQ ID NO: 112422 - DNA, 1878 bp, synthetic construct
  misc_feature 1..1878: note = Description of Artificial Sequence: Synthetic coding sequence
  source 1..1878: mol_type = other DNA
atgaattatagcgagatcgaaagtaaggttagagaggctaccaacgacgacccctgggggccttcgggacagttgatgggcgagattgccaaggcgacctttatgtatgagcagtttccagaactcatgaatatgttgtggagccgcatgctcaaggataacaaaaaaaattggaggagagtatacaaatctttacttttgctggcttatctgataagaaacgggtctgagcgggtggtcacttctgctagagaacacatatatgatctgaggtccttagagaactaccactttgtggatgagcatggtaaggatcagggcataaatatccgacaaaaggtcaaagagttggtcgagttcgcacaagacgatgacaggctccgcgaagagaggaagaaagccaaaaagaacaaggataaatatgtgggagtgtcttcggactctgttggcgggttccgttactccgagcgctatgatccggagcctaagtcgaagtgggatgaagagtgggacaagaataagtctgctttccccttttctgacaaactgggggagctttctgacaaaataggcagtacaattgatgacaccatttccaagttccgcagaaaagaccgcgaagatagccccgaaagatgctcagacagcgacgaggagaaaaaggccagacgtggtagatcaccgaagggggaattcaaggacgaggaggaaaccgtgactacaaagcatattcatatcactcaggccacagaaaccaccacgaccaggcataaaagaacagcaaatccatcaaaaaccatcgacctgggcgccgcggcgcattacacaggtgataaagcttcgcccgatcagaacgccagtacacacaccccacagtcctccgtcaagacctccgtcccgtccagcaagtctagcggggatctggtcgatcttttcgatggtacatcccagtctaccgggggatcagctgatctctttggaggctttgccgattttgggtctgccgctgctagcggatctttcccaagccaggtcacagcaacctccggcaatggagacttcggtgactggtctgcatttaaccaggctccgagtgggcccgttgcttcatcaggagaattttttggcagcgcatctcagcctgcagttgaactggtctcaggttcgcagtctgctctcgggcccccccccgctgcttctaattccagcgatcttttcgacctgatgggctcttcacaggcaacaatgaccagctcccaatccatgaacttcagcatgatgagtaccaacacagtgggccttggtctccctatgtcacgttcccagcccttgcagaacgtcagcacagtactgcaaaagcccaacccgctctataaccaaaatactgacatggtgcagaagagcgtctcaaagacgttaccttccacttggagcgacccttccgtgaacatatccctggacaacctgctcccagggatgcagccatcaaaaccacagcaaccgtcactgaatacaatgatccaacagcagaatatgcagcagccaatgaacgtcatgacgcagagctttggcgcagtaaacctgtcaagtccaagcaatatgctcccagtgcgaccccaaacaaacgccctgataggtggccccatgcccatgtcaatgcccaacgtgatgaccggcacaatgggcatggcccctctcggcaatacacccatgatgaaccaaagcatgatggggatgaacatgaacatcggaatgtcagccgcgggcatggggctcacagggactatgggtatggggatgcccaatatcgcaatgacctctggcacagtgcagccaaagcaggacgcattcgcaaactttgcaaacttcagcaagtag

SEQ ID NO: 112423 - DNA, 1878 bp, synthetic construct
  misc_feature 1..1878: note = Description of Artificial Sequence: Synthetic coding sequence
  source 1..1878: mol_type = other DNA
atgaactattctgagatcgaaagtaaagtgagagaagccaccaacgatgatccctgggggcccagcggccaactgatgggcgagattgctaaagccacatttatgtacgagcagttcccagagctgatgaacatgttatggtctcggatgctgaaagataacaagaaaaactggcgtagagtgtataagtctttacttttactcgcctatctgatccgtaacgggtccgaaagggtggtgaccagcgctcgagaacacatatatgatctgcgcagcctcgaaaattatcatttcgtagatgagcacggtaaggaccagggcattaacattcggcagaaggtcaaagagcttgtggaatttgcacaggatgatgaccgcctcagggaagaaaggaagaaggcaaagaaaaacaaggataagtatgtgggcgtgtcttcagactcagtggggggcttccgctacagcgagcgatacgatcctgagcctaaatcaaaatgggacgaggagtgggataaaaataagagcgcttttcctttttctgacaaactaggtgagctctccgacaaaatcggatcaactatagacgataccatcagcaagtttaggaggaaagacagagaagattccccagaacgttgcagtgacagtgacgaggaaaagaaggcccgtagaggcagatctccgaagggggaattcaaagacgaagaggagacagtcacaaccaagcacattcacataactcaggcaaccgagacaactacaactcgccataaacgtaccgccaatccttccaaaaccattgacctcggtgccgcggcccactatacaggagacaaggcctctccggaccagaatgccagcacccatacgccccagtcctcagtcaagacgagcgtgccgagttctaaatcctcgggcgatctcgttgacctgtttgacggcacctctcaatctacaggaggctcagctgacctctttggcggatttgccgattttgggtcagcggcagcttccggcagcttcccctcacaagtgactgccacaagtggtaacggcgactttggcgattggtcagctttcaatcaggcccccagcggccccgtagcctcttccggggagtttttcgggagcgctagccagccagcagtagagctggtgtccgggagccagagtgccttaggccccccccctgctgcctccaatagttccgatctcttcgatctgatggggagctctcaagctacaatgacctcgagccagtctatgaatttttctatgatgtccacaaacacagtcggtttgggactccccatgtccaggtcccagcccttgcagaacgtgagcaccgttctgcagaagccgaatcccctttataatcagaataccgatatggtgcaaaaaagcgtgagcaaaactttgccctctacatggtctgacccatcagtgaatatatcattggataacttgctgccagggatgcaacccagtaagccccagcagccttcgctgaatactatgatccagcagcagaatatgcagcagccgatgaacgtgatgacccagagtttcggcgcagttaatctctctagtcctagcaatatgttacccgtgcgaccccaaaccaatgcgctgatcggaggccccatgcccatgtcgatgcccaacgttatgaccggaactatggggatggctcccttgggtaatacacctatgatgaatcagtcaatgatggggatgaacatgaatatcggcatgtcagccgcaggtatgggcctcactggtacgatggggatgggcatgcccaacatcgccatgacatccggcacagtgcaacctaaacaggacgcatttgccaattttgcaaatttttcaaaatag

SEQ ID NO: 112424 - DNA, 1932 bp, synthetic construct
  misc_feature 1..1932: note = Description of Artificial Sequence: Synthetic coding sequence
  source 1..1932: mol_type = other DNA
atgttgaacatgtggaaggttcgggaactcgtagacaaagccaccaatgtcgtgatgaattacagcgaaattgagtctaaagtgagagaggcaaccaacgatgacccatggggcccttccgggcagctgatgggcgaaatcgcaaaggctacctttatgtacgaacagtttcccgaactgatgaacatgctgtggtctagaatgctcaaagacaataaaaagaactggcgccgagtgtacaagtcgctcctcctgctcgcttacctcattaggaatggaagtgagcgcgtcgtgacaagcgctagggagcatatctacgacctccggtccctagagaactaccattttgtcgacgagcatgggaaagaccaggggatcaatatccgacaaaaggtgaaggaattagtagaatttgctcaggatgatgaccggctgcgtgaggaaaggaaaaaggccaagaagaataaggacaagtacgtcggggtgagttccgattccgtgggcggatttcggtatagtgagagatatgaccctgagccaaagagtaagtgggacgaggaatgggacaaaaataaatccgccttccccttcagtgacaagctcggggagctgtccgataagatcggctccacaatcgacgacacgatctccaagttccggaggaaagaccgggaggatagtccagaacggtgctcagactcggacgaagagaagaaagctagaagagggcgcagcccaaagggggagtttaaagacgaggaagagactgttacgaccaaacacatccacattacgcaggccaccgaaacgaccacgacccggcataaacggactgcgaatccgtccaagaccattgatcttggcgctgctgcccactatacgggggataaagctagtcccgaccaaaatgcctccactcacactccgcagtccagtgttaagacaagtgtcccaagcagtaagtctagcggtgacttagtggacctttttgatggcacttctcaatcaaccggagggtcagcagacttatttggggggttcgcagacttcggctccgccgccgcaagcgggtctttcccgagtcaggttacagcgacctccggtaacggtgactttggcgattggtcagctttcaaccaagcacctagtggtccagtggcatcatcaggcgaattctttggcagcgcctcccagcctgctgtcgaactggtgtccggttctcagagcgctctgggcccccctcccgccgcaagcaatagttctgacctcttcgatttaatggggagttcccaggccacaatgacaagcagccagtcaatgaattttagcatgatgtcaaccaataccgtcggcttgggtctgcccatgagtaggagccagcccctgcagaacgtatccaccgtcctccagaagccaaacccactctacaatcagaacaccgatatggtgcagaagtctgtcagcaaaacactgccctcgacatggagcgaccccagcgtcaatataagcttagataacctgctaccagggatgcagccttccaagccacaacagccatctcttaataccatgatccagcagcagaacatgcagcagcccatgaatgtgatgacccagtccttcggcgccgtgaatctgagctccccctccaatatgcttcctgtgcgaccccagacaaatgcgctgattggcggaccaatgccaatgagtatgcccaacgtgatgactggtaccatgggcatggcccccctggggaataccccaatgatgaaccagagcatgatgggaatgaacatgaacatcggaatgtctgccgcagggatgggactgactggaaccatgggaatggggatgcccaatatagctatgacgtctggaaccgtgcagcctaaacaggatgcatttgcaaatttcgccaacttttcaaagtag

SEQ ID NO: 112425 - DNA, 5028 bp, synthetic construct
  misc_feature 1..5028: note = Description of Artificial Sequence: Synthetic coding sequence
  source 1..5028: mol_type = other DNA
atggcgcaaatactgccaatccgcttccaagagcacctgcagctacaaaatctgggtatcaaccccgctaacataggtttctctactctgacgatggagtccgacaaattcatttgtatcagggaaaaagtgggggagcaggcacaggtcgtgatcattgatatgaatgatccctctaatcctatccgccggccaatttctgcagatagtgccatcatgaacccagcctccaaggttattgccctgaaggcgggaaagaccctccaaatctttaacatcgagatgaagtccaagatgaaggcccatacaatgacggacgatgtcaccttttggaagtggatcagcctgaatactgttgcactggtgacggacaacgctgtctaccattggagtatggagggcgaatcccagcccgttaagatgtttgacagacatagtagcttggcaggctgccagatcataaattataggactgacgcaaaacaaaagtggttgctgctaacaggaatctcagctcagcagaaccgtgttgtgggtgcaatgcagctctatagcgtagatcgaaaggtttctcagccaatcgagggccacgcagccagcttcgcccagtttaaaatggagggcaacgccgaggaaagcactcttttctgcttcgctgtccggggccaggcaggaggcaagcttcacattatcgaagtaggcactccccccaccggcaatcagccctttccaaaaaaagcagtcgatgtattctttcccccagaggcccagaacgatttccccgtcgcaatgcaaatttcagaaaagcatgacgtggtatttctaattactaagtatggctacatccatctctatgatttggaaactggtacctgcatttacatgaatcgaattagcggcgaaacaattttcgtaaccgccccacacgaggcaactgctgggataataggagtgaacaggaagggacaggtgttaagtgtttgcgtggaagaagagaacattattccatatattacaaatgtgctgcagaacccagatttggccttgcgcatggctgttcgaaataatttagctggcgccgaggaactcttcgcccggaagttcaacgccctgttcgctcaaggcaattactctgaggccgccaaagtggctgctaatgcccccaagggtattctgcggaccccagacaccattagacgcttccagtctgtacctgctcaacctggccagactagccccctcctgcagtacttcggtatcttgttggatcagggtcagctcaataagtatgagtcactggagctgtgtagacccgttctccagcagggtcgcaaacagctgcttgagaagtggctgaaagaagataagctggagtgtagcgaagaactgggcgacttagtcaagtctgtggatccaactcttgctctgtcagtgtacctgagagcaaacgtgcctaacaaggttatccagtgtttcgctgagaccggacaggtgcaaaaaatcgtactgtatgccaagaaagtggggtatacccccgactggatctttctcctccgcaatgttatgaggatttcacccgatcaaggccagcagtttgctcagatgcttgttcaggatgaagagcccctggcagatatcacccaaattgttgacgtcttcatggagtacaatctgattcagcagtgtactgcatttcttctcgacgcactgaagaacaaccggcctagtgagggaccgctccagacccggctgctggaaatgaacctcatgcatgctcctcaggtagctgatgctatcctcgggaatcagatgtttacccattatgaccgcgctcatattgcacaactctgtgagaaggccgggttactccagcgcgcgctggaacacttcacggatctttatgacatcaaacgggcagtagtccacacacatttactgaatccagagtggctggtgaattattttgggtccttaagtgtagaagatagcctcgagtgtctgagagccatgctgtcagcaaatatccggcaaaatctgcaaatttgtgtccaggtcgcttcaaaataccacgagcagctctccacacagagcttaatcgagctctttgaatcctttaaatcattcgagggtctgttttacttcctgggcagtattgtgaatttctcccaggaccccgacgtacattttaagtacattcaggcggcatgcaagacagggcaaattaaagaagtcgaaaggatttgtcgagagtctaactgttacgaccccgaacgagtgaaaaatttcctgaaggaggcaaaactgacagaccagctgccactgatcattgtgtgcgatcgtttcgatttcgtccatgaccttgtactgtacctgtatcgcaataatttacaaaagtatatcgagatctatgtccagaaggtgaaccccagcagactcccagttgtgattggagggttgctagacgttgactgctccgaggatgtgattaagaatctcatcctcgtggtacgtggccaattcagcacagatgagttggtggccgaagttgaaaagcggaatagactgaagctgctactcccttggctggaggctaggatacacgaaggttgtgaagagcccgccacgcacaatgcccttgccaagatctatattgacagcaataataaccctgagagatttttgcgggagaatccgtattacgacagtcgtgtcgttggaaagtactgcgagaaaagagatcctcatcttgcatgcgtggcctatgagaggggacagtgtgatttggaactgatcaacgtgtgtaatgagaactcactgttcaaatccctgtcgagatatcttgtgcggaggaaggacccagagctatggggcagtgtactgctggagtctaacccctaccgaaggcctttgattgaccaagtggttcaaaccgctctttccgagacacaggatcctgaggaagtatctgtgaccgttaaggcttttatgaccgcagacctacccaatgagttaattgagctcctcgagaaaattgttctggacaattctgtcttttcagagcatcgtaaccttcaaaacctcttgatcctgacagccattaaggccgatcgaacacgggtaatggaatacatcaatagactggataattacgacgccccggacattgccaatatagctatctcaaatgaactctttgaggaagccttcgccatttttcggaagttcgatgtcaacacatcagcagtacaagttttgatcgaacatatcggcaatctcgacagggcttacgaatttgctgagcggtgcaatgaacccgctgtgtggagtcagctggccaaggcccagctgcagaagggcatggttaaagaagcaattgattcctatatcaaagctgacgatccttctagttatatggaagtggtacaggctgctaacacctcaggaaactgggaggagttggtcaaatatctccagatggctaggaaaaaagcccgagaaagctacgtggaaaccgagctgattttcgcgctggcaaagaccaatagactggccgagctcgaagagtttatcaacggccctaacaacgctcacatccaacaggttggtgatagatgttatgacgagaaaatgtatgacgccgcaaagctgctatataataatgtttccaacttcggccgtcttgcaagtacactggtccatctcggggaataccaggcagcagtggatggagctcgcaaggccaacagcacccgaacatggaaggaggtgtgcttcgcctgcgtggatggcaaggagtttcgtctcgcccagatgtgcggtctccacatcgttgtccacgcggacgagctcgaggagcttattaactactaccaagaccggggctatttcgaggagttgataactatgctcgaggccgcattgggccttgaacgcgcccacatgggaatgtttactgaacttgcaatcctgtactcaaagttcaaaccccaaaagatgcgcgaacacttggagcttttctggagcagagtgaacatccctaaggtgctgagagctgccgaacaggcccatttgtgggccgaacttgtattcctgtacgacaagtacgaagaatatgacaatgcaattatcaccatgatgaaccaccctacagatgcatggaaagaaggccaatttaaggatattattacgaaggttgcaaacgtagagttgtactaccgagctattcaattctacctagagtttaagcctctccttcttaacgacctgctaatggtgttatcacctaggctggatcacactagagcagtaaactactttagtaaagttaaacagttgccacttgtcaaaccttatttgaggtctgtgcagaatcacaataataaatctgtgaacgagagcctgaacaatctgttcattaccgaagaagattatcaggcccttcgcacatcaatcgatgcatatgacaacttcgacaacatctcattggcccagcgtcttgaaaagcatgagctcatcgagttccggcgcatcgcagcatacctgtttaagggcaacaatcggtggaaacaaagcgtagagctctgtaaaaaggactctctatataaggacgcaatgcagtacgcaagcgagagcaaagatactgaacttgcagaggaactcctgcaatggtttctgcaagaagagaagcgcgaatgtttcggcgcctgccttttcacttgttacgatctgctcagaccagacgtcgtcttagagaccgcatggaggcacaatataatggattttgccatgccctactttatacaagtcatgaaggagtacctaaccaaagtggataagcttgacgccagtgagagtctgcggaaggaggaggagcaggcgacagagacccagcccattgtgtacggccaaccccagctgatgttaactgctggaccaagcgtggccgtcccgccccaagctccttttgggtacggctatacagcccctccctatgggcagccgcagcccggatttgggtattcaatgtag

SEQ ID NO: 112426 - DNA, 4923 bp, synthetic construct
  misc_feature 1..4923: note = Description of Artificial Sequence: Synthetic coding sequence
  source 1..4923: mol_type = other DNA
atggctcagattcttcccgttaggtttcaagaacacttccagctgcagaacctcggaatcaatccagctaacattggattctccactctgaccatggagtctgataaattcatatgtataagggagaaggtgggggagcaggcccaggtgaccattattgatatgtctgatcccatggccccaatacggaggccaatttccgcagagagcgcgattatgaaccctgctagtaaagttatcgctttaaaggcaggaaagactttgcagatctttaacatcgagatgaagtcaaaaatgaaagctcacaccatggccgaggaagtaatattctggaagtgggtgagcgtgaacactgttgcgctggttacagaaactgctgtctaccattggagtatggagggtgactcacagccaatgaaaatgttcgataggcacacctcattggtgggctgtcaagtgatccactacagaacagatgaataccagaagtggctcctgctagttgggatctctgcccaacaaaatcgtgtagtgggggcaatgcaactctattccgtcgaccgcaaagtaagccagccaatcgaggggcatgcagccgctttcgctgaattcaagatggagggcaatgccaaacctgctaccctgttttgcttcgcggtcaggaatcccaccgggggaaagctgcatatcatcgaggtggggcaacccgctgcgggaaaccaacctttcgtgaaaaaggcagtggatgtattcttcccgcccgaggcccagaacgactttcccgtggccatgcaaatcggcgcaaaacacggcgtgatctacctcatcactaagtatgggtatctacacctgtacgacttagaaagcggtgtttgcatatgtatgaatcgcatctctgccgacaccattttcgtgaccgcgcctcacaaaccaaccagtggaatcatcggggttaacaagaagggtcaggttctgagcgtttgcgttgaagaagataacattgtgaactacgcaaccaacgtcctgcagaacccagatcttgggcttcgattagcagtaaggagtaacctggctggggccgaaaagctgttcgtgagaaagttcaacacgttatttgctcagggctcttacgcagaagccgccaaggtggccgcctcagcccctaaaggtatcctgagaacacgtgaaacagtacagaagttccagtcaatacccgctcagtccggacaagcaagccctttattacagtacttcggtatccttttggaccagggacaactgaacaaactggaaagcttagagttgtgtcacctggtgctccagcagggcagaaagcagctattggagaagtggctgaaggaagataagctggagtgctcagaggagttaggcgacctcgtcaagaccacagacccgatgctggctctttctgtatacctccgcgcaaacgtgccttctaaggtcattcagtgttttgcagagacaggtcaattccaaaagatcgtgctgtacgccaaaaaagtcgggtatacacctgactggatcttcctgctgcgtggggttatgaagatcagccctgagcagggacttcagttttccagaatgttggtgcaggatgaggaaccacttgcaaacattagtcagattgtagacattttcatggaaaattctctaatacagcagtgtacatcctttcttctagatgcccttaagaacaacagaccggccgagggcctcctgcagacatggctgctcgaaatgaacctcgtccacgcgcctcaggtggcagacgccattctgggcaataagatgttcacacactatgacagagcccacattgcacaactgtgtgagaaagccggcttgttgcaacaggccctggaacactatacagacttgtacgacataaagcgggccgtagtgcatacgcatcttctcaatcctgaatggcttgttaactttttcggatcgttatccgtcgaggattcagtggaatgcctccacgccatgcttagcgcgaacataaggcagaatctgcaactgtgcgtgcaggtcgcgtctaagtaccacgagcagcttgggacccaagccctggtggaactgtttgaatctttcaagtcttataagggcctgttttactttcttggttctattgttaatttcagccaggaccctgatgtgcatttgaaatacatccaagccgcatgcaagaccggccagattaaagaagtggagcgtatttgtcgggagagtagttgttataaccccgagagggtgaaaaattttctgaaggaagccaaacttacagaccagctccccttgatcattgtatgtgacagattcggctttgtccacgatctcgttctgtatctgtatcggaataatctgcagaggtatatcgagatttatgttcagaaagtgaacccatccaggactccagcagtgattggcggactgcttgatgtcgattgctccgaggaggtcatcaagcatttgatcatggctgtgcggggccagttttcaactgacgaactagtggccgaagtggagaagagaaacaggctcaagctgctgttgccctggctggagagtcagattcaggaagggtgtgaggaacctgccacccacaacgctctggcaaagatttacatcgactcaaataacagccccgaatgttttctccgggaaaatgcctactatgactccagcgtcgtcggacggtactgtgagaaacgagatcctcatctggcatgtgtagcatatgaaaggggacagtgtgacctggagctgatcaaggtctgtaatgagaactccttgttcaaatccgaggctcgttatctggtgtgcagaaaggaccctgagctttgggctcacgtgctggaagagaccaatccatccaggcgccagctgatcgatcaggttgtgcagaccgcattgagcgagacacgtgatcctgaggagatcagtgtcaccgtcaaggcattcatgactgccgacctcccaaacgagctcatcgaacttttggagaaaattgtgctggataactctgttttttcggaacatcggaacctgcagaacctccttatcctcaccgctatcaaggccgaccggacccgcgtaatggagtatatcagcaggctcgacaattacgacgctctcgatattgcgagcatcgctgtgtcttccgctctctacgaggaggcctttaccgtttttcataagtttgacatgaacgcttccgctatccaagtactcatcgaacatattgggaacctcgaccgggcgtacgagttcgctgaacgatgcaacgaacctgcagtctggtctcagctggcacaggcacaattgcagaaagacctggtcaaagaggccatcaactcctacattcggggggacgatccatcatcttacctggaggtggtgcagtcggcctcacgttctaataattgggaagatttggtaaaattcctccagatggcccggaagaagggccgagagagttacattgaaacggagctgatctttgccctagccaagacctccagggtttccgagctcgaggatttcattaacggacccaacaacgcccacatccagcaggtgggcgatcgatgttacgaggagggtatgtacgaggcagctaagctgctatactccaacgtgtccaatttcgcaagactcgccagcaccctagtgcatctcggagaatatcaggcagccgtagataactctcggaaagccagttcaaccagaacatggaaggaggtatgcttcgcatgcatggatggacaggaattccggttcgctcagctgtgcggcctgcacatcgtcatacacgctgatgagttggaagaactgatgtgttactatcaagacagaggatatttcgaggaattgattctcctcctagaagccgcactcggcctggaacgcgctcacatgggcatgttcacggagctcgctatcctttactccaaatttaagccccagaaaatgttggaacacttggaattgttttggtcccgcgtaaatattccaaaggtgttgagggccgcagagcaagctcacctctgggcggagctggtgtttctgtatgacaaatacgaagaatacgacaacgccgtactgacaatgatgagccatcccaccgaagcttggaaagaaggtcaatttaaagacatcatcacgaaagtggccaatgtggaactctgttatcgggctcttcagttttacctagactataagccactgctgattaacgacctgttgttggtgctgtccccgaggctcgaccatacttggacggtttctttcttcagtaaagctggacagctgcctctggtcaagccatatttgagaagtgtccagtcgcacaacaacaaatccgtgaacgaggcacttaatcatctcctgaccgaggaggaggattaccagggtctgcgggcctctatagacgcatacgataattttgataatatttccctcgcgcagcagcttgaaaagcaccaactcatggagtttagatgcattgccgcatacctgtataagggcaacaattggtgggcccagagcgttgaattgtgtaaaaaggaccatctgtataaagacgccatgcagcacgctgcagaatcaagagatgccgaacttgcccagaaacttctgcagtggttcctcgaagaaggaaaaagggaatgttttgcggcatgcctatttacctgctacgacttactccggcccgatatggtcctggaactcgcctggcgccataacctcgtcgacctagccatgccgtactttatccaggttatgcgtgagtacctgtcgaaggtggacaagctagatgcgttggagagtctcagaaagcaggaggagcacgtcacagagcctgcccccctggtgtttgacttcgatgggcacgaatag

SEQ ID NO: 112427 - DNA, 4752 bp, synthetic construct
  misc_feature 1..4752: note = Description of Artificial Sequence: Synthetic coding sequence
  source 1..4752: mol_type = other DNA
atggctcagattctgcctgtgcgcttccaggagcatttccagctgcagaatctaggtataaatccagcaaacatcggcttttcaactctgacgatggaatccgataagttcatttgtatacgagagaaggtgggggagcaggcccaggtgaccatcatcgatatgagcgatcctatggccccaatccgacgccctatctccgccgagtccgccattatgaacccagcctctaaggtcatcgccttaaaggcaggaaagacgctgcagatcttcaatatcgaaatgaagagtaagatgaaagcacacaccatggctgaggaggtgattttctggaagtgggtgtctgtgaacaccgtcgcactggtgaccgaaaccgccgtttatcattggagcatggaaggagatagtcagccaatgaagatgttcgaccggcacactagtttggtgggatgtcaagtgatccactacagaaccgatgagtaccagaagtggctgctcttagtcgggatctctgctcagcaaaatagggtcgtgggtgccatgcagctgtactccgtagataggaaggtcagtcagccaattgaagggcacgcggccgcctttgctgagtttaaaatggaagggaacgctaaacccgctacactgttctgctttgccgtgcgcaacccaaccggagggaagctccatataatcgaagtggggcaacctgccgccggcaatcagcccttcgtaaaaaaggctgtggatgtcttcttccccccggaagcacagaatgactttcctgtggccatgcaaattggggctaaacacggcgtcatttacctgattacaaaatacggctatttacacctttacgatctggaatccggagtttgtatttgcatgaaccgaatctctgctgacaccatattcgttactgcgccccacaagcccacaagcggaatcattggagtcaataagaagggccaggtcctctcagtttgcgttgaggaggataatattgtgaattacgccactaacgtgctccaaaatcccgacctaggacttcgattggctgtgcgatctaatctggcgggcgccgaaaagttgtttgtcaggaagtttaatacccttttcgctcaggggtcttacgctgaggcagccaaggtcgcggcttccgctccaaaggggatcctcagaactagagagacggtgcagaagtttcagtctatcccagcacagagtggtcaggccagtcctttattgcagtatttcggtatcctactggaccaaggacagttgaacaaactggagtctttggaactctgtcatctggtactgcagcaaggtcgtaagcagctgctcgagaaatggttaaaggaggataagttggagtgttctgaggaactcggtgatctggtgaagactactgaccctatgctggctctgtcagtatatctgcgcgcaaacgtcccatccaaggtgatacagtgtttcgccgaaaccggacagttccagaaaatcgtgctgtacgctaagaaggtggggtatactcctgactggatttttctgctgcgtggagtaatgaaaatttccccagaacaagggctccagttctctcgtatgttagtccaagatgaagagccacttgcgaatatctcacagatcgtggacatatttatggaaaattctctcattcagcagtgtaccagttttcttcttgatgcattgaaaaacaacaggccggctgaggggctgctgcagacttggctattagagatgaatctggtgcacgctcctcaggtcgcagatgctatcctgggtaacaagatgtttactcattacgatcgggctcacatcgcacagctctgcgagaaggcaggcctgcttcagcaggccctggaacattatacagacctgtacgatattaagagagccgtcgtacacacccatctcttgaatccagagtggttggtgaattttttcggtagtctctctgtggaggatagcgtggagtgtttgcatgcaatgttgtctgctaacatcaggcagaacttacagctttgtgtacaggtggcttcaaagtaccatgaacagctcggcacgcaagccctggtcgagttgttcgaatccttcaaaagctataaagggctgttttacttcttaggatccattgtgaatttctcacaggaccccgacgtccacctgaaatatattcaggctgcgtgtaagaccggccagatcaaagaggtggagagaatttgtagagaaagctcttgctataatcctgagcgcgtcaagaactttctcaaagaagcgaaacttacagatcagctccccctcataattgtctgcgacaggttcgggtttgtgcacgacttggttctctatttataccgcaataacttacaacgctacatcgaaatatatgtacagaaagttaacccttctcggacacctgcagtgattggcggactgctggatgtggactgttccgaggaggtgatcaagcacttgatcatggctgtgcgtggccagttcagtacggacgagctggtagctgaagtcgagaaacggaatcgcctgaagttgctgctcccgtggctggaaagccagatacaagaaggctgtgaagagccagccacgcataatgcattggccaagatctatattgatagcaataacagcccggagtgtttcctacgggagaatgcctactacgattcttctgtggttggaagatactgtgagaaaagggatccccatctggcttgcgttgcatacgaaagaggccagtgtgacctcgagctgatcaaggtgtgcaatgagaacagtctcttcaaatcagaagccaggtacctcgtctgtcggaaggatccagagctgtgggcccacgtactcgaagagaccaacccctctaggcgccagctcatagaccaggtagtccaaacagctctatccgagactcgtgaccccgaggaaatttctgtcactgttaaagcgttcatgactgctgacttgccaaatgagctgattgagttgctggagaagattgtgttagacaacagcgttttcagtgaacatagaaatttgcagaacctcctgatcctcacagcgatcaaagccgacagaaccagggtgatggagtatatatcaagattggacaattatgatgccctggacatagcttccatcgccgtctcttcggccctgtacgaagaggcctttactgtctttcataagtttgacatgaacgcctctgctatccaagtgcttatagagcacattggaaatctggatcgggcatatgagtttgctgaaagatgcaacgaacctgctgtatggtcccagttggcacaggcccagctgcagaaagacctagttaaggaggccattaactcatacatccggggcgatgaccctagcagttatctggaagtcgtccagagcgctagcagaagcaataattgggaggacctggttaagttcctgcagatggctcgaaaaaaggggcgggaaagttacatcgaaaccgagctcatcttcgccttagctaaaacatctagggtgagcgagctggaggattttattaacggtccgaacaacgcacacattcagcaggtgggcgacagatgctatgaagaaggtatgtacgaagcggccaaattactctactcgaatgtatctaattttgctaggctggccagcactcttgtgcatctaggcgagtatcaagccgccgtggataattcccgcaaagcctcctcaacccgtacttggaaggaagtctgcttcgcctgtatggatggacaggagttccgcttcgcacagctttgcgggcttcatattgttatacacgccgacgaactggaagagctgatgtgctattaccaagatcgaggctatttcgaggaactgatcctacttctagaagccgccctggggttggaaagggctcatatggggatgttcactgaattagccattctatacagcaagtttaaaccccaaaaaatgctagagcatctggaattattttggtctagggtcaatatccccaaggtgttacgtgcggcagagcaggcccatctgtgggccgaacttgtgttcctgtacgataagtacgaagagtacgacaatgcggtcctgacaatgatgagccatcccaccgaggcctggaaggagggacagtttaaagatatcatcacaaaagttgccaacgtagaactgtgctatagagcccttcaattttacctggactataagcccctgctgattaacgacctactcctggtcctgagcccacgattagaccacacctggaccgtgtcatttttctctaaagcaggacagctgccacttgtgaagccttacctccggtctgtccagtcccataacaacaaatccgtgaacgaagcactcaatcatttgctgacagaagaggaggattaccaggatgctatgcaacatgcagcggaatcccgtgacgccgaattggctcaaaaattactccagtggttcttagaagaggggaaaagagagtgtttcgccgcttgcctttttacatgctacgacctactaagacctgatatggtgctggagttagcgtggcgacacaacttagtggatctcgcaatgccgtacttcattcaggtgatgagagagtaccttagcaaagtagacaagctggatgccctcgaatcactgagaaagcaggaagagcacgtgaccgagccagccccactggtcttcgatttcgacggtcatgagtag

SEQ ID NO: 112428 - DNA, 4923 bp, synthetic construct
  misc_feature 1..4923: note = Description of Artificial Sequence: Synthetic coding sequence
  source 1..4923: mol_type = other DNA
atggctcagatactgcctgttcgctttcaggagcactttcagctgcagaacctgggaatcaatcctgcaaacattggcttttccaccctcacaatggaatcggacaaatttatttgcatacgggagaaggtaggggaacaggcccaggtgacaattatcgatatgtctgacccaatggcaccaattcggcgccctatcagcgccgagtcggcaatcatgaaccctgcatcaaaagtcattgcacttaaagctggaaaaacactgcagatctttaatatagagatgaagagcaagatgaaagctcataccatggcagaagaagtaatattttggaaatgggtgagtgtgaatactgtggctctagtgacggagacggctgtttaccattggagcatggaaggggactcccagcctatgaagatgttcgataggcatacatcactggtgggctgccaggtgatacattaccggaccgacgaataccagaaatggctgcttctggtggggatctctgcccagcagaaccgtgtcgtaggagcaatgcagctgtattcagtggacaggaaagtcagccagccgattgagggccacgctgctgctttcgcagagttcaaaatggaagggaacgctaaaccagccacacttttctgctttgctgtgaggaatcccactggcggaaagctgcatatcatagaggttggacagcccgctgccggcaatcaaccattcgttaaaaaggctgtggacgtattctttcctcccgaggctcagaatgacttccccgtcgctatgcagattggcgcgaaacatggagtgatctatcttatcacaaagtacggttatttgcatctttacgacctggaatccggtgtgtgtatttgtatgaaccgcatcagcgccgataccatctttgtgacggccccccataaaccgaccagcgggataataggcgtaaacaagaagggccaggtgctcagcgtttgcgtcgaggaagataacattgtcaactacgccacaaatgtgctccagaacccagacctgggtctgaggctcgcagtgcgctctaatcttgctggcgcagagaagttattcgtccggaaattcaacacactgtttgcccaggggtcttatgccgaggctgccaaggtagcagcctccgcccccaagggaatcttacgcacccgcgaaactgtccaaaagtttcagagcatccctgcacaaagcgggcaggctagtcctctgctgcagtattttggcatactccttgaccaaggccagctgaacaagctagagagccttgagttgtgtcacctggtgctccagcagggcagaaagcaactgttggaaaagtggctgaaggaggacaagctcgagtgctccgaggaattgggggacctggtgaaaacaaccgacccaatgttggctttgtccgtatacttgcgcgctaacgtcccgtctaaggtaatacaatgtttcgccgaaaccggtcagttccaaaagatagtgctttatgctaagaaagtggggtacaccccagattggatcttcctgctcaggggcgtgatgaaaatctcaccagaacaagggcttcagttttctagaatgttggtccaggacgaggagcctttggccaacatcagtcagatagtggacatttttatggagaatagtctcatccagcagtgcaccagcttcctgctggatgctctaaaaaataaccgcccagccgaaggacttctccaaacttggctgttggagatgaacttagtgcatgccccacaagtcgctgatgccattctgggcaacaagatgttcacacactatgatagagcacacattgcacagctatgtgagaaagccgggctgctgcagcaagcactagagcattatactgatttgtatgatatcaaacgtgccgtggtgcacacacacttacttaacccagagtggcttgtcaacttctttgggagcctgtccgtggaagactcggtggagtgcctacacgctatgctgtccgcaaacattcggcagaatctccaattgtgtgtgcaagtggcctccaaatatcacgagcagctaggaacccaagctctggtcgaattgtttgagtctttcaagagttacaagggccttttctatttcctgggctccatcgtgaatttttcccaggaccccgacgttcacctcaagtatattcaggctgcatgcaaaaccggccagattaaagaggtagagcgcatttgccgagagtccagttgctataatcccgaaagggtaaagaacttcttaaaggaggccaagctgactgaccaactgccattaatcatcgtctgcgacagattcggcttcgtgcacgatctggtcttatacttgtaccggaacaatctgcagcggtacatagagatatacgtccagaaagtcaatccttcacgcacccctgccgttatcggcgggctgcttgatgtggattgctctgaagaagtgatcaagcacttgataatggccgtgcgaggtcagttttccactgacgagctggtggcagaggtcgagaaaagaaataggctcaagctgctgctgccatggctggagtctcagatacaggaggggtgcgaggagccagcaacccacaatgcgctggctaaaatctatatagattccaacaatagtccggaatgttttttgagagaaaacgcgtattacgattcatccgttgtgggacggtattgtgaaaagagggatccccacctagcatgcgttgcctatgagagagggcagtgcgacctagagctgatcaaagtgtgcaacgaaaacagcctgtttaagagcgaagctaggtatctagtgtgccgcaaggaccccgagctttgggctcatgtgctcgaagagacaaatccgagcagacgccagctcatcgaccaggtggtccaaacggccctttccgaaactagagatccagaggaaattagcgtgaccgttaaagcgttcatgaccgctgacctgcccaacgaacttattgaacttctggagaagatagtgctggacaacagcgtattctctgaacataggaacttgcagaaccttttaattctgactgcaatcaaagccgaccgcactagggttatggagtacatctccagacttgataactacgacgctctcgacattgcttccattgcagtttcgagcgccctgtacgaagaggcatttaccgtattccacaagttcgatatgaacgcctctgcgatacaggtgctgattgagcacattggtaatctggaccgggcctacgagttcgctgaacggtgcaacgaacccgctgtgtggtcacaactcgctcaggctcaactacagaaagaccttgttaaagaggccatcaacagctacatcaggggggatgacccttctagctacttagaggtcgtgcaatcagcatcacgttcaaataattgggaggatctggtgaaattcctgcagatggcgagaaagaaaggcagggagagctatattgaaacagagctcatctttgccctcgccaagacatcccgagtctcagagttagaggatttcattaatggtccaaacaacgcacacatccaacaggtgggcgatcggtgttacgaggaggggatgtatgaggcggctaagctcctctattccaacgtatctaattttgctcgccttgcttccacattggtgcatttgggtgagtaccaggccgccgtagataatagccgcaaagctagctctacgaggacatggaaagaggtgtgctttgcctgcatggatggacaggagttcaggttcgcacagctgtgcggtctccatattgtcattcatgcagacgagctcgaagaattaatgtgctattatcaggatcgcggctacttcgaggaattgatcctgcttctggaggccgctctggggctggaaagagcccatatgggaatgttcacggagctggccatattgtatagcaagttcaaaccacagaaaatgctcgagcatttggagctgttctggtcacgcgtgaatatacccaaagtacttcgagcagccgagcaggcccacctgtgggccgagttagtcttcctctacgacaaatatgaagaatatgataatgcagtactgaccatgatgtcgcatcccaccgaggcatggaaggaagggcagttcaaggacattattacaaaagtcgctaacgtcgagctatgttaccgcgccctccagttctatctggactataagcccctgctaatcaatgatctactgttggtcttgagccctcgcctcgatcacacatggacagtgtcgttcttcagtaaagctggacaactccctctcgtcaagccatatctgcgctccgtgcagtcccacaacaacaaaagtgtcaacgaggcactgaaccatttactgacagaggaggaagactatcaggggctcagagccagcattgatgcatacgacaatttcgataacatttctttggcacagcaattagagaagcatcaactcatggagttccggtgtatcgctgcttatctatataaggggaataactggtgggctcagagtgtggaactgtgcaaaaaagaccacctgtacaaagacgctatgcaacacgcggctgagagtagggacgctgaactagcccaaaagcttctccagtggtttcttgaagaaggtaaacgggagtgtttcgccgcctgcttgttcacttgctacgacctactgcgacccgatatggtgctcgaattggcgtggcgacacaacctcgtagacctggccatgccatattttattcaggtgatgagagagtacctgagtaaagtggataagctcgacgcgttggagtcattaagaaaacaagaagagcacgttactgagccggctcctctggtgtttgattttgacggccatgaatag

SEQ ID NO: 112429 - DNA, 747 bp, synthetic construct
  misc_feature 1..747: note = Description of Artificial Sequence: Synthetic coding sequence
  source 1..747: mol_type = other DNA
atggccgaattggatccttttggggcccctgcaggcgctcccggagggccagctcttgggaacggtgtcgcgggggccggcgaagaggatcccgcagcagcattcctcgcgcagcaggagagtgagattgctgggatcgagaacgacgaggccttcgctatcctggacggcggtgcccctggcccccaaccacacggagagcccccgggcggtcccgacgccgtagacggtgtgatgaatggtgagtattaccaggagtcgaacgggccaaccgactcttacgccgctatctcccaggtggaccgactgcagagtgagccagaatccatacgaaagtggcgggaagagcaaatggagagacttgaggcactggacgcgaactcccggaaacaagaagctgaatggaaggagaaagcgattaaagaactggaagaatggtacgccaggcaagacgagcaattgcaaaagacgaaggcaaacaatcgggtggccgatgaggccttttacaaacagccgtttgcagatgtaattggatacgtgaccaatattaatcacccttgttacagtctcgaacaggcggcggaagaggcctttgtcaatgacatcgacgaatcaagtccgggaaccgaatgggaaagggtggcacgcctgtgcgattttaatccaaaaagttctaagcaggcgaaagatgtcagccgcatgcgctcagtcctcattagcctgaagcaggcccctcttgtccactag

SEQ ID NO: 112430 - DNA, 657 bp, synthetic construct
  misc_feature 1..657: note = Description of Artificial Sequence: Synthetic coding sequence
  source 1..657: mol_type = other DNA
atggccgagctggacccgtttggggccccagccggcgcccctggaggccctgctctcgggaatggcgtggctggagctggggaggaggatccagctgcagccttcctggcgcagcaagagtccgaaattgctggaatcgagaatgatgaagcatttgccattttggacgggggagcccctggtccacaaccacatggcgaacctcccgggggccccgacgccgtcgacggtgtaatgaatggagagtactaccaggagtcgaacggccccaccgacagctacgcagctattagccaggtcgacagattgcaatctgagcctgagagcatacgcaaatggagggaggagcaaatggaacggttggaggcactcgacgctaactcaaggaagcaggaggccgaatggaaggagaaggcgatcaaggagctggaagaatggtacgcgagacaggatgaacaactgcagaaaaccaaggctaataaccgcgcagctgaggaagccttcgtaaacgatatcgatgagagttcaccagggacagagtgggaacgcgtcgcacgcctttgcgacttcaaccctaagagttccaagcaggccaaggatgtttccagaatgcgttctgtgcttattagcctcaagcaggcacccttggtgcattag

SEQ ID NO: 112431 - DNA, 711 bp, synthetic construct
  misc_feature 1..711: note = Description of Artificial Sequence: Synthetic coding sequence
  source 1..711: mol_type = other DNA
atggctgagctcgatccgttcggcgctccagcaggagctcctggcgggccagctttgggcaatggggtcgctggggccggagaggaagacccggccgctgccttcttggcccagcaagaaagcgagatcgccggcatcgagaatgacgaggcattcgctattctcgacggaggagcaccagggccccagccccacggagagcctccaggtgggcccgacgcggtggacggcgtaatgaatggtgagtattaccaggagagcaatggcccaactgactcgtatgcagctattagccaggtggatcggctgcagagcgagccagagtcgatccgaaaatggcgggaggagcagatggagcgtttagaggccctcgacgccaactcacgtaagcaggaagcggagtggaaagaaaaagccataaaggagctcgaggagtggtacgcgcgccaggacgagcaactccagaagacaaaagccaacaacagagttgctgacgaggccttctacaaacaaccctttgctgacgtgataggttacgtcgctgccgaagaggcgttcgtgaacgatatagacgaaagcagcccagggactgagtgggaacgcgtcgctaggttatgcgatttcaatccgaaaagtagtaaacaggctaaagacgtgtctcgcatgcgctcagtgttgattagtcttaaacaggctcccctggtccactag

SEQ ID NO: 112432 - DNA, 747 bp, synthetic construct
  misc_feature 1..747: note = Description of Artificial Sequence: Synthetic coding sequence
  source 1..747: mol_type = other DNA
atggccgagcttgacccttttggcgcgcccgctggggccccgggaggcccagctctgggaaacggtgtcgctggagccggcgaggaagacccagccgcagcattcctggcccagcaagagtctgagattgccggcattgaaaacgatgaagcctttgcaatattggatggtggagccccggggccgcagccccacggtgagcctcccgggggacccgacgcagtcgatggagtcatgaacggcgaatactatcaggagtccaacgggccaaccgacagttatgccgctatatctcaggttgatcgcctgcaatcagagcctgagagcatcaggaaatggagagaagagcagatggagaggctagaggcactggacgctaattcccgtaaacaggaggcagagtggaaggagaaggctattaaagagttggaggaatggtacgctcgtcaggatgagcagctgcaaaagaccaaggccaataatagggttgccgacgaggccttttataagcagccatttgctgacgtcattggttacgtcaccaatattaaccacccttgctactcgcttgaacaggctgctgaagaggcttttgtcaacgacattgacgagagctctccgggaacggagtgggagcgagtcgcgcggttatgtgatttcaacccgaagtcttcaaaacaggcaaaagatgtcagccggatgcgctccgtgctgatatccctgaaacaggcgccactcgtccactag

SEQ ID NO: 112433 - DNA, 693 bp, synthetic construct
  misc_feature 1..693: note = Description of Artificial Sequence: Synthetic coding sequence
  source 1..693: mol_type = other DNA
atggcggagctcgatcctttcggagccccggccggtgcacccgggggcccggcactcggtaacggggtagccggggccggagaagaggatcctgcggccgcattcctggcccaacaggaatctgaaattgccggcatcgagaatgacgaggcatttgcaatcctcgacggcggcgcccctggccctcagccacacggcgagcccccaggcggtcctgacgccgttgacggggtgatgaacggggagtactatcaagagtccaacggaccaacagacagctacgcggcaatttcgcaggtagatcgtttgcagtccgagcccgagtctattcgtaaatggcgggaagagcagatggaaaggctcgaggctcttgatgccaacagtcgcaagcaggaagccgaatggaaggaaaaagctataaaggagctcgaggaatggtacgcacgacaggacgagcagctgcaaaagacaaaggccaataacagcactaacatcaaccacccctgctactcgctggagcaagccgctgaggaagcctttgtaaatgacatcgatgagtctagtccagggaccgagtgggaacgagtggcccgcctgtgcgacttcaacccgaagtcatcaaagcaggccaaggatgttagcagaatgagaagcgtgttgatcagtctgaaacaggctccacttgtacattag

SEQ ID NO: 112434 - DNA, 693 bp, synthetic construct
  misc_feature 1..693: note = Description of Artificial Sequence: Synthetic coding sequence
  source 1..693: mol_type = other DNA
atggcagaattagatccctttggtgccccagctggcgcacctggaggccccgccttaggcaacggtgtagcaggcgctggcgaagaggaccccgctgcagcttttctggcacagcaagagagtgaaattgcaggaattgagaacgacgaggctttcgctatactcgatggtggagctcccggccctcagcctcacggcgagccccctggcgggcccgacgctgtcgatggcgtgatgaatggggagtattatcaggaatcaaatggtccaaccgactcttacgctgcaataagccaggtggatcgcctccagtccgaaccagaaagtatcagaaagtggcgggaggaacagatggagagactcgaggcactcgacgccaattcccgcaagcaggaggccgaatggaaggaaaaggccattaaggagctggaggaatggtacgcgcgccaggatgaacagctgcagaagaccaaggctaataacagcacaaatattaaccacccatgctactccctcgagcaggctgccgaggaggccttcgtgaatgacatcgacgagtcatctccaggtacagagtgggagcgcgtcgctcgcctctgcgacttcaaccccaagagctccaaacaagccaaggatgtctctaggatgaggagcgtcctgataagtttgaagcaggcacccttggttcactag

SEQ ID NO: 112435 - DNA, 501 bp, synthetic construct
  misc_feature 1..501: note = Description of Artificial Sequence: Synthetic coding sequence
  source 1..501: mol_type = other DNA
atggcagaactggacccatttggagcccctgcaggagctcctggtgggccagccttgggaaatggcgtagcaggcgcgggtgaggaagacccagccgccgcatttctggcacagcaggaatctgagatcgccggtatcgagaatgatgaggcttttgccattctggacggcggggcacccgggcctcagccccacggcgagccgcccggaggacccgacgcaaattctaggaagcaagaagcggagtggaaggagaaggccattaaggagctggaggaatggtatgcacggcaggatgagcaacttcaaaaaactaaggccaataatagagccgcggaggaagcatttgtaaacgacatcgacgaaagcagcccgggtactgagtgggagcgagtggctaggctgtgcgacttcaatccaaagtcaagtaaacaagccaaagacgtctcaaggatgcgctccgtattgataagcctcaagcaagctcccctggtgcattag

SEQ ID NO: 112436 - DNA, 690 bp, synthetic construct
  misc_feature 1..690: note = Description of Artificial Sequence: Synthetic coding sequence
  source 1..690: mol_type = other DNA
atggcggatgacttcggcttcttttctagcagtgaatctggagcccctgaagccgcggaggaggatccagccgcagcttttctggcacagcaggagtctgagatcgcaggaattgaaaatgacgagggcttcggggcacctgccggcagccacgccgctcccgctcagccaggccctacctccggtgctgggagcgaggatatggggaccactgtgaacggagacgtttttcaagaagccaacggcccagccgatggttacgcagctattgcccaggcagatcggcttacacaggaacccgaatctattcgaaaatggcgcgaagaacaacgcaagagactgcaagagttggacgccgcatctaaggtgaccgaacaggaatggagggagaaggccaagaaggatttagaagaatggaatcaacgacaatctgaacaggtggagaagaacaaaatcaataaccgcattgccgacaaggcattctaccagcaaccagatgcagatataatcgggtacgtcgcctccgaggaagctttcgtgaaagaatctaaggaagaaacccctggcactgagtgggagaaggtggcgcaactgtgcgacttcaatcccaaaagcagtaagcagtgcaaagacgtctcaaggctcaggtcagtactgatgtccttgaaacagactcctctaagtcgctag

SEQ ID NO: 112437 - DNA, 636 bp, synthetic construct
  misc_feature 1..636: note = Description of Artificial Sequence: Synthetic coding sequence
  source 1..636: mol_type = other DNA
atggccgacgattttggatttttctcttcttctgaaagcggcgcccctgaggctgcggaggaggatcctgctgcagcattcctggcccagcaggaaagcgaaattgcaggaattgagaatgatgaggggttcggggcccccgccgggtcacacgcagccccagcccagcctggtcccacatcaggagctggctccgaagacatggggactacagtgaacggtgacgtgttccaggaggccaacggacctgccgacggatatgccgctatcgcccaggcagaccgactcacacaggagccagagtccataaggaagtggagagaagagcagcggaaaagactgcaagagctcgatgccgcctccaaggtcaccgagcaggagtggcgcgagaaagctaagaaggatttggaagaatggaatcaacgccagagcgaacaagtcgagaagaataagataaacaatcgcgcgtccgaggaagcttttgttaaggaaagtaaggaagagacgccggggaccgaatgggaaaaagtcgcacaactgtgtgatttcaacccgaaatcttcaaaacaatgtaaggatgtctctcgtctgaggagcgtgctgatgagcttgaaacagaccccattgtcgaggtag

SEQ ID NO: 112438 - DNA, 405 bp, synthetic construct
  misc_feature 1..405: note = Description of Artificial Sequence: Synthetic coding sequence
  source 1..405: mol_type = other DNA
atggccgatgatttcgggttttttagtagctcagagagtggcgctccagaggctgccgaggaggaccctgctgccgcattcctcgcacagcaggagtctgagattgctgggattgagaatgacgaaggttttggagcccccgcaggcagtcatgctgctccagcccagcccggtcccacttcaggtgcaggcagcgaggatatgggcacaaccgtcaatggggatgtattccagcctgtacatcaccagcgggtgcagctgcagacacagctgcccattcagccgaaggatgagccggctcataactattctagtagcatctggcacagccagggccagggccagaaaggtcctgcaggactgcgcctgccgactagtgctcagatcctctccccctttccctag

SEQ ID NO: 112439 - DNA, 636 bp, synthetic construct
  misc_feature 1..636: note = Description of Artificial Sequence: Synthetic coding sequence
  source 1..636: mol_type = other DNA
atggcaaatgctggcttgcagctcctggggttcattttagcattcttgggttggattggcgcaatcgtgtcaaccgcattaccgcaatggaggatctactcctacgctggagataatatcgttacagcacaggcaatgtatgaaggactgtggatgtcatgcgtcagccaaagtaccggacagatccaatgcaaggttttcgactcactgctgaatttatccagcactctgcaggctacaagagccttgatggtggttggcatcttacttggagtgattgccatattcgtggccaccgtggggatgaagtgcatgaaatgcttggaagatgatgaagtacagaagatgagaatggccgtcatcggcggagccatctttttgctggcggggctggccattttggtggcaaccgcctggtacggaaacagaatagtgcaggagttctacgacccaatgacaccggtgaacgcccggtacgaattcggccaagcactgttcacgggctgggctgctgctagtctttgtcttctaggaggagccctgctctgttgttcttgcccaaggaagaccacctcctaccccaccccccgcccatatccgaagccagctccgagttcaggaaaggattacgtatag

SEQ ID NO: 112440 - DNA, 501 bp, synthetic construct
  misc_feature 1..501: note = Description of Artificial Sequence: Synthetic coding sequence
  source 1..501: mol_type = other DNA
atgtatgaggggctttggatgtcctgcgtgtcccagagcacaggacagattcagtgtaaggtgttcgatagcttgctgaatctttccagcacgctgcaggctacccgtgctctgatggtcgtgggcattctgctaggcgtgatcgccatttttgtggccacggtgggtatgaagtgcatgaaatgtctggaagacgacgaagtgcagaagatgaggatggccgtgataggaggcgcgatatttctgctggctggcctggcaattctggtggctacggcctggtatgggaatcgtatagtgcaggaattttacgaccctatgacgcctgttaacgctcgatatgaattcggtcaagctctgttcacaggatgggcggctgcatctctgtgccttctgggcggagctctgctgtgttgttcttgtcctcggaaaacgacgtcctatccaactccccgaccatatccaaaaccagcaccgtccagtgggaaggactatgtctag

SEQ ID NO: 112441 - DNA, 624 bp, synthetic construct
  misc_feature 1..624: note = Description of Artificial Sequence: Synthetic coding sequence
  source 1..624: mol_type = other DNA
atggtcgctacatgcctgcaagtggttggctttgttacaagctttgttggttggatcggcgtaatcgtcaccacctctacaaatgattgggtggtcacgtgcggttatactataccgacttgtcggaaactggatgaactgggcagcaagggtctttgggcggattgcgttatggccacaggactgtaccattgcaagccactggtcgacattcttattctcccgggttacgtccaggcctgccgcgcactcatgatcgctgcctctgtgctggggctgcccgctatcctgctgttgctcacagtgctgccctgcatccggatgggccaagaacctggcgtggctaagtatcggcgcgcccagttggccggagttctcctgatcctactcgccttgtgcgcactggtggctacgatctggttccctgtttgcgcacatcgtgaaacaaccattgtctcatttgggtactctctgtacgccgggtggattggagctgtgctctgcctcgtcggaggatgcgtaattctgtgttgcgccggggacgctcaggctttcggcgagaaccgtttttattatacggcgggatctagttcccccacgcacgccaagagcgcgcatgtctag

SEQ ID NO: 112442 - DNA, 498 bp, synthetic construct
  misc_feature 1..498: note = Description of Artificial Sequence: Synthetic coding sequence
  source 1..498: mol_type = other DNA
atggtggctacatgcctgcaggtggtgggattcgttactagctttgttggctggatcggcgtgattgtgaccacgagtactaacgactgggttgtgacttgtggatacacaatccccacatgccgcaaactggacgagctgggatctaaggggctctgggctgactgcgtaatggccactggcctctaccactgtaaaccactggtggacatcctcatcctgcccggctatgtgcaggcctgtcgtgctttaatgatcgccgcaagcgttttgggcttaccagccattttattactcctaaccgtgcttccatgcatacggatgggacaggaacccggagtcgcaaaataccgccgcgctcaattggccggtgttctcctcatcctgctggggtgtcagttgctgtgggccaagacagaatcaagccttcattctcaacacctcgtacaattcaaacagaaatatctagaggactttagctatctgcagggcgattag

SEQ ID NO: 112443 - DNA, 498 bp, synthetic construct
  misc_feature 1..498: note = Description of Artificial Sequence: Synthetic coding sequence
  source 1..498: mol_type = other DNA
atggtggctacttgcctgcaggtagtgggcttcgtcacaagcttcgtgggctggattggcgttatcgtcactaccagcacaaacgactgggtggtgacttgcggttacacaatcccaacctgcaggaagctcgatgaactgggaagcaagggtctgtgggccgactgcgttatggccaccggactgtaccattgtaaacctttggtcgacatcctgatcctgcccggatatgtgcaggcttgccgggccctgatgatcgccgcatcagtgctgggcctccccgcaatcttgctgctgctgacagtgttgccttgcattagaatggggcaagagcctggtgtggcaaaatatagaagggctcagctcgctggtgtcctgctgatcctgctgggatgccagctcctctgggctaaaactgagtcgagcctacattcgcagcacttggtgcaattcaagcagaagtaccttgaagacttctcgtacctccaaggggactag

SEQ ID NO: 112444 - DNA, 720 bp, synthetic construct
  misc_feature 1..720: note = Description of Artificial Sequence: Synthetic coding sequence
  source 1..720: mol_type = other DNA
atggcatccactgctgtccaactgctagggtttctgttgagcttccttggaatggtggggacactaattactaccattctgccacattggcgccgaacagctcacgttggcacgaacattttgaccgctgtgtcctacctgaagggattgtggatggagtgtgtgtggcatagcacaggcatttatcagtgtcagatttaccgaagtttattggctttgcctcaagacctgcaggccgcgagagcattaatggtgatcagctgcctgctgagtggcatcgcctgtgcatgcgcagtgatagggatgaagtgcaccagatgcgcgaaaggcactcccgccaagactacatttgccatcttgggtggaacactctttatactggcaggcctgctgtgcatggtggctgtctcttggacgacaaatgacgtagtacaaaacttttacaatcctctgctcccatcaggcatgaaatttgaaatcggccaagctttgtatctgggattcatttcatctagcctgtcgctgatcggcggaacactgttgtgtctgtcgtgtcaggatgaggctccttaccgaccataccaggcccctccgagagcaaccacaactacagcaaacacagcccccgcatatcagccacccgctgcctacaaggataaccgagccccatccgtcacgagcgccacccatagtggttacagactcaatgattatgtttag

SEQ ID NO: 112445 - DNA, 720 bp, synthetic construct
  misc_feature 1..720: note = Description of Artificial Sequence: Synthetic coding sequence
  source 1..720: mol_type = other DNA
atggctagtactgcagtgcagctcctcggatttctgttgtcattcctgggaatggtgggcacactgatcacaactatactgccccattggcggcggaccgcacacgtcggcaccaacatcctcacagcagttagttatctgaaagggctgtggatggaatgcgtgtggcatagtaccgggatttaccagtgccagatctatagaagcctgctcgcgctgccccaggacctgcaggcggccagggccctcatggtcatcagttgccttctcagcgggattgcctgcgcttgtgccgttattggaatgaagtgcactagatgcgcaaagggaacacccgcgaagaccacttttgctatcctgggggggacactcttcatattggccggcctactctgtatggtggcagtgtcttggaccaccaacgatgtggtacaaaatttctataaccccctcctgccatctggtatgaagtttgaaatcgggcaagcactgtatttagggtttatttcctcatccctctccctcataggcggtactctcttgtgcttaagttgccaagatgaagcaccctacagaccctaccaggccccgcccagagcaacgactaccacagcaaataccgcacccgcctatcagccaccagctgcctataaagacaacagagctccatcagtcacgtctgccacccattctggatacaggcttaatgattatgtgtag

SEQ ID NO: 112446 - DNA, 720 bp, synthetic construct
  misc_feature 1..720: note = Description of Artificial Sequence: Synthetic coding sequence
  source 1..720: mol_type = other DNA
atggcttccacggctgttcagctgctggggttcctgctgtcattcctggggatggtgggaacactcatcactactattctcccccattggagacgcacagcccacgtgggtaccaatatcttaaccgcggtgtcatatcttaagggtctatggatggagtgcgtatggcactctaccgggatctaccaatgccaaatctaccgcagcctgctcgctcttccccaagacctgcaagcagccagagcactcatggtaatctcatgtctattaagtggtattgcctgcgcctgcgccgttatcggaatgaagtgcacacgctgcgcaaagggaacccctgccaaaaccacttttgcgatactggggggcaccctgttcattctggccgggctgctgtgtatggtggcggtgtcttggacgacaaatgatgtcgttcagaatttctacaacccgctccttccgtcgggaatgaaattcgagatcggacaggcgctgtatttgggatttatcagtagtagccttagtttgattggcggtactttactgtgcctctcctgtcaggatgaggctccatatagaccataccaggcgccgccccgtgcaactactaccactgctaataccgcacctgcataccagccacccgcagcgtacaaggataatagggctccatctgttacttctgccacacactcagggtaccgactcaatgattatgtgtag

SEQ ID NO: 112447 - DNA, 720 bp, synthetic construct
  misc_feature 1..720: note = Description of Artificial Sequence: Synthetic coding sequence
  source 1..720: mol_type = other DNA
atggccagtaccgctgtgcaactgctgggcttcctcctgtcatttctcggcatggtaggcacactgattacaacgatcctgcctcactggcgacggacagcgcatgtcggtactaatatcttgacggccgtgtcctatctaaaaggcctatggatggagtgcgtttggcattccactggtatctaccagtgccagatctatagatccctgctggcgctgcctcaggatttacaggccgccagagcgctgatggttatctcttgcttgctctctggtattgcctgcgcgtgcgctgtcataggcatgaaatgcacccgctgcgccaaggggacccccgccaagactacatttgcaattctggggggaacgctatttatattagcaggcctgctctgcatggtagcagtgtcctggacaaccaacgatgtggtgcagaatttttataatcccttgctgcctagcgggatgaagtttgaaatcggtcaggccctgtatctggggtttattagcagcagccttagcctcattggaggcacactcctctgtctgagctgtcaagatgaggctccatacaggccataccaggcccccccaagagccactaccacaacagccaacaccgcccccgcctaccagccccctgctgcttacaaagataaccgtgcacctagcgtgacttcagcaactcatagcggatacagacttaacgactatgtatag

SEQ ID NO: 112448 - DNA, 720 bp, synthetic construct
  misc_feature 1..720: note = Description of Artificial Sequence: Synthetic coding sequence
  source 1..720: mol_type = other DNA
atggccagtaccgccgttcagctgctgggttttctgctaagcttcctgggaatggttgggaccctcataacgacaatactcccgcattggaggcgcactgcgcatgtgggcaccaacatcctgacggccgtcagttatctgaaaggactctggatggaatgcgtctggcattccacaggaatatatcagtgccagatctatcgaagtctgctggccctgccacaggaccttcaggctgctcgcgccctgatggtgatctcctgtctgctcagcggtattgcctgtgcctgtgccgtcataggcatgaagtgcactcgctgcgcaaaaggcacgcccgcaaaaactacattcgctatacttggcggaaccctctttattttagcagggcttctgtgcatggtggcagttagctggaccacaaatgacgtcgtgcagaatttctacaatccgctactcccatcagggatgaaattcgaaatcggccaggctctgtatttggggttcataagtagctcccttagtcttattggcggaaccctactgtgcttgtcgtgccaggacgaagccccctacagaccttaccaggcccccccaagggcgacaacgacaacagcaaacacagcccctgcctaccaacccccagcggcatacaaggacaaccgcgctccctccgtgactagcgccactcattctggatataggctcaacgattacgtgtag

SEQ ID NO: 112449 - DNA, 918 bp, synthetic construct
  misc_feature 1..918: note = Description of Artificial Sequence: Synthetic coding sequence
  source 1..918: mol_type = other DNA
atgacttcccgcaccccacttttggtgactgcctgtctttactacagctactgtaatagccgccacctgcagcagggcgttcgaaaatctaagcggccagttttctcccattgccaggtgccagagactcagaaaacggatacgcggcacctgtcgggagcgagggccggcgtgtgcccatgctgccaccctgacggcttacttgctactatgagggatctgttgcagtacattgcctgtttctttgcattcttctccgcagggtttctgattgtggcaacctggactgactgttggatggtcaatgccgacgattctcttgaggtctccacaaagtgccgagggctgtggtgggagtgcgtcaccaacgccttcgatgggatcagaacatgcgacgagtacgacagcatcctcgccgaacacccactgaagctggtggtcactcgcgctttgatgatcacggcagatatactcgccggctttggatttttgaccttactgttagggctcgactgtgtaaagttcctccccgacgaaccgtacattaaagtgcggatttgctttgtagcaggggcaacattgctcatcgctggcactcctggcattatcgggagcgtttggtacgcagttgatgtgtatgtcgaacgaagtactttggttctgcacaatatattcctcggtatacaatataaattcggatggtcatgctggctgggaatggccggctcactcggatgtttcctggccggagccgtactgacctgctgcttgtatctttttaaggacgttggccctgaaaggaactacccatattcccttcgaaaggcgtactcagccgccggcgtaagtatggcaaaatcatattctgcgccgcgtaccgagacggccaaaatgtacgccgtggatacaagggtttag

SEQ ID NO: 112450 - DNA, 360 bp, synthetic construct
  misc_feature 1..360: note = Description of Artificial Sequence: Synthetic coding sequence
  source 1..360: mol_type = other DNA
atgacctcccggacacccctcctcgtgaccgcctgtctatattactcgtactgcaattcacgtcatcttcagcagggtgtaaggaagtcaaagcgccccgtcttctcccattgtcaagttccagaaacacagaaaaccgacactaggcatttgtcaggcgctagggcgggcgtctgcccctgttgtcatccggacggcttactcgccactatgcgtgatctgcttcagtatatagcatgtttctttgccttcttttccgccggctttctcatcgtggctacttggaccgattgctggatggtgaatgcagacgatagcttggaaatgctggacttgagagagaccattctgattccctag

SEQ ID NO: 112451 - DNA, 675 bp, synthetic construct
  misc_feature 1..675: note = Description of Artificial Sequence: Synthetic coding sequence
  source 1..675: mol_type = other DNA
atggcgaattcaggcctccaattattggggtactttctagccctgggaggttgggttggtataatagcttccactgcacttccgcagtggaaacagagctcctacgctggggacgcaattatcaccgccgttggactgtacgaaggactctggatgtcttgtgctagtcagtccacgggccaggtgcagtgtaagctttacgattcacttttagcactcgacgggcacatacagtccgcccgcgctctaatggtcgtcgcggtgttactaggcttcgtggccatggtgttgagcgtggtcggcatgaagtgcacccgcgtcggagatagtaatcccattgctaaaggaagagtggctatagcgggcggagcgctgttcattctggcaggcctgtgcacactcaccgccgttagttggtatgccactctggtgacacaggagttctttaatccatccacccccgtgaatgcaaggtatgagttcggacccgccctattcgtgggttgggcgtcagcgggactcgctgttcttggtgggagtttcctttgctgcacatgccctgagccagaaagacccaattcgtccccacagccgtataggcctggtccctcagcagctgctagagagccggtggtaaagctcccggcttccgcaaagggccctttgggcgtttag

SEQ ID NO: 112452 - DNA, 636 bp, synthetic construct
  misc_feature 1..636: note = Description of Artificial Sequence: Synthetic coding sequence
  source 1..636: mol_type = other DNA
atggcaaatagtggactacagctgttgggatatttcctagctctcggggggtgggtggggataatagcttccaccgcgctgcctcagtggaagcagagcagctacgcaggggatgcaatcataacggccgtcgggttgtacgaggggctgtggatgagttgcgctagccagagtacaggccaggtgcagtgcaagttatatgacagtttgctggccctggacggccacatccagagtgccagggcacttatggtggtcgccgtcttgttggggtttgtggccatggtgctctccgtcgtcgggatgaaatgtacccgcgttggtgactccaatccaattgccaagggtcgggtggccatcgccgggggggcattgttcatcctggccggactatgtacattgacagcggtgtcgtggtatgccaccttggtgactcaggagttttttaacccttccactcctgtcaatgctagatatgaatttggtccagcattgttcgtcggttgggccagtgcgggcttggctgtactgggaggatccttcctgtgttgcacttgtcccgaaccagagcgtcccaatagcagtccccagccgtacagaccgggcccctctgctgctgctagagagtacgtatag

SEQ ID NO: 112453 - DNA, 657 bp, synthetic construct
  misc_feature 1..657: note = Description of Artificial Sequence: Synthetic coding sequence
  source 1..657: mol_type = other DNA
atggctaacagtgggctccaactgcttggatatttcctggccctgggcggctgggtggggatcattgcatctacagccctgccacagtggaaacagtcatcttacgcaggggatgcaattatcactgcagtggggttatacgaggggctgtggatgtcctgtgcctcacagtccacaggccaggtgcagtgtaagctgtacgattccctgcttgcactggatggacacatacagtctgcgcgggctctgatggtggtcgctgttttgttgggttttgttgcgatggtactttccgttgtgggcatgaaatgcactcgagtaggagattctaaccccatcgccaaaggtcgggtggcaatagctggtggagccctgttcatcttggcaggaatgaatttggcacagccatgcagttgggcggggcctcaacttgcatggccttgttgggccgcaccttcctccgctgctcacgccaggagccagcgagaccccactgctgcccatagcccgattggcttggatccccttctgctccctgaatccacttccgaactgcgccttccctggcctgcaccccaccctgtggcaccactcccatccatacagcccgcaagccagcatcctggacagggtcactgggggatcggctgggcttag

SEQ ID NO: 112454 - DNA, 663 bp, synthetic construct
  misc_feature 1..663: note = Description of Artificial Sequence: Synthetic coding sequence
  source 1..663: mol_type = other DNA
atgtcaatgggattagagatcacaggaactgcactagccgtgctgggctggctgggtaccatcgtctgctgcgcactacccatgtggcgagtctcggcatttatcgggagcaatattattacctctcagaacatctgggagggtctgtggatgaactgcgtggttcagtcgaccggacagatgcagtgcaaggtgtacgattctctgcttgccctacctcaggacctgcaggccgcaagggctctgattgtcgtggccatcctgcttgctgcgttcggccttctggtcgctctggtaggcgcccagtgcactaactgtgtccaggatgacaccgctaaggctaaaattactatcgtggctggggtccttttcctgctggccgccttgctgactctagtgcctgtgtcatggtcagctaacaccattattagagacttttacaatccggtggtcccagaagctcagaagcgggagatgggcgccgggctctatgtgggctgggctgccgcagcgctccagctgttgggcggagccttactgtgttgctcttgccctccccgcgagaagaagtacaccgctacaaaagtcgtgtactcggccccaagatcaacaggtcctggggcctccctcggaacaggatacgatcggaaggattacgtctag

SEQ ID NO: 112455 - DNA, 630 bp, synthetic construct
  misc_feature 1..630: note = Description of Artificial Sequence: Synthetic coding sequence
  source 1..630: mol_type = other DNA
atggccagcatgggtctacaggtgatgggaatcgcccttgccgtgctgggatggctggcagtaatgctgtgttgtgctctgcccatgtggcgggtaacagcctttataggcagcaatatcgtgacaagccagactatttgggagggactgtggatgaattgtgtggtgcagagtacgggccagatgcagtgtaaagtgtatgatagtctccttgcactgccccaggacttacaggcggcgcgcgccctcgttatcatctctattatcgttgcagctttaggtgtactgttgtccgtagtgggcggcaagtgtacaaattgcctcgaggacgagagtgcaaaggctaaaaccatgatcgtagctggcgtggtatttttgcttgcagggctgatggttatcgtcccggttagttggaccgcccataatattatccaggacttctacaatccgctggtcgcctccggtcagaaacgggagatgggtgcatccctgtacgtcggatgggctgctagcggactactgttactggggggtgggctgctatgttgcaattgtcctccccgaactgacaaaccctattccgcgaagtattccgccgctaggagcgccgccgctagcaattacgtgtag

SEQ ID NO: 112456 - DNA, 630 bp, synthetic construct
  misc_feature 1..630: note = Description of Artificial Sequence: Synthetic coding sequence
  source 1..630: mol_type = other DNA
atggcaagtatgggactgcaggtaatgggaatcgcactagccgtgctgggatggttggcagtgatgctgtgctgtgcccttccaatgtggagggtcaccgcattcatcggttcgaatatagtgacaagccagaccatttgggagggactctggatgaattgcgttgttcagtctaccggtcaaatgcagtgcaaggtttacgactccctgctcgctctgcctcaggacctgcaggccgcccgggccctcgtgattatctcgattatagtagcagccttgggcgtgttgctcagcgtcgttggtgggaagtgtaccaactgcctcgaggatgagtccgcaaaggccaaaactatgatcgtggcaggggtcgtgtttcttctggcagggctgatggtgatcgtgccggtttcttggactgcccataacataattcaggatttctacaatccacttgtggcctccggccagaagcgtgagatgggagcttcgctgtacgtgggctgggctgcctcaggtctcctcctgctgggcggggggctgctgtgttgcaattgtccccctaggaccgacaagccttattctgccaaatactccgccgcgagatctgctgcggcatcaaattacgtgtag

SEQ ID NO: 112457 - DNA, 630 bp, synthetic construct
  misc_feature 1..630: note = Description of Artificial Sequence: Synthetic coding sequence
  source 1..630: mol_type = other DNA
atggccagtatgggactgcaggtgatgggcatcgccctggctgtgctgggctggctcgcagttatgctctgttgcgcattaccgatgtggagggttacagcttttattggctcaaacattgtgacatcccagaccatatgggaaggactctggatgaactgtgtggttcagtctactgggcagatgcagtgcaaagtttacgactcactcctggccctgccacaagacctgcaagcagcgcgggccttggtgattatctcaattattgtggccgcactcggagtcctgttaagcgtggtggggggaaaatgtaccaattgcctggaagatgagtccgccaaagccaagaccatgatcgttgcaggtgtggtgttccttttagctggcctgatggtgattgttcccgtgtcctggaccgcgcacaatattatccaagacttttataatcccctcgtggcctctggacagaaaagggaaatgggggctagcttatacgtcggctgggcagcctccgggctgctcctgctggggggtgggctcctgtgctgcaactgtccccctaggacagataaaccctatagcgctaagtacagtgcagcacgcagcgcggctgccagtaattacgtctag

SEQ ID NO: 112458 - DNA, 591 bp, synthetic construct
  misc_feature 1..591: note = Description of Artificial Sequence: Synthetic coding sequence
  source 1..591: mol_type = other DNA
atggctagcatgggtctccaggtgatgggcatcgcactggccgtgcttgggtggttggctgttatgctgtgctgcgctcttccaatgtggagggtgacagccttcattggcagtaacattgttacaagccagagcaccggtcagatgcagtgcaaggtgtatgatagtctgctggctttgccgcaggacctgcaggcagcccgcgctcttgtcatcatcagcattattgtggcagcactgggcgtcctccttagcgtcgtgggcggcaagtgcactaactgtttggaggatgagtctgctaaggccaaaaccatgatcgtagctggagttgtgtttcttctggcaggactcatggtgatcgtccccgtcagttggactgcccacaacatcatacaggacttctacaacccacttgtggcgtctggacaaaagcgtgagatgggggcaagcctgtatgtggggtgggccgcgagcggcctgctattactgggaggaggcctgttgtgttgtaattgtccccctcgaacagacaagccgtactcagctaagtacagtgcagccaggtccgcagccgcttcaaattatgtctag

SEQ ID NO: 112459 - DNA, 912 bp, synthetic construct
  misc_feature 1..912: note = Description of Artificial Sequence: Synthetic coding sequence
  source 1..912: mol_type = other DNA
atgactagagctaggattggttgcttcggacccggcggtagggcaagagggacggaaagcgcccctgagcccagtaagagggttcccccaggtcggtcctggcagacgcaagaggtgcgacaaacaaggggagccaatgggctgggaccccgtgccgggtcggccggggctaaggcaccgggacctgcacagggcgctgctcaacacgggctgggcggatcagccgggctgagggtgagggtgtccccgcttgcaatgggatccgccgcccttgagatcctggggctagtgctgtgcctagtgggatggggcggcttgattctggcctgtggtttgccaatgtggcaggttacggcatttctcgatcacaacattgtcaccgctcaaaccacctggaaggggctgtggatgagctgtgtcgtgcagtctacaggtcatatgcagtgcaaagtctacgatagtgtactggctctgtccaccgaggtgcaggctgcccgggctctcacagtgtccgctgtcctgttggcgttcgtcgccttgtttgttacccttgccggggcccagtgtaccacgtgtgtcgccccaggccctgccaaagccagggtggcactgacagggggggtgttgtatctgttctgtgggctcctggctctggtgcccctgtgttggtttgccaatattgtggtaagagagttctatgatccctcagttcccgtttcacagaagtacgaacttggtgctgccctgtacattgggtgggccgcaacagccctgctcatggtgggtggatgtctgctgtgctgtggcgcctgggtttgcacggggcggccagatctgtcctttccagttaagtactccgctccccggagacctactgctacgggcgactacgataaaaagaactatgtgtag

SEQ ID NO: 112460 - DNA, 912 bp, synthetic construct
  misc_feature 1..912: note = Description of Artificial Sequence: Synthetic coding sequence
  source 1..912: mol_type = other DNA
atgactcgggcgcgcatcggttgctttggtcctgggggaagggccagaggtacagaatctgctcctgaaccttcaaaaagggttccccccggcagatcctggcagacccaggaggttagacagacgaggggagcaaacggcctgggtcctagagctggttcagcaggcgccaaagcgcctgggcccgcccagggcgcggcgcagcacggcctgggtggatccgccgggctgcgggtcagggtcagccctttagccatgggcagtgcagccttggagatactggggttggtcctctgcctggtaggctggggaggcctgatactcgcatgtgggctgcctatgtggcaggtcacggctttcctcgatcataatattgtcacagctcagacaacttggaaaggattgtggatgagctgtgtggtacagtcgacaggccatatgcagtgtaaagtgtatgactccgtgttagctctgtccaccgaggtacaagccgcccgcgctttaaccgtgtctgccgtgctactggcgtttgtggccctgtttgttacactggccggggctcagtgtaccacatgtgtcgcccccgggccggccaaagctcgggtggccctgaccggtggggtgctatacctcttctgcggactgctcgccctggtcccactgtgctggttcgccaacatagtggtccgggaattctacgacccttccgttcctgttagtcagaaatacgagctgggcgccgccttatacattggatgggctgccactgccctgctaatggttggtggctgcctgctctgttgtggagcttgggtgtgcacaggaagacccgacttatcgtttccagtcaaatatagcgccccccgtcgcccaacggcaaccggggactatgacaaaaaaaactacgtatag

SEQ ID NO: 112461 - DNA, 912 bp, synthetic construct
  misc_feature 1..912: note = Description of Artificial Sequence: Synthetic coding sequence
  source 1..912: mol_type = other DNA
atgacacgcgcccgtattggctgctttggccccggaggacgggccagggggaccgagtctgcgcctgagccttccaaaagagtccctcccgggagaagctggcagacccaggaggtgcgccagactcgcggcgccaacgggttaggcccacgtgctggcagtgccggcgctaaggcacctggacctgcacagggcgctgcccagcacgggctagggggttctgctgggctcagagtgagagtgtccccattggccatgggaagcgcagcgctggaaatactcggactggttttgtgtttagtcggctggggtggcctgatcctggcttgcggactgccaatgtggcaggtgacggcattcctggaccacaatattgtgacggcccaaaccacctggaaagggctgtggatgtcctgtgtggtgcagtccaccggtcacatgcagtgtaaagtgtacgatagcgtccttgccctgagcacagaagtgcaggccgcccgagcactgacggttagcgctgtgctcctcgcatttgtggcattattcgtcacactggccggggcccagtgtacaacttgcgtcgccccagggccagccaaagctagggtcgccctgactggaggggttctttacctgttctgcgggctactggccctggtaccactttgttggttcgctaatatcgtcgtcagggaattctacgatccttctgttcccgtatcacagaagtacgagctaggagccgccctttacatagggtgggctgctactgctctactgatggttggtggatgccttctttgttgcggcgcttgggtgtgcacaggcagaccggacctgagtttccccgtgaaatactccgctccgaggaggcctactgctaccggcgactacgacaaaaagaattacgtttag

SEQ ID NO: 112462 - DNA, 1086 bp, synthetic construct
  misc_feature 1..1086: note = Description of Artificial Sequence: Synthetic coding sequence
  source 1..1086: mol_type = other DNA
atgggagaggaggccaacgacgataagaaacctactactaagtttgagttggagcgggagacagaactacggtttgaggtggaggctagccagtcagtccagctggagcttctcacagggatggcagaaatattcgggacagaattgacacgaaataaaaagttcacatttgatgccggtgctaaggttgctgtgtttacctggcatggctgctcggtccagctgagcggcagaaccgaggtcgcatacgtgtcaaaggataccccaatgctcctgtatctcaatacacacactgcactggagcagatgcgcagacaggctgaaaaggaggaagaacggggccctagagtcatggtcgttggacctactgacgtcggaaaaagcaccgtgtgcagactgttactgaattatgccataacctccaggctagcagatgtattcaatcagaggtgcgaggtcaaccggagggctagtgtgagtggatgtgtgattaatacatgtggatgggttaaagggtcggggtatcaggccctcgtgcacgcagcttcagccttcgaagtggatgtggttgttgtgctggatcaggagcggctgtacaatgagctgaagcgagatcttcctcacttcgtcaggactgtgctccttcccaaaagcgggggggtggtcgaacggtcaaaagactttagacgcgagtgtcgtgacgagaggattagagagtacttctacgggttccggggatgtttttacccacacgcatttaacgtgaaatttagtgacgtgaagatttacaaagtgggagcacccacaattccagacagctgtctgcccctgggaatgagtcaggaagataatcaactgaagctcgtcccggtgacacctgggcgtgatatggtgcaccacttgctgagtgtaagcactgcagagggaaccgaagaaaatttgtccgaaacttccgtggccggctttattgtcgtgaccagtgttgatctcgaacaccaggtctttacagtgctgagtcccgcccccaggcctctgccgaagaattttcttctgattatggacattcgtttcatggatcttaaatag

SEQ ID NO: 112463 - DNA, 810 bp, synthetic construct
  misc_feature 1..810: note = Description of Artificial Sequence: Synthetic coding sequence
  source 1..810: mol_type = other DNA
atgcaagaaatcattgcctcagtggaccatatcaagttcgacctggagattgccgtcgaacagcagctcggagcccagccactgccttttccaggaatggacaagagtggggccgcagtttgtgaatttttcctcaaggccgcctgtggcaagggaggaatgtgccctttccggcatatcagcggtgaaaaaaccgtggtgtgcaaacattggctgcgtggcctctgtaagaaaggcgaccaatgtgagttcctgcacgagtacgatatgaccaaaatgcctgagtgctacttctactcaaaatttggggaatgctccaacaaggagtgtccttttttgcacatagatcctgagtctaagataaaggactgcccttggtacgacagaggcttttgcaagcatggccccctttgccggcaccgacacacacggcgggtcatctgtgtcaactacctggtgggcttttgtcccgagggtcccagttgtaagtttatgcatccccggttcgagctacccatgggcacaactgaacaacccccattgcctcagcagacacagccaccagccaaacaatccaataatccacctctgcaaagatcctccagcctcatccagcttacgtcacagaatagctcaccgaatcagcaaaggacacctcaggtgataggggtaatgcagagccaaaactccagcgctggcaacagggggcccagacccttggagcaggtgacttgctataaatgcggggagaaagggcattacgccaaccgctgtacaaagggccacctggcttttctgtctggacagtag

SEQ ID NO: 112464 - DNA, 735 bp, synthetic construct
  misc_feature 1..735: note = Description of Artificial Sequence: Synthetic coding sequence
  source 1..735: mol_type = other DNA
atgcaagaaatcatcgcatctgtcgatcacattaagttcgatcttgagatcgctgtggagcaacagctgggcgcgcagcccctaccttttccaggtatggataagtcaggggccgctgtgtgcgagtttttccttaaagctgcttgcggcaagggaggaatgtgtccatttcgccacattagcggggaaaaaacagtggtttgtaagcattggctccgcggtctgtgtaaaaagggcgaccagtgtgagtttctccatgaatacgatatgacaaaaatgcccgagtgctatttctactccaaattcggagagtgttctaataaagaatgtcccttcctgcacatcgatcctgagtctaaaataaaggattgtccctggtacgatcgaggtttttgcaagcatggcccactgtgccggcacaggcacacgcgcagagtgatttgtgtgaactacttggtcggattctgccccgaaggcccatcctgtaaattcatgcacccccggttcgaacttcctatgggtacaaccgagcaaccgcctttaccccaacaaacgcaaccaccagcaaaacaacgtaccccccaggtgatcggcgtaatgcagagccagaactcaagcgccggcaacaggggcccacgacccctggagcaagtgacatgctacaaatgcggagagaaaggacattacgctaatagatgcacaaaaggccacctggcattcttaagtggccagtag

SEQ ID NO: 112465 - DNA, 636 bp, synthetic construct
  misc_feature 1..636: note = Description of Artificial Sequence: Synthetic coding sequence
  source 1..636: mol_type = other DNA
atgcaggaaataatcgcaagcgtagatcatattaagtttgacctggagattgcagtggagcagcagctgggcgcccaacccctgcccttcccgggcatggataaatctggcgccgccgtgtgcgagttctttttgaaagcggcatgcgggaaaggcggtatgtgcccgttcagacacatttcaggggaaaaaacagtcgtgtgtaaacactggctacgcggcttgtgcaagaagggcgatcagtgtgagttcttgcacgaatacgatatgaccaagatgccagagtgctatttttacagtaagtttggacctttgtgccgccatcgacacacaaggcgcgtgatctgcgtcaattatctggtcggcttctgtcctgaaggcccgtcatgtaagtttatgcaccctaggttcgaactaccaatgggaacaactgagcagccaccactgccacagcagacgcagccgccggcgaaacggacacctcaggttataggcgtcatgcagtcccagaactccagtgcggggaaccgaggcccccgtcccctggagcaagtgacctgctacaagtgcggggaaaaaggccactacgcaaacagatgcacaaaaggtcatctcgctttcttgtctggccagtag

SEQ ID NO: 112466 - DNA, 1767 bp, synthetic construct
  misc_feature 1..1767: note = Description of Artificial Sequence: Synthetic coding sequence
  source 1..1767: mol_type = other DNA
atggctgatggcgtcgaccacatcgacatatacgccgatgtgggagaggagtttaaccaggaagcagaatatggtgggcacgatcagatcgatctgtatgatgacgtgatttcaccctccgcaaataacggagacgcacccgaggacagggattatatggataccctgccacccactgtgggagacgatgtcggcaagggtgcagccccaaatgtggtgtacacatatacgggcaagaggatcgccctgtacattggaaaccttacttggtggacaactgatgaagatctcacagaagctgtgcactccctcggagtcaatgacatattggaaatcaaattctttgaaaatcgggccaacggccaatctaagggattcgcccttgttggcgtcgggagtgaggcctcatcaaagaagctcatggatcttctgcccaagcgggagttacacggccaaaaccccgtggtcacaccatgtaacaaacagttccttagtcagtttgagatgcaatcccgcaagaccactcaatcagggcagatgtcgggagaaggcaaggccggtccacccggaggttcctcccgcgccgcatttccccagggcggtcgcggcagaggccgctttccaggagcagtaccaggcggagacaggtttccggggccggctggaccgggcggcccccctccaccattccctggcaacctgattaaacatcttgtgaagggcactcgtcccctgtttcttgagactaggataccatggcacatgggtcactctattgaggagattcctatctttggcctcaaggccgggcagacgccgccaagaccaccactaggacctcccgggcctcctggcccaccaggtcctccaccgccaggacaagtgctgccacctcctttggccggaccgcccaatcggggtgaccggccacctccccccgtgctgttccccgggcagcccttcgggcagcccccactcggacctctgccccccgggccgccgccgccagttcccggctatgggcctccccctggtcccccacctccccaacagggaccaccccctccgccgggtccctttcccccgaggccacctggccctttgggccctccccttacactagctcctcctccacacctcccaggaccccccccgggtgcccctccccctgcgccgcatgtgaaccctgcgttttttccaccacctaccaactctggcatgcctacgagtgatagcagaggcccccccccaacagacccttacgggcggccgccaccttacgacaggggtgactacggcccccctgggcgggaaatggacacagctcggacaccacttagtgaagcagaatttgaggaaattatgaaccgcaatcgagcaatctcatcaagcgctatcagccgggccgtcagtgacgccagcgccggggattatgggtctgctattgaaaccttagtcacggccatttctctcatcaagcagagtaaagtttcagccgacgatagatgtaaagtcctgatcagctccctgcaggattgtctacatggaatcgaatcgaaatcctacggatcgggatctcgccgcgagcggtcgcgcgagagggaccacagccggagcagggaaaaatctcgacgccacaaatcacggtcaagagacaggcatgacgattactacagagaacgctctagagaacgtgagcgacacagagatcgcgatcgcgatcgcgatcgggagcgggacagggagagagagtacagacaccgctag

SEQ ID NO: 112467 - DNA, 1656 bp, synthetic construct
  misc_feature 1..1656: note = Description of Artificial Sequence: Synthetic coding sequence
  source 1..1656: mol_type = other DNA
atggcagacggggtcgaccacatagacatctatgccgatgttggcgaggagttcaaccaggaggcagaatatggcggccacgaccaaattgatctctatgacgacgtgatcagtccatccgcgaataacggcgacgctcctgaggaccgagattatatggacactctgcctccaaccgtgggcgacgatgtcggcaagggagccgcacctaatgtagtgtatacttatacgggcaaacggattgcactttatattggaaacctcacctggtggacgacagatgaggatctaactgaggctgttcacagtctgggagttaacgatatactggaaattaagtttttcgagaaccgggccaacggccagagtaaggggttcgctctcgtgggggtgggaagcgaggcatcctcgaaaaagcttatggacctgcttccgaaacgggaactccatggccagaatcccgtcgtgactccttgtaataagcaatttctaagtcagttcgaaatgcaatctcgcaaaacaacacagtctggacagatgtccggagaaggcaaggctggcccacccgggggtagctcacgtgccgcgttcccgcagggtggaagaggccgaggtaggttcccgggggcggtgcccggtggagatagattccccggacccgccggaccaggcgggccccctcccccgttccctgcaggacaaacgcctccacggccacctctcggtcctccaggcccaccaggccctcccggcccacctcctcctggtcaagtgctccctccccctctcgccggacctcccaaccggggagatcggccccctccacccgtactgtttcccgggcaaccgttcggccagcccccattggggcccctgcctccagggcctccgccacctgtcccaggttacgggcctccgcctggacctcctccacctcagcagggacccccacctccccctggaccatttccccctcgaccaccaggacccctggggcctccactaactctggcaccacctccacatcttcccggccccccccctggggccccaccacccgcccctcatgtgaaccccgccttttttcccccccccactaactcagggatgccaacctccgactctcgcgggccgccaccaaccgacccatatggtcgtcctcctccgtatgaccggggagattacggccccccaggaagagagatggacacagcccgtactcccttaagcgaggcggagtttgaggagatcatgaacagaaatcgggcgattagttcatcggccatctcacgggccgtctcagatgcttctgccggtgattatggatcagctatcgagacactagtgaccgcaatatccctgataaagcagagcaaagtgagcgcagacgaccggtgtaaagttctcatcagttctctccaggactgtctccacggcattgagagcaagagttacggatcaggctctagaagagagcgaagtcgagaacgagatcacagccggtccagagaaaaatctcgtaggcataaatcccgatcacgcgaccgacatgatgactattaccgggagcgatctcgtgaaagagagaggcaccgggatcgagacagagatcgtgacagggagcgcgatcgggaacgcgaataccggcataggtag

SEQ ID NO: 112468 - DNA, 1437 bp, synthetic construct
  misc_feature 1..1437: note = Description of Artificial Sequence: Synthetic coding sequence
  source 1..1437: mol_type = other DNA
atggcagacggtgtggaccatatcgacatctacgcagacgtaggggaggaattcaatcaggaggcagaatatggggggcatgatcagatcgacctgtacgatgacgtgatctcccccagcgccaacaacggcgatgctcccgaggacagagactacatggatacgctacctcctactgtcggcgatgacgttggcaaaggcgctgcacccaacgtcgtctacacctacactggcaagcgcattgccctttacattggtaacctgacttggtggacaactgacgaagatctcacagaagcagtacattctctcggtgtaaacgatattctggaaattaaattctttgagaaccgggctaacggccagtctaagggatttgctctggtgggtgtcggatcagaagctagctcaaagaaactgatggacctactcccaaaaagagagctccatggtcagaatccagtcgttaccccgtgcaataagcagttcctgagccagttcgaaatgcaatccaggaagaccactcagagtgggcagatgtctggtgagggaaaggctgggccgcctggggcaggcccacccaataggggggataggcccccacctcctgtgctctttccaggccagcctttcgggcagccgccgcttggacccctaccacctggcccgcccccccccgtacctggttacgggccacctccaggtccccctcccccccaacaagggcctcctccaccaccaggcccatttccaccacggccccctggtcctctgggccctcccctaacacttgctccacccccccatctgcccgggccacctcccggagctccacccccagcacctcacgtgaaccctgcttttttccccccacctactaactccggtatgcccacgagtgatagtcggggaccaccgccaacagacccctacgggcgaccacccccatatgatcgaggtgactacggcccacccggccgagagatggacacagctcgaaccccactgtctgaagccgaatttgaggagatcatgaaccgaaacagggctatctcttccagtgccatttctcgggccgtgagcgacgcgagtgcgggagattatggctcagccatcgagaccctggtgactgcgatctctttaataaagcagtcaaaggtttcagccgatgacagatgtaaagtgctcatctcctcattgcaagactgcctccatgggattgaatcaaaaagctatggaagcggtagccggagagagaggagcagggaaagggaccacagccgcagccgtgaaaagtccaggcgccataagtcccggtcccgagaccgtcacgatgattattacagggaacgatctcgagagagagagcgccacagagatagagacagggacagggatagagaacgtgacagagaaagggaatacagacacagatag

SEQ ID NO: 112469 - DNA, 1851 bp, synthetic construct
  misc_feature 1..1851: note = Description of Artificial Sequence: Synthetic coding sequence
  source 1..1851: mol_type = other DNA
atgtcgtccctggctgtgcgcgacccagccatggaccgatcgctacgctccgtgttcgtggggaatatcccgtacgaagcaacagaggaacagctcaaggatatcttctccgaagttgggagcgtggtcagtttcagactggtgtacgacagagaaaccggcaagccaaaagggtatggtttttgcgagtatcaggaccaggaaaccgccctcagcgcaatgcggaacctgaacggacgggaatttagcgggagagctctgcgggtggataacgccgccagtgagaaaaacaaggaagaattgaagagcctgggacctgcagctccaattattgacagtccgtacggcgatcctatcgatccggaagatgcccctgaaagcatcactcgagctgttgccagccttccaccagagcagatgttcgagttaatgaaacagatgaagctctgcgtgcaaaactcccaccaggaagcccggaatatgctcttacaaaatccacagctggcgtacgcccttctgcaggcacaggtggttatgagaattatggaccctgaaatcgctctcaagatattgcaccggaaaatccacgttacaccacttatccccggaaagtctcagtcggtcagcgtgtccggaccagggccgggcccaggcccgggactgtgcccgggccctaacgtgctactcaatcagcaaaacccccctgcacctcagccccaacatttggctcgccgcccggtgaaagatattcccccccttatgcagacccccatccaggggggcataccagcccctggccctattcccgctgccgtgcccggagctggtcccgggtctttaacacccggaggagcgatgcagcctcagttgggtatgcctggcgttgggccggtgccacttgaaaggggacaggtgcagatgtcagaccctagggccccaattcctcggggtcctgttactccaggtggcctaccacctagaggactgcttggcgacgcccccaatgaccctcgcggtgggacgctgctgagcgtaaccggagaggtggaacctcgcggatatcttggtcccccgcatcaaggcccacctatgcaccacgcctccgggcatgacactaggggaccaagctcgcatgagatgcgaggcggacccctgggtgacccacggctgcttatcggggaaccccgcggccccatgatcgatcagaggggcttaccaatggatgggagggggggccgagattctcgagctatggagactcgggcgatggagactgaggtgctggaaacgcgggtcatggaaagaaggggaatggaaacgtgcgcaatggagacacgaggaatggaggcccggggcatggatgctcggggtctcgaaatgcggggcccggtcccgagctcccgcggtcccatgacaggtggcattcagggtccgggaccaatcaacattggagccggtggaccacctcaaggtccgagacaggtccccggaatttcgggtgttgggaaccctggcgccgggatgcaggggaccgggattcagggtactggcatgcagggagcggggatccagggagggggtatgcagggggcaggtattcagggggtttcgatccaagggggaggcattcaggggggaggtatacaaggtgccagcaagcagggggggtctcagccaagcagcttcagccctgggcagagccaagttacccctcaggatcaggagaaagcagctctgattatgcaggtgcttcagttaacggccgatcagatagctatgttgccaccagaacagagacagtcaatcctgatcctgaaggagcaaatccagaaatcaactggagccagctag

SEQ ID NO: 112470 - DNA, 2541 bp, synthetic construct
  misc_feature 1..2541: note = Description of Artificial Sequence: Synthetic coding sequence
  source 1..2541: mol_type = other DNA
atgctctttaccgtgagttgcagtaaaatgtcttccatcgtcgacagggatgacagctctatctttgacgggcttgtggaagaggacgacaaagacaaagcaaaacgtgtctccagaaacaaaagtgagaaaaaaaggagagatcaatttaatgtgctcatcaaggaactgggctccatgctgcccggtaacgcccgaaagatggataaatccacggtgttgcagaagagcatcgactttctccgtaagcacaaagagatcacggctcagtccgacgcttctgaaattagacaggattggaaacctacctttctctctaacgaggagtttacccaactgatgctggaagcgctggacggattttttttagctattatgactgatgggtccatcatctacgtcagcgagtctgtaactagtctgctcgagcaccttccatccgatctggttgaccagagtatctttaactttataccagaaggtgaacatagtgaggtctacaagatcctctctactcacctcctcgagtcagattcacttacccccgagtaccttaagtccaaaaaccaactggaattctgttgtcacatgctgagaggcaccattgatccgaaagaaccctcgacatatgaatatgtgaaatttattggcaatttcaaaagcctgaatagcgtgagctcctctgcacataacgggttcgagggcaccattcagaggacacatcgacctagttacgaagatcgtgtttgttttgttgctacagttcgattggctacccctcagttcattaaggaaatgtgcaccgtagaggaaccgaatgaagaatttacaagcagacactccctagagtggaagtttcttttcctggatcatcgggcaccccccattatcgggtacctgccctttgaggtgctgggcacatccggctacgactattaccatgtggacgatctggagaatctcgccaagtgtcatgaacacctgatgcagtatggaaaaggcaagtcatgctattatcgcttcttgacaaaagggcagcagtggatctggctgcagacgcattactatatcacgtaccaccagtggaacagtagaccagagttcattgtgtgtacccacacagtggtctcttatgccgaggtgagggccgagaggcgacgagaactaggcattgaagagtcactgccggagactgccgccgacaagtctcaggactcaggcagcgacaatcgcatcaatactgtctccctgaaggaggccctggagcgttttgatcatagtccaactcccagcgcttcctcccgctcaagcagaaaaagcagccacactgcggtctctgatccatcctccacccccaccaagatccccaccgacacatctaccccaccccggcaacatcttcctgcgcacgagaagatggtgcagcggaggtcgagttttagcagccaatcgattaattcacaatccgtgggctcctccttgacccagcccgtcatgagccaagctaccaatttgcccatacctcaggggatgagtcagtttcagttcagcgctcagttgggagcgatgcagcatcttaaggatcaactggagcagcggacccgtatgattgaggctaacatccataggcagcaggaggagctccgcaagatccaggagcaacttcagatggtccacggccagggcctccagatgttcctccagcagagcaaccctggactgaattttggctccgttcagcttagtagtgggaacagttcgaatattcaacagctggctcccatcaatatgcaaggacaggtggtgcctacaaaccagatccagagcgggatgaacaccggccacatcggtaccacccagcacatgatccagcagcaaacgctccaatcaacatctacccagtctcaacaaaatgtgctgtccggacattctcagcagacttctctgccatcccagacacagagtactctcaccgctcctctgtacaacacgatggtgatctcccaacccgccgccggctctatggtgcagatccccagcagcatgccacagaactctacacagtccgctgccgtcacaacatttacccaagacaggcagatccggttttctcagggacagcagctcgtgactaagctggttaccgccccagtggcatgcggagccgttatggtgccatcaactatgctcatgggtcaagtggttaccgcatacccaacgtttgccacccagcagcagcaatcgcagacactgagcgttactcagcagcagcagcagcagagctcccaggaacagcaactaaccagcgtgcaacagccctctcaggcccaattgacccagccccctcagcaattcctgcaaacttctcgtttgctccacggtaatcccagcacccagttgattttgtccgcagccttcccactccagcaatccacatttcctcaaagtcaccaccagcagcatcagagccagcagcagcagcagttgtcaaggcacagaacagattctctcccagatccctccaaggtgcagccgcagtag

SEQ ID NO: 112471 - DNA, 1278 bp, synthetic construct
  misc_feature 1..1278: note = Description of Artificial Sequence: Synthetic coding sequence
  source 1..1278: mol_type = other DNA
atgggtgaagaagctaacgatgataaaaagcctaccaccaaattcgagctggaacgggagacagaactgcgcttcgaggtggaggcttcccagagcgtgcagctggagctgctgactggcatggcagagatcttcggaacagagctaacaaggaataaaaaattcacatttgacgccggggcaaaggtggcggtgtttacatggcatggctgtagcgtccagctgtctggcaggaccgaggtcgcctacgtgagcaaggataccccaatgctgctgtacttgaatacccacacagccctcgagcagatgcggcgccaagccgagaaggaggaagagcggggaccacgagtgatggtggtggggcccaccgatgtgggcaaaagcacagtgtgccggctgctgctcaactacgctgtgcgactgggaagaaggcctacgtacgtcgagttggatgtaggccagggaagcgtgtcaatccccgggacaatgggcgcgctgtacattgaaaggcccgcggatgtggaggagggcttcagcatccaagcacccctcgtctatcacttcgggagtacaactcctggcacaaatataaagctttacaataagatcacatcccggttggccgacgtctttaatcagcggtgtgaagtcaaccggagagccagcgtgtccggctgtgtcatcaacacttgtggttgggttaaagggagcggctatcaggccctcgttcacgctgcctctgcatttgaggtggacgtcgtcgtggttctggaccaggagcgactttacaatgaactgaaaagggatttgccacatttcgtacgaaccgtgctgcttcctaagtctggcggtgtcgttgagcgctctaaggacttccgcagggaatgccgggatgaacgaatccgggagtatttctatgggttccgggggtgcttctacccacacgcattcaatgtgaaatttagcgatgtgaagatttacaaagttggagcacccacaattcccgattcgtgtctgccactgggaatgagccaggaggacaatcagctgaaactggtaccagtcactcctggcagggatatggtgcaccatctacttagtgtttcaacagctgagggcacggaggaaaatctaagcgagacctccgtcgcaggctttattgtcgtgacctcagttgacctagagcaccaggtgtttacagttctgagcccagctcccagacctttgcctaagaatttcctgctgattatggacatcaggtttatggatctcaagtag

SEQ ID NO: 112472 - DNA, 1311 bp, synthetic construct
  misc_feature 1..1311: note = Description of Artificial Sequence: Synthetic coding sequence
  source 1..1311: mol_type = other DNA
atgaccgatctgcattcctcctatactgaggaaatgggggaggaagccaatgatgacaaaaaacccactacaaagttcgaactcgaaagagaaactgagttgaggtttgaagtggaagccagccagagcgtccagctggagttactcactgggatggctgagattttcggcactgaactgaccagaaataaaaagtttacattcgatgccggcgcgaaagtagcggtgtttacctggcatggatgctctgtacagctgagcggccgcacagaagtagcttacgtttccaaggacaccccaatgctgctgtatttgaatacacacaccgcgctcgagcaaatgagaaggcaggccgagaaagaggaggagcgcggcccaagggttatggtggtggggccaaccgatgtgggaaagtccacagtctgtcggctgctactgaactatgctgttcggctaggccggcgaccaacttatgtcgagttggatgtcggccagggaagcgttagtattcccggtactatgggcgctctatatatcgaacgcccagccgatgtggaggaggggttcagcatccaggcgcccctggtttaccacttcggctccaccacaccgggaaccaacataaagctgtacaacaaaatcacttcccgcttggctgatgtgtttaaccagcgctgtgaagttaacaggagagcgagtgtgagcggatgtgttataaacacctgcggttgggtgaagggatccggctaccaagcactggttcacgcagcctccgcctttgaagtggatgtcgtcgtcgtactggaccaggaacggttgtataacgaactcaaacgggatctgccgcattttgtccgaacagtgctgctccctaaaagcggcggggtggtagagagatcgaaggacttccgtagggagtgtcgagacgagaggatccgggagtacttctatggctttcgggggtgcttttacccacatgctttcaatgtcaaattctctgatgtgaagatctacaaggtgggagctccgaccataccagattcttgtctcccgttggggatgtcgcaagaagataatcagctgaagctcgtgcctgtaactccgggcagagatatggtacaccacctgctgtcagtcagcaccgcagaggggaccgaggaaaacctgtcagagacttctgtggccggatttatagttgtcacttccgtggacctggaacaccaggtgttcacagttctcagtccagccccgcgaccactgcccaaaaattttttgctgatcatggacatccgtttcatggacctgaagtag

SEQ ID NO: 112473 - DNA, 279 bp, synthetic construct
  misc_feature 1..279: note = Description of Artificial Sequence: Synthetic coding sequence
  source 1..279: mol_type = other DNA
atgggggaggaggccaatgatgataaaaagcccacaacaaaatttgaactggagagagagacggagttgcgctttgaagtggaagcgagccagtcggtccagctcgagctgctcaccggaatggctgagatcttcggaacagagctcaccagaaataaaaagtttacctttgacgctggtgcaaaagtggccgtttttacctggcatggttgttcagtgcaactttccgggcgcaccgaggttgcctatgtgtcaaaggatactccgatgctgctgtag

SEQ ID NO: 112474 - DNA, 1278 bp, synthetic construct
  misc_feature 1..1278: note = Description of Artificial Sequence: Synthetic coding sequence
  source 1..1278: mol_type = other DNA
atgggcgaagaggccaatgatgacaagaaacctaccaccaaattcgagctggagagagagaccgaactccggttcgaggtcgaggcatcccagagtgtacagttagaactgctgactggaatggctgagattttcggcacagagttgactagaaataaaaagtttacattcgacgcaggggccaaagtcgctgtgttcacctggcatggttgcagcgtacagctgagtgggcggaccgaggttgcatatgtgtctaaggatacccccatgcttctgtacctgaatactcacacagccctggaacagatgcgtaggcaggccgagaaggaggaggagcgcggtccaagggtcatggtggtgggtcccacggatgtcggcaagagcaccgtatgtaggctgttgcttaactacgcagttcgcctgggccgacggccaacgtacgtggagctagacgtgggccaggggagcgtttctattcccggtacgatgggcgctctctacatagagagacctgccgacgttgaggagggcttctctatccaggcgcccctagtgtatcattttggttccaccacccccggcactaacatcaagctgtataataagattacgtcccgattggctgacgtcttcaatcaacggtgtgaagttaacagaagagccagcgtctcgggctgcgtgatcaacacatgtggatgggtgaagggatctggataccaggctttggtgcatgctgcctcagcctttgaggtagatgtagtggtggtcctagaccaggaacgactctacaatgagctgaagcgtgacttgcctcattttgttagaacggtcctgctgcccaagtcagggggcgtcgtggaacgttccaaggatttccgccgagagtgcagagacgagcgcatcagagagtacttctacggattccgcggatgtttttacccacatgctttcaatgtgaaattctctgacgtgaaaatctacaaggtgggtgcaccgacaattcccgattcttgcctaccactcggaatgagccaggaggataaccagctgaagttggtacccgtcacccccggccgggacatggtccaccacttactctcggtctcaacagcggagggcacagaagagaatctatcagagacctcagtggcgggttttatagtcgtgacatctgtagatctggaacatcaggtgtttaccgtcctaagccccgcgccaagacctctgcccaaaaactttctgctgatcatggatatacgttttatggacctcaagtag

SEQ ID NO: 112475 - DNA, 399 bp, synthetic construct
  misc_feature 1..399: note = Description of Artificial Sequence: Synthetic coding sequence
  source 1..399: mol_type = other DNA
atgggcgaggaggccaacgacgataaaaagcctaccactaagtttgagctcgaaagggagacagagttgagattcgaagtcgaggcaagtcagtccgtacaattggagttgcttacaggaatggccgagatcttcggcacggaactgactagaaacaaaaagtttactttcgatgccggcgcaaaggtggcagtgttcacctggcatggctgctcagtgcagctttcgggcaggactgaggtggcttatgttagcaaagatacacccatgttactgtatttgaatactcatacggccctcgagcagatgaggagacaagccgaaaaggaggaggagaggggtcctagagtgatggtagttggcccaactgatgtcggcaagagcacggtctgcaggtag

SEQ ID NO: 112476 - DNA, 834 bp, synthetic construct
  misc_feature 1..834: note = Description of Artificial Sequence: Synthetic coding sequence
  source 1..834: mol_type = other DNA
atgtggccgggcattctagtaggcggcgcacgggtggcttcttgccgttatcctgccctggggcctcgcctggccgcccatttcccagctcagaggccaccccagagaaccttgcagaacggcctcgccctgcaaagatgcctacatgccacagctacaagggcactgcctctaatccccatagtggtcgaacagaccgggcgtggcgaaagggcctatgacatttatagtcgccttctacgcgagcgaatcgtgtgtgtgatgggcccaatagatgactccgtcgctagtctcgtcatagctcagctgctgtttttgcagagtgagtccaataagaagcctatccacatgtacatcaattccccgggaggcgtggttacagcagggttagcgatttatgatactatgcagtatatccttaatcccatctgtacctggtgcgtggggcaagcagcgtccatgggcagcctgctccttgccgctggcacacctgggatgcgccatagtctgcccaacagcagaatcatgattcatcagccgtcaggcggcgctagaggacaggcgaccgatatcgccatccaagccgaagagattatgaaactaaagaaacaactctataatatttatgcgaagcataccaagcagagccttcaggtgatagaatctgccatggaacgagacagatatatgagccctatggaggcccaggagtttggaatcctcgataaagtcttggtgcacccaccccaggacggtgaggacgaaccaactctagtccaaaaagaaccagtagaggcggctccggctgccgagcctgtccccgcaagtacgtag

SEQ ID NO: 112477 - DNA, 1617 bp, synthetic construct
  misc_feature 1..1617: note = Description of Artificial Sequence: Synthetic coding sequence
  source 1..1617: mol_type = other DNA
atgtggtcggggagatcatcttttacatccctggtcgtgggtgtattcgtagtctatgtggtacacacgtgttgggtgatgtatggaatagtctatactagaccttgctctggggatgctaactgtattcagccataccttgcccgtcgccccaagctgcagctctctgtgtacactaccacaagaagtcatctgggagcagaaaataatattgatttggtactgaacgtggaggatttcgacgtggagtctaagtttgagaggaccgtcaacgttagtgttccaaagaagacacgaaataatggcacactctacgcatacatcttcctgcaccatgccggagtgctgccttggcatgatgggaagcaggtgcaccttgtgtccccattaactacctatatggttccgaaacctgaggagattaacctcttaaccggagagagtgatacccagcagattgaggctgagaagaaacccacttccgctttggacgagccagtgagccactggcggccaaggcttgcattaaatgtgatggccgacaactttgttttcgacggtagctcactgccggccgacgtccacagatatatgaaaatgatacagctgggaaaaacggtccattatcttcccatcttatttatagaccaactgagtaatcgggtaaaggatctgatggtgatcaacaggtctacaacggaactgccattgaccgtatcctatgacaaggtgtctttggggcgtctcagattttggatccatatgcaggatgctgtctattccctgcagcaatttgggttctccgaaaaagatgcagatgaggttaagggaatctttgtagatactaatctctacttccttgcactaactttcttcgtggccgctttccatctcctcttcgacttcctggcattcaagaacgacatcagcttctggaagaagaagaaaagcatgattggaatgtctactaaggcagtgctgtggcgttgctttagcacggtagttattttccttttcctcctagatgagcaaacgtcactcctggttttggttcccgctggcgttggcgctgctatagagctgtggaaggtcaagaaagccttgaagatgacaattttctggcgggggttgatgcccgagttccagttcggaacatattccgaatcagaacggaagacagaggagtatgatactcaagcaatgaagtatttgtcctatcttctgtatcccctctgtgtgggcggcgccgtctacagtctcctgaacatcaagtataagagctggtactcatggttgatcaactctttcgttaatggggtgtacgccttcggttttttattcatgctgccccagctgtttgtgaattataaattgaagagcgttgctcacttgccatggaaagccttcacctacaaggcatttaacacttttatcgatgacgtatttgcatttattattaccatgcccacctcacatcgactcgcctgttttcgggatgacgtggtcttcctcgtttacctctatcaaaggtggttgtatccagtggataagcggcgggtaaacgagtttggagaaagctatgaggaaaaggctacccgggcccctcacactgactag

SEQ ID NO: 112478 - DNA, 1509 bp, synthetic construct
  misc_feature 1..1509: note = Description of Artificial Sequence: Synthetic coding sequence
  source 1..1509: mol_type = other DNA
atgtggagcggcagatcaagtttcacatcactggttgtgggagttttcgtcgtttacgtggtacatacgtgctgggttatgtacggaatcgtctatacccgcccatgttcaggcgatgctaactgcattcagccatacctggcaaggcggcccaagcttcagctaagtgtttacaccacaacccgctcacacttaggtgctgaaaataatatcgacctcgtccttaacgtagaggactttgacgtcgagagcaagttcgaaaggactgtaaacgtatcagtcccaaaaaagacacgaaataatggaaccctgtacgcctacatcttccttcatcacgccggcgttctcccctggcatgatggtaaacaagtccatcttgtaagtcccctcacgacgtatatggttcccaagcctgaggaaatcaatctactgacaggagagagtgatacccagcagatcgaggctgaaaaaaagccaacctccgcactggatgagcccgtgtcacattggaggcccagactggccctgaacgtcatggcagacaactttgttttcgatggtagcagcctccccgcggatgttcatcgatacatgaaaatgatccaattggggaagacagtgcattatctgccgatacttttcatagatcagctttccaatcgggttaaagatctcatggttattaatcgcagcacaacagaactgccactcaccgtcagttacgataaggttagcctgggccgcctgcggttttggatccacatgcaagacgctgtctactccctgcaacagtttggcttcagcgaaaaggatgccgacgaagttaagggcatctttgtagatacaaacttatatttcctcgcactaacattttttgtggcggcctttcacctgttatttgatttcttagcattcaagaacgatatttctttctggaagaagaagaagtctatgatcggtatgtctaccaaactctggaaagttaagaaggccctgaaaatgaccatcttctggcgaggactgatgccggagtttcagtttggcacctacagcgaatctgaacgcaaaactgaggagtacgacacccaagccatgaagtacctctcatatcttctctaccctttatgcgtgggcggagccgtgtattctcttctcaatatcaagtacaaaagctggtactcttggctaattaacagcttcgtgaatggggtgtacgcctttgggttcttgttcatgctgccccagcttttcgttaactataagctcaaaagtgttgctcatctaccttggaaagcgtttacctataaggcttttaatacctttatcgatgacgtgtttgcctttatcatcacaatgcccactagccacaggctcgcttgctttagggatgacgttgtcttcctcgtgtatctttaccagcgctggctttaccctgtggataaaagaagagtgaatgagtttggcgaaagctacgaagaaaaggctacaagagccccccatacggactag

SEQ ID NO: 112479 - DNA, 1350 bp, synthetic construct
  misc_feature 1..1350: note = Description of Artificial Sequence: Synthetic coding sequence
  source 1..1350: mol_type = other DNA
atgatgaaaactctgctattgtttgtcggcctcctgttaacatgggagtcaggtcaggtgttgggggatcaaaccgtctctgacaatgagcttcaggagatgtcgaatcagggcagcaaatacgttaataaggaaatccagaatgcagtaaacggggtgaaacagatcaagactctgatagagaagaccaacgaggaaagaaaaacgttgctgtcgaacctggaggaggctaagaaaaagaaggaggatgccttgaacgaaaccagggaaagtgaaacaaaacttaaggaactgcccggggtctgtaacgagaccatgatggccctctgggaagagtgcaaaccctgcctgaaacaaacttgtatgaagttctatgccagggtgtgtagatctggatctggactggtgggccgacagttggaggaatttcttaaccagagctcacctttttatttttggatgaacggggatcggattgattcactgttggagaatgaccggcagcagacacatatgctggacgtaatgcaggatcacttctcgagggccagctctattatagacgagctcttccaggaccgctttttcacacgagaaccccaggacacctaccactacctgcccttcagcctgccccatcgtaggccacattttttcttccctaaaagccggatcgtgcgctctctgatgcccttctccccctatgaaccactgaacttccacgctatgttccagccttttctggaaatgatccacgaggcacagcaggccatggatattcactttcactcccctgccttccagcatccacccaccgagtttattagagagggtgacgacgataggacagtctgcagagagatccgacataattcaacagggtgtctcagaatgaaagatcaatgcgataaatgccgggaaatactgtccgtagactgctccacaaataaccctagccaggccaaattgagacgcgaattagatgagtccctgcaagttgccgagaggcttacaaggaaatataacgaactgctaaagagctatcagtggaaaatgctcaatacgtcaagcctcctggagcagctcaatgaacagttcaactgggtcagtcgtctagccaacctgacccaaggggaagaccagtattatttaagagtgacaactgtcgcttcacacaccagtgactctgacgtcccctctggcgttacagaagtggtggtgaaattatttgactccgaccctatcacggtgaccgtgccggtggaagtgtcacgcaagaatcctaaatttatggaaacagtcgccgaaaaggccctacaagaataccggaagaaacacagagaagaatag

SEQ ID NO: 112480 - DNA, 825 bp, synthetic construct
  misc_feature 1..825: note = Description of Artificial Sequence: Synthetic coding sequence
  source 1..825: mol_type = other DNA
atgcaggatcacttctctcgcgcatcgtctatcattgatgagctcttccaggatcggttcttcactcgtgaaccacaagatacataccactatttgccgtttagtctccctcataggaggccccactttttcttcccaaaaagcagaatcgtccgttcactcatgccctttagcccttacgaaccactgaatttccacgcaatgttccagccctttttagagatgatccatgaggctcagcaggccatggacatccactttcatagtccagctttccaacatcctcccaccgagttcatccgggagggagacgacgacagaactgtctgcagggaaatccggcacaacagcactgggtgcttgcggatgaaggaccagtgtgataaatgccgagagatcctctcagttgattgcagtaccaataacccttctcaggccaaactgcggcgtgaactcgatgaaagcttgcaagtcgctgaaagactgacacggaaatataacgagttacttaaaagctatcagtggaagatgctcaatacgtcctcactattggaacaactcaacgaacagtttaactgggtgtctagacttgcaaacctgacacagggtgaggatcagtactacctgcgggtgacaacagtggcatctcacaccagtgattccgacgtgccatccggggtaactgaagttgtcgtgaagctttttgatagtgatcctattaccgtgaccgtccctgtggaggtgtctcggaagaacccgaagtttatggaaactgttgcagaaaaagccctccaggagtaccgcaagaagcacagagaggaatag

SEQ ID NO: 112481 - DNA, 1350 bp, synthetic construct
  misc_feature 1..1350: note = Description of Artificial Sequence: Synthetic coding sequence
  source 1..1350: mol_type = other DNA
atgatgaagacactgcttctcttcgtgggacttctccttacctgggagagcgggcaggttttgggtgaccagacagtgtctgataacgaactgcaagaaatgtctaaccaaggttccaagtacgtgaataaagaaattcaaaatgctgtgaatggggttaagcagattaaaaccctgatagaaaagaccaatgaggaacggaagacgcttttgagcaacctcgaggaagccaagaagaagaaagaggacgcattgaacgaaaccagagaaagcgaaaccaagctcaaagagctgcccggggtgtgcaatgaaactatgatggcgctttgggaggaatgtaaaccctgcctcaaacagacgtgcatgaagttctacgcaagagtgtgtcggagcggtagcgggctagtcggccggcagctcgaagagttcctgaaccagtcctcccccttctacttctggatgaacggggatagaattgattccctgttagaaaatgatcgccagcagacccacatgctggatgtcatgcaagatcattttagtcgcgcttcttccatcattgacgaactcttccaggatcggttctttacaagggaacctcaggatacataccattacctgccattcagtctgccccatcgaaggcctcatttcttcttcccgaagtctagaatagttcgaagtctgatgccattctccccttatgaaccgctgaacttccatgctatgttccagccattcctggagatgattcatgaagctcagcaggctatggacatccattttcactctcccgctttccagcacccccccaccgagtttataagggagggcgatgacgataggacagtgtgtagggagattaggcataattccacaggctgtcttcgcatgaaagaccagtgcgataagtgcagagagatcctctctgttgactgttctactaacaaccccagtcaagcaaaattgcgaagagaactggatgaaagcctgcaggtagcagagaggcttaccaggaagtataacgaactcttgaagagctatcaatggaaaatgcttaacacctctagcctcctggagcaattgaacgagcagtttaactgggtgagtcgactggcaaacctcacacagggagaagatcagtactacctgcgtgtcaccaccgtggcctcacacacatctgattctgacgtgccatctggtgttacagaggtggtggtgaaactcttcgattccgatcctatcaccgttaccgtgccagtggaggtatctagaaaaaatcccaagtttatggaaacagttgcagagaaggccctgcaggaatacaggaagaaacatcgagaagagtag

SEQ ID NO: 112482 - DNA, 615 bp, synthetic construct
  misc_feature 1..615: note = Description of Artificial Sequence: Synthetic coding sequence
  source 1..615: mol_type = other DNA
atgatgaagacgctgctcttattcgtcggtttactgctgacatgggagtctgggcaggttctgggagaccaaacagtatccgataacgagcttcaggaaatgtctaatcagggtagcaagtatgtcaacaaagaaattcagaacgccgtgaatggcgtcaaacaaatcaagaccctcatagaaaagacaaacgaggaacggaagaccctgctttctaacctggaagaggccaaaaaaaagaaggaagacgctttgaacgagacaagggagtctgaaacgaaactgaaagagctccccggtgtctgtaatgagaccatgatggccttatgggaggaatgtaagccgtgcctcaaacagacatgtatgaagttttatgcacgcgtctgcagatcaggctccggcctggtcggtagacagctggaggaatttctcaaccagagctcaccgttttacttttggatgaatggggatcgcattgattctttgcttgagaatgacaggcaacaaacacacatgctggatgtgatgcaggaccattttagtagagcttcgagtataattgacgaactattccaagatcgatttttcacaagggaaccccaggatacttattag

SEQ ID NO: 112483 - DNA, 1350 bp, synthetic construct
  misc_feature 1..1350: note = Description of Artificial Sequence: Synthetic coding sequence
  source 1..1350: mol_type = other DNA
atgatgaagactctgctgttattcgtggggttactgctgacatgggagtcggggcaggtgcttggagaccaaactgtgagtgataacgaactccaggagatgtcgaatcagggaagtaaatatgttaataaggaaatccagaatgcagtgaatggtgtcaaacagataaagacccttatagaaaagaccaatgaagaacgcaagaccctgctgtccaacttggaggaagcgaagaagaaaaaagaagatgcactcaatgaaactcgcgaaagcgagaccaaactgaaagagctgcctggggtttgtaacgagaccatgatggccttgtgggaagagtgcaaaccctgcctgaagcagacttgcatgaagttttacgcgcgggtctgcagatcgggaagtgggctcgtcggacggcagttagaagagttcctcaaccagtcatcaccattttacttttggatgaatggagatagaatagactccttactggaaaatgataggcagcaaacacatatgctcgacgtaatgcaggaccacttttctcgggctagtagcattatcgatgagctctttcaggatcgcttcttcacgagggagccacaagacacgtaccattatcttccattcagtttgccacatcggcgccctcactttttcttccctaaatccaggatcgtgagatcactgatgccgttctccccatacgagccactcaattttcacgcgatgtttcagccgtttctcgagatgatccacgaggcacaacaggcgatggacatccattttcattctcctgccttccagcaccctcccaccgagttcatccgtgaaggcgatgatgatcggactgtatgcagggagattcggcacaactcaactgggtgtctccgtatgaaagaccagtgcgacaagtgccgggagatcttgagcgtagactgctcaaccaataatccaagtcaggccaaactccgtcgagaactcgacgagtccctgcaagtagcggagcgcctgacgcgcaaatacaacgagctacttaaatcttaccagtggaaaatgctcaacacatcatctctgttggagcagcttaatgaacagttcaactgggtctcgcgactggccaacttgactcagggggaagatcagtattacctgagggtaacaacggtggccagccatacatcagactccgatgtgccatctggagtgaccgaggtagtggttaagttgtttgacagcgatccgattaccgtgaccgtaccagtggaagtctcgcgtaaaaaccctaagttcatggagacagtggccgagaaagccctgcaggaatatcgcaaaaaacacagagaggagtag

SEQ ID NO: 112484 - DNA, 816 bp, synthetic construct
  misc_feature 1..816: note = Description of Artificial Sequence: Synthetic coding sequence
  source 1..816: mol_type = other DNA
atgatgaaaacgctgcttttgtttgttggactgttactgacctgggaatcaggccaagttctgggtgatcaaacagttagcgataatgagctgcaggaaatgtccaatcagggctctaaatatgtgaacaaggagattcagaacgccgtaaacggtgtcaaacagataaaaactttaatcgaaaaaacaaatgaagagcggaaaaccctattgtcaaacctggaggaggctaaaaagaagaaggaggatgccctgaatgaaaccagggagtccgaaacgaagttgaaggaactgcctggggtttgcaacgaaacgatgatggctctgtgggaggagtgtaaaccatgcctcaagcagacatgtatgaaattttacgcgcgtgtttgcagaagtgggtcgggccttgtcgggaggcagttggaagagtttctgaatcagtcttcaccattctatttttggatgaacggcgacaggatagattccctcttggaaaatgacaggcagcagacgcatatgctggacgtgatgcaggatcattttagtagggcctccagtatcattgatgagttattccaagatagcttgatgcccttctcgccgtatgagcccctgaatttccacgcaatgttccagcctttcctcgaaatgatacatgaagctcaacaggccatggatatccacttccactcccctgcctttcaacatccgcccacagaattcatacgggaaggagacgatgacagaaccgtgtgcagggagattaggcacaacagcaccggctgcttgaggatgaaggaccagtgcgataagtgctag

SEQ ID NO: 112485 - DNA, 1383 bp, synthetic construct
  misc_feature 1..1383: note = Description of Artificial Sequence: Synthetic coding sequence
  source 1..1383: mol_type = other DNA
atggaggcctgtaaggatagcaggataggggggatgatgaaaacactgctcttattcgtcggtctgcttctgacctgggagagtggacaggtgcttggtgatcaaaccgtgagcgacaatgaactgcaggagatgtccaaccaggggtcgaagtatgtgaacaaggaaatccagaatgctgttaatggcgtcaagcagatcaagacgctgatcgaaaagacaaatgaggagcgtaaaacccttctttctaatctggaagaggccaagaaaaaaaaagaagacgctctgaacgagacccgggagagcgagactaagctcaaagaattgcctggggtgtgtaatgaaacgatgatggcactgtgggaggagtgcaaaccttgcttaaagcaaacttgtatgaagttttacgcgcgggtctgtagatcggggagcgggctcgttggtcggcaattggaggagttcttgaatcaatcctcccccttctacttctggatgaatggagacaggatcgatagccttctggagaacgacagacaacagacccatatgttagacgtcatgcaggaccattttagcagagccagcagcatcattgatgaactctttcaggacagattctttactagggagcctcaagatacatatcactacttgcctttttcccttccgcatcgcaggccccactttttctttccaaagagccggattgtcagaagcttgatgcctttctcaccatacgaaccactgaatttccatgccatgttccaaccgttcttggagatgattcacgaagctcagcaggctatggatatccactttcattcccccgcatttcagcatcctcctacagagttcatacgtgagggtgacgacgatcggacagtctgccgcgagatccggcacaactccaccggttgtctgcggatgaaggaccagtgtgacaaatgtagagaaatcctctcagttgattgttccactaataacccctcacaggcgaaactgaggagggagctcgacgaatcacttcaggtggctgagcgcctgactagaaagtacaacgaattactaaagagctatcagtggaagatgctcaatactagttccttgctggaacagctgaacgagcagtttaattgggttagtcgcctggctaatcttactcaaggagaggatcagtactaccttcgtgtcaccaccgtcgcatcacacacctcagactctgacgtacccagtggtgttacagaggtggtagtgaaactgttcgattccgaccccatcacagtcactgtccctgtcgaagtctccaggaagaatcctaagttcatggagaccgtcgcagagaaagccttgcaggaatatcgcaagaagcaccgagaggaatag

SEQ ID NO: 112486 - DNA, 1506 bp, synthetic construct
  misc_feature 1..1506: note = Description of Artificial Sequence: Synthetic coding sequence
  source 1..1506: mol_type = other DNA
atgcaggtctgttcacagcctcagagaggctgcgtacgtgagcagtcggcaatcaatacagcacctcccagcgctcacaacgccgcaagccctgggggcgcccggggccacagggttccactgactgaagcatgtaaggattctagaatcggcggcatgatgaagacgctgttgctctttgtgggactcctgctgacttgggagtccggccaagtcctgggggatcaaacagtgtccgataacgagctgcaggagatgtccaaccaggggagcaagtatgttaacaaggaaatccagaacgccgtgaacggggtcaaacagatcaaaaccctcatcgaaaagactaatgaagagaggaaaacactgctgagtaaccttgaggaggccaaaaaaaagaaggaggacgccttaaacgaaacacgggaatccgagactaagctcaaagaactgccgggcgtatgtaacgagacaatgatggccctgtgggaggagtgcaagccctgtctcaagcagacttgcatgaagttctatgcacgggtgtgccgcagcggttcagggctcgttggccgccagctcgaggagttcctgaatcaatccagccccttctacttttggatgaatggggacagaatcgattcattacttgagaatgaccgacagcaaacacacatgctagacgtgatgcaggatcattttagccgggctagtagcatcattgatgagctgtttcaggatagattctttactagagagccccaggacacgtatcactacctgccattcagcctgccacaccgccggccccactttttcttcccaaagtcacgaattgtgaggagcctcatgcccttcagcccgtacgagcctctcaatttccacgccatgttccagccatttctggagatgatccacgaggcgcaacaggcaatggatattcactttcattctcccgcctttcagcatccgcctactgagtttattagagaaggagatgatgaccgcacggtctgtcgggagattcgccacaatagcaccggatgtctgcgcatgaaggatcaatgtgataaatgcagagagatcttaagcgtggattgtagcactaataatccttcccaggcaaagctaaggcgggagcttgacgagtcactgcaagtggctgagcgtttgacacggaagtataatgagctgctgaaatcctatcaatggaaaatgcttaacaccagcagtttgctcgaacagctgaacgaacagtttaactgggtctccagattggccaaccttacccaaggggaggaccagtattatctgcgggtgactacagtagcttcccacacctcagacagcgatgtcccctctggcgtgaccgaggtggtggtcaaactatttgatagcgaccctattacagtgacagtaccagtggaagtctccagaaagaatccaaaattcatggagacagtcgccgaaaaagccctgcaggagtatcggaagaagcacagggaggagtag

SEQ ID NO: 112487 - DNA, 894 bp, synthetic construct
  misc_feature 1..894: note = Description of Artificial Sequence: Synthetic coding sequence
  source 1..894: mol_type = other DNA
atggaagcatgcaaggactctcgaatcggcggaatgatgaaaaccctgctgcttttcgtgggactgctcttgacctgggaatctgggcaggtgttgggcgatcagaccgtgagcgataacgaacttcaggaaatgtcgaaccaggggagtaaatacgtgaacaaagagattcagaacgccgtaaacggggtgaaacagattaaaacattaatcgagaagaccaacgaagagcgaaaaaccttgctcagcaaccttgaggaggctaaaaagaaaaaagaggacgctctaaatgaaacacgggagtccgaaactaagttgaaagaactgccaggggtttgtaatgaaacaatgatggccctgtgggaggaatgtaaaccctgcctgaaacaaacgtgtatgaaattttatgctcgcgtgtgccggtccggcagcgggctggtggggcgccaactcgaagagttcctgaatcagtcctcacccttttatttttggatgaatggcgatagaatcgacagtttactagaaaatgataggcagcaaactcacatgctcgacgtcatgcaggaccacttctcccgggcgagttccatcatcgatgaactgttccaggaccggttctttaccagagaaccgcaggatacttatcactatctgccatttagtttgccacaccggcgcccccactttttcttccctaagagtcgcatcgtccggtccttgatgcctttttctccatacgagccccttaatttccatgcaatgtttcaaccattcttggaaatgatccatgaagcgcagcaagccatggatatacatttccattctccagcatttcagcatccgccaacggagtttatccgagagggagacgatgaccgcacagtgtgtcgatag

SEQ ID NO: 112488 - DNA, 2040 bp, synthetic construct
  misc_feature 1..2040: note = Description of Artificial Sequence: Synthetic coding sequence
  source 1..2040: mol_type = other DNA
ctcggacaattcgagcaaccgactggatatatggaaaatagcgtgtcatattcggctatcgaggacgtgcagctgctgtcctgggagaacgcccctaaatattgtctgcaactgactataccgggaggtaccgtcctgcttcaggcagcaaatagctacctgcgcgaccaatggttccacagtctgcaatggaaaaagaaaatttataagtacaagaaggtcctgagtaacccaagtcgctgggaagtagtcctgaaggagattagaaccctggtggacatggccctgacgtccccactccaggatgatagcattaaccaagctcccctggaaatagttagtaaactgctgagtgaaaataccaatctaactacacaagaacatgagaatatcatcgttgccatcgctcccttactggagaacaatcacccgcccccggacctttgtgaatttttctgcaaacactgtagggaacgccctcgctcgatggttgtgatcgaggttttcacgcctgtggtccagagaatcctaaaacacaatatggacttcggcaagtgccccagattacgactcttcacacaggaatatatactcgctctgaacgaattgaatgcagggatggaagtcgttaagaagttcatacagagcatgcacggtccaaccgggcattgtcctcacccgcgcgttttacctaatcttgtggccgtgtgcttagctgctatatacagttgctacgaagagttcatcaatagcagagacaactctccttccttgaaggagatcagaaatgggtgccagcagccgtgcgatcggaaacccaccctgccacttcgactgctgcacccgtcccctgacctggtgagtcaagaagccaccctgtcagaagcccgtctgaagtccgtggtcgtagcatcctcagagattcacgtcgaagttgagaggacttccacagccaaaccagctttaaccgctagtgctggaaatgattccgaacccaacctgatcgactgcctcatggtcagtcccgcttgttctaccatgtccatcgagctcggtcctcaggccgatcgcaccctcggttgctatgtggagatactgaagctgctttctgattatgatgactggcggccgtctcttgcctcactccttcaacctattcccttccctaaagaagccttggctcatgagaaattcacaaaggaactcaagtacgtgatccaacgcttcgcggaggatccacgacaagaagtgcactcctgtctgttgagtgtacgtgcggggaaagatggatggttccagttatacagccctggcggggtcgcatgcgacgatgacggtgagctatttgcttctatggtccatattctaatgggttcgtgttacaaaacgaagaagtttctactaagcctcgccgaaaacaagttgggcccatgcatgcttctggctttgagaggaaaccagacaatggtagagattttgtgtcttatgcttgagtataacatcatcgataataacgacacacagctgcagatcattagcactctcgagtctacagatgtgggcaagcggatgtatgaacaactgtgcgatagacagagagagctgaaggagctccagcgaaagggcggccctacgcggttgactctgcctagcaaaagcacagatgctgacctcgccaggctcctgagttcagggagttttggtaacctagagaacctgtcgctcgcgtttacgaatgtcacttcggcttgcgcagagcacctgatcaaactcccctcactgaagcagttaaacctgtggtcaacgcagttcggagacgcgggactgaggttgctgagtgagcaccttaccatgctgcaagttctcaatctgtgcgagactcctgtcaccgatgccggcctcctcgccctgagcagcatgaaatcactgtgctccctgaacatgaacagcaccaaattgtctgccgatacatacgaagacctcaaggcaaaacttcccaacttgaaggaggtggatgtccgctataccgaggcttggtag

SEQ ID NO: 112489 - DNA, 2322 bp, synthetic construct
  misc_feature 1..2322: note = Description of Artificial Sequence: Synthetic coding sequence
  source 1..2322: mol_type = other DNA
atggacgtgactagctcctccggtggtggcggcgacccgagacaaatcgaggaaactaaaccgttgctgggaggcgatgtttctgcccctgaagggacaaagatgggggctgtgccatgtagaagggccctgctgctttgcaatggtatgagatacaaactgctgcaggagggtgatatacaggtctgcgttatccggcacccccgcacttttttgagcaagatcttaactagtaaatttctaaggcgctgggaacctcaccatttgactctggctgataactctctggcctctgccaccccgacaggctatatggagaacagcgtctcttacagtgctatcgaagatgttcagctcctgagctgggaaaatgctcctaaatattgcctgcagttaactattccaggggggacggtgcttctccaagctgctaactcttacctgagggatcagtggttccactctctgcaatggaagaaaaagatctacaagtataaaaaggttttgagcaaccccagtcgatgggaggtggttctaaaggaaattcgaactctcgtcgatatggcgctcaccagccccttgcaggatgattccatcaatcaggcgccgctcgaaatcgtctcgaagctgctgtctgaaaataccaatctaactacccaagaacacgaaaacatcatcgtggctatagctccactcctggagaataaccatcctcctccagacctgtgcgagttcttctgcaaacactgcagagagagacccaggagcatggtggtcatcgaggtctttacgcccgttgtgcaacggattcttaagcataacatggactttggcaaatgtcctcggctgaggctcttcacccaggaatatattcttgcgctgaacgagctaaatgctgggatggaggtagtcaaaaaatttatacagagcatgcacggccccactggacactgtcctcacccccgcgtcttgcccaacctggtcgcagtgtgcctggcagctatctattcttgctatgaagagtttatcaacagccgggacaatagtccctctttgaaggaaatacgcaatggttgccagcagccttgcgatcgcaagcccacactcccactccggctgcttcatcccagcccggaccttgtctcgcaggaggccacactgtccgaagctaggctcaagtccgttgttgtggcaagttctgaaatccatgtggaggttgagcgaacaagtacagctaaaccagcactgacagcaagcgcagggaatgattccgagcctaacttgattgactgtttaatggtaagcccagcctgcagtaccatgtcaatagagctgggaccgcaggctgaccggactctcggatgttatgtcgagattctcaaacttttgagcgactacgatgattggcgaccctctcttgcttcactgctccagcccattccttttccaaaggaggcactagcacacgaaaaattcacaaaagaactgaaatacgtgatccagaggttcgcagaggacccgaggcaagaggtgcattcctgcctgctttctgtgcgcgcgggcaaggacgggtggttccagctgtacagccccgggggcgttgcttgcgacgacgacggtgaactgttcgcgagcatggtgcacatacttatgggaagttgctataaaactaagaagttcctgctgtccttggcagagaacaagctgggcccatgcatgttactggcccttagaggcaatcaaacaatggttgaaattctttgcctcatgctggaatataacatcatagacaacaacgacacacagttgcaaataatatctaccctcgagtccaccgacgtcggcaagaggatgtatgaacaactctgtgaccgccagcgcgaactgaaggagttgcaaaggaaggggggccccaccaggctcaccttgcccagcaagagtacggacgccgaccttgcccgactgttgagctctggcagcttcggtaacctggagaacctctcgctggccttcaccaatgtgacttcagcttgcgcagagcaccttattaagcttccctcgctgaaacaacttaacctctggtcgacacaattcggggatgccggacttagattgctttctgaacacctcacaatgttgcaggtgttgaatctttgtgagacaccagtgactgatgcagggttactagccctgtctagcatgaagtccttatgctcgctcaatatgaattccacaaaactttccgctgatacctatgaagacctcaaagcaaagcttccgaatctgaaggaggtggacgtgcgctatacagaagcgtggtag

SEQ ID NO: 112490 - DNA, 2040 bp, synthetic construct
  misc_feature 1..2040: note = Description of Artificial Sequence: Synthetic coding sequence
  source 1..2040: mol_type = other DNA
atgggtcaggccgctgaaccgactgggtacatggagaatagtgtgtcgtattccgctatcgaagacgttcagcttctcagctgggaaaatgcccccaaatattgccttcagctgactatccctggtggcacggtgctgctgcaagcggccaactcttatttgagggaccagtggttccacagcttgcagtggaaaaagaaaatatataagtataagaaggttctgagcaaccccagcaggtgggaggttgtcctgaaagaaatacgcactctcgtcgatatggccctgacaagtcctctgcaggacgactccatcaaccaagcacccctggagatcgtgtccaagcttctgtcagagaacactaatttgaccacccaagaacacgagaacatcatcgtcgcaatagctcctttgctggaaaataaccaccctccacctgatctctgtgagttcttttgcaagcactgccgcgaacgcccgcgctctatggtcgtgatcgaggtgttcacccccgtcgtccagagaatactgaagcataacatggattttggaaagtgcccaagattacggttgtttacccaggagtacattttagcgctcaatgaactgaacgcaggtatggaagtcgttaagaaattcattcagtcaatgcacgggccaaccggccactgcccccaccccagggttctccccaatctggtggcggtgtgcctggcagccatctactcgtgctatgaggagtttattaattccagagacaacagcccctcgctcaaggagatacgaaatgggtgccagcagccatgcgacagaaagcccactctaccccttagactgctacaccccagtccagaccttgtgtcacaggaggccactcttagtgaggctcggctgaaatctgtggttgtcgcatcgtccgagatacatgtggaggtggagcgcacgagcacagcaaagccagccctgaccgcatcagccgggaacgatagcgagccaaatcttatcgactgcttgatggtgagcccggcttgttccaccatgtcaatcgagctagggccccaggccgaccgcaccctgggttgctacgttgaaattttgaaattgctgtccgactatgacgattggcgcccgtccttggcctctctcttgcagcccatccctttcccaaaggaggccctggcgcacgagaagttcaccaaagagctcaagtacgttatccagcggtttgccgaagacccacgtcaagaagtgcattcttgccttctctccgtgcgcgcaggcaaagatgggtggttccaactctatagcccaggcggggtcgcttgtgacgatgacggggaacttttcgccagcatggtccacattctgatgggctcatgttataaaaccaagaagttcctgctctcactggccgaaaacaagctcggtccttgtatgctgttagccctccgaggaaatcagacaatggtggagattctttgcttgatgctagaatacaacatcatcgacaataatgatactcaactccagataattagcactctcgagtcaactgacgtcggcaagaggatgtacgagcagctgtgcgaccggcagcgggaactcaaggagctccagagaaagggaggaccgacccgcctcacgctgccttcgaaatcaactgatgccgatctcgctcgactcctgtcaagcgggtccttcgggaacctcgaaaacctgtctctggcctttacgaacgtgacttcagcatgtgccgagcatcttattaagctcccctctttgaaacagctcaacctttggagcacccaattcggggatgctgggctaaggctcttgagcgagcatcttactatgctgcaggtgctgaacctgtgcgagacacccgtaaccgacgccggtcttctggcgctgagttctatgaagtctttgtgctccctgaatatgaatagcactaaactgtccgctgacacttacgaagatctcaaggcaaaactgccaaatctcaaagaggtcgatgttagatacaccgaagcctggtag

SEQ ID NO: 112491 - DNA, 1761 bp, synthetic construct
  misc_feature 1..1761: note = Description of Artificial Sequence: Synthetic coding sequence
  source 1..1761: mol_type = other DNA
atggcactgacatcccccttacaggacgacagtattaatcaggctccactagagattgtgagcaaactcctatccgagaacacaaacttgaccacccaggaacacgaaaacattatagtggccattgctcccctcctggagaataaccacccacccccagacctatgtgagtttttctgcaagcactgtcgggaaagaccacgttcaatggttgttatcgaggtttttactcccgttgtccaacgcatactgaagcacaatatggactttggcaaatgtccacgtctcaggctcttcacccaggaatacattctggcactgaacgaactgaacgcggggatggaggtggtgaagaagtttatccagagcatgcatggccctaccggccattgcccacatcctagggtattacctaacttagtagctgtgtgcttggcggccatatatagctgttatgaggaatttataaactcccgtgacaatagtccatccttaaaggagatccggaatggatgtcagcagccttgtgatcggaaacccactctgccgctccgcctgctccatcctagccctgacctggttagtcaagaggccaccttgtctgaggctagacttaaatccgtggttgtggcctcttctgaaattcacgtcgaagtggaacgcacctcaactgcaaaaccagcattgactgccagcgcgggaaacgactctgaacccaacttgattgactgtctcatggtgtcccccgcttgctcaactatgtctatagagctgggcccacaggccgatagaactttaggctgttacgtcgagatactgaagctgctgtctgactacgacgactggagaccgtcactggccagccttctgcagccaattccctttccaaaggaggcattggctcatgagaagtttaccaaagaactaaagtatgtgattcagcgcttcgcagaggatcccaggcaggaggtccacagttgcctgctaagcgttagggcaggcaaagatgggtggttccagctctactctccgggtggggttgcttgtgacgacgatggcgagctgttcgcaagtatggtgcacatactgatggggtcctgctacaaaacaaaaaagttcctgcttagcctcgcagaaaacaaacttggtccctgcatgttgctggcgctgaggggcaatcagaccatggttgagatcctgtgtttaatgctggagtacaacataatcgataacaacgacacccaactgcagatcattagtactttagaaagcactgatgttggcaagagaatgtatgagcaactttgcgataggcagagggagctcaaagaattacagcgcaaaggagggccaacccggctgactctgcccagcaaaagcacagatgccgatcttgcccgcctgctgtcctccgggagtttcggtaacctggaaaatctgtccttggcgttcactaacgtgaccagtgcctgtgccgagcatctgatcaaactaccatccttgaaacaattgaatctgtggtccactcaatttggtgatgccggactccggttactttctgagcatctgaccatgctgcaggtgcttaatctttgcgagaccccagtaaccgatgctgggctcctcgccctgtcaagtatgaaatccttatgttcactgaacatgaatagcacaaagctcagcgccgacacttatgaggacctaaaggctaaattgcctaatctgaaagaagtggacgtcaggtataccgaagcctggtag

SEQ ID NO: 112492 - DNA, 312 bp, synthetic construct
  misc_feature 1..312: note = Description of Artificial Sequence: Synthetic coding sequence
  source 1..312: mol_type = other DNA
atggcccattacaaggcagctgactccaagcgtgaacagtttcgccgttatctggagaagagtggcgtgcttgatacattaacaaaggttctggtcgccctatatgaagagcctgaaaagccgaactccgccctggatttcctcaagcatcatttaggggccgccacccccgaaaaccctgagattgagctcttacgcctggagctcgccgaaatgaaggagaagtacgaggcaattgtggaagagaacaagaagttgaaagctaagctagcacagtacgaaccaccgcaggaggaaaagagggctgagtag

SEQ ID NO: 112493 - DNA, 1695 bp, synthetic construct
  misc_feature 1..1695: note = Description of Artificial Sequence: Synthetic coding sequence
  source 1..1695: mol_type = other DNA
atggccgtgttccggagcgggttgcttgtgctcaccacgccattggcgagcctggcaccccggcttgcgagcattctgacaagtgccgctcggcttgtaaatcacacgctgtacgtgcacctgcaaccgggcatgagcttggagggacctgctcaaccccagtccagccccgtgcaggccacatttgaagtattagacttcatcacacatttgtatgcaggcgccgacgtacatagacacttggacgtgcgcatacttctcacgaatattcggaccaagagtaccttcctcccccctctccctacttcagttcagaatctcgcacacccccccgaggtggtattgaccgactttcaaaccctggatggctcccagtataatcccgtcaaacagcagctggtgcgctatgcgaccagctgttactcttgctgcccaaggctggcctctgtgctcttgtacagcgactacggtattggcgaggtccccgttgagccgcttgacgtgccactcccatctaccattaggcctgcaagcccagtggcagggtcccccaagcagccagtccgcggatactaccgaggcgccgttggaggcacctttgacaggttgcacaacgctcacaaagttttgctctcagtcgcttgcatccttgcgcaagagcagcttgtcgtaggcgtggctgacaaggatttacttaaatctaagctgctccctgaactccttcagccatacaccgagcgggtcgagcacctgtcagaatttctggtagacatcaagcctagcctgacttttgatgtgatcccacttctagacccatacgggcccgctggctcagatccctcccttgaattccttgtagtctcagaagagacttacaggggcggtatggctattaataggtttagactggaaaatgacctagaggaactcgcgctgtaccaaatacaactactgaaagatctgcggcacactgagaatgaagaggacaaggttagttcttcctcattccgccagaggatgctcggcaatctgctcagacctccatacgaacggccggaacttccaacttgtctctatgtgattggacttactggcattagtggctccggcaaaagctcaatcgcacaaaggctgaaggggctgggggccttcgtaatcgattccgaccatttgggacatagggcatatgcccctgggggacctgcctaccaaccagtcgtggaggcctttggcaccgacatcctgcacaaagatggtatcattaaccggaaggtattaggtagtcgtgttttcggaaacaaaaaacagctgaagatcctgacagacattatgtggccgattatagccaaactggcccgtgaagagatggaccgcgccgtggctgaaggaaaaagggtttgcgttatagatgccgctgtgctgcttgaagctggatggcagaatcttgtgcacgaagtttggaccgctgtgatccccgaaacggaggccgtgcgacgcatcgtggagcgcgatggcctgtctgaggccgctgcccagagcagattgcagtcccagatgtccggtcagcagctagtagaacaatcccacgttgtcctgtcaaccctgtgggagcctcatatcactcagcgacaggtagaaaaagcttgggccctgctgcagaagcgcatccccaaaacacatcaggcactggactag

SEQ ID NO: 112494 - DNA, 1695 bp, synthetic construct
  misc_feature 1..1695: note = Description of Artificial Sequence: Synthetic coding sequence
  source 1..1695: mol_type = other DNA
atggcagtctttaggtccggcctcctcgtgctcactacgccccttgcgtccttggcccctcgactcgccagcatattgacatctgcagcgaggcttgttaatcatactctctacgtgcacctacagcctggaatgtcgctggaaggccccgcacaaccacagtcaagtcccgtccaggcgacattcgaagtcctagattttattacccacctctacgccggagccgatgtccacagacatctggacgtgcggatcttactcactaacataaggaccaaaagcacgttcctgccccccctccctacaagtgtacagaacctggcccacccgcccgaagtggtactgactgacttccaaacactcgatggctctcagtacaaccctgtgaagcagcagctggttcgctatgccacttcgtgctacagttgctgtccgagactggcctctgtgttgctctactcagactatggtatcggtgaggtcccagtagaacctctggacgtgcccctcccctcaacaatccggcccgcctctccagtggccgggtcacctaagcaaccagtacggggctattatcgaggggcggtcggcgggaccttcgatagactgcacaacgcccacaaagtgcttctgtctgtggcgtgtattctcgctcaggaacaactagtggtgggtgtggcagataaggacctgctgaagtcgaagcttctgcccgagctgttacagccatatactgagagggtagaacatctatcagagtttctggtcgacatcaaaccatctctgacttttgatgttattcctctgttggacccctacggtccagcgggttcagatccgtctctggaatttctggtagtgtccgaggagacctacaggggaggcatggccatcaaccggttcagattggagaatgacctggaagagctcgccctgtatcagattcagctgctcaaggatctcagacatactgagaacgaggaggacaaagttagcagcagcagcttcaggcaacgaatgctaggaaacctattgcgcccaccttacgaacgtcctgagctgcccacctgtctgtatgtgattggcctgaccggaatctcaggcagcggaaaatcttccattgcacagaggctgaaagggctcggcgcctttgtgatcgacagtgatcatctcggacatagagcctatgcacccggtgggcctgcctatcagcctgttgttgaagccttcggaacagatattctgcacaaagacggtatcatcaaccgcaaggtgctgggcagcagagtgttcggaaacaagaaacagttgaaaatcctgacagacatcatgtggcccataattgctaaactggccagagaggaaatggatcgggctgtggctgagggcaagcgggtgtgtgttatcgacgcggccgttttgttagaagcaggctggcagaacttggtgcatgaagtgtggaccgcagtgatccctgagacagaggccgtgcgccggattgtggaacgcgacgggttaagcgaggcagccgctcagtccagacttcagtcccagatgagcggtcagcagctggtcgagcagtcgcacgtggtgctgtctactttgtgggaaccgcatataacacagcgtcaggtggagaaagcctgggctcttctacagaaaagaattccaaaaacccatcaggcgcttgactag

SEQ ID NO: 112495 - DNA, 1782 bp, synthetic construct
  misc_feature 1..1782: note = Description of Artificial Sequence: Synthetic coding sequence
  source 1..1782: mol_type = other DNA
atgcgcacgccccggcttagagcacagcctcggggcgcagtctaccaggccccctcgcccccgcctgccccagtgggactcgggtctatggcggtattccgttctggacttttagtcttgaccacccccttagcctctctggcaccacgcctggcgtcaattctcacaagcgctgctaggctggtcaaccatacactgtatgtgcatcttcagccaggtatgtcattagagggcccagcccagcctcaatcttccccagttcaggccacatttgaggtcttggattttatcacccacctgtatgcaggagccgatgtgcatagacatctggatgtacgaattctgctgactaacatcagaacaaaatcaactttcctcccgccactgcctaccagtgtccagaatctggcccacccacctgaggtcgtgctgactgactttcagactttggatggctcccagtataacccagtgaaacagcagctggtgagatatgcaacatcttgctacagctgctgcccgagactggcttccgtcttgctttactccgattacggcattggagaagtcccagtggagcccttggatgtgcctctgccatctaccattcgacccgcgagtccagtcgcaggatcgcctaagcaaccggtaaggggctactatagaggggccgtcggcggaaccttcgatcggctccacaacgcccacaaggtccttctgtccgtcgcttgtatcctcgctcaagagcagctggtcgtgggggtagccgacaaggatctgttaaagagcaagctcctgccagaactgctgcaaccctacacagagagggtggaacatttgtcagaattcctggtcgatataaagccctcattgacctttgatgtcattcctctactggacccctatgggcccgctggctctgacccctcactcgaatttttagtcgtgtccgaagagacatatcggggcggcatggcgatcaacaggtttcgcttggaaaatgacctggaagagctcgccctgtatcaaatacagctgttgaaggacctgaggcacacagaaaatgaagaggacaaggtatccagctccagctttagacagaggatgctgggaaatctgttgagaccaccatacgagcggccggaactgcccacttgcttgtacgtgatcggactcacagggatcagcgggtccgggaagagtagcatcgctcagaggcttaaaggcctcggagcctttgtgatcgattcagaccacctcggccatagagcgtatgccccgggcggaccagcctatcagccagtggtagaggcctttggcaccgacattctgcacaaggatggtatcatcaataggaaagtgctgggaagtagagtcttcggtaataaaaagcaattaaagatcttaacagatattatgtggcctatcattgccaagttggccagagaggagatggatagggctgtcgccgagggtaaaagggtctgcgtaatcgatgctgctgttctcctggaggccggctggcaaaacctggtccatgaggtctggacagctgtcatccccgagaccgaagctgttaggaggatcgtggaacgcgacgggttgagtgaggccgccgcccagagtaggcttcagagtcagatgtccgggcagcagttggtcgagcagtcacacgtggtgctcagtactctgtgggagccacacatcacacagagacaggtggagaaggcatgggccctcctgcagaagcgaattcccaagacacatcaggcgttggactag

SEQ ID NO: 112496 - DNA, 528 bp, synthetic construct
  misc_feature 1..528: note = Description of Artificial Sequence: Synthetic coding sequence
  source 1..528: mol_type = other DNA
atggccgtgttccgctccgggctgttggtactcacaactcccctcgcatccctagcaccccggctggctagcattctaacctcagccgcgcgacttgttaaccatacactgtacgtgcacctgcagccgggaatgtctctggaaggtccagcgcaaccccagtcctctcccgtacaggcgacgttcgaggtcctggactttatcacccatctgtcgccaagtcccgcccatctctcccccgagtcgaggcctccagcccgtagtagggtagaccggttccccgacccaggatggaagcctgtgcagcctggacaaaccgcagcatctgctctgcggcaccaactcctgcaactgctttcagctactggactcggggccgctattctcagactgtgggatcgcagatcggcaagaggcgctcctggctgccccctgactctgcatgatcaggcaagcttcccccgggggcgagtaagtaaagctgcaggagcatggctcctcccctggagatgccgatggcatgtctag

SEQ ID NO: 112497 - DNA, 810 bp, synthetic construct
  misc_feature 1..810: note = Description of Artificial Sequence: Synthetic coding sequence
  source 1..810: mol_type = other DNA
atggcaattaaccgctttcgtctcgagaacgatttggaagagctggcattgtatcagattcagttactcaaagacctgcggcacaccgagaacgaggaggataaggtcagctcttccagctttcggcaacggatgcttgggaatctgctgcgacctccctacgaacggccagaactgcctacctgtctgtatgtgatcgggctcaccgggatcagcggcagcggaaagagttccatagctcagcgcctcaaaggcctcggtgctttcgtcatcgactccgatcaccttgggcacagggcctacgcccctggagggcctgcgtatcagccggtggttgaagctttcgggacggatatcctgcacaaggatggtataattaatcgtaaggtgctgggcagtagagtattcggcaataagaaacaattaaagatcttgaccgacatcatgtggccaatcatcgctaagttggcacgcgaagagatggaccgtgctgtagccgaaggtaagcgcgtttgtgtcatagacgctgccgtgttactcgaagccggatggcagaacctggtgcacgaggtgtggacggcggtgatccccgagaccgaggcagtgcgcagaattgttgaacgtgatgggttgagcgaagcggccgcacaaagtagattacagagccaaatgtccggccagcaactcgtggagcagtcccacgtcgtgctgtctacgctgtgggagcctcatatcacgcagaggcaggtggaaaaggcttgggctttgctgcaaaagcgaatcccaaaaacccaccaggcccttgattag

SEQ ID NO: 112498 - DNA, 1782 bp, synthetic construct
  misc_feature 1..1782: note = Description of Artificial Sequence: Synthetic coding sequence
  source 1..1782: mol_type = other DNA
atgcggacccctcgcttgcgcgcacaaccacggggcgcagtgtatcaagcaccatcacctcctcccgccccagtgggactgggcagtatggccgtcttccgctccggcttgcttgtgctgaccaccccacttgccagcctggcccctcgcctggcgagcatcctgacgagcgcggccagactggtcaatcatacactctatgtgcacttgcagcccggcatgagcctggagggacccgcacaaccacagtcctctcccgttcaggctaccttcgaagtgctggattttataactcatctgtatgcgggagcggatgtccataggcatctagacgtgcgtatcctactgacaaatatccgcactaagtcaactttcctaccacccctgcctacctcagtgcagaacctcgctcatccgcccgaagttgtgctgaccgactttcagaccctagacggctcccagtacaaccctgttaaacagcagctggtgaggtacgcaacaagctgctatagttgttgtcctaggctcgcgtcggtgctgctctactcagattacggcattggagaggtgcctgtggaaccgctggacgtcccactcccctcaaccatccgcccggctagccccgtggcaggctctccaaaacagcctgtccgcggatattaccggggcgccgtcggggggaccttcgataggctgcataatgcccacaaagtgcttctcagcgttgcatgtatattagcccaggaacaactcgtcgtcggggtggccgataaggacctccttaaatccaagttgcttccggagctgctccaaccctacacagagagggttgaacatctctccgagtttctcgtggacattaaaccgagcttgacttttgatgtcataccgctcctggatccttacggaccggctggatccgatccaagcctcgagtttcttgtggtgtccgaagagacctacagggggggaatggctataaatcggttccgattggaaaacgacctggaggagcttgcattataccagattcagcttcttaaggacctcagacacacagagaacgaggaagacaaagtgtccagctcctcatttcgacagcggatgctgggaaacctgttgcgtccgccgtacgaacgtccagagctaccaacttgcctctacgtcatagggctcaccgggatcagcggatccgggaagagttctattgcccagagactgaagggtcttggcgcatttgtgatcgactctgaccatctcggacaccgtgcgtatgccccggggggccctgcatatcagcctgtggtcgaggcttttggaacagatatcttgcacaaggacgggataataaatagaaaggtgctcggctccagagtgttcggtaacaagaaacagctcaaaattctgacagatattatgtggcccatcattgccaaactggcccgcgaagagatggaccgcgcggtggcagaggggaagcgagtgtgtgttattgacgccgcagtgctcctagaggccggttggcagaacctggtccacgaggtgtggactgccgtgattccagaaactgaagccgtccgccgcatcgtggagagagatggtctgagcgaagctgccgcgcaaagccggctgcagtcccaaatgagtggacagcagctggtggaacaatcacatgtcgttttatccacgctgtgggagccccacataacacaacgtcaggtcgagaaggcatgggccctgcttcaaaaaagaatacccaaaacgcatcaggctctggactag

SEQ ID NO: 112499 - DNA, 429 bp, synthetic construct
  misc_feature 1..429: note = Description of Artificial Sequence: Synthetic coding sequence
  source 1..429: mol_type = other DNA
atggctactaagattgacaaggaagcatgtcgagccgcgtacaatctggtaagggacgacggaagcgccgttatctgggtcaccttcaaatacgacggctcaactattgtccctggggagcagggcgctgagtaccaacactttatccagcagtgcacggatgacgtgcggctgttcgcttttgtgaggttcacgacaggggacgccatgtccaaacgttctaagttcgctttgatcacgtggattggtgagaatgtatctggactccagcgagccaaaaccggcacagataagactttagtcaaggaggtagtgcaaaactttgccaaggaatttgtgatctccgacaggaaggagttggaggaggatttcatcaaatctgagctgaagaaggctggcggggccaactacgatgcgcagaccgagtag

SEQ ID NO: 112500 - DNA, 1731 bp, synthetic construct
  misc_feature 1..1731: note = Description of Artificial Sequence: Synthetic coding sequence
  source 1..1731: mol_type = other DNA
atgaggggccctaactccggcacagaaaaaggccggctagtgatacctgagaaacagggattcgacttcctctgcatgcccgtgtttcaccctagattcaagcgtgaattcatccaggagccggccaagaatcggcctggaccgcaaacgcggtcagatcttctgctctctgggcgcgccttcctgctgcctctgaatcaggaagacaataccaacctcgcgcgagtgcttactaatcacatccatactggtcaccattcctccatgttttggatgagagtcccattagtggcccccgaagacttgcgagacgacatcatagagaatgctccaaccacccacactgaggaatattccggcgaggaaaagacctggatgtggtggcacaacttcagaaccctgtgcgattatagcaaacgcattgcagtagcactggaaatcggcgcggatctaccatccaatcacgtaatcgaccggtggctgggggagcccatcaaggctgccatcttaccgacatcaatattcctcaccaataaaaaaggcttccctgtgttgagtaaaatgcaccagcgactgatctttcgcctgctcaaactggaggttcaattcattataacaggcactaatcatcactccgaaaaggagttctgcagctatttgcagtatctggagtacctctcccagaacagacctccacccaacgcctatgagctgttcgccaaaggctatgaagactatctacagtccccacttcagcctctaatggacaatctcgaaagccagacttatgaagtttttgaaaaagatcccattaagtattctcagtaccagcaggcaatttacaagtgtctcctggatagggtcccggaggaggagaaggacacgaacgttcaggtcctaatggtgctcggagctggacggggtccgctcgtcaacgcctctttgcgggcagccaaacaggcagacagacggatcaaactctacgccgtggagaaaaatcctaacgctgttgtgacgttggaaaactggcagtttgaagaatgggggagtcaggttacagtcgtcagcagcgatatgcgggagtgggtggcgccggaaaaggccgacattattgtctcagagttactggggagcttcgccgataacgaactgagccctgagtgtcttgatggcgcccaacatttcctcaaggacgatggcgtgagcattccaggagaatatacttcgtttttagcccccatatcgtcctccaagctctacaacgaagtgagggcgtgtagagaaaaggaccgggaccccgaggcccaatttgagatgccctacgtggtcaggttacataacttccatcaactatctgccccacagccttgcttcactttttctcacccaaacagagatcccatgatagacaacaacagatactgcactctagaatttcccgtcgaggttaatactgtcctccatggcttcgccggctattttgagactgttctgtatcaggacatcacgttgagcataaggccggagacacactcccctggtatgttctcttggttccccatcctattccccattaagcagcctattacagtccgcgaaggacagactatttgcgtgaggttctggcggtgtagcaattcaaagaaggtgtggtatgagtgggcggtgacagcgccagtctgctctgcgattcataacccaactggcaggtcatataccatcggcctgtag

SEQ ID NO: 112501 - DNA, 1206 bp, synthetic construct
  misc_feature 1..1206: note = Description of Artificial Sequence: Synthetic coding sequence
  source 1..1206: mol_type = other DNA
atgctgggcatcggtacagagggacctcacgtcgggcttgtgcaggcctccgagcacccaaagatcgaattttacttgaaaaatttcaccagtgcgaaggacgtgctgtttgccattaaggaagtcggattccggggtggcaattcaaataccgatatcaccctagagaagtacctcttcgtgatgctgaaacgttctgagaaccaacagacttatctcatgaacgccgacgtagccgagcggatgagctcgaccacagttgattctgaggagcgtctgctacggggtaaggccctcaagcacaccgcccagaagttctttacagtggatgccggcgtacgaaagggaatacctaaagtggtggtggtgttcatcgatggatggccatcggacgatatcgaggaagcaggcattgtggctcgagaattcggcgtgaatgtgttcattgtgtccgtggcaaaacctatccccgaggagttgggcatggtgcaggacgtgacatttgtggataaagccgtgtgtaggaacaacggcttcttctcgtaccatatgccaaattggtttggaactactaaatatgttaaacctttggtacaaaaactgtgtacacatgaacagatgatgtgtagtaagacctgctacaattctgtaaatatcgcctttttgatcgacggcagtagttctgtgggagactccaacttcagactgatgctagagttcgtaagtaatattgcaaagacctttgagatctctgatattggggctaagattgctgcagtgcagtttacatatgaccagaggacggaatttagtttcacagattattccactaaggagaacgtactcgccgtgataaggaacatccgctacatgagcggggggacggctacaggggatgcgatatcttttaccgtgaggaacgttttcggtcctatcagggagtccccaaataaaaacttcttggtgatagtcactgacggacagtcatatgatgacgtccagggacccgctgcagctgctcatgacgccggcatcacgatctttagcgtgggagtggcatgggcgccactcgatgatctgaaggatatggccagcaagcccaaggaatcccacgcatttttcaccagagagtttaccggactggagcccatcgtgtctgacgtgattcgaggcatttgccgggactttttggagtcccagcagtag

SEQ ID NO: 112502 - DNA, 1653 bp, synthetic construct
  misc_feature 1..1653: note = Description of Artificial Sequence: Synthetic coding sequence
  source 1..1653: mol_type = other DNA
atgagtgccgcatggattcccgcacttggtctgggagtctgtctgctgctgcttccaggcccagcggggtccgagggcgccgcccccatcgccataacctgtttcacaagaggcctggatatcaggaaggagaaagctgacgtcctctgtccaggggggtgtcctctagaggaattctcagtctatgggaacatcgtgtatgcctccgtgtctagtatttgtggtgcagcggtccatcggggcgtgatctccaattctggtgggcctgtcagagtttacagtcttcccggcagagagaactacagtagcgtggatgcaaatggcatccaatcgcagatgctctcacgttggtccgcttcttttacggtgacgaagggaaagtcgtcgacacaagaggccactggtcaggctgtgagcacagcccacccacccacaggcaagaggctgaaaaaaacgcctgaaaagaagacagggaataaggattgtaaagctgatattgctttcctgattgatgggtccttcaatatcggccagcggagattcaatctgcagaaaaacttcgtcggcaaagtggcccttatgctgggcataggaacagaaggtccgcatgtgggtctcgtgcaggcatctgaacacccgaaaatcgagttctacttaaaaaactttactagtgcgaaagatgtcctgttcgctatcaaagaggtgggattccgcggtggaaactcaaacactgggaaagccctaaagcacactgcccaaaagttcttcaccgtggatgccggcgtgcgcaaaggaattccaaaagtggtggtcgtatttatcgatggctggccctctgacgatatagaagaagcgggcatcgtggcgcgggaatttggggttaatgttttcatagtctctgtagcaaagcccattcctgaggagctcgggatggtccaagatgtgacctttgtggacaaagctgtttgtcgtaataatggtttcttcagttaccatatgcctaattggttcggcaccaccaaatacgtgaagcccctcgtgcagaagctttgtacccacgagcagatgatgtgtagcaagacttgctataacagtgttaatatagccttcctcattgacggctcctcgagtgtgggggactctaactttcgactgatgctcgagttcgtgtccaacatagccaagacatttgaaatcagcgatataggagccaaaatcgcagccgtgcagtttacctatgaccagagaacagaattttcttttaccgactactccacgaaggaaaacgtgcttgccgtaatacgcaacatccggtacatgagtggaggcactgcaaccggcgacgctattagctttacggtcaggaatgtgttcggacctattcgggagtctccgaataaaaactttcttgtgatagtgactgacggtcaaagctatgatgatgtccagggcccagctgccgcagcccacgatgctggaataaccattttttccgtcggcgtggcctgggcccccttggatgatttgaaagacatggcatctaaaccaaaggagagccatgcattctttacaagggaattcacagggctggaaccgatagtatctgacgtgattcgcgggatatgccgcgacttcctcgaaagccagcagtag

SEQ ID NO: 112503 - DNA, 732 bp, synthetic construct
  misc_feature 1..732: note = Description of Artificial Sequence: Synthetic coding sequence
  source 1..732: mol_type = other DNA
atgctgtctcgttggtcagcatctttcacagttaccaagggcaagagctctacacaggaggccacgggccaggcggtttcaaccgcgcacccacctacagggaaaagactgaagaaaacaccggagaaaaagactgggaacaaggattgtaaggccgacatcgccttcctgatcgatggttcctttaacatcggccaaagaaggttcaatctgcagaaaaacttcgtgggtaaagtcgccctgatgctcggaatcggaactgaagggccccacgtcggtctggttcaggcatctgaacacccaaaaatcgagttttacctgaaaaactttacatcagccaaggatgtactgttcgcaattaaggaggtcggttttcgggggggtaatagtaatactggcaaggcccttaagcacaccgcccagaaatttttcaccgtcgatgccggcgtcaggaaggggattcctaaagtggttgtagtgtttattgacgggtggccgagtgacgacatagaggaagcaggtattgtcgcgagggagtttggtgtcaacgtgttcatcgtctcagtagccaaacctatccctgaagaactcgggatggttcaagatgtcacctttgtggacaaagcggtttgcagaaacaatggattttttagctaccatatgccaaactggtttggcaccacgaagtacgtctcactgtggtaccgctcctgtgctctgatgaacaagtag

SEQ ID NO: 112504 - DNA, 1278 bp, synthetic construct
  misc_feature 1..1278: note = Description of Artificial Sequence: Synthetic coding sequence
  source 1..1278: mol_type = other DNA
atgggtcccaggagactcctcctggtcgcagcttgttttagtctgtgcgggccgttactgagtgcccgaacacgtgcccgtaggcctgagagtaaggccaccaatgccacgcttgatcccaggagctttcttttgagaaatcctaatgacaaatatgagcccttctgggaggatgaagaaaaaaatgagtcgggcctgactgaatacagactagtaagcattaataaatcctcacccttgcagaaacagcttccagcattcatttccgaggatgcttcgggatacctgacaagttcttggttgaccctgttcgtcccaagcgtgtacacaggcgttttcgttgttagtctccccctgaacattatggcgatcgtggtgtttatacttaagatgaaggtgaagaaacccgccgtcgtctacatgttgcatttggccacagccgatgtgctctttgtcagtgtgcttccctttaagatcagttattatttttccgggtctgactggcagtttggcagtgagctctgccgcttcgtcactgcagcattttactgtaacatgtatgcctcgatactgctgatgaccgttatatccattgatcggttccttgcagtggtttaccccatgcagagtctgtcctggcgcactctcggacgcgccagctttacatgcctcgctatctgggcactggctattgcaggagtggtcccattgttgctaaaggagcagaccatccaggtgcccggcctaaacatcacaacgtgtcacgatgtgctgaatgagactctgcttgagggttactatgcttattatttttctgcctttagcgctgtttttttttttgtcccccttatcattagcaccgtgtgttacgtctctatcatccggtgtctttcctcttccgcagtcgcgaacaggtctaaaaaatccagagccctgtttctcagcgccgctgtgttttgcatctttatcatttgttttggtcccactaacgtcttactaattgcgcattattccttcctgagccacacctccaccaccgaggcggcttatttcgcttatctcctatgcgtttgtgtctcttcaatatcttgctgcatagatccgctgatctactactatgccagttcggagtgccagcggtacgtgtattctatcttatgctgcaaagagagttcagatccttcttcttacaattctagcggacaacttatggcatctaaaatggatacatgctcctctaacctgaacaatagcatctataaaaagctgctgacatag

SEQ ID NO: 112505 - DNA, 1194 bp, synthetic construct
  misc_feature 1..1194: note = Description of Artificial Sequence: Synthetic coding sequence
  source 1..1194: mol_type = other DNA
atgaggtctccatcagccgcttggcttttgggcgccgccatattgctggccgccagcttatcttgttccggtaccatccagggtacatcccgctcctccaagggcagatcgctcatcggaaaggtggacggcacatcgcatgtgacaggtaagggggtgaccgttgaaactgtgttctccgttgatgagtttagtgcaagcgtcttaacagggaaactcaccactgtgtttctacccatcgtctacaccatcgtctttgtggtcgggctgccgtcaaacggcatggccctctgggttttcctatttagaacaaagaaaaaacatccagcggtgatctacatggccaaccttgctttggcagacctcctctctgtgatttggttccccctgaaaatcgcttaccatatacacggtaacaactggatttatggcgaggccctctgcaacgtactaatcggctttttctacggtaacatgtattgctccattcttttcatgacttgcttatctgtccagagatactgggtgattgtaaatccaatggggcactcccggaaaaaagcaaacatcgctatcgggattagccttgcgatctggctgctgattctgttagtcactatcccactgtacgtggtcaagcaaactatctttattccagccctgaatataactacatgtcacgatgtcctacccgagcagcttttggtgggggacatgttcaactacttcttatctctcgctatcggggtgttcctatttccggcgttcttgacggcctctgcctacgttctgatgataagaatgctacgctctagtgctatggacgagaactctgaaaagaagagaaaaagggccatcaagttgatcgtcactgtgctcgcaatgtacctcatctgttttactccgtccaaccttctcttggtggtgcattactttttgatcaagtctcagggacagagccacgtgtatgcgctgtatatcgtagctctctgtttgagtaccctgaatagctgtatcgacccatttgtctactacttcgtgtcacatgacttccgcgaccatgcaaaaaacgccctgctctgccggtccgtgcgtaccgttaagcagatgcaggttagccttacatctaagaagcacagccgtaagagctcatcctatagctcatccagcactacggtaaagacatcatactag

SEQ ID NO: 112506 - DNA, 1125 bp, synthetic construct
  misc_feature 1..1125: note = Description of Artificial Sequence: Synthetic coding sequence
  source 1..1125: mol_type = other DNA
atgaaagcccttatctttgctgccgcaggcttattgttgctcctgcccaccttctgccaaagtggcatggagaacgatacgaacaatttggccaaaccaaccctcccgatcaagacctttcgcggggctccgcccaacagtttcgaagaattccccttcagcgcccttgaggggtggactggtgccacaattactgtaaaaatcaaatgtcctgaggagtcggcctcccatttacacgtcaaaaatgcgacaatggggtatctcacatccagtctaagcaccaagctgataccagccatttatctgcttgtgttcgttgttggagtccctgccaatgccgtcacactgtggatgctgttctttcgcacaagaagcatctgtacaactgtattctacactaacctggccatcgccgacttcctgttctgtgtcaccctgcccttcaagatcgcctatcatctcaatgggaataactgggtgtttggagaagtcctgtgccgtgcgactacagtcatcttttacggaaatatgtactgtagtattttgctgcttgcttgcattagtattaatcggtatctcgcaattgtgcacccttttacttatagagggctccccaagcacacatacgcacttgtgacctgtggactcgtatgggcgaccgtgttcttgtacatgttaccgttttttatcctcaaacaggagtactatctggttcagccagatattacaacttgtcatgatgtgcataacacctgtgagtctagcagccccttccagctgtattacttcattagtctcgccttctttgggttcctgattccgttcgtgttaattatctattgctatgctgcaattattaggactctgaatgcatacgaccaccggtggctgtggtatgtgaaggctagtctactcatactggtgatctttacgatttgttttgccccctcgaatatcatactgatcattcatcacgctaactactattataataatacagatggattatatttcatttatctcattgccctttgtctgggatcactgaatagttgccttgaccctttcctgtacttcttaatgagcaaaactaggaatcacagcaccgcttacctcaccaagtag

SEQ ID NO: 112507 - DNA, 1059 bp, synthetic construct
  misc_feature 1..1059: note = Description of Artificial Sequence: Synthetic coding sequence
  source 1..1059: mol_type = other DNA
atggaaaatgataccaataacctggcaaaaccaacgctacccatcaagactttccggggtgccccgcccaacagctttgaggagttcccctttagtgccttggagggttggacaggcgccactatcaccgtgaagataaagtgcccagaagagagtgcatctcatctacatgtaaaaaatgcaaccatgggatacctgactagttccttgtctaccaagcttatcccagcaatataccttctagtcttcgtcgttggtgtgccagccaatgctgtaaccctttggatgttgttctttcgtacacggtccatttgtactaccgtcttttatactaacctggcgatagctgacttcctcttctgcgttactctaccctttaaaattgcttaccacctcaatgggaacaattgggtgtttggggaagtcctgtgcagggctaccaccgtgatattttacgggaacatgtattgttcaatcctattgcttgcatgcataagtataaataggtatcttgcaatagtgcaccctttcacttacagaggcctcccgaagcatacttacgctctggtgacttgtgggcttgtgtgggctacagttttcctctacatgttgccctttttcatattgaagcaggagtactatcttgtccagccagacatcacgacctgtcatgacgtccacaatacctgtgaatcctcttctccgttccagctttattattttatctctctggccttcttcggctttttgatacctttcgtgctcatcatctattgctatgccgctattattcgcaccctcaacgcctatgaccatcgctggctctggtacgtgaaggcctcgctgcttattctcgtaatatttaccatctgcttcgcaccatcgaacatcatcttgatcattcatcacgcgaattactactacaataatactgatggtctgtacttcatatatttgattgcactgtgccttggctccctcaattcatgtttggatccttttctgtactttctgatgtctaagactcgcaaccattctacagcctatttgaccaagtag

SEQ ID NO: 112508 - DNA, 1158 bp, synthetic construct
  misc_feature 1..1158: note = Description of Artificial Sequence: Synthetic coding sequence
  source 1..1158: mol_type = other DNA
atgtggggacggttactgctgtggcctctggtgctggggttctctctttcgggaggcacacagacaccgagcgtgtacgacgagtctggcagcacgggagggggggatgatagtacaccatcgattctacccgcgccccgcgggtaccccgggcaagtttgcgctaacgactctgatacactggagcttcctgattcctccagagccctgcttcttggctgggttccaacaagactggttcccgccttatacggtctcgtcctggtggtgggacttccagctaacggtctggccttgtgggtgttggctactcaggcccctcgcctgccttcaacaatgctgctcatgaatcttgccgcagcagacctgctgttggcattggccttgcctcccagaattgcataccatctcaggggacagcgatggccgttcggcgaggcagcctgcagactggcaacagcagctctgtatggccacatgtacggcagcgtgctgctgcttgcagctgtgagtcttgatcggtacctggccctcgtccatcctttgagagcacgggcacttagaggacgacggcttgccctgggcctctgcatggctgcgtggctcatggctgccgcgctcgccctcccactgacacttcaacgccagacctttcgtctcgctagatccgatcgggtcctctgtcacgacgctctcccactggatgcacaagcatcccactggcagccagccttcacctgccttgccctgctgggctgcttcctgcctctgttggcaatgcttctgtgttatggggcaacgttacataccctcgctgctagcggtagaagatatggccatgctctccgcctgactgccgttgttctggccagcgctgtcgcctttttcgtcccttccaatctccttttgcttcttcactattccgatcctagtccctctgcttggggcaatctgtatggggcctacgttccttccctagcactaagcaccctaaactcctgtgtagatcctttcatttactattacgtgtccgccgagtttcgtgataaggtccgcgcgggattgttccagcgctcgcccggggacacagtcgccagcaaggcctctgctgaaggtgggtctcgcgggatgggcacgcactcctccctgctgcagtag

SEQ ID NO: 112509 - DNA, 1848 bp, synthetic construct
  misc_feature 1..1848: note = Description of Artificial Sequence: Synthetic coding sequence
  source 1..1848: mol_type = other DNA
atgcgggccttattactgttgggcttccttctcgtgagcctcgagtccactctctcaatacccccttgggaagcccctaaggaacacaaatacaaggcagaagagcacaccgtcgtgctgacagtcacaggcgagccatgtcattttcccttccagtaccacagacagttataccataaatgtacacataaggggcgcccagggccacagccctggtgtgcgacaaccccaaatttcgatcaggaccaacggtggggctactgtctggaaccaaagaaagttaaggaccattgcagtaagcatagtccttgtcaaaagggtgggacttgcgtaaacatgccatccggaccacactgtttgtgccctcaacatctgactggcaaccactgccagaaggagaagtgcttcgaaccacagctcttgaggttctttcataaaaatgagatctggtacaggaccgaacaggccgccgtggcaaggtgtcagtgtaagggaccagatgcccactgtcaacgactggcaagccaagcatgccgtactaacccgtgcctgcatggggggcgttgcttggaagtggaaggccataggttatgtcattgtccagtgggctacactggggccttctgtgacgtggacactaaagcgtcttgctatgatggtaggggtctgtcttacaggggactggcaagaacgaccctctcgggcgctccatgtcagccctgggcctctgaggccacctatagaaatgtaacagccgagcaggccagaaattgggggttgggtggacatgctttctgccggaacccagacaacgatatccggccctggtgcttcgtgctaaatcgggaccgactgtcatgggagtactgtgatctggcacaatgccagacaccaacacaagcggcgccccctacccctgtaagtccacggttacatgttccattaatgccggcacaacctgctccccccaagccccaaccaaccacacgcacccctcctcagagtcaaaccccgggtgctttgcccgcaaagcgggagcagccaccctccttgactcgcaatggtccgctgtcttgtggacaaaggctcaggaagtcacttagtagcatgacaagagttgtaggagggctcgttgccctgagaggcgcgcacccatatatcgcagctctctactggggtcactccttctgcgccgggagtctcatcgccccatgctgggttctgactgcggcacactgtctccaggatcgaccagcaccggaggacctgaccgtggttctgggacaggagcgaaggaatcactcatgcgaaccatgccagaccttggccgttcgctcttaccgcctccacgaggcgttttcgccagtgagctaccagcatgacctggccttactgcggctgcaggaagacgccgacggcagttgcgctctgctgagcccatacgtccaacctgtatgcttgccctcaggggctgcccgtccgagtgagacaacattgtgtcaggttgccggctgggggcatcagttcgagggtgcggaagaatacgcctcattccttcaggaggcgcaggttccattcctctcactggagcgatgcagtgcccctgatgtgcacggatctagcattctgcccggcatgctgtgcgctggctttctggaaggaggaacggatgcctgccagggcgactcaggtggacccctagtgtgcgaagaccaagcagcagagcgtcggctgacactccagggaatcatttcttggggaagcggttgcggcgaccgcaacaagccaggagtgtacaccgacgtggcttactatctggcatggatccgcgagcacacggtgtcttag

SEQ ID NO: 112510 - DNA, 1986 bp, synthetic construct
  misc_feature 1..1986: note = Description of Artificial Sequence: Synthetic coding sequence
  source 1..1986: mol_type = other DNA
atgcgccttaaaaacctcaccttcatcataatcctgataatctctggcgagctgtacgccgaagagaaaccatgcggttttccccacgtcgaaaatggccgcattgcacagtattattatacttttaagtcattctactttcccatgtccatagataagaaattatctttcttttgtttggccgggtataccacggagagcggtcggcaggaggaacagacaacatgtacaaccgagggttggagcccagaaccgagatgttttaagaaatgcacaaagccggacctatctaatggctacatttccgacgtcaagttgctttataagattcaggagaatatgcggtatggttgcgcctccggttataagacaacaggcggcaaggatgaggaggtggtccagtgcctttctgatgggtggagttcgcagccaacatgccgcaaagagcatgaaacctgcctcgcacctgagctctataatggcaactattcaaccacacaaaagaccttcaaggttaaagataaagtgcaatatgaatgcgctactggctactacaccgctggtggaaagaaaacagaggaagtcgaatgcctgacttacggttggagcctgacacccaaatgtaccaagttgaaatgctccagcctcaggctgatcgagaacggatatttccacccagtgaagcaaacatacgaagagggagacgttgtgcagttcttttgtcatgaaaattattacttgagtggttcagatcttattcagtgttataattttggctggtacccggaatctcccgtatgtgaaggacgcagaaaccgctgccctcccccgcccctacctattaactcaaagatacagactcattccacaacctatagacacggcgagattgtgcacatcgagtgcgaactgaattttgagattcatgggtctgccgaaatccgatgtgaggacgggaagtggactgagccgcccaagtgcattgagggccaggaaaaggtggcctgcgaggaaccgcctttcatagaaaacggcgcagcaaacctgcactccaagatatactacaatggagataaagtgacctacgcttgtaaaagcggctatcttttgcacggcagtaacgagatcacctgcaatcgggggaagtggacattaccccccgaatgtgtggagaacaatgagaattgcaaacatccccctgttgtcatgaatggcgccgtggccgatggaatcctggcctcttacgcgactgggagcagcgtggagtatagatgtaacgagtactatctgcttcggggatctaaaatcagcagatgcgaacagggaaaatggtcgtccccccctgtgtgtctggagccatgtaccgtgaacgtcgactacatgaatcgcaataacattgagatgaagtggaagtacgagggtaaagttctgcacggtgatctgatcgacttcgtgtgcaagcaaggatacgacctctccccactaaccccactctctgaactcagcgtgcagtgtaatcggggcgaggtcaagtaccctctctgcacccgcaaagagagtaaagggatgtgtacttccccccccctgatcaagcatggagtgattatcagttccaccgtggatacatacgagaatgggagctcagtagagtaccgctgttttgaccaccactttctagaagggagcagagaggcatactgcttagatggtatgtggactactcctcctctatgtttggagccttgcactttatcattcactgagatggaaaagaacaacctgcttctcaagtgggacttcgacaacaggccccatatactgcatggagagtatatcgagttcatttgccggggagatacttatcccgcagagctctatattaccggttcaatcctgaggatgcagtgcgatcgtggtcagttgaaatatccaagatgcattccaaggcagagtacgctgtcctatcaagagccactacgcacgtag

SEQ ID NO: 112511 - DNA, 3675 bp, synthetic construct
  misc_feature 1..3675: note = Description of Artificial Sequence: Synthetic coding sequence
  source 1..3675: mol_type = other DNA
atgttgaccaagtttgagacaaaatccgcacgggtgaaaggcttgtctttccacccaaagcgtccatggattctcacctcgctgcacaacggagtgattcaactgtgggactaccgcatgtgtaccctcatcgacaagttcgatgagcacgacgggcctgtcaggggcatcgattttcacaaacagcagccacttttcgtttctggaggtgatgattacaaaattaaagtgtggaactataaactgcgacggtgtcttttcaccttgcttggccatctggattacatccgcacaacattttttcatcacgaatatccctggatcttgagtgcatccgatgaccagactatacgcgtatggaattggcagagccgtacctgtgtgtgcgtgctgacaggacataatcactacgtcatgtgcgctcagtttcatcccacagaagacctggtagtatcagctagcctcgaccagacagtgcgtgtgtgggacattagcgggctacgcaagaagaatctctcacccggagccgtcgaatcagatgtgcggggcatcacaggggttgatctctttgggactactgacgctgttgtgaagcatgtgttagaggggcatgaccggggagtaaattgggccgcctttcaccccaccatgccccttatagtaagcggggcagatgaccgtcaggtgaagatctggagaatgaacgaaagtaaggcgtgggaggtggacacctgtagagggcattataataacgtgtcttgcgcagtgtttcatccccgtcaggaactgattctctccaacagcgaggacaagagcattcgggtttgggacatgtccaaacggactggcgtgcagaccttcagacgcgatcatgatcgattttgggtgttggccgcccatccaaatctgaatctatttgcagctggacatgatggagggatgattgtctttaagcttgaacgagagcggccggcctatgccgttcacggtaatatgctgcactacgtgaaggaccggttcttaagacaactggacttcaatagcagcaaggacgtggctgtgatgcaattgagatcagggtccaaatttcccgtctttaacatgtcttacaaccccgcagaaaatgccgtcttgttgtgtactcgggcaagcaatctggagaactctacatatgacttgtacacaatcccaaaggatgcggattctcagaaccctgacgcacctgagggtaaaaggtctagtggcttgacggccgtgtgggtcgctagaaatcgctttgctgtgttggacagaatgcactccctgctcataaagaacctaaagaacgagattactaaaaaggttcaggtacccaattgcgacgagattttttatgccgggactggcaaccttctgctgagggatgctgactccattacacttttcgacgttcaacagaagagaactctcgctagcgtgaagatttctaaggttaagtacgtgatctggagtgccgacatgtctcatgtcgccctgctcgccaagcacgcgattgtgatttgcaataggaagcttgatgctctgtgcaacatacacgaaaatattcgagtaaaaagtggcgcctgggacgagtctggggtgtttatctataccacttcgaatcatattaagtatgctgtgacaacaggtgatcacggcatcatacgaacactcgaccttcccatctacgttacgagagtcaaaggcaacaacgtgtactgcctcgaccgagaatgtagaccaagagtactgaccattgatcccacagagtttaagttcaagctggccctcattaatcgcaagtatgacgaggtactacacatggtgaggaatgccaagcttgtgggtcagtccataatagcatatcttcagaagaaaggctaccctgaggtagcactccacttcgtgaaggatgaaaagacccggttttccttggctctagagtgcggaaacatcgaaattgcccttgaagccgccaaagcactagatgacaagaactgttgggaaaagctcggcgaggtggcactgttacagggcaaccaccagatcgtggaaatgtgctaccaaagaaccaagaatttcgacaagctgagctttctctatttaataactggcaacctcgagaaactccgcaaaatgatgaagatcgctgagatcagaaaggacatgtccggccattatcagaatgcactgtaccttggcgatgttagcgaacgcgtgcgcatcctgaagaattgtgggcaaaagagcctggcttacctgaccgctgccacacacggtctggacgaagaggctgaaagcttgaaggagacctttgacccagagaaggaaacgatccccgacatcgatccgaacgcaaagctacttcagcccccagcccctatcatgcctctggataccaattggcccctgctcacggtaagcaagggattctttgaaggcacaatcgctagcaaaggtaaagggggggcgttagccgccgatatcgatattgacaccgtggggaccgagggctggggtgaagacgcggagttacagctggacgaggatggcttcgtggaagcgaccgagggtctcggcgatgatgccttgggcaagggtcaggaagagggtggcggttgggacgtggaggaagatctggaacttccacctgaactcgacattagtcccggcgctgcaggcggcgccgaggatgggttttttgtgcctccaacaaagggtaccagcccaactcagatttggtgcaacaactcgcaactcccagtcgatcacatcttggctggttcctttgagactgcaatgcgcctgctgcacgatcaagttggcgtcattcagtttgggccctacaaacagctgttcctgcagacatacgctcgggggagaacgacctaccaggccttaccatgcctgcccagcatgtacggctatccaaataggaattggaaagacgcagggctgaagaatggagtgcctgcagtggggctgaagcttaatgacctcattcaaaggctgcaactgtgttatcagcttactacggtggggaagtttgaagaagctgtggagaagttccggtctatccttttgtcagttcccttactcgtggtcgataataaacaagaaatagccgaagcccagcagctcatcactatttgtagggaatatatcgtgggcttgtctgtggagacagagagaaagaagctgcccaaagaaacactcgaacaacagaaacggatatgcgagatggcggcctactttactcactccaacctgcagcctgtgcatatgatattggtattaaggactgctctgaacctgtttttcaagttgaaaaattttaagaccgctgctacatttgcacgccgactgttagaactgggccccaagcccgaggtggcccagcagacccggaagatcctaagcgcctgtgagaagaaccctacagacgcctatcaactgaactacgatatgcacaacccatttgatatctgcgccgcttcctaccgccctatctatagaggtaagccggttgagaagtgtcctctgagcggggcttgttattctcctgaattcaaaggtcagatttgtcgggtgaccactgtaacagagatcggcaaggacgtaatcgggctgagaatcagccccttgcaatttaggtag

SEQ ID NO: 112512 - DNA, 3702 bp, synthetic construct
  misc_feature 1..3702: note = Description of Artificial Sequence: Synthetic coding sequence
  source 1..3702: mol_type = other DNA
atgttaaccaaatttgagactaagtccgcccgcgtaaagggtctgtcgtttcatccaaagcgcccatggattctcacctccttacacaacggtgtcatacagttgtgggactatcggatgtgcaccctgatcgataagttcgacgaacatgatggccctgtgagaggcattgacttccacaagcagcagcccctgtttgtaagcggtggggacgactataaaatcaaagtctggaactacaagcttaggcgatgcctgttcaccttactgggtcacctcgattatatccggaccacctttttccatcacgaatacccctggatcctgtcagcctctgatgatcagacgatacgggtttggaattggcagagccgcacatgtgtatgtgtgctgaccggacataatcactacgtcatgtgtgctcagtttcatcctaccgaggacctagttgtgtcagcttcccttgaccagaccgttcgtgtgtgggatatttccggtttacggaagaaaaatttatctcccggggccgtggaatccgacgttcgcggcatcaccggggtggatcttttcggaacaacagatgccgtggtgaagcacgtgttggaagggcacgatagaggcgtcaattgggctgccttccaccctacgatgccactcatcgtgagtggcgcagacgatcggcaggtgaaaatatggagaatgaacgagagcaaggcttgggaagtggatacttgccgtggacactataacaatgtctcctgtgccgtctttcaccccaggcaggaattgattctgagcaactctgaggataaatctattagagtgtgggatatgtctaagcggactggggtccagaccttccgacgggaccatgacaggttttgggtgctggccgcacaccctaatttgaacctcttcgcagcaggtcacgatggcgggatgattgtctttaaactagaacgggagcggccagcatacgccgtccacggcaacatgctccactacgtcaaagacagattcttgcgtcagctagacttcaatagctccaaggatgttgcggtgatgcagctgcggagcggctctaaattccccgttttcaacatgtcctataaccctgctgagaacgctgtactcctttgcacgcgggctagcaatctggaaaatagcacctacgatctgtacacaatcccaaaggacgcagatagccagaacccggacgcgccagagggaaagcgctcctccggactcacagcggtctgggtggccaggaaccggttcgcagtgctggacagaatgcacagcttgcttatcaagaatctgaagaacgaaatcactaagaaagttcaggtgcccaactgcgatgaaatcttctacgcaggcactggcaacctgcttctgcgggacgcggactcaatcactctgttcgacgtgcagcagaaacggacactagctagtgtgaaaatcagtaaggttaaatacgttatttggtctgcagatatgtcacacgtggccttgctcgccaaacacgaacatagctgccctctgccccttacggctattgtgatctgcaataggaagctggacgctctgtgcaacattcacgagaatattcgggtgaaaagtggagcgtgggacgagagcggcgtcttcatttataccactagtaaccatataaagtatgcagtgaccacaggggatcatggaatcataagaactctcgacctgccaatttatgtaactcgagttaagggcaacaacgtttattgcttagatagagaatgcagaccgagggtgctcacaattgacccaacagagtttaagtttaagctcgccctgatcaatcgcaagtacgatgaggtccttcatatggtgcggaatgcgaagttggtcggtcagtctatcatcgcctacttgcagaagaaaggctacccggaagtcgctcttcattttgttaaggacgaaaaaaccagattttcactggccctcgaatgtggaaacattgagattgccctggaggcagcgaaagccctcgacgataagaattgttgggagaaactgggtgaggtggccctcctgcaaggtaatcaccagatagttgaaatgtgttatcagcggaccaagaactttgacaagctctctttcctgtatttaattaccggaaatttggagaaactgagaaaaatgatgaaaattgccgagatccgcaaggatatgagcggacactaccagaacgcattgtacctcggcgatgtgtccgaaagagtgaggatcctgaaaaactgcggccagaaatctttagcttatttgacggcggcaacccatggcttagacgaagaagccgaaagtctcaaggagacgttcgaccccgaaaaagaaactatacccgacattgacccaaatgctaaactattgcagcctccagcccccattatgcctctcgacacgaattggccactcctaacggtctcaaaagggttcttcgagggcacaattgcctccaagggaaaaggcggcgccctggcagccgatattgatattgacaccgtgggcaccgagggctggggtgaagacgctgaactccagcttgacgaggacggattcgtagaagctactgaaggccttggagacgatgctctgggaaaaggtcaagaggagggaggcggctgggacgtggaagaagacttagaattgccacccgaactggacatttctcccggggccgccggaggcgccgaggacgggttttttgtcccccctaccaaaggaacctccccaacgcagatctggtgtaataatagtcagttgccagtcgaccacatcttggctggatcatttgagactgccatgcggttactgcatgatcaggtcggggtaattcaatttggtccctataagcagctgttcctgcagacatacgcccggggacgcaccacctaccaggccttgccatgcctgccgagcatgtatggatatccgaacagaaattggaaagatgctgggcttaagaacggagtgcccgccgtcgggttaaaacttaatgaccttattcagaggctacagctgtgctaccagctgaccacggtgggaaagtttgaagaagccgtggaaaaatttcgctctatattgttaagcgttcccctgttggtggttgataacaagcaggaaattgcagaggcccagcagcttataacaatctgtcgtgaatacatcgtgggcctgtctgttgagactgagcggaagaagctgcctaaggaaactctggagcagcagaagcggatttgcgaaatggcggcatactttacccactcaaacctccagcctgttcacatgatactcgttttgcggactgccctgaatctgttttttaagctgaaaaatttcaaaactgcagccaccttcgctcggcggctcctcgaactgggacccaagcccgaagtggctcagcagacccggaaaatactgagtgcctgtgaaaagaatccgaccgatgcataccagctgaactatgacatgcataatccctttgacatctgcgcagcctcctatcgacccatttacagaggaaagcctgttgagaagtgcccactgtccggggcctgttatagccctgagttcaaaggccagatctgtagggtcaccaccgtgactgagatcggtaaagatgtcattggcctacgcatctcaccactgcaatttcgatag

SEQ ID NO: 112513 - DNA, 2862 bp, synthetic construct
  misc_feature 1..2862: note = Description of Artificial Sequence: Synthetic coding sequence
  source 1..2862: mol_type = other DNA
atgaccgcagcagaaaacgtctgctatacgttgataaatgtgccaatggactccgagccacctagtgagatctccctgaagaacgacttggaaaagggcgacgtcaagagtaaaaccgaagccctgaagaaggtgattattatgatattaaatggggagaaactgcccggcctcctcatgaccattatacgcttcgtcctcccattgcaggatcatacaatcaagaagctcctgctcgtcttttgggaaatagtaccaaagacaacccccgacggcagacttctgcacgagatgatcctggtttgcgatgcctatcgtaaagacctccaacacccaaacgaatttataagaggaagtactcttcgattcttgtgcaaacttaaggaggcagaactcctggagccccttatgccggccatacgcgcctgcctcgagcaccggcactcctatgtgagaaggaatgcagtccttgctatatacaccatctatagaaatttcgagcatctcatccctgacgcaccagagcttatccatgattttttggtcaacgaaaaagacgccagctgcaagcgcaacgctttcatgatgctgattcacgcagaccaggacagggccttagattatctgtccacttgcatagatcaggtccagactttcggggacatcctgcagctagtgatcgtcgagcttatctacaaagtatgtcacgcgaacccctctgaacgggcccgctttatccgatgcatatataatctcctccagagcagctctccggccgtgaagtacgaagcagcggggacattagtcacactgagctctgctcccaccgctattaaagcagcagctcagtgttacatagacctgatcattaaggagagcgataataacgttaaactcattgtactggatcgactgatagagttgaaggagcatcctgcccatgagcgagtgctgcaggatctggtgatggacattctgagagttctgagtactccggatttggaagtgagaaagaaaaccttgcagctcgctctagacctagtgagtagcagaaacgtggaagagctagttattgtcttgaaaaaggaagtcataaagacaaataacgtgtccgaacacgaagatactgataagtataggcagttgttggtccgtactctccactcatgttcagtccgctttccagacatggcagccaacgttatccccgtgctgatggagtttctgagtgataacaacgaggccgcagccgcagatgtgctggaattcgtgagggaggcaattcagagatttgacaatctcagaatgcttattgtggagaagatgctggaagtattccatgcaataaagagcgtcaagatctacaggggtgccctatggatccttggcgagtattgtagtaccaaagaagacatccagagtgtcatgactgagattcggcgatcacttggggaaattccgatcgtggaaagtgaaatcaagaaggaggcgggggagctcaaaccggaggaagagatcacagttggccccgtgcaaaaactcgtgaccgaaatgggcacctatgctactcagagtgctctcagctccagccgcccaaccaagaaagaggaggacagaccaccactcagaggattccttctggacggtgacttcttcgtggcggcctccctcgcgaccaccctgaccaagattgcactgcgctacgtcgccttggttcaagaaaaaaagaaacagaatagttttgttgcggaagccatgctcctgatggctacaatcctgcatctgggcaagtcatctctgccaaagaaaccaattacagacgacgatgtggacagaatcagtctgtgcttgaaggtactgtccgaatgctccccgctcatgaacgacattttcaacaaagagtgtaggcagtccctcagtcacatgcttagtgccaagttagaggaggaaaaactgtcacagaaaaaagaatctgagaaacgcaatgtgacagtacagcccgatgaccctatatcctttatgcagctgaccgccaagaacgagatgaattgtaaggaggatcaattccagctttctttactagctgcaatgggaaacactcagaggaaagaggccgcagaccctttggcaagcaagcttaacaaggtgacacaattaaccggattctcggaccccgtttatgccgaagcgtacgtgcacgtgaatcaatacgatatcgtcctcgatgttctggtcgtgaatcagacctcagacacattgcagaactgtactttggagcttgccacactgggggatctcaagctcgtggagaagccctctccgctgacactagcacctcatgacttcgcaaatattaaagccaatgtcaaggtggcaagcacggagaatggcataatatttggcaacatcgtgtacgatgtcagcggagcggcctccgacaggaattgcgtggtgctatccgacattcacattgacattatggactacattcaacccgccacgtgcactgatgccgaatttagacagatgtgggcggagttcgagtgggaaaacaaagtcacagttaacaccaacatggtcgacttaaacgattacctacagcacattttgaaatccacaaacatgaaatgtctcaccccagagaaagccctttctggttattgtggcttcatggcagcaaacctctatgcccggagcattttcggcgaagatgcattggctaacgtttccatcgagaaacccatccaccagggcccggatgctgcagttacagggcacatcagaatcagagcgaagagtcaggggatggcattgtcattgggtgataaaatcaatttatctcagaagaaaaccagcatttag

SEQ ID NO: 112514 - DNA, 2862 bp, synthetic construct
  misc_feature 1..2862: note = Description of Artificial Sequence: Synthetic coding sequence
  source 1..2862: mol_type = other DNA
atgaccgcagccgagaatgtgtgctacacactaatcaacgtgcctatggatagcgagcctcccagtgagattagtctcaaaaacgatttagagaagggggatgtgaagtccaagaccgaagcccttaagaaagtgattataatgatactgaacggtgagaagcttcctggactcctcatgactatcatccggtttgttctcccacttcaggatcacacgattaagaaattgctgcttgtgttctgggagatcgtccccaagacgacacctgacgggaggcttcttcacgagatgatcctggtgtgcgatgcgtaccgtaaggacctgcagcaccccaacgagttcatcagaggatcaaccctccggtttctttgtaaactgaaggaggcggaactcctcgagcctctcatgccggctatccgcgcctgcctcgagcacagacactcctatgtccgccgcaacgcggtcctggctatttatacaatctatcggaactttgagcacttgattccggacgcccctgaactaatacatgattttctcgtaaacgagaaggatgcctcatgcaagcgcaatgcctttatgatgctgatccacgcggatcaggacagggctttagactatcttagtacctgtatcgaccaggtgcagactttcggggacatccttcaactggtgattgtcgaattaatctacaaggtgtgccatgctaacccgtctgagcgcgctcgatttattagatgcatttacaaccttctccaatctagcagccccgccgtgaaatacgaagccgcggggactctggtgaccctgtctagcgcccccaccgcgataaaagctgctgcccaatgctacatcgaccttatcatcaaagagtctgacaacaatgtgaaactgatcgtgttggacaggctcattgagctgaaggagcaccctgcccatgaacgcgtgcttcaggacctcgtcatggacattctgcgtgtactaagcacccctgaccttgaggtgaggaaaaaaacgctgcaattggccctggacttggtctcttcgcggaatgtggaggagctcgtaatcgtcctcaagaaggaagtgatcaagacgaataatgtatccgagcatgaagacaccgacaagtaccggcaactgctcgtgcgaacattacactcatgtagcgtgaggttccccgatatggcagcgaatgttattccagtattgatggagtttctctctgacaataacgaagccgcagcagctgacgttctggagtttgtcagagaggccattcagcgcttcgataaccttagaatgctgatcgtcgagaaaatgctggaagtgttccacgccatcaagagcgtgaagatttacagaggtgctttgtggatcctgggcgagtactgcagtacaaaggaggacatccagtctgtgatgacagaaatcagacggtctcttggagaaatccctattgttgagagcgagataaagaaggaggccggagaattgaaacctgaagaagaaatcaccgtgggccctgttcagaagttggtcacagagatggggacttacgcaacacagtcagcccttagcagctcacgcccaacgaaaaaggaagaggatcggcctccgttgcggggatttctcctggatggcgacttcttcgtggccgcttctctggctacaaccctcaccaaaattgcccttaggtacgtcgcattggtgcaggaaaaaaagaagcaaaacagcttcgtggccgaggctatgctgttgatggccacgatcctgcacttgggtaagagttccctgccaaagaagcccattaccgacgacgatgtcgatcggattagcctgtgcctcaaggtgcttagcgaatgctctcctctgatgaatgatattttcaacaaggagtgcagacagtccctcagccacatgctgtcagccaagctcgaggaggagaagctgtctcagaaaaaagagagtgagaaacgaaatgtgactgtgcagccagacgacccaattagcttcatgcagctcacagccaaaaatgaaatgaactgcaaagaagaccagttccagcttagcctgctggctgcaatgggtaacacccagcgtaaagaggccgcagaccctctcgcatcaaaactcaataaagtcactcagcttaccggattctctgatccagtttacgcagaagcctacgtccatgtcaaccagtatgatattgtgctggacgttctcgtggtcaatcagactagcgataccctccagaattgtacccttgagttggccacactgggcgatctcaagctggtggagaagccgagcccccttacgctggctccccatgacttcgcaaatatcaaagccaacgtcaaggttgcctcaaccgaaaatggaattattttcggcaatattgtctatgacgtgtctggtgccgcatccgacagaaattgcgtggttctctcagatattcacattgatataatggactatatccagcccgccacatgtactgatgcagaattcaggcagatgtgggccgagtttgaatgggagaacaaggttacggtgaataccaacatggtggatctgaatgactatctgcagcatattcttaaatcaaccaatatgaaatgcctcacccctgaaaaagctctcagcggttactgcggcttcatggcagcaaacctctatgcacgctcaatctttggcgaagacgcgctcgctaatgtcagcattgaaaagccaatccaccagggacctgacgccgccgtaactggacacatacggattagagccaagtctcaaggcatggctctgtctttgggcgacaaaatcaacctttctcagaaaaagacctctatctag

SEQ ID NO: 112515 - DNA, 2721 bp, synthetic construct
  misc_feature 1..2721: note = Description of Artificial Sequence: Synthetic coding sequence
  source 1..2721: mol_type = other DNA
atgcccctcagactggacatcaaacgcaagctcacagcgcggtccgaccgtgttaaaagcgttgatctccatcccactgaaccttggatgctcgcttctctgtacaacggctcagtttgcgtgtggaaccatgaaacccagacattagtcaaaaccttcgaagtgtgcgacctgccagtacgtgcagctaagttcgtcgcacggaagaattgggtggttaccggagccgatgacatgcaaatccgggtgttcaactacaacacactcgagagagtgcatatgtttgaagcccactcagactatatccgctgcattgccgtgcaccctacacagccttttattctgacaagctcggacgatatgctgatcaaactctgggattgggacaaaaagtggagctgctcacaagtgttcgagggacatacgcactacgtgatgcagattgtgattaatccgaaggataacaatcagtttgcgtcagccagcctcgaccgtaccattaaagtgtggcaacttggatcatcttcccccaacttcacactggagggacacgaaaagggagtaaactgcatagactactattcaggcggcgacaagccctatttaatctctggagctgatgatcgactggttaagatttgggactatcagaataagacctgcgtgcagacgctggagggacatgctcagaatgtttcctgcgccagctttcacccagagctccccattataatcaccgggtccgaggatgggacagtgcggatatggcattcgtcgacctatagattggaatccaccctgaattacggtatggaacgagtgtggtgcgtggccagcctgcgaggttcaaataacgtggcactgggctatgatgaaggtagcattatcgtgaaacttgggcgcgaggagccagctatgtcaatggacgctaacggtaaaattatctgggcaaaacactctgaagtccagcaggcaaacctcaaagcgatgggagatgcagagattaaggacggagaacggcttcccttagccgttaaggatatgggatcctgtgagatttatccacaaactattcagcataatccaaatggaaggtttgtggtcgtgtgcggcgacggggagtatatcatttacactgcaatggccctccgcaataagtccttcggcagcgcccaagagtttgcatgggcccacgattcatctgaatatgccattagggagtccaatagcatagtgaaaatcttcaagaattttaaggagaaaaaaagttttaagcctgactttggagccgagagcatttacggtggatttttgctgggcgtgcggagcgtgaatggcctcgctttctatgactgggataatacagagctgataagacgcattgagatacagcctaagcatattttttggagtgactccggtgagttggtttgtattgctactgaagaatccttttttattctaaaatatctgtcagagaaagtgctcgcagcccaggagacacatgaaggagttacagaagacggcattgaggatgcgtttgaggtgctgggagagattcaggaaatcgtgaaaacaggcctgtgggttggggactgctttatctacacatcctccgtgaataggctaaactactacgtgggtggcgaaatcgtcaccatcgcacatctcgatcgaaccatgtacttgctgggatatatccccaaggacaatcgtttgtacctgggtgataaagaattgaacatcattagctatagcctgctcgtaagtgtgctggagtatcagactgctgtgatgcgcagggacttctctatggccgacaaggtgcttcctaccattcctaaggagcagcggaccagggttgctcactttctggagaagcaagggttcaaacagcaggctctcaccgtcagtacggacccagaacaccgatttgagctcgctctgcagctgggtgagcttaagattgcttatcagttagctgtggaagcagagagcgagcagaagtggaagcagctcgctgagctggccatatctaagtgtcagtttggactggcccaagaatgtcttcaccacgcccaggactacggcggcttgctactcctggccaccgcctcgggtaatgcaaacatggttaataaattggccgaaggcgccgaaagagacggcaagaacaatgtggcctttatgtcctatttcctgcagggcaaggtggacgcctgtctggagttgctaatcagaacagggagacttccagaagctgcctttctggccagaacgtacctgcccagtcaggtgtcgcgggtggttaagctctggagggaaaatctcagcaaagtcaatcagaaagcggcggagtccctggctgatcccacagagtacgaaaacctgtttcctggattgaaggaggccttcgtagtagaagagtgggttaaggaaacccacgctgacctttggcccgccaaacaataccctttagttacaccgaacgaagagagaaatgttatggaagaggggaaagactttcagccctcaagatctacggctcagcaggagctcgatgggaagccagcaagtccgacacctgtcattgtggccagccacactgcgaataaagaggagaagtcattgcttgaactggaagtagacctagataacctggagttggaggacatcgatacaactgacattaacctggacgaagacatactggatgactag

SEQ ID NO: 112516 - DNA, 2634 bp, synthetic construct
  misc_feature 1..2634: note = Description of Artificial Sequence: Synthetic coding sequence
  source 1..2634: mol_type = other DNA
atgcttgcatcactgtataacggatcagtgtgtgtgtggaaccacgaaactcagaccctggtgaagacctttgaagtgtgcgatctgccagtgagagctgcaaagtttgtggcgaggaaaaactgggttgtcacaggtgctgatgatatgcaaatacgcgtcttcaattataatacacttgagagggtgcacatgttcgaagctcactccgactacattcgttgcattgccgttcacccaacacagccgtttatcttgaccagtagcgatgatatgcttatcaaactttgggactgggacaagaagtggtcttgtagccaggtgtttgaaggacacacgcactacgtgatgcaaatcgttattaacccgaaagataataatcaatttgccagcgcctctctagaccgaacaataaaagtgtggcaactcggcagtagcagccctaattttaccttggaaggccacgaaaagggagtcaactgtatcgactattatagcgggggcgacaaaccttatttgatttcaggcgcagacgatagactggtgaagatatgggactatcagaacaaaacttgcgtccaaaccctggagggtcatgctcaaaacgtgtcatgtgcatctttccaccccgaattgcctatcatcataacagggtctgaagacggtacagttcggatctggcactcttcaacttatcggctggaaagcacattaaattacggaatggagagggtatggtgtgtggcttctctaagggggtcaaataacgtggccctcggatatgacgaaggatccattatcgtcaagctgggcagggaggagccggcaatgagtatggacgctaatggaaaaataatatgggccaaacactccgaggtccagcaggctaacctaaaagccatgggtgacgcagagataaaggatggggaaagactgccacttgccgtaaaggacatgggcagttgtgaaatatacccacagaccatacagcacaacccgaacggccgctttgttgtggtttgcggagacggcgagtacattatctataccgcaatggcactccgcaacaaaagtttcggctctgcacaggaattcgcttgggcccacgattcaagtgagtatgccatacgggagtccaattccattgtgaaaatttttaagaacttcaaagaaaagaaaagcttcaaacccgatttcggagccgagtccatctatgggggctttttgcttggagtgaggagtgtgaacggactggctttttatgattgggataatactgagctgatcagaagaattgagatccaacctaagcatattttctggtcagattcaggagagctggtttgcatagctactgaagagtccttttttattctgaagtacctaagtgagaaagtcttagcggcccaggaaacacatgaaggagtgaccgaggacggcattgaagatgccttcgaagtcctgggtgagattcaagagatcgttaaaactggcctgtgggtaggagactgcttcatttatacctccagtgtgaataggctgaactactatgtgggaggcgagatcgtcaccattgcacacctcgaccggaccatgtatctgctaggctacatccccaaggacaatcgcctgtatctgggggacaaggagcttaacatcattagttattcattactggtcagtgtcctggagtaccagaccgctgttatgcgccgtgacttcagcatggccgataaagtcttgcccacgattcccaaggagcaaagaactcgcgttgcacatttcctggagaagcagggtttcaaacagcaagccctgactgtttccactgaccctgagcatcggttcgaactggcgcttcagctgggagaacttaagatcgcataccagctcgcagtggaggccgagagcgagcagaagtggaagcagctggctgaacttgccattagcaaatgtcaatttggtctagcgcaggagtgcctacaccacgcccaggattacggcggcctgctgctgctggccactgctagcggaaatgccaacatggtcaataagctggccgagggcgccgagagagacggcaaaaataatgtggcttttatgagctattttttgcaaggtaaagtggatgcttgtctggaacttctaatccggacaggacgcttgcccgaggcagccttcctcgcaagaacatatctgccatcacaggtttcacgcgtcgtcaaactgtggcgggagaatctgtctaaggtcaatcagaaagccgcagagtccctagctgatcctaccgagtacgagaacctgttcccgggactcaaggaggccttcgtggttgaagagtgggtcaaggagacccacgccgatctttggcctgctaaacagtatccactggtcacacccaacgaggagaggaacgtgatggaggagggcaaagactttcagccctcaagatccacggcacagcaagagctggacggtaaacccgcttcccctacacccgtcatcgtagcttcccacacggccaacaaggaggaaaaatcactgctcgagttggaggtggacttggataatttggagcttgaggacatcgacacaacagatattaatctggatgaggacattctcgatgactag

SEQ ID NO: 112517 - DNA, 927 bp, synthetic construct
  misc_feature 1..927: note = Description of Artificial Sequence: Synthetic coding sequence
  source 1..927: mol_type = other DNA
atggcccctcccgcaccagggcctgcaagtggtggaagcggtgaggttgatgaactgttcgatgttaagaacgcattttacataggatcttatcaacagtgtatcaacgaggcccaaagggtcaagctttcaagtccagagagagacgtcgagcgcgatgtgtttctttatcgcgcttacctagcccagaggaaatttggcgtagtccttgacgagattaaaccgtcaagtgccccagaactgcaggctgtgcgaatgttcgccgactacctggcacatgagagtcggagggactccatcgtggcagaactggatagagaaatgagccggtccgtcgacgtgactaacaccacgttcctgctaatggcggcctcaatctatctgcatgaccaaaatccagatgcagcgctgcgggcattacatcagggggactcactcgaatgcactgctatgacggtgcaaatcttgttaaagttggatcgtctcgaccttgcaagaaaagaactgaaacgtatgcaggacctggatgaggacgctaccctgactcagcttgcaactgcatgggtgtcattggccaccgggggtgagaaactgcaggatgcctactatatcttccaggagatggcagataagtgctcaccaaccctgctgctgttgaatggacaagcagcatgtcacatggcccaggggcgctgggaggctgccgagggcctgctgcaggaggcgctggacaaagatagcggctacccagaaacgctggtgaatctcattgttctttcacaacatctgggaaaaccccctgaagtgactaatagatacctttcacaactaaaggacgcccacaggtcacatcccttcattaaggagtatcaggccaaggagaacgactttgacaggcttgtcctccagtacgctccatctgcttag

SEQ ID NO: 112518 - DNA, 771 bp, synthetic construct
  misc_feature 1..771: note = Description of Artificial Sequence: Synthetic coding sequence
  source 1..771: mol_type = other DNA
atggctcctccggcacctggcccggccagtggagggtccggtgaagtcgatgagctgtttgacgtgaagaacgccttctacataggtagttatcagcagtgcatcaacgaggcccagcgcgttaaactctcttcccccgagcgggatgttgaaagggacgtatttctttatcgcgcctatctggcccagaggaaattcggtgttgtgctggatgagataaaacccagctccgcacctgaactacaggccgttcgaatgtttgccgactacctcgcccatgaaagtcggcgagacagtatagtggctgaactcgaccgggaaatgtctcgatcagtggatgtgacgaataccactttcttgcttatggcggccagcatctacctgcatgaccagaacccagacgctgctctcagagcactgcaccaaggcgactcattagagtgcacggcgatgacagtgcaaatcctgctgaaacttgacagactcgatttggcccggaaagagctgaagagaatgcaggatctggatgaggacgcaacattgacccagctggcaacagcctgggtaagcctggcaacagactcgggctacccggaaacccttgtcaacctcattgtgcttagccagcacctgggcaaaccaccagaagtgacgaatcgatacctcagccagctaaaggacgcacaccggtcccatcccttcataaaggaataccaagctaaagaaaatgactttgatagacttgtactgcagtacgccccatcggcctag

SEQ ID NO: 112519 - DNA, 774 bp, synthetic construct
  misc_feature 1..774: note = Description of Artificial Sequence: Synthetic coding sequence
  source 1..774: mol_type = other DNA
atggcacctccggcgcctggacccgcctccggagggtctggcgaagtggacgagttgttcgacgtcaaaaacgcattttatataggctcctaccagcagtgcataaatgaagcccagagagtgaaactgagtagccctgagagagacgtggagcgtgacgtgtttctgtacagggcgtacctcgcccagcgtaagttcggcgtggttctggatgagattaaaccttcctccgcacctgaactacaggcagtaagaatgtttgcggattatctcgctcatgagtctcggtccactgccatgaccgttcaaatactgctgaagctggacaggctggacctggcccgaaaggaactgaagcggatgcaagacctggacgaggacgccaccttgacccagttagctacagcttgggtctctctggcaaccgggggcgagaaattacaggacgcctactacattttccaggagatggccgacaaatgttcacctacccttctattactgaacggtcaggccgcctgccacatggcccaggggcgctgggaggcggcagaagggttgcttcaggaagccctggataaagattcaggatacccagagaccctcgtcaatctgattgtgcttagccagcatctgggaaagccacctgaagtcacaaaccgctacctctctcagctaaaagacgctcacaggtcacacccatttatcaaagagtaccaagccaaggaaaatgattttgacagactggtactgcagtacgcaccgtctgcttag

SEQ ID NO: 112520 - DNA, 924 bp, synthetic construct
  misc_feature 1..924: note = Description of Artificial Sequence: Synthetic coding sequence
  source 1..924: mol_type = other DNA
atggcgcctcccgctccggccgggctgaggggcagcggagaagtggacgaattgttcgatgtgaaaaatgcattttacatcggcagctaccaacaatgcattaacgaagcacaacgagtgaagctgtccagccccgaaagggatgtggaacgtgatgtgttcttatacagggcataccttgcacagagaaagttcggcgtggtactcgacgagatcaaaccctcaagcgcacctgagctacaggcagtccgcatgtttgctgattaccttgctcacgagtcacgacgcgactccattgttgcggaacttgacagagaaatgagcagaagtgttgacgtgactaacaccaccttcctgttgatggcagccagtatctacctgcatgatcagaatccagacgcagctctgagggccctccatcagggggactctttggagtgtaccgctatgaccgtacagattttgcttaagctggatcggctggacctggccaggaaagaactgaaaaggatgcaggatttggatgaggacgctactcttactcaactggctaccgcatgggtgtcactggctaccggcggggagaagcttcaagatgcctactatatcttccaagaaatggccgataagtgctccccaaccctgctcctgttgaacggccaggccgcctgccacatggcccaaggcaggtgggaggccgctgagggactgctgcaggaggcactggacaaggactcagggtaccccgaaaccctcgtcaatctcattgtccttagccaacatctggggaaacccccagaggtaactaacagatatctgagtcagctgaaggatgcgcatcgaagccacccgtttattaaggagtaccaagccaaagagaacgactttgaccggcttgtcctccaatatgccccgagtgcgtag

SEQ ID NO: 112521 - DNA, 741 bp, synthetic construct
  misc_feature 1..741: note = Description of Artificial Sequence: Synthetic coding sequence
  source 1..741: mol_type = other DNA
atgataaagaagtttgataaaaaagatgaggagtccggctcaggctccaatccctttcagcacctcgaaaagagtgccgtgcttcaggaggcaaggatctttaacgagacccccataaatccccggaggtgcctccatatcctgaccaaaattctgtacctgcttaaccagggggagcattttggtaccaccgaggcaactgaagcgttttttgctatgactcgcttgtttcagagtaatgaccagaccctgagacgcatgtgctatctcaccatcaaagaaatggcgacaatcagtgaagacgtaattatcgttacctcctccctcacgaaggacatgaccggcaaagaagacgtttacagaggacctgcgattagagcattgtgccgcatcactgacggcacaatgctccaggcgattgaaagatacatgaagcaggccattgtagacaaggtctcaagcgtctccagcagcgcccttgtgagttcgctccacatgatgaaaattagctacgacgtcgtcaagagatggattaatgaagcccaggaggcagcctccagcgacaacatcatggtgcaataccatgcactcggggtcctgtatcatctgcgcaagaatgaccgcctggctgtcagcaagatgttaaataagttcaccaagtctggcctcaagtcccagtttgcttactgcatgctaattcgcatcgccagccggcttctcaaggagacggaggatgggtag

SEQ ID NO: 112522 - DNA, 468 bp, synthetic construct
  misc_feature 1..468: note = Description of Artificial Sequence: Synthetic coding sequence
  source 1..468: mol_type = other DNA
taagccggcagcttcagttgtaccatgaagttcactgtgagggattgcgacccaaacacgggcgtccctgacgaggatggttacgacgacgaatacgtgctggaagatctcgaggttacagtgagtgaccacatccaaaaggtgctgaagcccaattttgcggctgcctgggaagaagtcggtgatacctttgagaaagaggagacgtttgctctgagcagtactaagacactggaggaggcagtgaacaatatcattaccttcctggggatgcagccctgcgagagaagcgataaggtgcctgagaataagaactcccactctctctatcttgcgggcatattcagaggaggctatgatcttctggtccgcagtagactagccttagccgacggggtgacaatgcaagtcacagtgcggtccaaggagagaacgcccgtggatgtgattctggcgtctgtaggctag

SEQ ID NO: 112523 - DNA, 741 bp, synthetic construct
  misc_feature 1..741: note = Description of Artificial Sequence: Synthetic coding sequence
  source 1..741: mol_type = other DNA
atgattaaaaagtttgataaaaaggatgaggagtcaggttcgggcagtaatcctttccagcatttggaaaagtctgccgtcctgcaggaagcacgaatcttcaacgagactcctattaatcccagacggtgtctccatatattgacgaaaatcctatacctcttgaatcagggggagcattttggaaccacggaggccacagaggcattcttcgcgatgactagactatttcagagcaatgatcaaactctgagacggatgtgctacctgaccattaaagaaatggccaccattagcgaggatgtcattatcgtgacttcgtccctaacgaaggacatgacaggcaaagaggatgtgtacagaggaccagctattagagccctgtgtaggatcacggacggtacaatgctgcaggccatcgaacgctatatgaaacaggcgatcgttgacaaggtctcttccgtttcatcaagcgcgcttgtaagtagcctgcacatgatgaagatcagttacgatgttgtgaaaagatggatcaacgaagctcaggaggccgcgtcttctgacaatattatggtgcagtaccatgccctgggagtgttgtatcatctgcggaagaacgaccgtctcgctgtgagcaaaatgctgaacaaatttactaagagtgggctaaagtcacagtttgcttactgcatgttgatcagaattgccagtaggctcctcaaggaaacagaggacgggtag

SEQ ID NO: 112524 - DNA, 1080 bp, synthetic construct
  misc_feature 1..1080: note = Description of Artificial Sequence: Synthetic coding sequence
  source 1..1080: mol_type = other DNA
atgtattttaaaagggctgcacgcgccttccccgtgctgctcaccggagcaggcaaaactacactgctcaactacattttgaccgagcagcattctaaaagagtcgcagtcatcctgaatgagttcggagaagggtcggctcttgaaaagtccctggccgtatcgcaaggcggcgagctgtacgaggagtggttagagcttaggaacggttgtctgtgctgcagcgttaaagatagcggcttgcgggctattgagaatctcatgcagaaaaaagggaagttcgattatattttacttgagacaacgggattggccgaccctggggctgtggcgtccatgttctgggtggacgccgagctgggctccgacatttacctagatggcatcattacaattgttgattcaaaatatgggcttaaacacttaacagaagagaagccagatggtttaattaatgaagctacccggcaggtggcgctggcggatgcaatcctgataaataagacagatctggtccccgaagaggacgtcaagaagctgagaaccacaatccggagcatcaatggactggggcagatcctggagacccagagatcccgtgttgacttgtcgaacgtgctagacctgcacgccttcgactctctgagtggcatctctctgcagaaaaaactgcagcacgtgccaggaacccagccacaccttgatcagtccatcgtcactataacctttgaagttcccggtaatgcaaaggaagaacacctgaacatgtttatacagaacctgctgtgggagaagaatgtacgtaacaaggacaaccattgtatggaggtgatccggttaaaaggcctggtgagcatcaaggacaagtctcagcaggtgatcgtgcaaggtgtccacgagctctacgatcttgaagaaacgcccgtgtcttggaaggatgacacagaacggactaataggttggttcttctgggtcgtaatctagacaaggacatactgaagcaactgtttatcgcgactgtcacggaaactgaaaagcaatggactacaaggtttcaggaagatcaagtgtgtacatag

SEQ ID NO: 112525 - DNA, 1188 bp, synthetic construct
  misc_feature 1..1188: note = Description of Artificial Sequence: Synthetic coding sequence
  source 1..1188: mol_type = other DNA
atgctgccagctgtgggcagcgctgatgaggaggaagaccctgcagaggaagactgccccgagttagtcccgatagagacaacacaaagcgaggaagaggaaaagtccggattgggcgctaagattcccgtcacaattatcacgggttatctgggggcaggtaaaaccacacttttaaactatatcctcactgaacaacactccaagcgagttgcagtgattctgaacgaatttggagaaggttctgctctcgaaaagtcgttagctgtttcccaagggggggagctgtatgaggagtggctggaactgaggaatggctgtctgtgctgcagtgtcaaggactcgggtctgagggccatcgagaacctgatgcagaagaaaggtaaatttgactacatcctgctggagactacgggcttagccgatccgggcgccgtagcttccatgttctgggtggacgccgagctgggtagtgatatttacctcgatggaataattacaatcgtggattcaaagtatgggctgaagcacttgaccgaggagaaaccagatggactgatcaacgaagcgactaggcaggttgctctggcggacgctattctgataaacaaaacagatctcgtgcccgaggaagacgtgaaaaaacttcgcactacaatccgatcaattaacgggcttggacagattctagaaacacagaggagtagggtcgacttatctaatgtgttagacctgcatgctttcgattcgctttccggtatctctctgcaaaaaaaattgcagcacgtgcccgggacccagcctcatctggatcagagtatcgttacaataaccttcgaagtgccaggtaatgccaaagaggagcatctcaacatgttcatccagaaccttctttgggaaaaaaacgtgagaaataaagataatcattgtatggaagtgatcagactgaaaggcctggtgtctattaaagacaagtctcaacaagttattgttcaaggagttcatgagctctacgacttggaagaaacgcctgtttcctggaaggatgacacagaaaggaccaaccggttggtcctgctgggcagaaacctggacaaggacattttgaagcagctgttcattgctacagtaactgagactgagaaacagtggacgacacgttttcaggaagaccaggtgtgtacttag

SEQ ID NO: 112526 - DNA, 543 bp, synthetic construct
  misc_feature 1..543: note = Description of Artificial Sequence: Synthetic coding sequence
  source 1..543: mol_type = other DNA
atgctgcctgccgtgggatcggcggacgaagaggaggatccggccgaggaagactgtcccgaactggtccctattgaaaccacccagtccgaagaagaagaaaaatcagggctcggcgccaaaataccagttacaatcattacagggtatctgggagccggtaagactacactcctcaactatattttgactgaacagcactccaaacgggtagccgttatacttaatgaatttggtgagggatccgcattggaaaagtccctcgcagtgtctcagggcggggaactctacgaagagtggctggagttgcgtaacggttgtttgtgctgcagcgttaaagactctggcttgcgagccatcgaaaatctgatgcagaagaagggcaagtttgattatattttactagagaccacaggtctggcagaccctggggcagtcgccagtatgttctgggtcgatgcagagctggggagcgacatttacctcgatggcatcatcaccattgtggacagtaagtacggattgaaggtgaagtaccactag

SEQ ID NO: 112527 - DNA, 1044 bp, synthetic construct
  misc_feature 1..1044: note = Description of Artificial Sequence: Synthetic coding sequence
  source 1..1044: mol_type = other DNA
atgctcccagccgtcgggtctgctgatgaagaagaagatcctgccgaagaagattgcccagagctggtgcctattgagacaacgcagagcgaagaagaagagaagtcaggactcggagcgaagatccctgtgactatcattaccggctatctgggggccggaaagaccactctgttaaattacatcttgacagagcaacactccaaacgagtggcagttatcctgaatgagttcggggaagggagtgccctcgaaaaatcactcgcagtcagtcagggtggagagctctatgaggaatggttggagttgagaaacggctgcctctgttgctctgtgaaggatagtgggttgcgggcaatcgaaaacctaatgcaaaagaaaggcaaatttgactacattctgttggaaaccactggcctggccgatccgggagccgtggcctctatgttttgggtcgacgctgaactcggcagtgacatctatctcgacgggattatcaccatcgtggattctaagtacggactgaagcacctgactgaggagaagcctgatggtctgatcaacgaggccactcgtagcatcaacggacttggacaaatacttgagacccagcgatcctcactgcaaaagaagttacagcatgttccgggcacgcagcctcacctggaccagagcattgtcacaataacatttgaggtgcccggtaacgccaaggaagagcacctgaacatgttcattcagaacctactttgggagaagaacgtgaggaataaggacaatcactgtatggaggttattagattgaaaggactcgtcagcattaaggataagagccagcaggtgatagtgcagggggttcacgaactgtatgatctcgaggaaaccccggtcagctggaaggatgacaccgaaagaactaaccggctggtactgctggggcggaacctggataaggatatcctgaagcagctttttatagccacagtgacagagacggagaaacagtggactacccgctttcaggaagatcaagtgtgcacgtag

SEQ ID NO: 112528 - DNA, 753 bp, synthetic construct
  misc_feature 1..753: note = Description of Artificial Sequence: Synthetic coding sequence
  source 1..753: mol_type = other DNA
atgttgccagcggttggcagcgccgatgaggaggaggaccccgctgaggaggactgtcctgagctagtgccaattgaaactacccagtcggaggaggaggagaagagtggcttgggcgcaaagatccccgtgaccattatcactggctacttgggcgccggcaagactacactgctaaattatatcctgacagagcagcacagcaaacgtgtcgctgtaatcctgaacgagttcggcgaaggttctgcgctagagaaaagcctggcggtaagtcaggggggcgaactctatgaggaatggctcgagctaaggaacggctgcctgtgttgcagcgtaaaagatagcgggcttagggctattgagaatctaatgcaaaagaagggcaagtttgactatattttgttagagacgacgggtctcgccgaccctggagcagtggctagcatgttttgggtggacgccgagttaggttccgacatctatctcgacgggatcattactatagtagactccaagtacggacttaagcacctaaccgaggaaaaacccgacggcttaatcaatgaggccacccggcaggtggcactggccgatgccatcttaattaataagacggatctggtacccgaagaggatgtaaagaaactacgtaccacaatacgctatgagatgataagtgttctgtcagcatacagatctatgctctatactcagaatatcttttattctgactgctgcccggtggaaacatag

SEQ ID NO: 112529 - DNA, 234 bp, synthetic construct
  misc_feature 1..234: note = Description of Artificial Sequence: Synthetic coding sequence
  source 1..234: mol_type = other DNA
atgtacttcaagcgtgcggcccgtgcttttccagtgctgctgaccggagcgggaaaaactactctgctgaactatattctcaccgagcagcatagtaagagggttgccgtgatccttaatgaattcggggaaggatcggcactggagaaaagtctggccgtctctcaggggggagaactgtatgaagagtggctggagctgcgcaacggttgcttatgttgtagtgtcaaatag

SEQ ID NO: 112530 - DNA, 342 bp, synthetic construct
  misc_feature 1..342: note = Description of Artificial Sequence: Synthetic coding sequence
  source 1..342: mol_type = other DNA
atgttgcctgccgttgggtccgccgatgaagaagaggatccagctgaagaagattgtccagaattggtcccgatcgaaaccacacaatccgaagaagaagaaaagtcagggttaggcgccaaaattcctgtgactataatcacaggttatctaggagctggcaaaacaactcttcttaactatatactgactgagcaacacagcaaacgggtggcggtcatccttaatgaatttggtgaggggtctgctctggagaagtcgttggcggtctcacagggcggagagctttatgaagaatggctggagctaagaaatggatgtctctgttgttcagttaaatag

SEQ ID NO: 112531 - DNA, 1131 bp, synthetic construct
  misc_feature 1..1131: note = Description of Artificial Sequence: Synthetic coding sequence
  source 1..1131: mol_type = other DNA
atgttgcctgcggtggggagtgcagacgaggaagaagacccagctgaggaggactgccctgagctggtccctatcgagacaactcagtcggaggaggaggaaaaaagtgggctcggggccaaaatacctgtcacaattatcacgggatacctgggggcaggcaaaaccacccttttgaattacattctcaccgaacaacacagcaagagagtggctgtcattctcaacgagttcggcgagggaagtgccctggaaaaatcattagcggtcagccagggtggtgagttatacgaagagtggctggaacttcggaacggatgcctctgttgctccgtcaaggatagcggactccgggcgatagaaaatctcatgcagaaaaagggaaaatttgattatatcctcttagagacaactgggttggctgacccgggagctgttgcgtctatgttctgggtggacgctgagctgggctccgacatatacctggacgggattataacaatcgtcgattccaagtatggcctgaagcacctgacggaggagaagccagatggcctcatcaacgaagccaccaggcaagtagccctggccgatgcaatcctgataaataagactgacctggtgccggaagaggacgtgaaaaagttacggactacaatccgcagcattaacgggctcgggcagatcctggagactcagaggtcatccctgcagaagaagcttcagcatgtccccggtacacagcctcacctggaccaatccatcgtcaccataacttttgaggtccctgggaatgcgaaagaagagcacctaaacatgtttatccagaatttactgtgggagaagaacgtgaggaacaaggataaccattgcatggaggtgataagacttaagggtctcgtcagtatcaaggacaaaagtcagcaggtgattgttcagggggtccacgagctgtacgacctggaggagacaccggtgagctggaaagacgacacggaacggacaaaccgcctagtgctgctgggaagaaatctggataaagacattctgaagcagctttttatagcaactgtgactgaaaccgaaaaacagtggaccacacgctttcaggaggaccaggtatgtacttag

SEQ ID NO: 112532 - DNA, 483 bp, synthetic construct
  misc_feature 1..483: note = Description of Artificial Sequence: Synthetic coding sequence
  source 1..483: mol_type = other DNA
atgctccccgcggtgggctcagctgacgaagaggaggatccggcggaggaggattgcccagaattggtaccaatcgagacaactcagtcggaagaggaggagaagtccggactaggtgcgaaaatccccgtcaccataatcaccgggtatctcggagcaggtaagactacgctgctaaattatattctgaccgagcaacactccaaaagggttgccgtgattctcaatgagttcggagaggggagcgccctggagaaatcacttgcagtctcccagggaggtgagctgtatgaggagtggctagagctcagaaatggctgcctgtgctgctcagttaaggatagtgggcttagggcaatcgaaaacctgatgcagaaaaaaggcaagttcgactacatcctgctggaaacgaccggcctggcagatcccggcattatcacaatcgtagactctaaatacggcctcaaggtgaagtatcactag

SEQ ID NO: 112533 - DNA, 441 bp, synthetic construct
  misc_feature 1..441: note = Description of Artificial Sequence: Synthetic coding sequence
  source 1..441: mol_type = other DNA
atgtattttaaacgtgccgcgcgggcctttccagtgctcttgaccggggcaggcaagaccaccttactcaactatattctgacagagcagcactccaagagagtcgcggtgatcctaaacgagttcggcgaaggatcagctcttgaaaagtccctggctgtcagccaggggggggagttgtacgaggagtggctggagctgagaaatgggtgtttgtgttgctccgtcaaggattccggcctgcgcgcgatcgagaacctgatgcagaagaaaggtaaattcgattacattttgttggagactacaggtctagccgacccaggagccgtagctagtatgttctgggtagatgccgaactcgggtccgatatatacctggacggcatcatcaccattgtggactcaaagtatgggttgaaggctaagaattggaccacatag

SEQ ID NO: 112534 - DNA, 1188 bp, synthetic construct
  misc_feature 1..1188: note = Description of Artificial Sequence: Synthetic coding sequence
  source 1..1188: mol_type = other DNA
atgttacccgccgtgggctccgctgatgaggaggaggaccccgccgaagaggattgccctgagttggtccccatggaaacaacccaatctgaggaagaagaaaaaagtggcctcggagctaaaatccctgttactatcattactggctacttgggcgctgggaagacaacccttctgaactacattttgacagaacagcactctaaacgtgtggcagtgattcttaatgagtttggagagggaagcgccttggaaaaatctctggccgtaagccagggcggtgagctgtatgaggagtggctggaattgcggaatggctgtttatgctgttcggtgaaggataatgggctccgcgctatagagaacctaatgcagaagaagggaaagtttgactatattctgctggagaccacgggactcgcagacccaggcgcggtggcttccatgttttgggtggacgctgaactaggaagtgatatatatttggacggtattattacaatcgtcgattcaaagtacggtctgaagcatttagccgaggagaagcccgacgggttaataaacgaagcaacacgacaggtggcactagcagacgcaatactgattaacaaaaccgatctcgtccccgaggaagacgtgaagaaactgagagcaactattcggagtataaacggcctgggacagatactcgaaactcaacggagcagagtggatctgtcaaatgtcctcgacctacacgccttcgacagcctgtccggaattagcctgcagaagaagctccagcacgtgccagggacccaaccccatctggatcagagtatcgtcactataaccttcgaggtgccaggcaacgctaaggaagagcaccttaacatgttcatccagaacttgctgtgggaaaagaacgtccggaataaagacaaccactgtatggaggtgatcagattaaagggattggtgtctatcaaagataagtcccagcaggtgattgtgcagggggttcatgaactgtacgatctcgaggaaacccccgtctcgtggaaagatgataccgagagaacgaaccgtttggtcctcttgggaaggaacttggataaagacattctaaaacagctctttatcgccaccgtaacagagaccgaaaaacagtggaccacacactttaaagaagatcaagtgtgcacttag

SEQ ID NO: 112535 - DNA, 543 bp, synthetic construct
  misc_feature 1..543: note = Description of Artificial Sequence: Synthetic coding sequence
  source 1..543: mol_type = other DNA
atgctgccagccgtggggtccgccgacgaggaggaggacccagcggaggaggattgccccgaattagtacctatggaaaccacccaatccgaggaggaggagaagtccggactgggcgctaagattcctgtcacgatcatcaccggatacctgggcgctgggaagacaactttgctgaactatatcttaacggagcagcattcgaagagagtggccgtaattctgaacgaattcggcgaaggtagtgctctggaaaagtccctggccgtatctcagggcggagagctctacgaggagtggttagagctaagaaacgggtgtctttgttgttctgtgaaggacaacgggctccgtgccattgagaatctgatgcagaaaaagggaaagtttgactacatactgcttgaaactaccggcttggccgacccaggagcggtcgccagcatgttttgggtcgatgccgaattgggaagcgacatttatcttgatggaatcattaccatagtggactctaagtatgggctgaaagtaaagtaccactag

SEQ ID NO: 112536 - DNA, 1131 bp, synthetic construct
  misc_feature 1..1131: note = Description of Artificial Sequence: Synthetic coding sequence
  source 1..1131: mol_type = other DNA
atgcttcctgcggtggggtcggccgacgaagaagaggatcccgccgaggaggactgcccagaactggtgcccatggaaacaacccagtctgaagaggaagaaaagtctgggctgggggcgaagattcctgtcaccattattaccgggtacctaggcgccggcaagaccaccctgctgaattacatattgacggagcagcactctaaaagggtcgccgttatcctcaatgagtttggggagggcagtgcactggaaaaatccctggcggttagccagggcggcgagctctacgaagagtggttagaactgcgaaatgggtgcctgtgttgctctgttaaggataacggactccgtgcaatagagaaccttatgcagaaaaaagggaagttcgactacattctcttagagactaccggactggccgatccaggagctgttgcctcgatgttctgggtcgacgcagaactcggctccgacatctatctggatggcattatcacgatagtggacagcaaatacgggctaaaacacttagccgaggagaagcctgacgggcttattaatgaagcaactcggcaggtggcactcgccgacgcaatcctcatcaataaaacggacctcgtcccagaagaggacgtgaaaaaattgcgagccactattcgctcaataaacggccttggacagatcctggagacacagcgtagttccctccaaaagaagctacaacacgtacccgggactcagcctcatctcgaccagagtatcgtaacaataacatttgaagttcccggcaacgcaaaggaagagcacctgaacatgtttatacagaacctgctgtgggagaaaaacgttcgcaacaaagataatcattgcatggaggtgattcgccttaaggggctagtgagtattaaagataagtcgcagcaggtaatcgttcagggcgtgcacgaactctacgacctcgaagagactcctgtgtcttggaaagatgacaccgagcggaccaacagactcgtcctcctgggccggaatctagacaaagatatcctgaagcagctatttatagccactgtgaccgagaccgaaaagcagtggacaacccactttaaagaagatcaggtgtgtacttag

SEQ ID NO: 112537 - DNA, 1080 bp, synthetic construct
  misc_feature 1..1080: note = Description of Artificial Sequence: Synthetic coding sequence
  source 1..1080: mol_type = other DNA
atgtacttcaaaagagccgcaagggcgttcccagtgctcctgactggagcgggcaaaacaacactgctgaactatattctgaccgagcagcattccaaacgggtggccgtcatcctcaacgagttcggagaaggcagcgcactcgagaagtcactcgcagtgtctcagggaggcgaactgtatgaagagtggttggagctaagaaacggatgcttgtgctgttctgtcaaggataatggcttacgcgctatcgaaaacctcatgcagaaaaaggggaaattcgattatattctcctagagaccaccggtctcgccgaccccggagccgttgcgagcatgttttgggttgatgccgagctcgggagtgacatttatctcgacggcattataactatcgtggactctaagtatgggcttaaacatctggcagaggagaagcccgacgggctcattaacgaggctacccgacaggtcgccctcgcagacgccattctcattaacaaaaccgatctcgtccccgaagaggatgtaaagaaactccgcgccactattaggtcaatcaacgggctcggtcaaattcttgaaactcaacggtcccgagtcgatttgtccaacgtactcgacctacatgccttcgactctctctccggtataagtctccaaaaaaagctccagcacgttcctggcacccaaccgcatctcgatcaatcaatcgtaactatcactttcgaagtgcctgggaatgccaaggaggaacatctcaacatgttcatccagaaccttctgtgggaaaaaaatgtgaggaataaagacaatcattgcatggaggtgattagattgaagggacttgtctccattaaggataagtcgcaacaggtgattgtgcagggggtccacgagctttacgatctggaggagactccggtgtcttggaaggatgatactgaacggactaaccgccttgtccttctcggacgcaatttggataaggacatcctgaagcagctgttcattgccacggtgacagagactgaaaaacagtggactacccactttaaggaagaccaggtgtgtacgtag

SEQ ID NO: 112538 - DNA, 483 bp, synthetic construct
  misc_feature 1..483: note = Description of Artificial Sequence: Synthetic coding sequence
  source 1..483: mol_type = other DNA
atgctgcccgctgtcggatccgccgatgaggaagaagacccagcggaggaagactgcccggaactagtgcctatggagaccactcagtccgaagaggaggaaaaaagtgggctgggagccaagatcccagttactataatcactggttatctgggcgccggaaaaaccaccttactgaattatatactgactgaacagcattctaagcgggtagccgttatcctcaatgaatttggagagggctccgctctcgaaaagagtctagcagttagtcagggtggagagttgtacgaagaatggcttgagctacgcaatgggtgcctgtgttgctccgtcaaggataacgggcttcgggccatagagaacctgatgcagaagaagggtaagttcgattacatcctgctggaaaccacaggccttgcggatcctggaatcatcacgatagtagattctaagtatggccttaaggttaagtaccactag

SEQ ID NO: 112539 - DNA, 1188 bp, synthetic construct
  misc_feature 1..1188: note = Description of Artificial Sequence: Synthetic coding sequence
  source 1..1188: mol_type = other DNA
atgcttcctgcagtcggctctgtggacgaagaagaggacccagcagaagaggactgtccagaattggtacccatcgagacgacacaaagcgaagaggaggaaaaaagcgggctcggcgcaaagatacctgtgaccatcattacagggtacctgggagcgggcaagaccacactgcttaactatatcctgacagagcaacattcaaagagggtggccgtgattttaaatgagtctggcgagggctctgctctggaaaagtctctggcagtgtcacaggggggcgagctgtacgaagaatggctggaactgaggaacgggtgtctctgctgttccgtcaaagacaacggcctgcgcgcaatcgagaacctgatgcagaagaaaggcaagtttgacgatattctgctggaaacaaccggactggccgatccaggagccgtcgccagtatgttctgggttgacgccgagcttggatctgacatctatcttgatggcattataactattgtggatagtaagtacgggctgaaacacctgaccgaggaaaagcccgacggtcttattaatgaggcaacaagacaggtggcactagcggatataatcctcatcaataagactgaccttgtacccgaggaggacgtcaagaaattgcgcacgactatccgctctattaatggcctcggacagatacttgaaacacagagaagtcgggttgatctgtccaacgtattggacctgcacgccttcgactcgctgtcaggcatcagtctgcagaagaagctgcagcacgtgccaggtacacagccacatctggatcagtctatcgtaacgatcaccttcgaagtccccggcaatgcaaaagaagaacatcttaatatgtttatccagaacctgctgtgggaaaaaaatgtgcgcaataaggacaaccactgtatggaagtgattaggctgaaggggttggtctcaatcaaagacaagtcccagcaggtgattgttcagggcgtgcacgagctatacgatctggaggagacccctgtgagctggaaggatgatacagaacggaccaaccggctggtcctgattggacgcaacttagacaaggacatcctgaaacagttgttcatagccacagtgacggaaactgagaagcaatggacaacccactttaaagaagaccaggtgtgcacatag

SEQ ID NO: 112540 - DNA, 258 bp, synthetic construct
  misc_feature 1..258: note = Description of Artificial Sequence: Synthetic coding sequence
  source 1..258: mol_type = other DNA
atggaagtaatacgcctgaaaggcttggtgtctataaaagataagagccaacaggtcatagtccagggagtgcatgagctctacgacctagaggaaaccccagtctcctggaaggacgacactgaaagaaccaacaggctcgtacttatcggccgtaatttagataaagacattttaaaacagctcttcatcgctaccgtgacagaaacagagaaacagtggaccacccacttcaaagaggatcaggtgtgtacatag

SEQ ID NO: 112541 - DNA, 258 bp, synthetic construct
  misc_feature 1..258: note = Description of Artificial Sequence: Synthetic coding sequence
  source 1..258: mol_type = other DNA
atggaggtcattcgcctgaaaggccttgtctccattaaggataaaagtcagcaggtgattgttcagggagtgcacgagctctacgatctcgaagaaaccccggtttcttggaaagatgatactgaacgtacgaatcggctggtcttaattgggcggaatctcgataaagacatcctcaaacagctgttcatcgccacagtgactgaaaccgaaaagcagtggacaacccacttcaaggaagaccaggtatgtacctag

SEQ ID NO: 112542 - DNA, 132 bp, synthetic construct
  misc_feature 1..132: note = Description of Artificial Sequence: Synthetic coding sequence
  source 1..132: mol_type = other DNA
atgtttattcagaacctgctctgggagaagaacgtgcggaacaaagacaatcattgcatggaggtcatcagactgaaggtccagttcactgttgccgatttttggactaagtcatttagttggctgttgtag

SEQ ID NO: 112543 - DNA, 1128 bp, synthetic construct
  misc_feature 1..1128: note = Description of Artificial Sequence: Synthetic coding sequence
  source 1..1128: mol_type = other DNA
atgctccctgctgtcgggtctgtagacgaagaagaggatcctgctgaggaagactgcccagagctggtccccatcgaaaccacgcagtctgaggaggaagagaagtctggtctaggtgccaagattcctgtgacaatcatcaccggatatctcggcgctggaaaaactactcttctgaattatatactcacagagcaacacagcaaacgcgtggctgtgatcctgaacgagtccggcgagggcagtgcattagagaagagcttagccgtctctcagggcggtgaattatacgaagagtggcttgagctgcgaaacggctgtttgtgttgcagcgtgaaggataacggtctcagggctatcgagaatctaatgcagaagaagggcaagtttgatgatatccttctcgagaccaccggcttggcggacccaggtattattacaattgtggactctaagtacgggctgaaacacttgaccgaggagaagcctgacggactgattaatgaagctaccagacaggtggcccttgcagatataatcctgatcaataaaacagatctggtgcctgaagaggacgtaaagaaactacggacaacaattagatcaatcaacggccttggacaaatcttagagactcaacggtctagagtcgatctatcgaatgttcttgatttgcatgccttcgactccttatcagggatttccttacaaaaaaagttacagcacgtgcccggaacacaacctcacctggatcagtcaattgtcactataacatttgaagtccccggaaatgcaaaggaagagcacctcaacatgttcatccaaaacctcctgtgggaaaagaacgtgcgcaataaagataaccattgcatggaggtgataaggctgaagggccttgtatccataaaggacaaatctcagcaagtgatagtgcaaggagtccatgaattgtacgacctcgaggaaaccccagtttcatggaaggatgacaccgaacggacgaatcgacttgtgctgatagggcggaacctggataaggatatactcaaacagctgtttattgccacagttactgagacagaaaagcagtggacgacacattttaaggaggaccaggtctgcacctag

SEQ ID NO: 112544 - DNA, 1080 bp, synthetic construct
  misc_feature 1..1080: note = Description of Artificial Sequence: Synthetic coding sequence
  source 1..1080: mol_type = other DNA
atgtacttcaagagggcccctagagcctttcccgtattgctaacgggcgctgggaagaccactctgctcaattatatactaacagaacagcattccaaaagggtcgccgtgattctcaacgagagtggagagggctccgctttggaaaaatccctggcggttagtcaaggcggcgagctgtacgaggaatggctcgagcttcgcaacggctgtctgtgttgctccgtgaaagataacggcctacgggcaatagagaatctcatgcagaagaagggcaaattcgatgatatcctgttggaaacaaccggactggctgaccctggcgccgttgcaagtatgttctgggtcgacgccgagctcggatccgacatctatctcgacggtatcataacgatcgtggacagcaaatacgggctgaagcaccttacagaagaaaaacctgacggcttgatcaacgaggccactaggcaggtcgcactggccgacatcatactcattaacaaaactgacttggtccctgaggaggatgtaaaaaagctgagaacaactattcgcagcataaatggccttgggcaaatcctcgaaactcaaagatcccgcgttgacctgtcaaacgtccttgatctgcacgcttttgattcactgagcgggatcagcctgcagaagaagctccagcacgtgcctggaacacagccgcatttagatcaatcgatagtgacaattaccttcgaggtccctggaaatgccaaggaggagcatttaaacatgttcatacaaaacctactatgggaaaaaaatgtgagaaacaaggacaatcactgcatggaggtgatccggttgaaggggttggtgtctatcaaggataagtctcagcaggtgatagtccaaggcgtgcacgaattgtatgacctggaggagacccccgtatcttggaaggacgacaccgaaaggacaaataggctggtgctgatcggcaggaatctggataaggatatccttaagcagctctttatcgctaccgttactgagactgagaaacagtggaccacccattttaaagaggaccaagtgtgcacgtag

SEQ ID NO: 112545 - DNA, 234 bp, synthetic construct
  misc_feature 1..234: note = Description of Artificial Sequence: Synthetic coding sequence
  source 1..234: mol_type = other DNA
atgtattttaagcgcgctccccgcgcctttccagtgctcctgacgggcgccggaaaaacaacgctgcttaactatatcctgacagagcagcactcaaaaagagtagcagttattctgaacgaatccggtgaagggtccgcactggaaaagtctctggcagtgagtcaggggggagaactgtatgaagagtggctggaactcagaaatggttgcctgtgctgcagcgtgaaatag

SEQ ID NO: 112546 - DNA, 1131 bp, synthetic construct
  misc_feature 1..1131: note = Description of Artificial Sequence: Synthetic coding sequence
  source 1..1131: mol_type = other DNA
atgttgccggctgtgggatcagttgatgaagaagaagaccccgctgaggaggattgtcccgaactggtcccaatagaaactacccaaagtgaggaagaggagaagtccgggctcggtgctaagatccctgtgacaatcatcaccggctatttgggcgctgggaaaacaacgctgctaaactatattctgactgagcagcattcaaaaagagtggctgttattttgaatgagtcaggtgaggggtcagctctggaaaaatccctcgccgtatcacaggggggggagctgtacgaagaatggcttgagctaaggaacgggtgtctgtgttgctcagtgaaggataatgggctgcgtgccattgaaaacctgatgcagaagaaaggaaagtttgatgacattttgctggaaacaactggactcgccgatcccggagccgtggcatctatgttctgggtagacgctgagttggggtctgacatatacttagacggcatcatcaccatcgtggactccaagtacggcttgaaacatctcacagaggaaaaaccggacggtctcatcaacgaagctactcgccaagtggctctagctgacattatcctcattaacaaaaccgatctcgtgccagaggaggatgtcaaaaagcttcggacaaccataaggtctatcaatggcctgggacaaatcctggaaactcaaagaagcagcttgcaaaagaagctccagcacgtgccgggtacccagccacacctggaccagtcaatcgtgacaataacgttcgaggtgcccggaaacgccaaagaggaacatctgaatatgtttatccagaatttactttgggagaaaaatgtgaggaacaaggacaaccactgcatggaggtaataagactaaaaggactggtgtctatcaaagacaagtcccagcaagtgattgtgcagggcgttcacgaactctacgatttggaggagactcccgtttcgtggaaagacgacaccgagcggaccaataggttagtactcattggcagaaatctggacaaggatatacttaaacaactgtttattgccactgtgacagagactgagaaacagtggaccacacacttcaaggaagaccaggtttgcacctag

SEQ ID NO: 112547 - DNA, 225 bp, synthetic construct
  misc_feature 1..225: note = Description of Artificial Sequence: Synthetic coding sequence
  source 1..225: mol_type = other DNA
atgtacttcaaacgtgctccaagggctttccccgtgctgctaacgggcgccggcaaaacaaccctgctgaactacattctcacagagcagcactccaagagggtagcggtgattctcaacgaaagcggcgaggggagtgcccttgagaagagccttgctgttagccagggaggagagctgtatgaggaatggctcgagctgcgcaatgggtgtctctgctgttag

SEQ ID NO: 112548 - DNA, 543 bp, synthetic construct
  misc_feature 1..543: note = Description of Artificial Sequence: Synthetic coding sequence
  source 1..543: mol_type = other DNA
atgttacccgccgtaggaagcgtcgatgaggaagaagaccccgccgaagaagactgccctgagctggtgcctattgaaactacccagtcagaggaggaagaaaaaagcggccttggagctaagatcccagttaccattattactggatatctgggcgctggcaagactaccctgttaaattatatcctgactgagcagcatagcaagagggtggccgtgatcttaaacgagagtggtgagggctcggccctggagaagtccctggcagtatctcagggtggagaactttatgaagaatggctagaactgaggaatggctgcttgtgctgctccgtgaaggacaacggcctgagggctattgagaacctgatgcagaagaaggggaagttcgatgacattctgttggagaccacgggcttggcggacccaggagccgtggcctctatgttctgggtcgatgccgagctgggaagtgatatttacttagatgggatcataaccatcgttgactcaaaatacggactgaaggtgaagtatcactag

SEQ ID NO: 112549 - DNA, 1044 bp, synthetic construct
  misc_feature 1..1044: note = Description of Artificial Sequence: Synthetic coding sequence
  source 1..1044: mol_type = other DNA
atgttgcctgcagtcggaagcgtggatgaagaagaagatcctgccgaggaggattgccccgagctggtccctattgaaaccacccaaagtgaagaagaggagaaatccggcttgggggccaaaattcccgtaaccattattacaggatacctcggcgctggaaagacgaccctgctgaattacatcctcactgaacaacatagcaaaagggtcgccgttatcctcaacgaaagcggcgaaggctctgctttggaaaagtccctggcagtgagccagggtggagaattgtacgaggagtggcttgagttgagaaatggatgcctttgctgctctgtgaaggacaatggactgcgggccattgagaacctgatgcaaaagaaagggaagtttgatgatatcctgctcgaaactaccggcttggcagatcctggagcagtggcatcgatgttttgggtggatgcagaactcggcagtgatatctaccttgatggtataattactatcgtggacagtaaatacgggctgaagcatctcacagaggagaagcccgacggcctgattaacgaagcgacgcggtcaattaatggcctagggcagatcctggagacgcagcgaagcagccttcagaagaaacttcagcatgtgcctggcacacagccccatttggatcagtccatagtcaccatcacattcgaagttcctgggaatgccaaagaggagcacctgaatatgttcatccagaatctgctgtgggagaagaatgtccgcaataaagacaatcactgtatggaagtcatccgcctgaaggggctggtctcaataaaagacaagagtcagcaggtcattgtgcaaggcgtgcacgagctgtacgacctggaagagaccccagtgtcttggaaagatgatactgaaagaacaaaccggctggtgttaatcggaaggaaccttgataaggacattcttaagcagctctttatcgcaaccgtgactgaaactgagaaacagtggaccacacactttaaagaggaccaagtgtgtacctag

SEQ ID NO: 112550 - DNA, 987 bp, synthetic construct
  misc_feature 1..987: note = Description of Artificial Sequence: Synthetic coding sequence
  source 1..987: mol_type = other DNA
atgcttggttctagggccgccggctttgcgagaggactgcgcgcagtcgcactggcctggctgcctggttggcggggtcgatcgttcgcccttgcacgcgccgcaggcgctcctcatggcggcgaccttcagccaccagcctgccccgagccgcgggggcgacagctgtcccttagcgccgcagccgtggtggacagcgctcctcgcccccttcagccttacttgcggctcatgaggctggacaagccgattggcacttggttgttatacttaccatgtacctggtcgattggcttggcggcagagcccggatgtttcccagactggtacatgctaagtctcttcgggaccggagccattctgatgaggggcgctggctgtactattaatgacatgtgggatcaagactacgacaaaaaagttactaggacagcgaacagacccattgctgccggtgacatctcgacctttcagagttttgtgtttttaggcggacagttaactcttgccttgggggttttgctttgcctgaactattatagcattgctctaggtgccggctctctcttactggttatcacatacccactgatgaaacgcatcagctattggcctcagctggctctgggcctcacgttcaattggggggcccttctgggctggagcgctatcaagggaagttgcgacccatccgtgtgtcttcctctttatttctctggcgtgatgtggacgctgatctacgacaccatttatgcccatcaggacaaaagggacgacgtcctgattgggcttaagagcacagcattgagattcggagagaataccaagccctggctttcaggtttttcggtcgcgatgctgggggccctgtctctggtgggggttaattccgggcagacagcgccttactacgcagcgcttggggccgtgggcgcccatttgacccaccagaaatggggactggagattctgcccaggctggtgtag

SEQ ID NO: 112551 - DNA, 1266 bp, synthetic construct
  misc_feature 1..1266: note = Description of Artificial Sequence: Synthetic coding sequence
  source 1..1266: mol_type = other DNA
atgacccccatttcccaggtccgcatgaggaaggggagtgctcataccgctgcgcagcccggacgattgggcctacaccccgctggagcgacagcacatgcatgcagagggatgacatcaattcgggctcgccccggactcactagcgccatgctcggaagtcgcgccgcaggtttcgcccgggggctccgggccgtggctcttgcctggctgcctggctggcgaggacgatcatttgccctggccagagccgcaggcgccccccatggaggagacctgcagcccccggcctgccctgaaccacggggtcgacaactatcactatccgctgctgctgtggtggattccgcccccaggcctttgcagccctacttacggctgatgcgtctcgataagcccatagggacttggctgctgtatctcccctgtacttggtccatcgggttggccgcagagcctgggtgcttccccgactggtatatgttgtcattgttcggaaccggcgctattctgatgaggggggcaggctgtacgatcaatgacatgtgggaccaggattacgacaagaaggttactcggaccgctaatagaccgattgcagccggagatatctctactttccaatcctttgtcttcctcggaggccagctcactctggccctgggggtgcttctctgcctaaattattatagcatcgcactgggggccggatctctcctacttgtaatcacatacccactgatgaaacggatttcctattggccgcaactcgccttgggtctgacattcaattggggggcgctgttaggatggtccgcaatcaagggatcctgcgaccccagcgtatgtctccccctgtacttttcgggcgtgatgtggacactgatttatgataccatttacgcgcatcaagataagcgcgatgatgtgctgattggactgaaatcaacagccctgaggtttggcgagaacactaagccctggctgtctggtttctccgtcgcgatgctgggagcactgtccttggtaggcgtgaatagcggtcagaccgctccatattatgctgccttgggcgccgtgggggctcatctgacacatcagatttacactctcgatattcacaggcccgaagattgctggaacaagtttatatctaatcgaacacttggtctgatcgttttcctgggaatagttctaggcaatctctggaaggagaaaaagaccgacaagactaaaaaaggaatcgagaataagattgagaattag

SEQ ID NO: 112552 - DNA, 1155 bp, synthetic construct
  misc_feature 1..1155: note = Description of Artificial Sequence: Synthetic coding sequence
  source 1..1155: mol_type = other DNA
atgacctcgatcagggccaggccaggcttgacaagcgcaatgcttggctcacgcgcagccggctttgccaggggtctccgggccgtagcgctcgcttggcttccaggctggcgaggtagatctttcgctttggcacgagccgccggagctccccacgggggagacttgcagccgcctgcctgccctgaacctagggggcggcaactttccctgtcagccgcagcggtggtcgattcagcgccacggccacttcagccgtacctgagactgatgcgcctggacaagcccatcgggacatggctgctgtatttgccatgcacatggtccattggcctcgcagcagagcctgggtgcttccctgactggtacatgctcagtctgttcggaacaggggccatactgatgcgcggggccggctgcaccataaacgatatgtgggaccaagactacgataaaaaagtgactcggacggctaataggcccatagccgccggagatatttccacctttcaaagctttgtgtttctcggcggacagctgaccctcgccttgggagttctgttgtgtcttaactactactccatcgcactaggggctggttccctcctgctcgtgataacatacccgctaatgaagaggatctcatactggccgcagctggctcttggcctgacctttaactggggggcgctattaggctggagcgctatcaaaggcagttgcgatccgtcagtgtgcctgccactttacttctctggagtcatgtggactctgatctacgataccatctacgcccatcaggataaacgggacgatgtgttaattggtctgaagtctactgctcttcgtttcggagagaataccaaaccgtggctcagcggctttagcgtagctatgctgggcgccctaagcctggtgggggtgaactccgggcagaccgccccatattatgccgccctgggcgccgtcggtgctcatctgactcaccagatatacacattggatatccatagacccgaggactgttggaataagtttatcagtaaccggacccttggcctgatcgtcttcctcggtatcgttttaggtaacctgtggaaggagaaaaagacggataaaacaaaaaaaggaattgaaaataaaattgaaaattag

SEQ ID NO: 112553 - DNA, 798 bp, synthetic construct
  misc_feature 1..798: note = Description of Artificial Sequence: Synthetic coding sequence
  source 1..798: mol_type = other DNA
atggccacactgcttcggccggtattacggcgcctttgcggactccccggtctgcaacggcccgccgcggaaatgcccctgagggctcgcagtgatggcgccggaccattatacagccaccatctgcccacttcacctctccagaagggcctgctggcagcgggaagtgctgccatggcactgtataatccataccgtcatgatatggtcgccgtcctcggcgagactaccgggcaccggactcttaaggttttgcgggatcaaatgaggcgggaccccgagggcgcccagatcctacaggaacgcccccggatctcgactagtacattggacctgggaaaactacagagtctgcccgagggtagtctcggtagggaatacctgcggtttctggacgtgaaccgtgtgagtcccgatacaagggcacccaccaggttcgtagatgacgaggaactcgcctatgttatccagcgttatcgcgaagtgcatgacatgctgcatacactcttgggtatgccaacaaacattctgggggagatcgttgtgaaatggtttgaggctgttcagacagggctgcccatgtgcatcctgggcgcctttttcggtcccatccggctcggcgcccagtccctgcaggtcctcgtgtccgagctgatcccatgggctgttcagaatggccgccgcgcaccatgcgtactgaacctgtattatgagaggcgctgggagcaatcactgagagccttaagggaggagctgggaataacggcacctcctatgcatgttcagggtctggcctag

SEQ ID NO: 112554 - DNA, 456 bp, synthetic construct
  misc_feature 1..456: note = Description of Artificial Sequence: Synthetic coding sequence
  source 1..456: mol_type = other DNA
atggccactctgctgaggcctgtgttacggaggctttgcggacttccagggttgcagcgaccagccgcggagatgccgcttcgggcccgatccgacggagctgggccactgtactcacatcacctgcctacatcaccattacagaaaggactcttggcagctgggtctgccgcaatggccctgtataacccataccgccacgatatggtggctgtgcttggcgaaaccaccggtcacagaacactgaaggtcctgcgtgatcagatgagaagagatccggagggagcccaaatactccaggaaaggccccgcatcagcacaagtacattagatttgggcaaacttcagtccctgcccgagggctctctagggagagagtatttacgatttctggatgtcaatgtaagcttccagctgctctgtatttggcagtcccccgaccgtactgaagagtag

SEQ ID NO: 112555 - DNA, 654 bp, synthetic construct
  misc_feature 1..654: note = Description of Artificial Sequence: Synthetic coding sequence
  source 1..654: mol_type = other DNA
atgtcctgcgccggagctgcggcggccccccggctctggagacttcggcccggcgcaaggcggtccttgagtgcatatggccgacgcacctccgtgagatttcgctcctccgggatgacacttgacaatatcagccgcgccgcggtcgatcggatcattcgggtagaccatgcgggcgaatatggggcaaatcgcatttacgctgggcagatggccgtgttgggcaggactagcgtagggccagtgatccagaagatgtgggatcaggaaaaggaccatcttaagaaatttaatgaactaatggtgacatttagggtgcgacccacagtgctgatgccactgtggaatgtgctcggcttcgccctaggagccggtactgcccttctggggaaagagggggcgatggcctgtacagtggctgtagaggaatctattgcgcaccattacaataatcagatccggacgctcatggaagaagaccccgagaagtacgaggagctgctccaactgataaagaaattccgggacgaggagttggaacatcatgacattgggcttgaccacgacgccgagctggcccctgcatacgccgtgctgaaatcaatcatacaggccggttgcagggtagcaatctacctcagcgaaaggctctag

SEQ ID NO: 112556 - DNA, 540 bp, synthetic construct
  misc_feature 1..540: note = Description of Artificial Sequence: Synthetic coding sequence
  source 1..540: mol_type = other DNA
atgactctggataatatcagcagagccgccgtggatagaattatccgagtggaccacgctggggagtacggcgcgaaccgcatatatgccggacaaatggccgtgctcggccgcacgtcggtcggacctgtgattcagaagatgtgggatcaagaaaaggaccatcttaagaagtttaatgagctgatggtcacatttcgggtccggcccaccgtcttaatgcctctttggaacgttctcggctttgcgctgggcgctggaaccgcgctattgggaaaagagggtgcaatggcctgcaccgttgcggttgaagagtcaatcgctcaccattacaataatcagattcggacgcttatggaggaggaccccgagaaatatgaagagttactgcagctcatcaaaaagttcagagacgaggagctggagcatcacgatataggcctcgatcacgatgcagagctagcacctgcgtatgcagttcttaaatcaatcattcaagcgggctgtcgggtggccatctacctttccgagcgactgtag

SEQ ID NO: 112557 - DNA, 957 bp, synthetic construct
  misc_feature 1..957: note = Description of Artificial Sequence: Synthetic coding sequence
  source 1..957: mol_type = other DNA
atggccgccgccgcagtatccggagccctgggtcgcgccggatggcgtctgctacagctgaggtgtctacccgttgctaggtgccggcaggccttagttcccagagcctttcacgcaagtgccgtgggactgagatcctcggacgagcagaaacagcagccccccaactctttctcacagcagcactccgaaacacagggggctgaaaagcccgaccctgaatcgtcacactcccccccgcgatatacagatcaaggaggagaagaagaggaggactatgagagtgaagagcagctccaacacagaatcttgaccgccgcactggaatttgttcccgcccatggctggaccgcggaggctatcgctgaaggtgcccagtccctcggcctctcctcagctgcggccagcatgtttggaaaggatgggtctgagctcattctccactttgtgacacaatgcaatactcggttaactcgagtgttggaggaagaacaaaaacttgtgcagctggggcaggctgaaaaacgcaagactgaccagttcctgcgcgatgcggtggaaacacggctcaggatgttgattccttacatcgagcactggccacgcgcactcagtattctcatgctgccccacaatattccaagttcactgagcctcctcacgagtatggtcgacgacatgtggcattacgcaggtgaccaatccacagactttaactggtacacaagacgtgcaatgctcgccgctatttacaacactaccgaactcgtcatgatgcaggatagtagccccgacttcgaggacacgtggcgctttttagagaatcgagtgaatgatgcgatgaatatgggtcacactgcgaagcaggtgaagtccacaggagaagctttagtgcagggccttatgggggccgcggtcactctaaagaatttgacgggtctgaaccagaggagatag

SEQ ID NO: 112558 - DNA, 1743 bp, synthetic construct
  misc_feature 1..1743: note = Description of Artificial Sequence: Synthetic coding sequence
  source 1..1743: mol_type = other DNA
atgttcgctgggttacaggatctcggtgtggctaatggcgaggacttaaaggagacgctaacaaattgcacagaaccactaaaagcaattgagcaatttcaaaccgagaatggcgtattactgccgagtctacagtcagccttacccttcctggacctgcacgggacacccaggctcgagtttcaccaatctgtgtttgacgagctgagagataagttgcttgagcgggttagcgcgatcgcctcagaggggaaggctgaagaacggtataaaaagttggaggatctactcgaaaaatcattttctttggtcaagatgcccagcctgcagcccgttgtgatgtgcgtcatgaaacatctgcccaaagtgccagaaaaaaaattgaaactggtgatggctgacaaagagttataccgggcctgcgccgtggaagtgaaacgccaaatttggcaggataatcaagcgctcttcggtgacgaagtctctccccttttgaagcagtatatccttgagaaggagagcgctcttttcagcaccgagcttagcgtcctccataactttttcagcccttctccaaaaacccggaggcagggtgaagtagttcagcgcttgacccggatggtcggtaaaaacgtcaagctatatgacatggtgctgcaatttctgcgtaccctgtttctgcgcacaagaaacgtgcattactgcactctgcgggccgaattgttgatgtctctgcacgatttagatgtaggtgagatttgcactgtcgacccctgccacaagttcacctggtgtctggatgcatgtatccgggaacgcttcgtagattctaaacgagctagagaactccaaggttttctcgatggcgtcaagaagggccaggagcaggtgttaggagatctatcaatgatactgtgcgatccttttgccattaacactttggcattaagcactgtaaggcatctacaagagctggtgggtcaggaaactttgccccgtgatagcccagacctgctgctcctgctgcgccttctggcactgggccagggtgcatgggacatgatcgacagccaagtgtttaaagagcccaagatggaagtggaactgattacacggtttttgccaatgctcatgtcttttctggtcgacgactataccttcaacgtagaccaaaaactgcctgccgaggagaaggcaccagtttcataccctaacacgcttccggagtcttttaccaaattcctgcaggaacagaggatggcctgtgaagtgggcctgtactatgtgctccatatcactaaacaaagaaacaaaaacgcgctgctgcgcttactgcctggcttagtggaaacttttggcgatctggcattcggcgatatctttctacacctccttactggcaatctggctctgctggccgatgaatttgctctggaggacttttgttccagtctgtttgatggcttcttcctgactgccagcccaaggaaagagaacgtgcatcgacacgccttaagattattgatccatctccacccccgggtagcaccatccaagctggaggctttgcagaaggccttggagcccacaggacagtccggcgaggccgtcaaggagctgtactcacaactgggcgaaaaattggaacagcttgatcacagaaagccatcccctgctcaggcagccgagacccctgcattggaactgcctctccctagcgtccccgcgcctgcgccgctgtag

SEQ ID NO: 112559 - DNA, 501 bp, synthetic construct
  misc_feature 1..501: note = Description of Artificial Sequence: Synthetic coding sequence
  source 1..501: mol_type = other DNA
atggcctccggtgtaaccgttaacgatgaggtgatcaaggtgttcaatgacatgaaagtacggaaatcatccacgcaggaggaaattaagaaaaggaagaaagcagttcttttttgtctctcagacgataaacgacagatcatagtggaagaagctaagcaaattctggtcggggatattggcgacactgtggaggacccatacacaagcttcgtaaagctccttcccctcaacgactgtcgttatgccttgtacgatgccacttacgaaacaaaagaaagtaagaaagaggatcttgtgtttattttctgggccccggaatccgcccccttgaagtcaaaaatgatttatgcttcaagtaaggatgcgatcaagaagaaatttacggggatcaagcacgagtggcaggtgaatggccttgatgacattaaggacagaagtacgctcggtgagaagctgggaggaaatgttgtggtatctttggagggaaagccgctctag

SEQ ID NO: 112560 - DNA, 501 bp, synthetic construct
  misc_feature 1..501: note = Description of Artificial Sequence: Synthetic coding sequence
  source 1..501: mol_type = other DNA
atggcttccggagtgacagtgaatgatgaagtgattaaggtgtttaacgacatgaaagttcgaaaaagctccactcaggaagagattaagaagcggaagaaggccgtcctgttttgtctgtctgatgacaaacggcagatcatagtggaggaggccaaacagatcctagtcggggatatcggggatactgttgaggacccctatacttctttcgtcaagctgctgcctctcaatgactgtaggtacgcactgtatgatgctacttacgagacgaaggagtcaaagaaggaggacttggtgtttattttttgggcccctgaaagcgcccctctcaagtctaaaatgatatacgcctctagtaaggacgcaatcaagaaaaagtttacaggcataaagcacgaatggcaggtcaacggcttagacgatatcaaggatcgaagtactctgggcgaaaagctcggtggaaatgtggtggtcagcctcgagggcaaacccctctag

SEQ ID NO: 112561 - DNA, 1722 bp, synthetic construct
  misc_feature 1..1722: note = Description of Artificial Sequence: Synthetic coding sequence
  source 1..1722: mol_type = other DNA
atgagaaggtacgatagaggcttaaaaaccctcgagaacctgttagcaagcatccgaaagggaaatgccatagacgaggcagatatcccccctcccgtggccatcggcaaaggtcctgcttcaactcccacatactcaccagcccctacgcaacctgcaccgcgaatagcatccgccccagaaccgagagtgactctggaaggaccaagtgcaaccgcccccgcatcaagtcctggcctggcaaaaccgcagatgccccctgggccatgctcacccggacctctggcccagttacagtccagacagcgggactacaaactggctgcattgcacgccaaacaacaacagctggcttttttggaagggcgcaagaaacagctcctccaggctgcgctgagagctaaacagaaaaatgacgttgaaggagcgaagatgcatttgcgacaggccaagggcctggagccaatgcttgaagcatctcgcaatggcctgcccgtggacataacgaaggtacctccagcccccgttaacaaagatgatttcgccttggtccagaggcccggccccggtctctcccaggaagcagcccgtaggtacggagaacttacaaagctaatcagacagcagcacgaaatgtgtctcaatcatagcaaccagttcacccaacttggcaatattacagagaccacgaaattcgaaaaattggccgaagattgcaaacggtcgatggatatcctgaaacaagctttcgtgcgaggcttgccaactcctactgcccggttcgaacagagaaccttttccgtaataaagatattcccagacctgagttcgaatgatatgttactttttatcgtgaaagggatcaacctgcccactccaccgggtctgtcacccggcgacctggatgtgtttgttcgtttcgacttcccttaccctaatgttgaggaagctcagaaagataagacatctgtgatcaagaacacagattcacccgagtttaaggagcagtttaagctgtgtatcaatcggtctcacagaggcttcagacgagccatacagaccaagggcatcaaattcgaggttgtgcataaaggcgggctgtttaagacagatcgggtactggggactgctcaactgaagctggacgccctagaaatcgcatgcgaagtaagagagatcttggaagtgctggacggcagaaggcctaccggcggccgactggaagtgatggtgcgaatccgggagcctctgacggcacaacagctggagactactaccgagcgttggctcgtgattgatcctgtcccagcagctgtccccacggtggctggcccaaaaggcaaggcgccccccgtacccgctccagccagggaaagcggaaatagatctgcacgacccctgcacagcctgagtgtgctcgccttcgatcaagagcgccttgaacggaaaatcctcgcactccgccaggcccggcggccagtgccacccgaggttgcgcaacagtatcaggatatcatgcagaggtcacagtggcagagagcacagcttgagcagggaggagtgggcattagaagggagtatgctgcccagttagagaggcaattacagttttatactgaagctgcacggcggcttgggaatgatggatctcgcgatgccgcgaaagaggctctgtatcgacggaatcttgtggagagcgagctgcagcggcttcggagatag

SEQ ID NO: 112562 - DNA, 2856 bp, synthetic construct
  misc_feature 1..2856: note = Description of Artificial Sequence: Synthetic coding sequence
  source 1..2856: mol_type = other DNA
atgcacaagcggaagggtcctccgggaccgccagggcgaggagcggcagcagcacgacagctgggattactggtcgacctgtcacccgacggcctgatgattcctgaagacggtgccaacgatgaggagctggaggctgaattcctggcactggtgggaggccaaccccctgcgctggagaaactcaaagggaagggccccctgcccatggaagccatcgagaagatggcctcactgtgtatgagagacccagacgaagacgaagaggagggaaccgacgaagatgacctggaggccgacgacgacctgctggcggagctgaatgaggttttaggtgaggagcagaaggccagcgaaaccccacctcccgtagcccaaccgaaacccgaggcaccccatcccgggttagaaaccacattacaagagcggctggccttataccagacggcaatcgagagcgcgcggcaagcgggagatagtgcgaagatgcgccgctatgatcgtggcctcaaaactctcgaaaacttgctggcaagcatccgtaagggaaacgcaatcgacgaggccgacatacctccccctgtggcaattggaaagggtcccgcaagcacccccacctatagccccgctcccactcagccggccccgagaatcgcatctgcacctgaaccccgtgtcacattggaaggacctagcgcgaccgcgcctgctagctcgcccggcttggccaagccccaaatgccacccggaccgtgcagtccaggccctctggcacagttacagagcaggcagcgggattacaaactggccgccttgcatgctaaacagcagggggatactaccgcagctgctcggcatttcagagtggcgaaatcattcgatgccgttctggaggccctctctcgcggggaaccggtggacttgagctgcctgcccccgccacccgatcagctgccccccgaccctccatccccccccagtcagcctccgacaccagctacagccccttcgaccaccgaagtccctccgcccccacgtaccctcctggaggccctggagcaaaggatggagcggtatcaagtggccgccgcacaggccaagtctaaaggtgaccagcgaaaggcacggatgcacgaacggatcgtaaaacagtatcaagacgccataagagctcataaggcaggtcgggcagtggacgttgccgagctgccagtaccccctggctttccccctatccagggactggaggccacaaaacctacccagcaaagcttggtaggggtccttgaaacggctatgaagctggccaatcaggacgagggcccagaagacgaagaggacgaggtcccgaagaagcagaattcacccgtcgcccccacagcccagccaaaggcgcccccgtccaggaccccccagagcggctccgcacccaccgctaaggcacctccaaaggccacgagcacccgggcccaacaacaactggccttcttggaaggtagaaagaagcaactgctgcaggccgcactgcgggctaaacagaagaacgacgttgaaggtgcaaagatgcatctaagacaagccaaagggcttgaaccaatgctggaggccagcaggaatgggctgcctgtggacattaccaaagtcccacctgcaccagtcaataaggacgattttgcccttgttcagcgacctggcccgggcttaagtcaagaggccgcccggcggtacggcgaattgacaaaattgatccggcagcagcacgagatgtgcctgaaccactcgaatcagtttacccagctgggtaatatcacagaaacaacgaagtttgaaaaactggctgaggactgtaagaggagcatggatatattgaagcaggcttttgtgaggggactgcccacgccaacggctcggttcgagcagaggactttttcagtcatcaaaatcttccctgacttgtcgagcaacgacatgctgctttttatagtgaaggggattaacctaccgactccacctggcttgtcacctggtgacctggacgtctttgtgaggtttgacttcccatacccgaacgtcgaagaggcgcagaaagataaaacctccgtcatcaagaatactgacagccccgaatttaaggaacaattcaaactgtgtatcaataggtctcaccgaggatttcgccgggcgatacaaactaaggggattaaatttgaagttgtgcacaaggggggcttgtttaagacagatagagtcctgggtacagcccaattgaagctcgacgcccttgagatcgcatgtgaggtccgcgagattctcgaggtgctagatgggaggaggccaaccggagggaggttagaggtgatggtacggattcgtgaaccactcacggcgcagcagctagagacgacgacggaacggtggttggttatcgaccccgtccctgccgcagtgcctacccaggtggccggcccaaaggggaaggcccccccggtgcccgcccccgcacgcgagtctggaaaccgcagtgcccggccattgcatagtctgtctgtgttggcctttgatcaggagcggctcgaacggaaaatactggctcttagacaagcgagaaggccagtgcctcccgaggtagcccaacagtatcaggatattatgcagcgatctcaatggcagcgggctcagctcgagcaaggaggcgtgggtattaggagggagtacgcggcacagctcgagcgacagctgcagttctacacagaggccgcccggcgactgggcaatgatgggtcccgcgatgccgccaaggaggcactgtatagacggaaccttgtggagtcggagctgcagagactgcgaaggtag

SEQ ID NO: 112563 - DNA, 711 bp, synthetic construct
  misc_feature 1..711: note = Description of Artificial Sequence: Synthetic coding sequence
  source 1..711: mol_type = other DNA
tggcactctcctgacggcctcatgattccagaagacggcgcgaatgatgaggaactcgaagcagaattcctagcattggtgggaggacaacctcctgcgctagagaaactcaaagggaagggaccactgcctatggaggcaatcgagaagatggccagcctgtgtatgcgggaccccgatgaggacgaggaagaggggacagacgaggacgacctcgaggcagatgatgacctcctggccgagctgaacgaagtgctgggagaggaacagaaggcatctgaaactcctccacctgtggctcaaccaaagccggaggctccacatcctgggttagaaacaacgcttcaggaacgcctcgcgttataccagacagctatagagagtgccaggcaggccggtgactcagcaaaaatgcgtcgatacgacagaggtctcaagaccctggaaaatctcctggcatccattcggaaggggaatgctattgatgaggccgatatacccccaccagtagcgataggtaagggccctgcatctacccccacttattcccccgctcctacccagccagctccacgcattgcctctgcacctgagcctagagttactctcgaaggacccagtgctaccgccccggccagtagtcctggccttgccaaaccacaaatgcctcccgggccctgttccccaggtccgctggcccagctgcagtag

SEQ ID NO: 112564 - DNA, 1116 bp, synthetic construct
  misc_feature 1..1116: note = Description of Artificial Sequence: Synthetic coding sequence
  source 1..1116: mol_type = other DNA
atgccccccggtccatgctctcctgggcctctagcacagttacagagtcgacaaagagactataaactcgcggctttgcacgccaagcagcagggcgacacaaccgccgctgctcgtcacttccgcgtagcaaaaagctttgatgcggttctggaggcactaagtcgtggagagccagtcgacctttcctgtctcccgccgccccctgatcagctgcccccagaccccccaagcccccccagtcagcccccaactcccgccaccgccccaagtacaaccgaagtccctccccctcccagaactctgctggaggctctcgaacaaaggatggagcgctaccaggttgccgccgcccaagccaaaagtaagggcgaccagcgcaaggccagaatgcatgagaggattgtgaagcagtatcaagacgccattagggcacataaagctgggagggctgttgatgtggctgaactgcccgtgccaccaggcttcccaccaattcaggggctggaagctaccaagccgacccaacagtctttagttggggttctggagacagcgatgaaattggccaaccaggatgaaggcccagaggatgaagaagatgaggtccctaagaagcagaattctcccgtggctcctactgcacaaccaaaagcccctccaagtcgcacgcctcagtcaggctctgcacccaccgctaaagcaccacccaaggccaccagtactcgggcccagcaacagctcgccttcctggaaggaaggaaaaagcagttgctgcaggcagccctgcgagcaaagcaaaagaacgatgttgagggggcgaagatgcacttaaggcaggccaaaggcctcgagccaatgctggaggcctccagaaacgggctaccagtggatatcacaaaggtgcctccagccccggtcaacaaggacgactttgccctggtgcagcgcccaggtccaggcctgtcccaagaagcagctagacgctatggggagttgacaaaactgattcgtcaacagcatgagatgtgtctgaatcatagtaaccagttcacgcagttaggcaatatcaccgaaaccactaaagcaaacatggtgaagccatgcttctactag

SEQ ID NO: 112565 - DNA, 4539 bp, synthetic construct
  misc_feature 1..4539: note = Description of Artificial Sequence: Synthetic coding sequence
  source 1..4539: mol_type = other DNA
atggttagcgaaaagtcccacttggggaatccgcaggagccagtgcaagaagagccgaaaacaaggctcctgagcatgacagtccgcagggggcctcgctcacttccgcctatacctagtactagtagaaccgggtttgctgagttttccatgagaggcagaatgcgggagaaattgcaagctgctcggagtaaggcggagtctgcactgcttcaggaaattcctaccccaaggccacggcgcctgcgttctccctcaaagaaagagttggaaaccgaattcggcactgagcccggcaaggaggttgagcggactcaacaggaagttgactcccagagctattcacgtgttaagttccacgattcagcgcgtaagataaagcccaagccacaagtgcccccaggcttcccaagcgcagaggaggcatataactttttcacttttaactttgaccctgagccggaggggagcgaagaaaagcctaaggcccgacacagggccggaaccaaccaagaggaggaagagggggaagaagaggagccaccagcccagggaggaggtaaggaaatggatgaggaagagctgcttaatggggatgatgccgaggactttctgcttggcctcgatcatgtcgccgacgactttgtcgccgtacgtcccgctgactatgagagtatccacgatcgactacaaatggagcgggaaatgctctttattccctctagacagaccgtcccaacctacaagaaattacccgagaacgtgcagccccggttcctggaagacgagggactgtacaccggagttagaccagaggttgctaggacaaaccagaatattatggaaaatcgcctgctgatgcaggacccagaaagaaggtggttcggcgatgatggccgcattctcgctctcccaaaccctataaagccatttccttcaaggccacccgtgctaactcaagagcagtctattaaggccgagctggagacactgtataagaaggctgttaaatacgtccacagttcccagcacgtgataaggtctggcgaccctcctggaaactttcagctggacatagacattagcgggctgatcttcacacatcacccctgcttctctagagagcatgttcttgctgcaaaattggcccaactgtacgatcagtacctggcccggcaccagcgaaacaaggctaagtttctgaccgacaagctgcaggcgctgcgaaatgccgtccagactggccttgatcctgagaaacctcaccaatctctggatactattcaaaagaccattaacgagtacaaatcagagatcaggcagacaagaaaattcagggacgcagagcaggagaaggacagaacactgctgaagaccataatcaaggtttggaaagaaatgaagtcactgcgcgagttccaacgcttcaccaacacccccctcaaactcgttctgcggaaggagaaagctgaccagaaggccgacgaggaggcctacgaagctgagattcaggccgaaatttctgagctcctagaggagcacaccgaggagtacgcacagaagatggaagaatataggacatctctgcagcagtggaaggcctggcgcaaagttcaacgcgccaagaagaaaaagagaaaacaggccgctgaggaacacccaggggacgaaatcgccgagccttacccagaggaggaccttgtgaaaccttctccacccgaacctacggacagagccgtaattgagcaggaggtgcgcgagcgagctgcacagagtaggaggcgcccttgggaacctacactggtgcctgaactgtctcttgcaggatcagtgaccccaaatgatcagtgccccagagccgaagtgagccgtagggaagatgtgaaaaagcgctctgtgtatctgaaagtcctgtttaataacaaggaggtaagccggactgtcagccggcctctgggcgccgatttccgcgtccatttcggccaaatcttcaatctgcagattgtcaattggcctgaaagtctcacgctgcaggtgtatgagactgtggggcactcttctcccacactgctcgctgaagttttccttccaataccagagacaaccgtggtgactgggcgcgctcccaccgaggaagttgaattctccagcaatcagcatgtaactctcgatcacgagggagtgggctctggagttccatttagcttcgaggcggacggcagtaaccaattgactctcatgactagcggaaaagtcagccattccgtggcatgggcaattggcgagaacggaattccgttgataccacccctgagccagcagaacatcggtttcaggtccgccctcaagaaggctgacgccatctcgtccattgggacatccggtctcacagatatgaaaaagctcgcgaagtgggccgctgagagcaaactggaccccaacgatccaaataacgcccccctcatgcagctgatatcagtcgcgacgtcgggtgagagttatgttcctgatttcttccggttggagcagctgcagcaggagttcaactttgtctcagatcaagagcttaacagaagtaaaagatttaggctcctgcacttgcgctctcaggaagtccccgagtttaggaactataaacaggtgcctgtgtacgatcgtgaaatcatggaaaaggtgtttcaggactacgagaagcgccttcgtgaccgcaatgttatagaaaccaaggaacatatagatacccaccgtgctatagtggctaaatacctgcaacaggtgagagaatctgtcataaaccggtttctcatcgctaagcagtatttcctgctggcggatatgatcgtggaggaggaggtgccaaacatcagtattctggggctcagcctgttcaaacttgccgaacagaagagaccccttagacctaggcggaaagggcgcaagaaagtgacagctcaaaacctctctgatggagacatcaagctgctggtcaatatcgtcagggcatacgatatcccggtccgaaagcccgccgtgagcaaattccagcagccgagccgatctagccggatgttctcagaaaaacacgctgcaagcccatcaacctatagtcccactcacaacgccgattaccccctcggccaggtgctcgtgcggccttttgtggaagtaagtttccagcggaccgtatgtcacactacgacagcagaagggcccaaccccagctggaatgaggaattagagcttcccttcagggcaccaaacggagactattctactgcttccctccagtccgttaaggatgtggtgtttattaatattttcgatgaggtgctgcacgatgtgctcgaggatgatcgcgagagagggtccgggatacatacaagaatcgaacggcactggttaggctgtgtcaaaatgccgtttagcacaatatactttcaggcgcggttcgagtcccaggaagacgagaaattgttgcaggcaactgagaagtttcaagccgagtgcgcactgaagttccctaatcgccagtgtttaacaacagtgattgacatttccggcaagaccgtgttcataactcggtatctaaagcctttgaatcccccacaagaactgcttaacgtctacccgaacaacttgcaggccactgctgaactggtggcgcggtatgtttctctgataccgttcttgccagacaccgtgtcctttggcggcatttgcgacctctggagtacttctgaccaattcctcgatctgcttgcaggggacgaagaggagcatgcagttctgctctgcaattattttctctccctgggcaaaaaagcatggcttctcatgggaaatgctattcccgagggacccacagcctacgtcctcacgtgggaacaggggcgttatctgatttggaatccctgctcggggcacttttacggccagtttgacactttctgcccattgaagaatgtgggctgcttgatcggccccgataacatttggttcaatattcaacgttatgaaagtcccttacgtatcaatttcgacgtaacacgtcctaaactatggaagagcttcttctccaggagcctgccatacccaggattgagcagcgttcagcctgaagagctgatctatcagcgctcagacaaagcggcagcggccgagctgcaggatcggattgagaagatcttaaaagagaagatcatggattggaggcctcgacaccttactcgctggaataggtattgcacttctaccctacggcactttctcccccttcttgagaaatctcaaggagaggatgtggaggacgatcaccgtgcagagctcttaaaacagctcggggactatcgcttctctggatttcccctgcacatgccttatagcgaagtaaagcctttgatagacgcagtgtactccaccggggtgcacaatattgacgtccctaacgtggagttcgccctggccgtatatatccacccttatccgaaaaacgttctgtctgtgtggatctacgtcgccagtctcattcgaaaccgatag

SEQ ID NO: 112566 - DNA, 4863 bp, synthetic construct
  misc_feature 1..4863: note = Description of Artificial Sequence: Synthetic coding sequence
  source 1..4863: mol_type = other DNA
atgaacccacgggaggagaaagtgaagatcatcaccgaggaatttatcgagaacgacgaagacgcagacatgggacgacagaacaaaaatagcaaagtaagaaggcagccacggaaaaagcagccccccacggcggtaccaaaagagatggtgtcagagaagagtcatctcggtaatccgcaggaacctgtgcaggaggagccaaagaccagacttctttcaatgaccgtgcggcggggcccccgaagcctcccgcctatccccagtacctcacgtactggctttgctgaattctcaatgcgggggaggatgcgcgagaagttacaagccgcaagatctaaggcagagtcagccctcctccaagagatccctaccccacgacctcgtcgcttgcggtcaccctctaagaaggaactcgagaccgagttcgggaccgagccaggtaaagaagtggagcggacccagcaggaggtcgattcgcaaagttatagtagggttaaatttcatgactcggccagaaaaatcaagcctaagccccaggtccctcccggttttccatcagcagaggaagcttacaatttcttcactttcaattttgaccccgagcctgaaggtagcgaggagaagccaaaggctaggcacagggcaggtaccaaccaggaagaagaagagggcgaagaggaggaaccgccagcccagggaggtggcaaggagatggatgaggaggaacttcttaacggcgatgacgccgaggatttcctcttgggactggaccacgtcgcggatgattttgtggctgtgcggcccgcagattatgagagcatccacgataggctccaaatggaacgggagatgctgtttatcccatcgaggcagacagtgcccacctacaaaaagctgccggaaaatgtccaacctcggtttttggaggacgaaggcctgtatacaggtgtacgacctgaggtggcgcgcactaaccagaatatcatggagaatcgactgctaatgcaggacccagaaagaagatggtttggcgatgacggacgcattctggcactcccgaatcccatcaaaccatttccttctaggcctcccgtgctgactcaggagcaaagcatcaaggccgagctcgagaccttgtataagaaagctgtcaagtacgtccactcatcacaacatgtgataaggagcggcgacccccccggcaactttcagctcgatatcgacatttcagggttaatcttcacccatcacccctgcttcagccgagaacatgtgctggccgcaaagctggcacagttatacgatcagtacttagccaggcaccagcggaataaggcaaagttcctgaccgataaacttcaggcattgcgtaatgcggtccagactggactggatcccgaaaaaccgcatcagtctctcgataccattcaaaagacgataaatgaatacaagtcagagatacgtcagacaaggaaatttagagacgctgaacaggagaaagatcggaccttgctgaaaacaatcatcaaagtttggaaggagatgaagagcctcagggaatttcagcgctttactaacacaccactcaaactggtgttgcggaaggaaaaggcggaccaaaaggccgacgaggaagcttatgaagctgagattcaggctgagatatccgaattgttagaagaacacacagaggaatatgcgcagaaaatggaggagtataggacttctctccagcaatggaaagcttggaggaaggttcagcgcgccaaaaaaaaaaaaaggaagcaagccgcagaggaacaccccggtgacgaaattgctgagccctacccagaagaagacctcgtaaagccctccccccccgagccaactgaccgagccgtcatagagcaggaggtgcgagagcgtgccgcccagtcccgacgtcggccttgggaacccacactggttccggagctctccttggccggaagcgtgaccccgaatgaccagtgcccaagagccgaagtgtcccggcgagaggacgttaagaagaggagtgtctatctgaaagtgctgttcaataacaaggaagtaagcagaaccgtctctcgtccactcggggctgatttccgcgtccactttggtcagatctttaacctgcaaatcgtcaactggcccgagagcctgacgctgcaggtttatgagacggtgggccattcctcgcctaccctgctggcagaggtgtttctgcctattccagaaacgacagtcgtgactggaagagctccaacggaagaggtggagttcagctcgaatcagcacgtgacactcgatcatgagggcgtggggtcaggcgttcccttttcctttgaagccgacggctcaaaccaacttacgttgatgacctccgggaaagtgtcacacagcgtggcatgggcgataggggagaatggcattcccctgattccccctctgtcccagcagaacattggatttaggtccgcccttaagaaggctgatgccatctcctccatcggcacctccggtctaacggacatgaaaaagctggccaagtgggcggcggagtcgaagctggatcccaacgaccccaacaacgcccctttgatgcagctgatcagcgtggctactagcggcgaaagttatgtaccagatttctttagacttgagcagctgcaacaggagttcaactttgtaagcgaccaggagttaaacaggagcaagcggttcagactcctgcacttgagaagtcaggaggtgcctgagttcagaaactataagcaggttcctgtgtatgacagggagatcatggagaaggtcttccaggattatgaaaaacgcctgcgcgacaggaacgttattgagacaaaagagcatattgatacccaccgggctatcgtcgctaagtatctccagcaggtccgggagtccgtgatcaataggtttctgatcgctaagcagtacttcctactggcagacatgatcgtcgaggaggaagtgccaaatatctccattctgggactgagcctctttaagctcgccgaacagaaaagacccctaaggccacggagaaagggacgaaagaaggtgaccgcccagaatctgtccgacggcgacatcaagctccttgtgaacattgtaagggcatatgacattcccgttcggaagcccgcagtcagcaagttccagcagccttccaggtcctccaggatgttcagcgagaagcacgctgcctcgcctagcacatacagccccacacataacgcagattatcccctgggacaggtgctggtacggcccttcgtggaggtctctttccagcgcaccgtctgtcatactacgactgccgagggacccaatccttcttggaatgaagagttggaactgcccttcagagcaccaaacggtgactattcaacagcctctctgcagagcgtcaaagacgtagtgtttattaatatttttgatgaagtgctgcacgacgtgttggaggacgatcgggaaagggggtccggcatccatacacgaattgaaagacactggctggggtgtgtaaaaatgccatttagtacaatttactttcaagctcgcatcgatggcacgttcaagatcgacatacctcctgtgcttctgggctatagcaaggagcggaacatgatcctggagcggggttttgattcagtgagatctttgtccgagggctcatatattacactcttcatcaccatcgagccgcagctggtgcccggggagagcattcgggagaaatttgagagtcaagaagacgagaagctattgcaggccactgaaaaattccaagccgaatgcgctttgaagtttccaaataggcagtgtctgacgacagtgattgacatcagcggcaagactgtgtttatcacccgctatctaaaacccttaaaccctccccaagagcttttaaacgtgtacccaaacaacttacaagctacggcagagctcgtcgcgcggtatgtatcattgattccattcctccccgacactgtctccttcggcgggatatgtgacttgtggtcaacctccgatcaatttcttgacctgctcgcgggggatgaagaagagcacgctgtcctgctgtgtaattacttcctgtcattgggaaaaaaggcatggttactcatgggcaacgctattccggaaggaccaaccgcttacgtccttacctgggagcagggccgatatctgatctggaatccgtgtagcggccacttctacggccagttcgacaccttctgccctctgaagaatgtcggatgtctgatcgggcccgacaatatctggtttaacatccagcgctacgagtcccctctgcgaattaacttcgacgtgacgcgtcccaaactgtggaagtccttctttagtaggagccttccatatccaggcttatcatcggtccaacccgaggaactcatttaccagaggagcgacaaagcagccgccgcggaacttcaggacagaatcgaaaaaattttgaaggagaaaattatggattggagaccacggcatctgacccgctggaatcgctattgcacatcaacccttcgacatttcctacccctcctggagaaaagccagggcgaggacgtagaagatgaccacagagctgagcttctaaaacagttgggggactataggttttccggttttccactgcatatgccctattcagaagtgaaacctctgatcgatgctgtctactctactggtgtgcacaatatcgacgtaccaaacgtggagtttgccttggcggtgtacatccacccatatcctaaaaatgttcttagcgtgtggatatacgtcgccagcttgatcagaaaccgttag

SEQ ID NO: 112567 - DNA, 4863 bp, synthetic construct
  misc_feature 1..4863: note = Description of Artificial Sequence: Synthetic coding sequence
  source 1..4863: mol_type = other DNA
atgaaccctcgggaggagaaagttaaaattataacagaagagtttatcgaaaatgatgaggacgcagatatgggccggcagaacaaaaactccaaagtgaggcgccagccccgcaagaagcagccgcccactgccgtgcccaaggagatggtttccgagaaaagccacctgggaaacccccaagaaccagtgcaggaagaaccaaagacaagactgctttcgatgacagtgcgaaggggcccccggtccttacctcctatcccaagtaccagccgcaccgggttcgccgagttctccatgcgtggaaggatgcgggaaaagttgcaagccgccaggtccaaggctgagtctgcactacttcaggagatcccaacacctcgaccacgacgcctgcgatccccgagcaaaaaagagctagagaccgagtttggtactgaacccggcaaggaggttgaacgcacgcagcaggaggtggactctcagtcttactccagggtgaagtttcacgatagcgctcgcaaaataaaaccaaagcctcaagtgccgccgggtttccctagtgccgaggaagcttacaatttttttacctttaattttgaccccgagccagagggtagtgaagagaaaccaaaggctcggcatcgtgcaggcactaaccaggaagaagaggagggggaagaagaagagcctcctgcacagggaggagggaaggaaatggacgaagaggagctcctcaacggtgatgatgcggaggacttcctgctgggccttgaccacgtggccgatgactttgtagctgtacggccagcagattatgaatcaattcacgaccgcttgcagatggagcgggagatgctctttatcccatcgaggcagactgtgcctacctacaaaaagttaccagagaacgtacagcctaggtttctagaggacgagggtttgtacacaggagtccgcccagaagtggcacgtacaaatcaaaacatcatggaaaacaggttactgatgcaggatccagagcgacgttggtttggcgatgacggtcgtatcctggctttgcctaatccgatcaagcctttcccaagccgcccaccagtgttgacccaggagcagtctatcaaggcggagcttgagacgctgtataaaaaggctgtcaagtacgtgcactcatcccagcacgtcatccgttctggcgatccccccggcaatttccaacttgacatcgatattagcggtctgatttttacacaccatccctgtttcagcagagagcacgtcttggctgcaaaattggcccagctgtatgaccagtacctggcacgccaccagcgaaataaggccaagtttctaaccgacaagctccaagccctgcgcaatgccgttcaaaccgggttggacccagagaaaccccatcagtccctggataccattcagaagaccatcaacgaatacaagtccgagattagacagaccaggaaattccgggatgcggaacaggagaaggacagaactcttctgaaaacgattatcaaagtgtggaaggagatgaagtctttgagagaatttcagcgcttcactaatacccctctgaagttggttttaagaaaagagaaagccgaccagaaggctgacgaggaagcctacgaggcagagatacaggccgagatctccgagcttttagaggaacacaccgaagaatacgcacaaaagatggaagaatatcggacatctttacagcagtggaaggcttggcgaaaggtacagcgagcaaagaaaaaaaaaagaaagcaggccgcagaggaacatccaggcgacgaaattgccgagccctacccggaagaggacctcgtgaaaccttcccccccagaacctaccgatcgggcagtcattgagcaggaagtccgtgaacgcgctgcacagtccagaaggaggccatgggaacctacactggtgccggaactgtccctggccggaagcgtgacaccaaatgaccagtgccctagggcagaagtgtctcgtcgcgaagacgtgaagaaacgctctgtctacctgaaagtgcttttcaataacaaagaggtcagccggacagttagtcggccattgggagctgattttagagtccatttcgggcagatatttaatttacagattgtgaactggcccgagagtctgaccctccaggtgtacgaaaccgttggacactcctctcccaccctgctcgctgaggtgttcctccccatcccggaaacgaccgtggtaacaggaagggcgcccactgaagaggtggaattttcttctaaccagcacgtcacccttgatcacgaaggcgtcggaagcggggtccctttttcttttgaagcggatgggtctaatcagcttaccctcatgaccagtggcaaagtgagtcactcagtggcttgggctattggtgagaacggtattcctctaatacccccgttgtctcagcagaacatcggcttccgtagcgctttaaaaaaagccgacgccataagcagtatcggcacctccggattgacagacatgaagaaactggctaaatgggctgctgaatccaaactggacccaaatgatcctaataacgctccactaatgcagcttatctcagtcgcaacaagtggggagtcttatgtgcctgatttcttccgcttggaacagctgcagcaggaattcaactttgtgagcgatcaggaactgaatcgctcaaagcgcttcagactgcttcacctgcggtctcaggaggttccggaattccgcaattacaagcaggtgccggtttatgatagggaaatcatggaaaaagtcttccaggactacgaaaagagattgcgggaccggaatgtgatcgaaaccaaagagcacattgacactcatcgtgctattgtggccaaatatctacagcaggtcagagaaagtgtcattaatcgctttcttattgccaagcaatactttcttttggcggatatgattgtggaggaggaggtccctaacatcagcatcctgggcttgtccctgtttaagttagccgaacagaagaggcccctccgccctcgcaggaaaggacgaaaaaaagtgactgcccagaacttgagcgacggcgacattaaactcctcgttaatatcgtgagggcctacgatatccctgtgcgcaaaccggcggtcagcaagtttcaacagccttctcgttccagcagaatgttttccgagaagcatgccgcgtctccatccacatactcccccacccacaacgccgactatcctctcgggcaagtgctggtgcgcccctttgttgaagtcagttttcaacggaccgtctgccacactacgaccgcagagggtcctaacccttcatggaacgaagaactcgagcttcccttccgtgcacccaacggcgactactcaaccgcatcactgcaaagcgttaaggacgtggtgttcattaacatctttgacgaggtgcttcatgatgtgctcgaagatgatcgggagcgcgggtcagggatccacacgagaattgagagacactggcttgggtgcgtgaagatgcccttttcgaccatctacttccaagcacggatcgatggcacattcaagatagatatcccaccagtcctcctcggctactcgaaagaacgcaacatgattcttgaaaggggatttgattcagtacggtccctcagtgagggaagttatataacactgtttataaccattgagccccagcttgtccccggagagagcatccgggagaaattcgagtcccaagaggacgagaaactgcttcaagctacagagaaatttcaggccgaatgcgcccttaagtttccaaaccggcagtgtctgacgacagtgatcgatatctccgggaaaacagtgttcataaccagatacctgaaacctctgaatcctccacaggagctgttgaatgtctaccctaacaatctccaagccactgctgagttagttgcccgctatgtgtcactcattccatttcttcccgatactgtgagtttcggtggcatctgtgacctttggtctacatccgaccaatttcttgacttgctcgcaggagacgaagaagagcatgccgtgcttttgtgtaactacttcctctccctcggaaagaaggcttggctcctaatgggtaacgctattccagaaggacctactgcctacgtgttgacttgggagcaggggcgatatttaatttggaacccctgcagcggccacttttatgggcagttcgacacgttctgtcctctcaaaaatgtgggttgtctgataggccccgacaacatttggttcaatatacagcgatatgagtcaccattaagaattaatttcgatgtgacccgccccaagctgtggaagtcgtttttttcgagatcactcccctatcccggtctgtcttccgtgcagcctgaggagctgatctaccagcgatccgacaaggctgcggcagcagaactgcaggaccggatagaaaagattttgaaggagaagattatggactggcgtcctaggcatctgacaagatggaatcgctattgcacgagcactcttaggcacttccttcctttgcttgagaaaagccagggggaagacgtggaggatgaccaccgggccgagctgctcaagcaattgggcgactaccgctttagcggcttccctctacacatgccttactcagaggttaagccactcatcgatgcagtctacagtaccggagtacataatatcgacgtccccaatgtggagttcgccttggccgtttacattcacccataccccaagaatgtcttgtctgtatggatctacgtagcatccttgatcaggaacaggtag

SEQ ID NO: 112568 - DNA, 4539 bp, synthetic construct
  misc_feature 1..4539: note = Description of Artificial Sequence: Synthetic coding sequence
  source 1..4539: mol_type = other DNA
atggtttccgagaagagccacctcggaaatccacaagagccagtccaggaagaacctaagacccgactgctgtctatgacggttcgcagagggccacggtccctgccaccaatcccatccacctcccgaactgggtttgcagagttttccatgcgcggaaggatgcgggagaaactccaggcggcccgttctaaggctgaaagcgccttgttacaggagatcccaaccccgcgaccccgcagactgcgctcccccagcaagaaagaactggagactgagttcggaactgaacccggcaaggaagttgaaagaactcagcaggaggtggactcacagtcttacagccgggtgaagttccacgactcagcacggaagatcaagccaaagccgcaagtgccccccggctttcctagcgcagaggaggcctacaacttctttactttcaatttcgatccagagccagagggatccgaggagaaaccgaaagcccgacacagggccggcacaaaccaggaggaggaggaaggggaggaagaggaaccaccagcccagggagggggaaaagagatggacgaagaagagctcctcaacggagatgatgccgaggatttccttttgggattggaccatgtagcagatgactttgtcgctgtcaggccggctgactacgagagcattcacgaccgactacaaatggaaagggagatgctgtttatcccatccagacagacggtccccacttacaagaaacttcctgagaacgttcagccccgattcctggaggacgagggtttatacactggggtgagacctgaggtagctaggacgaaccagaacataatggaaaaccgcctcctgatgcaggaccctgagcgccgctggtttggtgatgatgggcggattctcgcccttcctaatccaattaaaccttttcccagtagaccgcctgtgttgacccaggagcagtcgattaaagcagaacttgaaaccctctataagaaagccgtgaagtatgttcacagctcgcagcacgttattcgctccggtgatccgccaggtaactttcagctggatatcgacatttctggacttatcttcactcatcacccttgcttcagtcgcgagcacgttctggcagccaagttagcacagctgtacgaccagtacttggcacggcatcagcgcaacaaagccaagttcctgacggacaagttgcaggcccttcgtaacgcagtgcagaccggactcgacccggaaaaacctcatcagtcactggataccatacagaagactatcaatgagtacaagagtgagattcggcagacccgcaagtttagagacgccgagcaggagaaggaccggaccctgttaaaaactataatcaaggtgtggaaagaaatgaagtccctgcgcgagtttcagaggttcactaacacaccactgaagctcgtgctgcggaaggaaaaggcagatcaaaaagccgacgaggaggcctatgaagctgaaattcaggctgaaatctccgagttgttggaggagcacacagaggaatatgcacagaagatggaggagtatagaacatctctccagcagtggaaggcctggcgtaaagtgcagagagcaaagaagaagaaaagaaaacaggcagctgaggagcatccgggcgacgaaattgcagagccatatcccgaagaagatttagtaaagccatctccccccgagcctactgatagggcagttattgaacaagaagttcgtgaacgggcagcccagagtcgccggcggccatgggagcccaccctcgtaccagaattatcactggccggaagcgtcactcctaacgaccagtgtccccgggccgaggtatccagacgggaggatgtgaagaagcggtccgtgtatctgaaggtgcttttcaataacaaagaagtcagtcggaccgtttcacggcctttaggagcggactttagggttcactttgggcagatctttaacttacagatcgttaattggcccgaatccctcactcttcaggtttatgagactgtcggccactcttcaccaacgttgttggctgaagtcttcctgcctatacctgaaacaactgtcgtgaccgggagagcacctactgaagaagttgagttttctagcaatcagcacgtgactctcgaccacgagggtgtaggatctggggtgccctttagtttcgaggcagatggtagcaatcaacttactcttatgacaagcggaaaggttagtcacagcgtagcatgggccattggggaaaacggaatacccctcatccccccactctcacagcagaacataggcttccgctccgcccttaagaaagccgatgcaatttcctctatcggaacaagtgggctgactgatatgaagaagctggccaagtgggcagctgagtctaaactcgacccaaatgacccaaacaatgctcctctgatgcagctcattagcgtggcaacgtcaggtgagtcctatgtacctgattttttcaggctcgaacaactgcaacaggagtttaactttgtgagcgatcaggagctgaataggagcaagaggtttcgcttacttcatctgcggagtcaggaggtgcctgagttcaggaactacaagcaagtgccggtgtacgaccgtgagatcatggaaaaagtcttccaggattatgagaagcggcttcgcgatcgcaacgtcattgagaccaaggagcacatcgatacgcatcgggcaatcgtcgctaagtatctccagcaggtgcgcgaaagtgtgatcaaccggttcttgattgcaaaacagtattttcttttggccgatatgatagttgaggaggaagtgccgaatatcagtattctgggactcagcctcttcaagctcgccgaacagaagcgccccctcagaccacgccggaaaggtcgcaaaaaagtcaccgctcagaatctgtccgatggggatattaaactgctcgttaatatagtgagagcatacgatatacccgtgcgcaaaccggctgtctcaaagttccagcagccgagcagatcctccaggatgttttccgagaagcacgcagcctccccatccacatacagccccactcacaatgctgattatcctctcggccaggtgttggtgcggccttttgtagaagtaagtttccagagaactgtctgccacaccaccaccgcagaagggcccaacccgtcctggaacgaagaactcgagctacccttcagggcccctaatggtgactatagtacagcctcactccagtcagtgaaagatgtcgttttcattaatattttcgacgaagtgctacacgatgtgctggaggatgatcgggagcgcggctcgggtattcatactcgtattgaacgccactggctcgggtgcgtaaagatgcccttctctacaatttactttcaagccaggtttgaaagtcaagaggatgaaaaattattacaagcaaccgagaagtttcaggccgaatgcgccctcaaatttcccaatcgacaatgtctgaccacagtgattgatatctcagggaaaacagtctttatcactagatacctaaagccgttgaacccaccacaggagctgcttaatgtctatcccaataatcttcaagccactgcggagctagtcgccaggtacgtgtctctgattccatttctcccagatacagtttcctttgggggtatctgcgatttgtggagtacctcagaccaattccttgatctgctggccggtgatgaagaggagcatgctgttctgctgtgcaactattttctctccctagggaaaaaggcctggttgctcatgggcaatgccatcccagaaggacctaccgcgtatgtgctgacctgggagcagggacgctatttaatttggaatccttgtagcggacatttttacggtcaattcgatacattttgcccgctgaagaatgtgggttgcttaattggaccggataatatttggtttaatatccaaaggtatgagagcccgttgcgcataaatttcgatgtaacaagaccaaagctgtggaaaagcttcttcagccgatcgctgccctacccagggctcagctccgtgcaacctgaagagctcatttaccaaaggagcgataaagctgctgccgccgaattacaggataggatcgagaagattcttaaggagaagataatggattggcgcccccggcacctgactcggtggaatcggtactgcactagtactctgcggcactttcttcccctattagagaaaagccaaggggaggatgtagaagatgaccatcgggccgagcttcttaaacagctgggggactaccgctttagcggattcccactacatatgccttacagcgaggttaaacctttgattgacgcagtttactccacgggcgtgcacaatattgacgtccctaatgtggagtttgcgttggccgtgtatattcatccctaccccaaaaatgttctgagcgtgtggatctatgtggcttctctgattcggaatcgctag

SEQ ID NO: 112569 - DNA, 369 bp, synthetic construct
  misc_feature 1..369: note = Description of Artificial Sequence: Synthetic coding sequence
  source 1..369: mol_type = other DNA
atgaatcctcgcgaagaaaaagtcaaaattattacagaggagtttattgagaatgatgaggacgccgatatggggagacagaataaaaattccaaagtccggcgacaaccacggaaaaaacagaagcccacaccattttcaagggcatgctggcagattttgccacacctaagtgctggcgtgcccctgctagggtgggagcatcctgtccagggcaaatcctttcaggccactaattgttgccctcagggtaacggagtaaggaagatccctccttggcagcctcctggtgcttgcgccggtggtgctcaggacccgcctcccgaatacgacagcccagagcgaccaacagagagggcaggttgctag

SEQ ID NO: 112570 - DNA, 4863 bp, synthetic construct
  misc_feature 1..4863: note = Description of Artificial Sequence: Synthetic coding sequence
  source 1..4863: mol_type = other DNA
atgaatccacgggaggagaaagtcaaaatcatcactgaggagttcatcgagaatgatgaggacgcggatatgggccgccaaaataaaaattcgaaagtcaggcgccagcccaggaagaagcagccacctacagcagtccccaaggagatggtatctgagaagtctcacctgggtaacccccaggagcctgtccaggaggagcctaagactcgcctgctctctatgaccgtgcggcggggacctcgctctcttccccctatccccagcacttctcgcaccggctttgcggaatttagcatgcggggtagaatgcgggagaaattgcaggccgccaggagcaaggccgagagcgctctcctgcaagaaatcccaaccccgcgacctagaagattgcgcagtccatccaaaaaagagttagagaccgagtttggaactgagcccggaaaggaggtggagaggacacagcaggaagttgattcccagagctatagcagagtgaagtttcatgactccgcgcgtaagattaaaccaaagcctcaggttccccctggtttcccctccgccgaggaagcctacaatttctttacattcaatttcgaccctgagcctgagggctccgaggaaaaacccaaggctaggcaccgagcgggtaccaaccaggaggaggaggaaggggaggaggaagagccacctgcccagggcggggggaaagaaatggatgaggaggaactgctgaacggagacgatgctgaggattttctcctcggactggaccacgtggctgatgactttgtggcggtgcggcccgcagattacgaatctatccacgaccgattacagatggagcgggaaatgctctttatcccctccagacagaccgtcccaacctataaaaaattgccagaaaatgtccagccgcggttccttgaagacgaaggcctttatactggggttaggcctgaggtggcgaggacaaatcagaacatcatggaaaatcgcttgctgatgcaggaccccgagcgccgatggtttggagatgacggaagaatcctggccctaccaaaccccataaaaccatttccttcccggccccctgtgctaactcaggaacagtccatcaaagcagagttagagacattgtataagaaagccgtgaaatacgttcatagtagccagcatgtgattcggtccggcgatcctcctggtaatttccagctagatatcgatatcagtggcctcattttcacccaccacccttgcttttcccgggagcatgttctggctgctaaactcgcacagctctatgaccagtacctggcaaggcatcagaggaacaaggctaaattcctgacagataagttacaagctctgagaaatgccgtgcagaccggattagatcctgaaaaaccacatcagagcctggacactattcagaagacaattaatgagtataagagcgagattaggcagactcgaaaatttagagacgcagaacaggaaaaagacagaactcttttaaaaaccatcatcaaggtgtggaaggagatgaagagtctgagggagtttcaaagattcacaaatactcccctgaaattggtcctgcggaaagagaaagcagaccagaaggccgatgaggaggcatacgaggctgagatccaggccgaaattagcgagctgcttgaggaacatacagaagagtacgcccagaagatggaggaatacaggacttccctgcagcaatggaaggcctggagaaaggttcagcgggcaaagaaaaagaaacggaaacaagccgcagaggagcacccaggtgatgagatcgccgagccgtatccagaagaggatctggttaaaccctcgccacctgaaccaactgatagggccgtgattgaacaggaagtgagagaacgcgcagcccagagcagaagaagaccctgggagcccaccctcgtgccagagctgtcactcgccggtagtgtgactccgaatgatcagtgcccccgggccgaggtgtctcgcagagaggacgtgaagaagcggagcgtgtacctgaaagttctgtttaataacaaagaagtcagcagaacagtatcgagacctttgggggccgacttccgggtccacttcggccagatctttaatctgcaaattgtgaactggcctgaaagcttgacacttcaagtctatgagaccgttggacacagttcacccaccctgcttgctgaggtgttccttccaatccctgaaaccactgtggtgaccggtagagctccaactgaagaagttgaattcagctctaaccagcacgtcaccctggaccacgaaggggtggggtctggcgtgcccttcagcttcgaagccgacggatccaatcaattaacgctgatgacttctggaaaagtgtcacattcagttgcatgggctattggagagaatggcattcccctaattcccccgcttagccagcagaatatcggctttagatcagcattgaaaaaggccgatgctatttcctccatcggcacaagcgggctgaccgacatgaagaaattagcaaaatgggccgctgagagtaaactggacccaaatgatccgaacaatgctcctttaatgcagctgatttccgtggccactagtggggagagctacgtccctgatttcttcaggttggagcagctgcagcaagaatttaattttgtctccgatcaagaactcaatcgttcaaaaagatttcgcctgctccatctacgttcccaggaggtcccagagtttaggaattacaagcaggtgccagtttacgatcgcgaaattatggagaaagtgttccaggattacgagaagaggctgcgggatcgtaatgtaattgaaactaaggaacatatagatacgcacagagcaatcgtcgctaaatatctacagcaggtacgtgaatcggttatcaaccggttcctaatcgctaaacagtacttccttctggccgacatgatcgtggaagaagaagtgcccaatatctccattcttggactttcactctttaaactggccgagcagaaacggcccctgaggccccgacggaagggtcgcaaaaaagtgacggctcagaatctatccgatggcgacattaaacttctggtaaacattgtaagggcttacgacatccccgtcagaaaaccagctgtctctaaatttcagcaaccaagccgctcgagtaggatgttctcagaaaaacatgccgcctctccctcaacttattcccctactcacaacgccgattatccactgggtcaggttctggtgcggcctttcgtagaggtatcttttcagcggactgtttgtcacacaaccacagcggaaggcccaaacccctcttggaacgaggagctggagctgccctttcgagcacctaatggcgactactccacggcctcactgcagtccgtcaaagacgtggtgtttatcaatatctttgacgaagtgctgcatgatgtgttggaggacgatcgcgagcgtggttctggaatacatacgagaattgaacgccattggctgggttgcgtgaaaatgccctttagtactatttactttcaggcgaggatcgatgggaccttcaagatcgacatcccgcccgtgctgctcggctatagtaaggagcgcaacatgattctggaacgcggtttcgattccgttagaagcctgtccgaaggctcttatatcaccctctttatcactattgaacctcagttggttccaggagaatcaatcagggagaagttcgaaagtcaggaggatgaaaagttgctccaggccacagaaaagtttcaagctgaatgcgcactcaaatttccaaataggcaatgtctcaccacagtaatcgacatttccggcaaaactgtctttatcactcgctacctaaagccgctgaacccaccccaggagcttttaaatgtgtacccaaacaacctgcaggcgacggcggaactggtagcccggtatgtgtccctgatcccattcttgccagacactgtgagctttggcggcatttgcgacctgtggtcaacaagcgatcagttcttggacttactagcgggggatgaagaggagcatgccgtgctgctgtgcaattactttctgagcctgggcaaaaaggcttggctccttatgggtaacgccattcctgagggccccacagcgtacgtcctgacctgggagcagggccggtatctgatctggaacccctgctccggccacttctatggtcagttcgacacgttttgcccattgaaaaacgtcggttgcttgatcggccccgacaatatttggtttaacatccaaagatatgagagcccgctccggattaacttcgacgtgaccaggcccaagttatggaaatcattctttagcagaagtctcccctaccctggactgtcatctgtgcagccagaagagcttatctaccagagatccgataaggcagctgccgctgagttacaggatcggatagaaaagatccttaaggagaaaattatggattggaggcctcgacacctgacccggtggaataggtactgcacatccaccttgagacacttcctgcctctccttgagaaatctcagggagaggatgttgaggacgaccatagagccgagcttttaaaacagctcggcgattaccgtttctctggtttccctctccacatgccatactcagaagtgaagcctctgattgacgcggtgtattctacaggcgtgcacaatatcgacgtcccaaacgtagaattcgcattggcggtctacatccacccgtaccccaagaatgttctgagcgtttggatttacgtcgcttccttgatccggaataggtag

SEQ ID NO: 112571 - DNA, 369 bp, synthetic construct
  misc_feature 1..369: note = Description of Artificial Sequence: Synthetic coding sequence
  source 1..369: mol_type = other DNA
atgaacccacgcgaagaaaaagtgaaaataattaccgaggaatttattgagaacgacgaagatgcagacatggggcgccagaataagaattcaaaagtgcgacgtcagccacggaagaaacaaaaaccaacacccttcagtagggcatgctggcagattctgcctcacctgtccgccggtgtgcccctcttagggtgggagcaccccgtacaggggaagtccttccaagcaaccaattgttgcccgcagggcaacggcgtcaggaagataccaccctggcagccccccggcgcctgcgcgggaggagctcaggacccgccgccagagtacgactcccctgagagacccactgagcgggcaggatgttag

SEQ ID NO: 112572 - DNA, 4539 bp, synthetic construct
  misc_feature 1..4539: note = Description of Artificial Sequence: Synthetic coding sequence
  source 1..4539: mol_type = other DNA
atggtaagtgaaaaaagccatctaggtaacccccaggaacccgtgcaggaggaaccaaaaacacgcttgttgagtatgactgtaagaagaggacccaggagtctcccacccatacctagcacaagccgtaccggctttgccgagttttccatgcggggccggatgagagaaaagctccaggccgctagatctaaggctgagagcgcactcctgcaggagataccgactccccggccgcgccgcctgaggtccccttcaaagaaagagctcgagacagagtttggaaccgagccagggaaagaggttgaacgaacccaacaggaggttgatagccagtcttacagccgggtgaagttccacgactcggcccggaagattaagccaaagccacaagttcctcccggattcccttccgcggaggaagcttacaactttttcaccttcaattttgatcctgagccagagggctctgaagaaaagcctaaggctagacatcgagcggggaccaatcaagaagaagaggaaggtgaagaggaggaaccaccggctcagggcggtggaaaagaaatggacgaagaagaactgctgaacggcgacgacgctgaggactttctccttggtctcgaccacgttgctgacgactttgtcgccgtcagaccagctgattacgagtccatccacgaccgcctgcagatggaacgggaaatgctgtttataccgtctcgccagactgtaccaacttataagaagctgccagaaaacgtacaacctcgattcctggaggacgaagggctgtacaccggtgtgcgccccgaagtagcgcggaccaatcagaatattatggagaacagactgcttatgcaggatccagagagacgctggttcggcgacgacggacgcatcctggccttgccaaatccgataaagcctttccctagcaggcccccagtgctgacgcaggagcagagtataaaagcagaactggagactttatacaaaaaagcagtcaagtacgtgcactcatcacagcacgtgattaggtcgggcgacccgcccggtaacttccaactggacatcgatatcagcgggctcattttcacccatcatccatgtttcagtcgagagcatgtgctagctgcaaaattggctcagctctatgaccagtacttggcgagacaccagcgaaacaaggctaaattcctcaccgacaaattgcaggcattgcgtaatgctgtacagacaggactcgatcccgagaaaccacatcaatccctcgataccatccagaagacgatcaacgaatacaaaagcgagatcaggcagacccggaagttcagagacgcagagcaggagaaggaccgtacattgttgaagactatcatcaaagtatggaaggagatgaaaagcttgcgcgaattccagcggtttacaaataccccgctcaagctggtcttgcgaaaggagaaggcagaccagaaggcagatgaagaagcctacgaggcagagattcaggccgagatcagcgagttgctggaagaacacactgaagagtatgcacaaaaaatggaagaatacagaacaagcctacagcagtggaaggcatggcgaaaggtgcaaagggccaagaagaaaaagcgcaaacaagcggctgaagaacatcctggggatgagatcgccgaaccctaccccgaggaggatctggttaaacctagccctcctgagcctactgatcgagccgtcattgaacaggaggtaagagaaagggccgcacagagccgtcgccgaccgtgggaaccaacactggtgccagagctgtctctggcaggaagcgttacaccaaacgaccagtgcccccgagctgaggtcagtaggagggaagatgtgaagaaacggtcggtgtatctcaaggtgctcttcaataacaaggaggtgtctagaaccgttagccggcccttaggtgctgactttcgtgtccattttggccagatcttcaaccttcagattgtgaattggccggaatcattaactctccaagtgtatgagaccgtagggcactcctccccaacactcctcgctgaagtgttccttcccatacctgagacaacagtagtaacaggccgcgcacctacagaggaagtggaattctcatccaaccagcacgtaaccttggatcacgaaggagtaggctccggagtgccattctccttcgaggcggatggttcaaaccagcttacactgatgaccagcgggaaagtgagccactccgtcgcctgggctattggcgagaacgggattcccctgatccctcctctcagtcagcagaacataggttttcgcagcgcactgaagaaagctgacgccatttcaagcatcggtaccagcgggctgaccgacatgaagaagctggccaaatgggctgccgaatcgaagctggaccccaacgaccctaacaacgccccactgatgcaactcatttcagtggcaaccagcggggaatcctacgtgcccgactttttcagactggagcagctgcagcaggagtttaatttcgtgagcgatcaggaattgaaccgctctaagaggttcaggctactgcacttacgatctcaagaggtgccagagttccggaactataaacaggtgcctgtctatgaccgggagataatggaaaaagtgtttcaggattatgagaagaggcttagggatcgtaatgtcatcgagactaaggagcacattgatactcatagagccatcgtggcaaagtaccttcagcaggtcagggagtccgtgatcaacaggtttctaatcgctaagcagtacttcctgcttgccgacatgatcgtcgaggaggaggtgcctaacatctcgatacttggtctgagtttgttcaagctcgccgagcagaaaaggcccctgcggccccgcaggaaagggaggaagaaggtgacagcccagaatctgtcggatggggacattaagctcctggttaacatcgtgcgcgcatacgacatccctgtgcggaagccagccgtatcaaagtttcagcagccgtcaaggtcaagtaggatgtttagcgagaagcatgctgcttccccctccacgtatagcccaacgcataacgctgattacccgctaggccaagttcttgtccgtcccttcgtcgaggttagctttcagcgcactgtctgccacacgacaaccgccgaaggccccaaccctagttggaacgaagaactggaactgccattcagagcgcccaacggcgactactcaaccgccagcttacaatcagtcaaagacgttgtgtttatcaacatttttgacgaggtgctgcacgatgtactcgaggacgaccgcgaacgagggagcgggatccacactcggattgaacggcactggttagggtgcgtgaaaatgcctttttctaccatctacttccaagcccggtttgaaagtcaagaagatgaaaaattactgcaggccaccgaaaaatttcaggctgaatgtgcacttaagtttcctaatagacagtgtctgacaaccgttattgatatttctggcaagactgtgtttattaccagatatcttaagcccctgaatccgccacaagaattgttaaatgtctacccaaacaacctccaggcaaccgcagagttggtggccagatacgtgtccctcatacccttcctacccgacacagtgtcctttggtggtatttgtgatctctggtctacctccgatcagttcctggatctgctggccggagatgaggaggaacacgccgtcctgctgtgcaactacttcctaagtttaggtaagaaggcgtggctgctgatggggaacgccatcccagagggcccgaccgcctatgtgctcacatgggaacagggacggtatcttatttggaacccctgtagcggacacttctacgggcagtttgataccttctgtcctctgaaaaacgtgggctgtctgattggtcctgacaacatttggttcaacattcagcgctatgagagtcctctgcgaataaatttcgatgtgaccagacccaaactctggaaatcttttttcagccgttctctgccatatcccggactctctagcgtacagcccgaggaactgatatatcagcggagcgataaggcggctgcggcagaactacaagatcggatcgagaagatactgaaagagaagattatggactggagaccgcgtcacttgacgcgatggaacagatactgtacctcaaccctccgtcatttcttaccgctgctggagaagtcacagggtgaggatgtagaggacgaccacagggcagagctgctgaagcagctgggcgactaccgcttcagcggattccccttacacatgccttatagcgaggtcaaaccactgatcgacgctgtttacagcaccggtgtacacaatatagacgtgcccaacgttgagttcgcgctcgccgtttatatccacccttaccccaagaatgtgctgagtgtgtggatttacgtcgcaagcctgattcggaacaggtag

SEQ ID NO: 112573 - DNA, 369 bp, synthetic construct
  misc_feature 1..369: note = Description of Artificial Sequence: Synthetic coding sequence
  source 1..369: mol_type = other DNA
atgaatccccgagaggaaaaagtgaaaattatcacagaagaattcatcgaaaacgacgaggatgccgacatgggtcgccagaataagaattcgaaggtgagacgacagcctaggaaaaaacagaagcctacccctttctcccgtgcatgctggcagatcttgcctcatctttctgcaggagtaccattgcttggctgggagcaccctgtccaagggaagtctttccaagcgactaactgctgtccacagggtaacggggtcaggaaaatccctccctggcagccccctggtgcttgcgctggcggggcgcaagatcccccccctgagtatgatagtcccgagcggcccactgagcgagcaggatgctag

SEQ ID NO: 112574 - DNA, 1767 bp, synthetic construct
  misc_feature 1..1767: note = Description of Artificial Sequence: Synthetic coding sequence
  source 1..1767: mol_type = other DNA
atgaatccaagagaggaaaaagttaaaatcattaccgaagagttcatcgaaaatgatgaggatgccgatatgggacggcagaacaagaatagcaaggttcgcaggcagccacggaagaaacagccacccactgcggtgccaaaggagatggtgtccgaaaagtcccatctaggaaatccccaggaacctgtgcaggaggagcccaagacacggctgctttccatgaccgtgagacgcggtcctaggagcctccctcccattccatcgaccagccgaacaggctttgcagagttctcaatgcgcggacgcatgagagagaagctgcaggctgcaagatctaaagcagagagcgccctattgcaggagattccaacgccaagacccaggcgattacggtcaccttccaagaaggaactggagacggagtttggcaccgaaccagggaaagaggtcgaacgcacccagcaagaggtagactctcagtcctacagccgcgttaagtttcatgacagtgctcggaaaatcaaacccaaaccccaggtgcccccgggatttccatccgccgaagaagcatacaatttcttcactttcaattttgacccggaacccgaggggtctgaggaaaagcctaaggcacggcaccgcgccgggaccaaccaggaggaggaggagggggaagaggaggaacctcctgcccagggtggtggcaaagagatggacgaggaggagcttctgaacggtgatgatgctgaggacttcctcctggggctcgaccatgtggccgatgactttgttgcagttcggcctgcagactatgagagcatccatgatcgcctacagatggagagagagatgctgttcatcccctcaagacagaccgttccaacctataagaagctcccggagaatgtccagccacgcttccttgaggatgaaggactgtatacaggggtgcgtcccgaggtggcgcgtactaatcagaatatcatggagaataggttactgatgcaggatcccgaaaggaggtggttcggcgacgatggaagaatccttgcattgcctaatcccatcaaaccattccctagcaggccccctgtcctgacacaggagcagtccattaaggctgagctcgagaccctctataagaaagccgtaaaatacgtgcactccagccagcacgtaatccggtccggtgatccccctggcaacttccagctggatatcgacatttcaggactgattttcacccaccatccttgcttctccagagaacacgtactggccgccaagctcgctcagttatacgaccaatacctcgctaggcaccaaagaaacaaggccaaattcctgacagacaaacttcaagcactccgaaacgccgttcagacaggtttagacccagaaaagcctcaccagtcactggacacaatccagaagaccatcaacgagtataaatcggaaatcaggcagacaaggaagtttcgggatgctgaacaagagaaggatcggaccctgctaaagacgattataaaggtttggaaagaaatgaagtcgctcagggaatttcagcgtttcacaaatacaccgctgaaactcgtgctacgaaaggagaaagcggaccagaaagcagacgaagaagcctatgaagcagagatacaggcagaaattagtgagttgcttgaggaacatacagaggagtacgcacaaaaaatggaagaatacaggaccagccttcagcagtggaaggcttggcggaaagtccagtag

SEQ ID NO: 112575 - DNA, 336 bp, synthetic construct
  misc_feature 1..336: note = Description of Artificial Sequence: Synthetic coding sequence
  source 1..336: mol_type = other DNA
atgaacccccgcgaggagaaagtcaaaatcattaccgaagaattcatcgagaatgacgaggacgctgatatgggcaggcaaaacaagaacagcaaagtacgtcgccagccccgaaagaaacaacctccaaccgctgttccaaaggaaatggttagtgagaagagccacctcggcaacccccaggagcccgttcaggaggaacccaagactagactgctatctatgaccgtgagacgggggccccggagagagctggtcgtcaaaaaatctttgggacggcctggcacagttactcacgtctgcaacccatcaaccctcgaggggcgaggagggtag

SEQ ID NO: 112576 - DNA, 882 bp, synthetic construct
  misc_feature 1..882: note = Description of Artificial Sequence: Synthetic coding sequence
  source 1..882: mol_type = other DNA
atggccctggtcagtgcagactccaggatcgccgaactgctgactgaattacatcagctcattaagcagacgcaggaagagcggtcccgtagcgaacacaatctcgttaatatccagaagacacatgaacgtatgcagaccgagaacaaaattagtccatactaccgaacgaagttgcgcggtttgtatacaaccgcaaaggctgacgccgaggctgagtgcaatatcctccgaaaagccttagataagatagccgaaattaagagtctcctggaagaacggcgaatcgcagcaaagatagcaggattatataatgactccgagccacccagaaagactatgagaaggggcgttctgatgaccctccttcagcaatcggccatgacgctgccactgtggattggaaagcccggggacaagccgcctccgttgtgcggggccattccagcgtcaggggattatgtggctcggcccggcgataaggtggcggcaagggtgaaagccgtggatggcgatgaacaatggatccttgccgaggttgttagctactcacacgcgaccaataagtacgaggtcgacgatattgacgaagagggcaaagagcggcacactttgagccgtaggagagtgatacccttgccccagtggaaagccaacccagaaacagaccccgaggccctttttcagaaagaacagttagtactggcgctgtacccacagactacctgcttttatagagctctaatccatgctccaccacagaggcctcaggacgactattctgtactctttgaagacacttcctacgcagacggatattccccacccctaaacgtggctcagcggtatgtcgtagcgtgtaaggagcccaagaagaagtag

SEQ ID NO: 112577 - DNA, 843 bp, synthetic construct
  misc_feature 1..843: note = Description of Artificial Sequence: Synthetic coding sequence
  source 1..843: mol_type = other DNA
atgaacgatagatcctcaagacgacgcactatgaaagacgatgaaaccttcgaaatttctataccttttgacgaggctcctcacctggaccctcaaatattctattctctgtcccccagtcggaggaacttcgaggagccacctgaagccgcttcttcggcgctggcgctcatgaatagtgtgaaaacacaattgcatatggcgctggaaagaaattcttggctgcagaagagaatcgaagacttggaggaggagcgcgattttcttcgctgtcagcttgacaagttcatttcatcagctcgaatggaggctgaagaccactgcaggatgaagccaggtccgcggagaatggaaggcgactcccgcggcggggcgggcggcgaagcttcggacccggaaagtgcagccagcagcctgtccggcgcaagcgaggaagggagcgcctcagagagaaggagacagaagcaaaaaggaggcgccagcaggcggcgctttgggaagccgaaggctcgagagagacagcgcgtaaaggacgcagacggtgtgctgtgtaggtataagaaaatcctcggaaccttccagaagctgaagagcatgtcaagagcattcgagcatcaccgggttgacaggaataccgtggcattgaccaccccaattgccgagctcctgatcgtggcccccgagaaattggccgaagttggtgagttcgatccaagcaaggagcgtttactggaatattcaagacggtgcttcctcgccctggacgacgaaacccttaagaaggtccaggccttaaagaagtccaagctcctgctgcctatcacctaccgctttaaacggtag

SEQ ID NO: 112578 - DNA, 495 bp, synthetic construct
  misc_feature 1..495: note = Description of Artificial Sequence: Synthetic coding sequence
  source 1..495: mol_type = other DNA
atgatgctgacgcaggcgcccagtagtgtagtccggtcgcgtaactccaggaatcatacggtcaactctggggggtcatgtctgagtgcgagcactgtcgctatccccgcgatcaacgattcatccgcagccatgtccgcctgcagtacgatctctgcccaaccggcatctagcatggacacccagatgcattcacctaagaagcaggagcgcgttaataaacgtgtgatttggggaattgaggtggccgaagagctgcactggaaaggctgggagcttggcaaggagacaacaaggaatctggtgctgaaaaaccgaagcctgaagcttcagaagatgaagtaccggtaccaatacaaaggctctaggactcaatgtcatagcctcgagccacggaaacaggcgctgtttaagaccaagcaaaataaacagaaaaaacccttgacttgtcacatcaaggctagcgagtgtcttaagtacgttcagtacgagtag

SEQ ID NO: 112579 - DNA, 495 bp, synthetic construct
  misc_feature 1..495: note = Description of Artificial Sequence: Synthetic coding sequence
  source 1..495: mol_type = other DNA
atgatgcttacgcaagccccttcgagcgtggttagatccagaaacagcaggaatcacaccgtcaactcgggaggctcgtgcttgtccgcttccaccgtcgccatacccgccatcaatgactctagtgctgccatgtctgcatgttccactatcagcgcccaaccagccagtagcatggacacccagatgcatagtcctaaaaagcaggaaagggtgaataaacgcgttatatggggaattgaggtggctgaagaactccattggaaaggatgggagctggggaaggagaccacaagaaatctggtgctcaagaaccgctctctgaaattacagaagatgaaatacaggtatcagtataaggggtccaggacccagtgtcactctctcgagccccggaagcaggccctgttcaagaccaagcagaataagcagaagaagcctctcacctgtcacattaaggcgtctgaatgtctcaaatacgttcagtacgaatag

SEQ ID NO: 112580 - DNA, 5778 bp, synthetic construct
  misc_feature 1..5778: note = Description of Artificial Sequence: Synthetic coding sequence
  source 1..5778: mol_type = other DNA
atgttcactctgactggttgccgattagtggaaaaaacccagaaggtggagaaccccagtgtcagcttcgcctcatctttccctctgattccgctgctgctgcgagggaagtctgtacaaaaaaagcaggcagagagtaagtctcagatcaagctgcatactcagagcgctccttttggtctgtgcccgaaggatatgatgctcactcaggccccgagttctgtggtgagatccagaaatagtaggaaccataccgtgaattctgggggttcttgtctctccgcctctacggtcgcaataccggcaataaatgatagcagcgcggccatgagcgcttgttctactatttccgcccaaccagcttctagcatggatactcagatgcattctccaaagaagcaggagcgagtcaacaagagagtcatttgggggatagaggttgccgaagagctgcattggaaaggatgggagctgggcaaggagaccacccgtaaccttgtcctgaaaaaccgatctctaaaactacagaagatgaagtatcgacctcctaagacgaaattttttttcacagtcatcccgcaacccatcttcctgtctcccgggataactttaaccttgccaatcgtgtttcgccccctggaagctaaagaatatatggatcagctctggttcgaaaaagcagagggcatgttctgtgtcggcctccgcgcaacactgccctgccatagactaatttgccggcctccttcgctgcagcttcccatgtgtgccgtcggtgacaccaccgaggcttttttttgtctggacaatgtgggcgacctgccgactttcttcacctgggagtttagctcacccttccagatgctgcctgcaactgggctgttggagcccggccaggccagtcaaatcaaagtcacctttcagccactgacagccgtaatttatgaggtccaggcaacatgctggtatggtgcgggttcccgccagcgcagctccatccagcttcaagctgtggccaagtgcgcccaacttctcgtctcaatcaaacataaatgtccagaagatcaggatgccgagggcttccagaaactgctttatttcggctctgtggctgtcggttgtactagcgagcggcagatccgcctgcataacccatccgctgtgaacgcaccctttcgcatcgaaatctctcccgatgaactagctgaggaccaggcattttcttgccccacagcacatgggatcgttctcccaggtgaaaagaagtgtgtgagtgtgtttttccaccctaagacgctggatacacggacagtcgattactgctcaataatgccttccggatgtgcgtcgaagaccctgctcaaagttgtgggattttgcaggggtcccgccgtttcactccagcattactgtgtgaacttctcctgggtgaacctgggcgaaaggtccgaacagcctctgtggatagaaaaccaatccgactgtactgcccattttcaatttgccatcgattgcctggagtcagtattcacaattcggccagctttcggaacccttgtcggtaaagcacgtatgacattacactgcgccttccagccgactcaccctattatttgctttcgccgtgtggcttgtctgattcaccaccaagacccactgttcctggatctaatggggacatgccatagtgattctaccaaaccggcgattctgaaaccacagcacctgacttggtatcggacgcacctggctcgcggactcacactctacccccctgatatcttggacgctatgctgaaggagaagaagctggcccaggatcaaaatggagctcttatgatcccaatccaggaccttgaagacatgcccgccccccagtatccatatatcccccccatgacagagtttttcttcgatggtactagtgacatcactattttcccgcctcccatttcagtcgagcccgtggaagtcgacttcggcgcctgtcctggccctgaagcaccaaaccccgtgccattatgtctgatgaaccacaccaagggcaagatcatggtggtgtggaccaggcggagcgactgccccttctgggtcacacccgagtcctgcgatgtgccacctcttaagtcaatggcgatgagattacatttccagccgccacaccctaattgtctgtatactgtcgaattagaggcttttgccatttacaaggtactgcagagctactccaatattgaggaagattgtaccatgtgtccctcctggtgtcttaccgtgcgagcaaggggccactcgtacttcgctgggttcgagcatcatatacctcagtattcactggacgttcccaagctgttccctgccgtgagtagcggtgaaccaacttataggagcctgcttctggtcaacaaggactgtaaacttttgactttttcactggctccacaacgcggaagtgacgtaatcctgcgaccaacgtccggcttggtggcgcctggggcacaccaaataatcctaatttgcacctacccagagggatcctcctggaagcagcacacgttttacctccaatgtaatgcaagccctcagtaccttaaggaggtgagcatgtattctagggaggagcctttgcagctcaagcttgacacccataagtccctgtacttcaaaccaacatgggtgggctgctcaagcacatctccattcactttcagaaatccttccagacttcctttgcaattcgaatggcgggtgtcagagcagcatcgcaaacttcttgcagtccagccatcgagagggttgatacagccaaacgaacggctgacccttacttggaccttctcacctcttgaagagaccaagtatttattccaagtgggaatgtgggtgtgggaagccggcctgagcccaaatgccaatcctgccgcaacgacgcactatatgctgcgattggtcggagtcggcttaacctcttccctgagtgcaaaagagaaggagctggcctttggcaatgtcctagtgaatagcaagcagagccggtttttagtactgctaaatgatggaaactgcacactttactataggctctatctggaacaggggagtccggaggcagtcgataatcatccgctggcactacagctggataggacagaaggttccatgcctccccggagtcaggatacaatctgcttgacagcgtgtcccaagcagagaagccagtactcttggaccattacatattccctcttgagccaccgggataataaagccggggagaagcaggagctgtgttgcgttagtctggtggctgtgtatcccctgctttccattcttgacgtctcctcaatgggcagcgcggaaggtatcacgcggaagcacttatggcgactgtttagccttgatctccttaactcctatctggagagggatcccaccccttgcgagttgacctataaagtccctaccaggcactcaatgtctcaaatacctcctgtgctgacacccttaagacttgactttaatttcggtgctgcaccgttcaaggcacccccaagtgtggtcttcctcgccctcaaaaatagcggtgtagtcagcctggactgggcctttttgctgcccagcgaccaacgtattgatgtggagctgtgggcagagcaggctgaactgaacagcacagagctccaccagatgcgggtgcaggacaattgtctgtttagcatttctcctaaggccggatcgttgagccctggccaggagcagatggttgaactgaagtattcccacctgttcatcggcacagaccacctgccggtactgtttaaggtgagtcacggaagagagatcttgctaaacttcattggcgtaactgtaaagccagagcagaagtatgtgcattttacctctaccacacatcagtttatcccaatccctatcggagacacattgccaccaaggcagatctatgaactgtacaacggaggatccgttccggttacatacgaggtccagacagacgtcctcagccaggtacaggagaaaaactttgatcacccaattttttgttgcctcaacccgaagggcgagatccaaccgggcagcaccgccagagtgttgtggatcttctcacctatagaagccaaaacatacactgtcgacgtgcctatacacatcttgggttggaattctgccctgatccatttccaaggtgtcgggtacaatccgcatatgatgggagacacagctccatttcataatatttccagctgggataattctagcattcactccaggttagtggttccagggcagaacgtctttctgtcacaatcgcacatcagtttgggcaatatcccggttcagtctaagtgttctagactcctctttctgaataatataagtaaaaacgaggaaatcgcctttagctggcaaccttctccactggacttcggggaagtaagcgtctcgcctatgatcggggtagtcgcacccgaggaaacagtgcccttcgttgtgacactcagagcttctgtccacgcctccttctattccgccgatttggtttgtaagctctacagtcagcaactcatgcgtcagtaccacaaagaactgcaggaatggaaagatgaaaaagtgcgccaagaggtggaattcactataacagacatgaaagtcaagaaacgcacatgctgcacagcatgtgaacccgccaggaaatataagacattgcctcccattaagaatcaacagtctgtgtcccgacccgcctcctggaaattgcagactcctaaggaggaggtgtcatggccttgtcctcagccaccctctccagggatgctgtgcctcggtctaacggccagggcacacgcaaccgactatttcctcgccaatttttttagcgaattcccttgccacttcctgcatagggagttgcctaaacggaaggccccccgggaagagagtgaaacctccgaagagaagtcacccaataagtgggggcctgtgtcaaaacaaaagaagcaactgttagtggacatccttacaaccataataagaggactgttggaggataagaacttccatgaggccgtggatcaaagtctggtggagcaggtgccttatttccggcagttttggaacgaacagagtaccaaatttatggaccagaagaatagtctgtacctcatgccaatcctgcctgttccaagctcttcctgggaagacgggaaaggtaaacagcccaaagaagataggccggaacactaccccggcctgggtaaaaaagaagagggcgaggaggagaagggcgaagaggaagaagaagagttagaggaagaggaagaggaagaggaggagaccgaggaagaggagctgggtaaagaagagatcgaggaaaaggaagaagaacgggatgagaaggaggagaaggtgtcctgggccggcattggccctaccccacagccggaaagccaggagagtatgcagtggcaatggcagcagcagttgaacgtgatggtcaaagaggaacaggagcaagacgaaaaggaagccatccggaggttacctgcttttgctaatctgcaagaagcgctgttggaaaacatgatccaaaatatcttggtggaggcatcacgcggtgaggtggtcttaacatctagacctagagtcatcgccctccccccgttctgcgttcccaggagcctcacgcctgatacactgctgccgacacagcaggcagaggtcctccacccagttgtgccgctaccgacagatcttccctag

SEQ ID NO: 112581 - DNA, 2190 bp, synthetic construct
  misc_feature 1..2190: note = Description of Artificial Sequence: Synthetic coding sequence
  source 1..2190: mol_type = other DNA
atgctaacccaggcacccagctctgtggttcgttctaggaattcccggaatcacacagtcaacagcggtggcagctgcctgtcagcgtccacggtggccatacctgccattaacgactccagcgcagccatgtccgcctgttcaacaatcagtgctcaacctgcctcttctatggatactcaaatgcattctcctaagaagcaggaaagagtgaacaagcgcgttatctgggggatcgaggtggcagaagagctccattggaagggttgggaactcgggaaggagacaacacggaaccttgtattaaaaaacaggtcactgaagcttcagaagatgaaataccgccctcctaaaaccaagtttttctttacagtcattcctcaaccaattttcttgtctccaggtattacccttactctaccgattgtctttcgccctctggaggccaaagagtatatggaccaactgtggttcgaaaaggccgaaggtatgttctgcgtcggtcttagggccacactcccgtgtcaccgcttgatttgccggccaccatccctgcagctccccatgtgcgccgtaggtgacaccacggaggcatttttctgcctcgacaatgtgggagacctgcctactttctttacctgggagttctcatctcctttccagatgctgcctgcaacaggcctcctggagcccggacaagcaagtcaaattaaagtgacgttccaaccgttaacagcggtgatatacgaagtgcaagcaacatgttggtacggggccggcagccggcaacggtcctctatccagctgcaggctgttgctaaatgtgcccaacttttggttagcatcaagcacaagtgccccgaagaccaagacgccgaaggcttccaaaagctgctgtacttcgggagtgttgctgtcggttgtacatcagagagacagattaggttacacaaccccagtgctgtaaatgccccttttcggatcgaaatcagcccagacgagctcgcagaggatcaagcgttttcctgcccaaccgctcatgggatcgtcttgccaggggagaaaaagtgtgtctccgtgtttttccaccccaaaacactggatacaagaacagtggactattgttccataatgccgtcagggtgcgccagtaaaaccttacttaaggtcgtgggcttctgccgggggccggctgtaagcctacagcactattgcgttaattttagctgggtgaacctcggagagcgctcagagcaaccattatggatcgaaaaccagagcgactgtaccgctcactttcagttcgcaatagactgtctggagagcgtcttcactatccggcctgctttcgggaccttggttggcaaggctaggatgacactccactgcgcttttcagccaacacatcccatcatctgtttccgcagagtggcatgtctgatacatcaccaggacccattgttcctcgacctgatgggcacctgccattccgattcaactaagcccgccattctgaagcctcaacacctgacctggtaccgcacccacctggctcggggtctaacgctatatccacctgacatcctggacgcgatgcttaaagagaaaaagcttgctcaagaccagaacggcgctctaatgattccaatccaagacctagaggacatgcccgcccctcagtacccatacattccccccatgaccgagttctttttcgatggaaccagcgatattacaatctttccccctccgatcagtgttgaaccggtggaagtcgacttcggggcttgccctgggcccgaggctccaaatccagttccattgtgtttgatgaatcatacaaaggggaaaattatggttgtttggacaaggcgcagtgactgtcctttttgggtcacccctgagtcctgtgatgtcccccccttgaaaagtatggccatgcggctgcacttccagccaccccatcctaattgcctgtatacagtagagcttgaggctttcgccatctataaggtgtgcgcaaggaacgaacgtgaagagtgtggcgtcagtgcacgctcgctctctgggctggtaggctggcaggaggtaaccgaagggagcttccgtctgcacccgctgcgcgcgaggctctccttgggctggaccgtcacacccatgagcctgtctccaccgaaactccttgcctag

SEQ ID NO: 112582 - DNA, 5778 bp, synthetic construct
  misc_feature 1..5778: note = Description of Artificial Sequence: Synthetic coding sequence
  source 1..5778: mol_type = other DNA
atgttcaccctgaccgggtgtcgcttggtggagaagactcagaaggtggagaacccttctgtgagctttgcctcttcctttcccctgatcccattactgctgaggggcaagtctgttcagaagaaacaggccgagtctaaaagtcagataaagctgcatactcagtccgctccatttgggctgtgcccgaaggatatgatgctcacccaggccccttcctcagtcgtgcgtagcaggaacagccgcaatcacactgtgaacagcggcggttcctgcttgtccgctagtaccgtcgcaatcccggcaatcaatgattctagcgctgccatgtcagcctgtagcaccatcagcgctcagcctgccagttctatggacactcagatgcacagcccaaagaaacaggaacgagttaataaacgggtgatttggggaattgaggtcgcagaggaactgcattggaagggatgggagctgggcaaagaaactacccggaacctggttttaaagaatagaagtctcaaacttcagaagatgaaatacagaccacccaagaccaagtttttcttcactgtaatcccacaaccaatttttctgtctccgggaatcacactgacactgcctattgtgtttcgccctttagaagccaaggagtatatggatcaactgtggttcgaaaaggccgaggggatgttttgtgtgggactgcgagctaccctgccgtgtcaccggctcatttgtagaccacctagcctgcaactgcccatgtgtgccgtcggcgatactaccgaagcatttttctgtctggacaacgtcggtgatctccccacattcttcacctgggaattctcgtcaccattccagatgttgcccgcgaccggtctcctggagcccggacaggctagccagatcaaggtgactttccagcccctgaccgctgtcatctacgaagtgcaggccacatgctggtatggagccggctcgagacagcggagcagcattcagttgcaggccgtggcaaagtgcgctcaattgcttgtgtccatcaaacacaagtgcccagaagatcaggacgctgaaggctttcagaagctactgtacttcgggagcgtggccgtgggctgcacttccgaacgccagatccgcctgcacaatccatccgcggtgaacgccccctttagaattgagatctcgcctgacgaacttgccgaggaccaggccttcagttgccccaccgcccacggaattgtcctgcccggtgaaaagaagtgcgtgtccgtctttttccatccaaaaacccttgacacacgcaccgtcgattactgctccatcatgccttccggatgcgcttccaagaccctgttgaaagtagtcggcttctgtcgcgggccggctgtgtcactacaacactattgtgtcaacttttcctgggtcaaccttggcgagcggagcgagcaacccttatggatcgaaaatcaatctgactgcacggcccatttccagtttgcaatagattgcctggaaagcgtgttcactatcagacctgccttcggtaccctggtcggtaaggctagaatgacactgcattgcgcgttccagcctacacatccgatcatatgttttaggagggttgcgtgcttgatccaccaccaagatcctttgttcctggacctaatgggaacctgtcattctgattcaacaaaacctgctatccttaaaccccagcatttgacatggtatcgaactcacctggctcggggtttgacgctataccctccggatattctcgatgctatgttaaaagagaagaagctggctcaggaccagaatggagctctcatgatacctatccaagatttagaggatatgcctgccccccaatatccatatatccctcccatgactgagttcttcttcgacggaacatctgacattacaatctttccgccacccatctctgtggaacctgtagaggtggacttcggcgcgtgcccaggtcccgaggcccctaaccccgttccactctgtctgatgaatcacactaaaggaaaaattatggtcgtgtggacacgacggtccgactgtccgttctgggtgacccccgagagctgtgacgttcccccactcaagtccatggccatgcgattacactttcaaccccctcatccaaattgcctgtatacagtagagctggaggcattcgctatctataaagtgcttcagagctacagcaacatagaagaagactgcactatgtgcccctcatggtgcctgactgtgagagcacgaggccacagctattttgccggttttgagcaccacattccccagtactcgctggatgtccccaagctttttcccgccgtgagctctggcgaacctacgtataggtccctgctgcttgtcaacaaggattgcaagctgctgacattttcgttggccccccagcgcggctcagatgttatcttacgtcccacctcaggcctggttgctcctggcgcccaccagattatcctcatatgtacttatcctgagggttcaagttggaagcagcatactttttaccttcagtgcaatgcaagtccgcagtatttgaaagaggtgtctatgtattcacgggaagaacccctgcagctgaagctggatacccacaagagcttatactttaaaccaacttgggtgggatgctcatccaccagtcctttcacatttagaaatcctagcaggttgcccctccagttcgaatggagagtttcagagcagcaccgcaaactcctcgcggttcagccctcacgagggttgatacagcctaacgaaaggttaactctaacctggacctttagccctctggaagagactaaatacctgttccaggtcggcatgtgggtttgggaggccggcctgtctccaaatgcaaatcctgccgccaccacccattacatgctgcgactggtgggagttggactgactagttctcttagcgcgaaggagaaagaattggccttcggcaatgtgttagtaaacagtaaacagagccgatttctcgtcctattgaatgatggcaactgcactctgtactacagactgtacctcgagcagggttcccccgaggccgtagacaatcaccctctggccttgcagttggaccggaccgaaggctcaatgccaccgcgaagtcaggataccatctgcctgacagcatgccctaaacagagatctcagtattcctggactatcacatactctctgctcagccacagggacaataaggcgggtgaaaagcaggagctttgctgcgtgtccctggtggccgtttaccccctcctgtcaattctggacgtgtcctcaatgggcagtgctgaaggtataaccagaaaacatctgtggcggctgtttagtctggacctgctgaactcgtatcttgaaagggatcctaccccctgtgaactcacttataaggttcctacgcggcattccatgtcacaaatcccacccgtcctgacaccactcaggctcgacttcaattttggcgccgccccctttaaagccccaccctcagtggtgttcctggccctgaaaaacagcggtgtggtgagtttggactgggcctttctgttgcccagcgaccagagaatagatgttgagttatgggctgaacaggctgaactgaactctacagagttacatcagatgcgggtccaggataattgcctcttttcaatctctccaaaggccggctcgctcagtcctggacaggagcagatggtcgaattgaaatatagtcacctgtttatcggtaccgatcatttgccagtgctgtttaaagtgagtcatggcagagaaattctgctgaactttatcggggtgacggtaaaacctgaacagaaatatgtccatttcacctcaacaacacatcaattcatccccattccaatcggagacaccttaccccctaggcagatctatgagctatataacggcgggtccgtacctgtgacctacgaggtacaaactgacgttctgtcccaggtgcaagaaaagaactttgatcatcccattttctgctgtttaaaccccaagggagaaatccagcctggaagtaccgccagagtcctttggatattctcacccatcgaggctaaaacctacacggtagatgtgccaatccatatcctggggtggaattcggctctcatacatttccagggtgtcgggtataacccgcatatgatgggtgacaccgctccttttcacaacatctcttcatgggataactctagcatacactctcgcctcgtggttccaggacagaacgtattcttatctcaaagtcacatttcgctcgggaacattccagtccagagtaagtgctcaagactcctgtttctgaacaacatctccaagaatgaagaaatcgcttttagctggcagccttcgcctctggatttcggggaggtgagcgtgtcaccgatgatcggagttgtggctcccgaggaaacggtccctttcgtggtgacactgcgcgcaagtgtccacgccagtttctattcagccgacctcgtgtgcaagttgtactcccagcaattgatgaggcagtaccacaaagagctgcaggaatggaaggacgaaaaagtccgacaggaggttgaattcacaatcactgatatgaaggtaaagaaaagaacatgctgcacggcgtgcgagcccgccaggaaatataaaaccctccctcctattaaaaaccagcaaagcgtgtcccgcccggccagctggaaactgcagaccccgaaagaggaggtgagttggccttgcccgcaacctccatcccccggtatgctctgcctaggcctgaccgcaagggcacacgccactgattacttccttgctaacttcttttcagagtttccctgtcattttctacaccgggaactccccaaaaggaaggcccccagggaagaatcagaaacttccgaggaaaagtcacccaacaaatggggccccgtatccaaacagaaaaagcaactcttggtcgatattttgactaccattatccgaggactgcttgaagacaagaactttcacgaagccgtggaccagtccttggttgagcaggtaccttatttccgacagttttggaatgagcagtccaccaaatttatggatcaaaagaattctctgtacctcatgccaatactcccggtgccatcatctagctgggaggacgggaagggaaagcagcctaaagaggacaggccagagcactatcccggattgggaaaaaaagaggagggggaggaggaaaagggggaagaagaggaggaggagctggaggaggaagaggaagaggaagaggagacagaggaggaagagcttggtaaggaggaaattgaggagaaggaggaggagagagatgagaaagaggaaaaagtttcctgggcaggaatcggccctactccccagcccgagagtcaggagtccatgcagtggcagtggcagcagcagcttaatgtgatggttaaggaagagcaggagcaagatgaaaaggaggccattaggaggctacccgctttcgccaatctccaagaagccctgttggaaaacatgatccaaaacattctggtggaagcctcccgcggcgaagttgtattgacctcaagacccagagtaattgctcttccacccttttgcgtccctcggtcccttacccccgataccctactgcctactcagcaagctgaggtcttgcatcccgtggtgccactgccaactgacctaccttag

SEQ ID NO: 112583 - DNA, 5778 bp, synthetic construct
  misc_feature 1..5778: note = Description of Artificial Sequence: Synthetic coding sequence
  source 1..5778: mol_type = other DNA
atgttcacactcacaggttgtaggttggttgagaaaacacagaaagtcgagaaccccagtgtgagtttcgcctcctctttccccttgattcccctgctcctacgcggcaaatccgtgcaaaaaaaacaggccgaatctaaaagtcagattaagctgcacacccagtccgcacccttcggcttgtgccctaaagacatgatgctgacccaggctccgtcttcggtggttagatctcgtaattcaaggaatcacacagtcaactccggcgggagctgcctttctgctagcaccgtggcaattcccgctatcaatgactcttcggctgctatgtcggcatgttccaccatctccgcccagcccgcatccagcatggacactcagatgcacagccccaagaagcaggagcgtgtgaacaagagagtgatctggggcatcgaagtcgccgaagagctgcattggaaggggtgggaactgggcaaagagacaacacggaacctggtgttgaaaaacagatcactgaaactccaaaaaatgaaataccgcccacccaaaacaaagttcttctttacggtaatcccccaacccatatttcttagccccggcatcaccttgacccttccaatagtgttccgccctctcgaggccaaagaatacatggatcaactgtggttcgagaaggctgagggcatgttctgcgtaggcctgagagctacgctcccgtgtcacaggctgatctgtcgcccaccttcactccagctgcccatgtgtgctgtgggagacaccacggaggcattcttctgcctcgataacgtgggagatttaccgaccttcttcacgtgggaatttagcagccccttccagatgctgccagcaactgggctgctggagcccggccaggcctcccagattaaagtgactttccagcctctgacagccgtaatttatgaggtgcaggccacctgttggtacggcgccggaagcaggcagcgttcctccattcagctgcaagccgtcgccaagtgtgcacagcttctagtctccattaagcacaaatgtccagaggaccaggatgccgagggctttcagaagttattatatttcggcagtgttgcggtcggttgtacatctgaaagacagatccgactgcacaatccctccgccgtcaacgcacctttccgaattgaaattagcccggatgaactggccgaggaccaggcttttagctgcccaacagctcacggaatcgtgctgcccggggaaaaaaagtgtgtttcagtcttcttccatcccaagactctagatacaaggacggtggattattgttctattatgccgtcagggtgtgccagcaaaactctgttaaaggtagtgggtttctgtcggggtcccgccgtttccctgcagcactactgcgttaatttcagctgggtaaatctaggggagagaagtgaacagcccctttggattgaaaatcaatcagactgcacagctcatttccagttcgctattgactgtttggagtcagtcttcaccattcgacctgcctttggcacactagtgggcaaagcaagaatgaccctccattgtgcttttcaacctacccatccaatcatttgtttccgtcgggtagcttgtctgatccatcaccaagacccactctttctcgatctaatgggtacctgccattctgattctacgaagccagccattttgaaaccacagcacctgacctggtaccgcacgcacctggcccgtgggctgaccctgtatccccctgatatcttggacgccatgctcaaagagaagaagttagcccaggatcaaaacggagctctgatgattcctattcaagaccttgaagatatgcctgcccctcaatacccgtatatacctccaatgacagaatttttctttgatgggacaagcgatatcacaatcttcccgccaccaatatcagtcgagcctgtagaagtagactttggagcttgtcccggtccagaagcgcccaatcccgtgccactgtgtctgatgaaccacacaaaagggaaaatcatggttgtctggacccggaggagtgactgtccattttgggtgactcccgagtcttgtgacgtccctcccctgaaaagtatggccatgaggctgcacttccaaccgcctcatcccaattgcctgtacacagtcgagctggaggctttcgcaatttacaaagtcctgcagtcttatagtaatattgaagaggactgcactatgtgcccttcttggtgtctgaccgtgcgcgccagggggcactcttacttcgcaggtttcgaacatcacattccgcagtacagcctagacgtgccaaagctatttccagctgttagcagtggtgagcccacctacagaagcctcctgctagtgaacaaggattgcaaactgctaaccttctccctggcgccacagcgcgggtcagacgtgatcctgcggcccacctccggtctcgtggcccctggtgctcaccagatcattcttatctgtacgtatccggaggggtcatcttggaaacagcacacattctacctgcagtgtaacgcaagcccccagtacttaaaagaagtgtcaatgtacagcagagaggagccactgcagttaaaactggacactcacaaatctctctattttaaaccaacctgggtgggttgctcaagcacgtctcccttcacatttagaaaccctagcaggctcccattacagtttgaatggcgcgtgtctgaacagcatcgtaagctgcttgccgtgcagccctcacggggcctcatccaacccaacgagagactcaccctcacttggacgttcagtcccttggaggagaccaagtacttgttccaggtcggtatgtgggtgtgggaggctggtcttagcccaaacgccaaccctgcagccactacacattacatgctacgtttggtcggcgtggggctcacgtcttccctttcggccaaggaaaaggaattggcattcggaaacgtgctcgttaattcaaaacagtcccgatttctcgtgctcttaaatgatggtaactgtaccctctactacaggctgtatctggagcagggctccccagaggcggttgacaaccacccgttggcgctgcaactagaccggacagaaggaagcatgcctccccgctcccaggacaccatctgtctaaccgcatgtcctaagcaaaggtcccagtactcatggaccattacttacagcctgctttcccacagggataataaggccggggaaaagcaggagctgtgttgcgtttccttggttgctgtgtatccattactgtcaatcttagatgtgagtagcatgggatccgcggaaggcattacgcgcaaacatctctggagactattctcgcttgatctgttaaactcataccttgagagggatcctacaccctgtgagttgacatacaaggttccaactcggcattcgatgagccagattccacccgttctcacccccttgcgcctggatttcaactttggggctgccccattcaaagcccctccatctgtcgtgtttctggccctcaaaaactcgggggtggtcagtctggactgggcattcctgctgccctcagaccaacgaatagatgtggagttatgggctgagcaggccgagctgaattctacagagctgcatcaaatgcgcgtgcaagataattgcctgttctctatttctcccaaggccggcagtcttagccctgggcaggagcagatggtggagttaaagtactcgcatctctttatcggtacagaccatctgcctgtgcttttcaaagttagccacggtagggagattctgctgaatttcattggagtaacggtgaagcctgagcagaagtatgtacatttcacaagtacaactcatcaattcattcccataccgatcggggataccctgccgccgcgacagatctacgagctgtataatgggggatccgttcctgtcacatacgaagtacagacggacgtgctctctcaggtccaggaaaagaacttcgatcaccctatattttgttgcttgaatcccaagggtgaaatacagccgggtagcacagctagagtcctctggattttctccccgattgaagcaaaaacatataccgtggatgtgcctattcacatcctcggctggaattcagctctcatccacttccaaggtgtagggtataacccacatatgatgggcgacactgctccctttcataatatttcatcgtgggataattcctccatccactctcgcttagtggtgccaggacagaacgtcttcctttcacagtcccacatttctctcggcaacatcccggtccagtccaaatgctcccgcctgctctttctgaataacatttccaaaaacgaagagattgcattttcctggcagccaagccccctggattttggggaggtcagcgtttcccctatgatcggtgttgtcgctccagaggagacagtgcctttcgtcgtcaccctgagggcaagcgtccacgcaagtttctactccgcagatctggtgtgtaaactgtacagccagcaactcatgcgccagtatcacaaagaactgcaggaatggaaggatgaaaaggtaagacaggaagtagagtttaccattacggacatgaaagtcaagaagagaacatgttgtacagcttgcgagcctgcgcgcaaatataaaaccctacctcccataaaaaatcagcagtctgtgtcgcggcctgccagctggaagttgcagaccccgaaggaggaggtgtcctggccctgcccacaaccaccgtcaccaggcatgctgtgccttggattgactgcacgcgctcatgctacggactatttccttgcaaacttcttctccgagttcccttgccatttcctgcatcgagagctcccaaagaggaaagcaccgcgagaggagagcgagacatccgaagagaaatcacctaataagtggggcccggtgagcaagcaaaagaaacaattactcgttgatatactgactaccataatacgcgggttgctggaagacaagaattttcacgaagcagttgaccagtcactagttgaacaggtgccttacttccgccagttttggaatgagcagtcaacaaaattcatggatcaaaaaaactcgctatatcttatgcctattcttcccgtcccgtccagttcgtgggaggatgggaaaggtaaacaacctaaggaagaccgaccagaacactacccagggctgggaaaaaaggaagaaggagaagaggagaaaggagaagaggaggaagaggagcttgaggaagaggaggaggaggaggaagagaccgaggaggaagaattggggaaggaggaaatcgaagaaaaagaagaagagcgggacgagaaagaagagaaggtgagttgggctgggatcggtccaacaccccagccagaatctcaggagtccatgcagtggcaatggcagcaacagcttaacgtgatggtcaaggaagaacaggaacaggatgagaaagaagccatcagacggcttcccgcttttgccaacctccaagaagcgctgttagaaaacatgatacaaaatatcctcgtggaggcctctagaggagaggttgtcctgacgtcgcgcccgcgcgttatagcgttgcccccattttgcgtaccccgtagcctgacaccagatacactgctcccaacgcagcaggccgaagtcttgcaccctgtagtgccactcccaactgatctgccatag

SEQ ID NO: 112584 - DNA, 816 bp, synthetic construct
  misc_feature 1..816: note = Description of Artificial Sequence: Synthetic coding sequence
  source 1..816: mol_type = other DNA
atgactctgcactgcgcctttcagcctactcaccctataatttgctttcggcgcgtggcctgtctcattcatcatcaggatcctctcttcctcgacctgatggggacttgtcatagtgactcaactaaacccgcgatcctgaagccccagcatctgacatggtaccggactcatcttgccagaggtctcactctctacccgcctgacattttggacgctatgctcaaggagaaaaaactggcccaggaccagaacggggccctaatgattcctatccaggacctggaagatatgcccgctccacaatacccctacatcccccctatgactgaattcttctttgacgggacctcagacattaccatttttccacctccgatatccgtggagcccgtggaagtggattttggcgcatgtccgggtcccgaggctccgaacccagtgcccttgtgtctgatgaaccacaccaagggcaagatcatggtagtgtggacacgccgatctgactgtcctttctgggttacccctgagtcatgcgatgtgccccccctaaagtcaatggcgatgcggctacactttcagcctccacacccaaactgcctgtatacagtggaactggaggcctttgctatatacaaagtctgcgctcggaacgagcgagaagagtgcggcgtctctgctaggtctctgtctgggcttgtaggatggcaggaagtcaccgaaggctctttccgattgcacccgctcagggcccgcctgtctttaggctggaccgtgacccccatgtccctgtccccaccaaaacttctggcatag

SEQ ID NO: 112585 - DNA, 543 bp, synthetic construct
  misc_feature 1..543: note = Description of Artificial Sequence: Synthetic coding sequence
  source 1..543: mol_type = other DNA
atggcagccttggatttacgcgcagagttggattctcttgttttacagcttctaggagatctggaggagctggaaggcaaaagaacggtcttaaatgccagggttgaagaggggtggctgtctcttgctaaagcaagatacgctatgggggctaagagtgtcggacctctgcagtatgcctctcatatggaaccccaggtgtgtctccacgcatccgaagcccaggagggactacaaaagttcaaggtggtgagggcaggcgtacatgcccctgaggaagtgggacctcgggaggctgggttgcggcggagaaagggccccactaaaacaccagagccagagagttctgaagctccacaagaccctttaaattggttcggtatcctcgtccctcacagcttaaggcaggcccaagccagctttcgcgatggattgcagctcgccgctgatattgccagcctgcagaatcggatcgactggggtcgtagtcaactcaggggactgcaggaaaaactcaagcagttggaaccgggagctgcatag

SEQ ID NO: 112586 - DNA, 567 bp, synthetic construct
  misc_feature 1..567: note = Description of Artificial Sequence: Synthetic coding sequence
  source 1..567: mol_type = other DNA
atgggaacacccttggatggtggttcacgcgtacccatcgggtgtcccgccaagcttaggagggtgactaggaagaaggtggcacctgaccttgaaggctggctgtccctcgccaaggcccgatacgccatgggcgctaaatccgtggggccactgcaatatgcgtcacacatggaaccccaggtctgtcttcatgcctccgaagcacaggagggcttacagaagttcaaagtcgtgcgtgccggggtccacgctccagaggaggtcggtcccagagaggccggactaaggcggagaaagggaccaacaaagactcctgagcctgaaagcagtgaagccccccaggatcctctaaattggttcggaattctagttccgcattccctgcgtcaggcccaggcgtctttccgtgatggcgtgctggaggccaagaaacgaaagtgcttcctcgaacgagttatccagtgtgtagtgtccccagccgcagaacaggaagcggaggacgagtcctgcccggaggactgggctgccgctgtgccagccgagacatctgctaaagccatttag

SEQ ID NO: 112587 - DNA, 855 bp, synthetic construct
  misc_feature 1..855: note = Description of Artificial Sequence: Synthetic coding sequence
  source 1..855: mol_type = other DNA
atgtccgataacaaggaaagaaaaagccagggcttccctaaggaggacaaccaagataccagttcgctggcagatgctgtcgagaaggttgccaaacagcagcagagccaagccagcgagatcgaaaagaataagaaggtgctctttaacctgaagaacgagctgcacgagctggaaaaagagattgcagcaattagcgccgagacaaaggaaaccgagcgccagatctatcagcaggactcagcaatagaaaatacaaagctgcactgcgattccctcgaaacccagattaaatccctgcactccgaaaatgtaaaactgaagttcgacattgagaccgctcaagaagacttcgaagaacatatgattaaatacaatgcatattacgccaaaatcaaagcccataaaaactctctgggcgaagtggagtccaaatggagtttcatgacggaactccacgagaagcgcgactttgtcaagaaacttaaaactatgaaggaggaactgatgcaggatttgcagaatccaggaggtaatcgcatcacacaggtgcaggaagacataactaatttaaaagacaagataatcactgtgaaggagtcaattatcgagaagacctgctttttagaggaggaaaaaaagacacatgagaagctgaggaaggagatagagagtctcgccccaagtcccagactggagtgttcttccgcaatctcagcacactgcaaactgtgcctgccagggtctcgacactcccctgcctcagccagtggcgtggcaggaactactggtgcctgccaccatacccaactgattttttgtatatttagcagggatggagtcagcccctgttag

SEQ ID NO: 112588 - DNA, 822 bp, synthetic construct
  misc_feature 1..822: note = Description of Artificial Sequence: Synthetic coding sequence
  source 1..822: mol_type = other DNA
atgtcagacaataaggagaggaaatcccagggttttcctaaggaggataaccaggacacctcctccctcgccgacgcagtggagaaagtagccaaacagcagcagagccaggcgagcgagattgaaaaaaataaaaaagtgctgttcaatctgaaaaacgaactacacgagctggaaaaggagattgccgctatatctgccgaaactaaagaaacggaaagacagatttatcagcaggattcagctatcgaaaataccaaactccactgtgatagcctggagacccagattaagtccctccactccgagaatgtcaagctgaagtttgacatagaaaccgcccaagaagattttgaagagcatatgattaagtacaatgcctactacgccaagattaaggcccataaaaatagcctgggggaggttgagtctaaatggtccttcatgacagagctgcatgaaaagcgcgatttcgttaagaaactgaaaactatgaaggaggagctcatgcaggacctacaaaatcctggtgggaacaggattacacaggtacaagaagatatcaccaatctaaaagataagatcatcacagtgaaagaatcaattattgaaaagacgtgcttcctggaagaagaaaaaaagactcatgaaaagctgcgcaaagagattgaggtgcaacataagcgctatgacgccattctgaaacgcttacattgccaggtgaataaactccagtctaatcgccgacagtggcagtggaatatccagcagctcgagaaaacagccgcagagctcaggaaatgcatcggcatgcaggaatag

SEQ ID NO: 112589 - DNA, 1536 bp, synthetic construct
  misc_feature 1..1536: note = Description of Artificial Sequence: Synthetic coding sequence
  source 1..1536: mol_type = other DNA
atgagtaaagtggcgcgcagtagcagcgagtctgatgtgcagttatgggagaccgaggaagacgacatgaccgagggcgatctggggtatggcttaggccgcaagcctggcggcatctacgagatcgaattttcccatcggtccaggaagaggtccgacggaaaaaattttagcccaccgcctttcccacgcaaaggcgaggaacggaatgaggccagttttcaatactcgaaacataaaagtcagcaggacacgtttcctcaggtctcacggatctcaaattaccggcgccagagctccactgttgacagtaactctgagctttcaaatgaagagctgaggcaatgtcttaatgaaacacttgaggaagtcgaaatgctcaagacggagctcgaggcgtcccagaggcagctcaggggcaaagaagaagcgcttaaaatcctgcagtctatggctatcttaggaaaagccacatctcatactcaggcggttctgcaaaagacgatggaacagaataggagcctggagaaggagattaacgccctccagtgggaaatcgagttcgaccacaataggttcaaaaatatagaagagtcctggattcaaaagtatgacaggctcaattgcgagaatgctgttttaaaggagaatctcaaggtcaaaacagaggagattaaaatgctgaaaagcgacaacgcggtcctgaatcagagatacctcgaggctcttgctatgctcgatataaaacagcagaaaatggcccaagaaaacatgtgctgcgacaagtctgggttcgctgaagcctcaggtctggagcttgccgtgctgggggcgtgcctttgccacgggccgggtggcaatccttgctcttgtgcccgaatggccgccagcaccaggaaactgctgcttcagctcaagcaagagttggagatcttacagaaatctaaggaagaagcctatgtcatggcagatgctttccgaatcgccttcgagcagcagctcatgcgcaagaatgaccaagctctacagcttacgcagatggacaagatgcacaaaaaggcaaccaaatggatgaattggaagcacctgaaagaggacgggtttccttctccccgttctaaaaaaacttttgggcagcggttgctggggatgctaccttcggagaactcgtctaagcggatggaagaccaggacagccctcaagaggtgttgaaaatgctcatcgacttactcaacgacaaagaagaagccctggcgcatcagcggaaggtgtcttatatgctggcccgtgctttggaggacaaggacacggcctccaatgaaaataaggagaagaaccccataaaggaaaattttccattcaataacccctggaggaagacttctgaatttagcgtgcttggggatcccattcactccagcgtgtgcatcctcaattctgttggttgtatctgttccatccagcacagccaaatcgatccaaactatcgcacccttaaacggtcccactcccttccatcatcaattattttttag

SEQ ID NO: 112590 - DNA, 1536 bp, synthetic construct
  misc_feature 1..1536: note = Description of Artificial Sequence: Synthetic coding sequence
  source 1..1536: mol_type = other DNA
atgtccaaagttgcaagatccagctccgaatccgacgtccagctgtgggagaccgaggaagacgacatgacagaaggcgatctagggtacggattgggccgtaaacccggggggatctacgaaatcgagttcagccacagatctcgtaagcgttcagacggtaagaactttagccctccaccgttcccaagaaagggcgaagagcgcaatgaggcatcttttcagtactccaaacataaaagtcagcaagacactttcccacaggtttcacggatttccaattatcggcgacagagcagcacagtcgactctaactctgaactgtccaacgaggagttacgccagtgtttaaatgagacgctggaggaagtcgagatgctcaagacggaactggaggcgtcccagaggcagttacgcggcaaggaagaagccctgaaaatcctgcagtctatggcaattcttggcaaggcgacatcccacacccaagctgtgctgcagaaaacaatggaacaaaaccgcagtctggaaaaagagattaacgctttgcagtgggagattgaatttgatcacaacaggttcaagaatattgaagaaagctggattcagaaatatgacagactgaactgtgagaacgcagtgcttaaagagaatctgaaggtcaagacagaggaaattaagatgcttaagtcagacaatgccgtgttaaaccagcgctacctggaggcattggcaatgctcgatatcaaacagcaaaagatggcgcaggagaatatgtgttgcgacaaaagcggttttgccgaggcttcaggattggaacttgccgtgctgggcgcctgtctttgccatggacccgggggtaacccctgcagttgtgctcgtatggcagcatcaactcgcaagctgcttcttcaactgaagcaggaattggagattttacagaagtccaaagaagaagcatatgtcatggcagatgcctttcggatcgcctttgaacagcagctgatgcgtaaaaacgaccaggccctgcaactgacacagatggacaaaatgcacaagaaagccaccaaatggatgaactggaagcatttaaaggaggatgggttcccctcccctcgaagcaagaagacctttgggcagcgcttgttgggcatgctgcctagtgaaaacagcagcaagagaatggaagatcaggatagcccacaagaagtgctaaagatgcttatcgatctcctgaatgataaagaggaagctctagcacatcagcgaaaagtgagttatatgctggccagagccctcgaagacaaagatacagctagtaacgagaataaggaaaaaaacccgatcaaggaaaatttcccctttaataacccttggcggaagacatctgagttctcagtccttggcgatccgattcattcgagcgtgtgtattctgaatagcgtgggctgtatatgctcaattcagcactctcagatcgatccgaattataggactctgaagcggtcccacagcctcccaagttccataattttctag

SEQ ID NO: 112591 - DNA, 1161 bp, synthetic construct
  misc_feature 1..1161: note = Description of Artificial Sequence: Synthetic coding sequence
  source 1..1161: mol_type = other DNA
atgctcaaaactgaacttgaggcaagtcagcgccagctaagggggaaagaagaggcattaaagatccttcagagcatggcaattctgggaaaagctacctcacatactcaggctgtgctgcagaagactatggaacagaaccgctccctcgagaaggagataaacgctctccagtgggagattgagtttgaccacaacagattcaagaatatagaagaaagctggatccagaaatacgaccgcctgaattgtgaaaacgctgtactgaaagagaacctgaaagttaagacagaagagataaagatgttgaagagtgataatgcggtgttgaaccagagatacctggaggcccttgcaatgcttgacatcaagcagcaaaaaatggctcaagagaatatgtgctgtgataagagtgggtttgccgaggcgtcggggctcgaattggcagtcctaggcgcctgtctttgtcatggccctggcggtaacccttgcagctgtgcccgcatggcggccagcacccggaagctactcctgcagcttaagcaggagctggaaattctgcaaaaatccaaggaagaagcctacgtgatggctgatgccttcaggatcgcttttgagcagcagttaatgagaaaaaatgatcaggccctacagttaactcagatggacaaaatgcacaaaaaagcaacaaaatggatgaactggaagcacctaaaagaagacggtttcccttccccgcgctccaaaaaaacttttggacagcgactgcttgggatgttgccaagcgaaaattcttcaaagaggatggaagaccaagactctccacaagaagtgctcaaaatgttaatagatctgttgaacgacaaagaggaagctctcgcacaccagaggaaggtctcttatatgctagccagagctctggaagataaagacacggcgtcaaacgagaacaaagagaagaatccaatcaaggagaactttccattcaacaacccatggagaaagacctctgaattctcggtgctgggagatcccattcacagctccgtttgtatcctcaacagcgtcggttgcatttgctctatccaacacagccagattgaccccaattatcgaaccctgaagaggagccattctctgcctagtagtatcattttttag

SEQ ID NO: 112592 - DNA, 3465 bp, synthetic construct
  misc_feature 1..3465: note = Description of Artificial Sequence: Synthetic coding sequence
  source 1..3465: mol_type = other DNA
atgcaagctatggagggagaagtgttactgccagccctgtacgaagaggaagaagaggaggaggaagaggaagaggaagttgaagaagaggaggagcaggtgcagaaaggggggagtgttggctccctcagcgtgaacaaacatcgtggactttctctgaccgaaaccgaattggaagagctaagggcacaggtgctgcagctggttgcggagctcgaagagacgagagagcttgcagggcagcacgaggatgattctctcgagctgcagggcctgctggaggacgagcggctggcgtctgcacaacaggccgaagtattcactaaacagatccagcagttgcagggagaacttaggtccctgcgggaggagatttcccttttagaacatgaaaaggaaagcgaactcaaggagatagaacaggaacttcacctggcgcaggccgagatacagtcacttagacaggccgcagaagactccgctacagaacatgagagtgacattgcctccctacaggaggatctctgtcgaatgcaaaacgaactcgaagatatggagaggatcaggggagactacgaaatggagattgcttctctgcgcgccgaaatggagatgaaatccagcgagcccagtggaagtctgggactgagcgactattccggacttcaagaggagctgcaggaattacgggaaaggtaccatttccttaatgaggaataccgagctctgcaagagagcaattcttccctgaccgggcagttggcagacctagaatcagagagaacccaaagggcaaccgagaggtggcttcagtcccagaccctgtcaatgacctcagccgagagtcagacatcagagatggatttcttggagcccgacccagagatgcagctgctgcggcaacagctgagagacgctgaggagcaaatgcatggaatgaaaaacaaatgtcaagaattgtgctgtgaactggaggagctgcagcaccataggcaagtgtctgaagaggagcaacgtcgcctacagcgggaactgaagtgtgctcaaaatgaagtcctccgctttcagacttcccatagcgtgacccagaatgaggaacttaaaagcagactgtgcacgcttcaaaagaaatacgacacatctcaggatgagcagaacgagctgctcaaaatgcagctccagctgcagacagaactaaggcagctcaaagtgatgaaaagcactcttgtagagaaccagagcgaaaaagagttactctgtcgtctgcagaaactacatctacagcaccaaaacgtaacctgcgagaaagagaagttactggaaaggcagcagcaattgcaggaggagctgcaatgtcacgaagcagaacttcaacacttacgagatacagtcgcttcattcaaggaatctaacgagaaagataccgaaacgcacgctcaacttcaggaaatgaaacagctatatcaggcatccaaagacgaactcgagagacagaaacacatgtacgaccaattagaacaggatctgctgctttgtcagcttgagctgaaagagctgaaagcaagtcacccgattccagaggacaagggtaaatgtgcgaacaagtgcgacacccttttatctcggcttaccgagctacaggaaaaatataaagcctcccagaaagagatgggacagcttcagatggagcagtgtgaacttctggaggatcagagacgaatgcaagaagaacagggacaactacaggaagagctccatcggttgaccctacctctgcccaagtccggactgctcctcaaatcccaagagctgctaaccaagttagaagatttgtgcgagctgcagctgctgtatcaaggcatgcaggaggaacagaagaagcttatccagaatcaagattgtgtgctgaaggagcagctggagatccatgaagagctaagaagatttaaggagtcccacttccaagaggtgctggaaaaccccgacgatagtaagctggccaaaagcagcaagtgcaaccgtaataagcagagcaagctgctgatggagcagatgcaggccctacaggtaatgtatgacgcggggcaagctaagcaagagttactgcagcaggaacaaggccgtcttctagaagagagaaagaggttacaagccgacctgcagctctgtctggaggagatgcagctcctccaagttcagagcccgtccattaaaatgagtctggaaagctacgggaaatcttatgggtctatggtgccatcaaacgaaaactgtaggaagacctacgatactacagtggatgacaatgagtcctactataagtcctacacatccactcaaactagctccaagagtttcctgaagtcttatgactcgtccacgagcgctagcgaggcttatggcaagagctattgtaccacctctaactctagtatcacttataagaagagctatggctctacgtcaagcagtgatacatgtcaaaaaagctttgtctcttcctgcactgacgaggagcccgctgaaccagaggatatggaacgcttcgaggaaatggtcgtgaaagtcctgatcaaactccaggctgtgcaagctatgtatcagatttcacaggaggagcactcgcagcttcaggagcagatggagaaactcctagctaaacagaaggatctgaaagaggagctcgacgcatgcgaaagagagtttaaagaatgcatggagtgcctggagaagccaatggctccacagaacgacaagaacgaaatcaaggaactccagacaaaactccgggagttacagttacagtaccaggcctccatggacgagcagggcaggctgctcgtggtccaggagcagctggagggccagcttcagtgttgtcaagaggaactgcgccaactgcgtgagaagcgaccgagtgttgttaaagaggctcggggcaaaaatgcgaacaagaatatgaataagaatgccaatggggttaaaatgaaaaaagtaactaagccttgtagcgatacatcagagagtgacctggaaacccggaaatctctggaggtagtcctttactataaggctagccagaggaaattggatggccttgcaaaggaggaggagaagaaagaagaaatggaggaagagaagaaacaggtgaaagaggaagcaaaggagcagtgtggcgacgaactggtagcggagcccgccgatcctgaggaagccaaatctacagaagaccaagaagaaaatgaagaggataaggaggaggaagagaaagaggaggacagcgaggaggaggaggatgacgcagatagctccctcgagtcacccgaggagaataatccactgcggctcagcgagagcaagaaatcctcaccgacacccaatccccctattttttccctcccgctcgtcgggttagtggtgatctccgccttgctttggtgttggtgggccgagacaagttcatag

SEQ ID NO: 112593 - DNA, 2874 bp, synthetic construct
  misc_feature 1..2874: note = Description of Artificial Sequence: Synthetic coding sequence
  source 1..2874: mol_type = other DNA
ctccgcgcactcgaaggagaggtcttactcccagccctgtacgaggaagaggaagaggaggaggaagaggaagaagaggtggaagaagaggaagaacaggtacaaaagggaggctcagtgggtagcctgtccgtaaacaagcatagggggctgtcactgaccgaaaccgagctagaggaacttcgagcacaggtgctgcagttagtggccgaattggaggaaactagagaactggcagggcagcatgaagacgatagtctggagctacaggggttgctggaggacgagcggcttgcgagcgcccagcaagccgaggtgttcaccaaacaaatccagcagttgcagggcgagctgagatcactgagagaggagatctcactcttggagcacgaaaaggaaagcgaattaaaggaaattgagcaggaactgcaccttgcccaagccgagatacaaagcctgagacaggccgcggaggactccgccacggaacatgagtctgacattgcatcactacaggaggacctgtgcagaatgcagaatgaactggaagatatggaacggattcggggggattacgagatggaaatagcttccctgcgggctgagatggaaatgaagtcttccgagccgagtggcagtcttggcctcagtgactactcaggactgcaggaagaacttcaagagcttcgagagaggtatcattttttgaacgaagaataccgggccctgcaggagtctaattcttctttaacagggcagctagctgatcttgagagtgagaggacccagagggcaaccgagcgctggctgcaatcacagactttaagcatgacatccgcagagagccagacttccgaaatggactttctagagcctgatccagaaatgcagttgctgaggcaacaattgcgggatgccgaagagcagatgcacggtatgaagaacaaatgccaggagctgtgctgcgagcttgaggagctgcagcaccatcgccaagtgagcgaagaagaacagaggagactgcagcgcgaacttaagtgtgctcagaacgaggtcctgagattccagacgtctcacagtgttactcagaacgaggagctcaaaagtaggttgtgtactctgcagaagaaatacgatacatcccaagatgagcagaatgaactactgaagatgcagttacaactgcagactgaactgcggcagctgaaagtgatgaaatccacacttgtggagaaccagtccgagaaagagctcttgtgtagactccagaaactccacctacagcaccagaatgtcacctgtgagaaagagaagctactcgaacgtcagcagcaactgcaggaagagttgcaatgccacgaggctgagctccaacatcttagggatacagtggccagttttaaggagtcaaacgagaaagacacagagacacacgcccaactgcaggaaatgaagcagctgtatcaggccagcaaggacgaactcgagcggcaaaagcacatgtacgaccagcttgagcaggatctccttctttgtcagcttgagctgaaagagttaaaagcttcgcatcccatccccgaggacaaggggaagtgtgcaaacaagtgcgacaccctgctgagtcggctcaccgagctgcaggagaaatacaaggccagccaaaaggagatgggacaactgcaaatggaacaatgtgaacttctggaagaccaacggcggatgcaagaagagcaaggccagctacaggaggagctccaccgactcacactgcctctgccaaaatcaggcctgttactaaaatcgcaagaactgctgaccaaactggaggacctctgcgaactccagctcctctaccagggaatgcaagaagaacagaagaagcttattcagaatcaagactgtgtgcttaaagaacagcttgaaatccatgaggaactgaggcgcttcaaagagtctcatttccaggaggttcttgagaaccccgacgattcaaagctcgctaagagcagtaagtgcaataggaataagcaaagcaagttgctgatggagcaaatgcaggccctacaggtaatgtatgacgcggggcaggccaagcaagagctactccaacaagagcagggccggctgttagaggaacgaaagcgactacaagcagacctgcaactgtgcctggaagagatgcaactcctccaggtacagtctccctcaatcaagatgagtctcgagtcctacgggaagagctacggatccatggtgccttcaaacgagaattgccgcaagacgtatgatacgactgtcgatgacaacgagtcatactacaaaagttacacatcgacacaaacatctagcaagtcgttcctcaaatcatacgacagctccactagtgcgtccgaggcgtatggaaagtcttattgcacaacatcaaattcgagcattacctataagaaaagctatggatctaccagttcaagtgacacctgccagaaaagtttcgtgtccagttgtaccgacgaggagcctgcagagcctgaagatatggagagattcgaggagatggtggtcaaggttcttatcaaacttcaggctgtgcaggccatgtaccagatcagccaggaggagcactctcagctgcaggagcaaatggagaaactgttggctaaacaaaaggacctgaaagaggagctggacgcatgcgaacgcgagttcaaggagtgcatggagtgtctagagaaacctatggctcctcaaaacgataagaacgagaatatgtttggcctgtggaagccaatggtatttcttgccatcgccgccgttgcactctatgtgctgccaaatatgagacaacaggagtcggagttttgcttaatggagtag

SEQ ID NO: 112594 - DNA, 1305 bp, synthetic construct
  misc_feature 1..1305: note = Description of Artificial Sequence: Synthetic coding sequence
  source 1..1305: mol_type = other DNA
atggaggctggcgcaggagctggcgccggcgcggcgggatggtcttgccccggccccggccctactgttactacactgggctcctacgaggcctcagagggctgtgaaaggaagaagggacagcgttggggatcacttgaaagacgcggaatgcaggcaatggaaggcgaagtgctgctgcccgcactatatgaggaagaggaagaagaggaagaggaggaagaagaagtggaagaagaggaggaacaggtacagaaggggggctcagttggttccctctccgtgaacaaacaccgcggcctgtcactgaccgaaacagagcttgaggaactgagagcccaggtcctacagctggttgctgaattggaagaaacccgggagttagccgggcagcacgaggacgattccttggagctgcaggggttactggaagatgagagactggccagtgcccagcaggcggaggtgtttactaagcagattcagcagcttcagggcgaactgcgcagcctgcgcgaggagatctctctactagagcatgaaaaagaaagtgaactcaaagagatagaacaagagctccacctggcacaagctgaaatccagtccctccgccaggccgccgaggacagtgcaacagaacacgaatctgacattgcttctctgcaagaggatttatgccgtatgcagaatgagctagaagacatggaaagaatcagaggtgactatgagatggagattgcctcacttagggctgagatggaaatgaaatcatctgaaccatcagaagagttgcaggagctgcgggaaagataccattttcttaatgaggagtaccgtgccctgcaggagtctaattcttcgctgaccggacaactggcggatcttgagtctgaacggacacagagagccaccgagagatggctacagtcgcagacgttaagcatgacctctgcagagagtcagacgagcgaaatggattttctggaacctgatcctgagatgcagctgctgaggcagcaactgagagatgctgaagagcagatgcacggaatgaaaaataagtgtcaagagctgtgttgcgaattggaagaactccaacaccatcggcaggtgtctgaggaggaacaacgtcgcctgcagcgtgagctgaagtgtgcccaaaacgaggtcctgagatttcagacttcacacagtgtgacccagtcctctcccacgcccaatcctccaatcttctcactgcctttagttgggttggtggtgatcagcgcgctcctgtggtgctggtgggccgaaaccagcagctag

SEQ ID NO: 112595 - DNA, 3474 bp, synthetic construct
  misc_feature 1..3474: note = Description of Artificial Sequence: Synthetic coding sequence
  source 1..3474: mol_type = other DNA
ctgcgcgcgttggaaggtgaagttttgctgccggccctatatgaggaggaggaagaagaagaggaagaggaagaagaggtggaagaagaggaggagcaagttcagaaggggggttcggttggtagcctgtcagtgaataaacatcgcggactgagtcttacagagacggagctcgaagagctaagagctcaggttctccagctggtcgccgagctggaggaaacccgagagctggctggacagcatgaggatgacagcttggaactccaaggtttactggaggatgagcgattggcatcggcacaacaggctgaagtgttcactaaacagattcagcagttacagggagaacttaggtcgcttagagaagagatctctctgctggagcatgagaaggaatctgagctaaaggagatagaacaggagttacacttggcccaggcagagattcaatcactgcgacaggcagccgaagattccgcaactgagcatgagtctgatatcgcttctctccaagaagatctgtgccgcatgcagaatgaactggaagatatggagagaatcaggggcgactatgaaatggagatagcaagtctgagagcggagatggaaatgaagagctctgagccatctggcagcctcgggctttctgattatagtgggctacaggaagagcttcaagagctgcgcgagcgttatcacttcctgaacgaggagtaccgagccctccaagaatcgaattcttctctgaccggccagcttgcagacttggagagcgagaggacgcagagagcaactgaaaggtggttacagtcccaaacccttagtatgaccagcgctgagtcccagacctcagaaatggacttccttgagcctgatccggagatgcaactgctccggcaacagctacgagatgccgaagaacagatgcatggcatgaaaaataagtgccaagagctgtgctgcgaactggaggagctccaacaccatcggcaggtgtcagaagaggaacagcgacgtctacagcgtgagctcaaatgtgcacaaaacgaggtgctgcgcttccagacctctcattcagtaacccagaatgaagaactgaaaagccgcctctgcaccttgcagaaaaagtatgacacctcacaggacgaacaaaatgagctcctgaagatgcagctgcagctgcaaaccgaacttcgccagctgaaagtcatgaagagcaccctagtagaaaaccaatccgagaaagaactgctgtgcagactccaaaaattgcacctccagcatcaaaatgtcacctgtgagaaagaaaaactgctcgagcgccaacagcaactgcaggaagagctgcagtgccacgaagccgagctccagcatcttcgcgatacagtggccagcttcaaggaatccaacgaaaaggacactgagacgcacgcgcagctgcaggaaatgaaacaactgtaccaagcctccaaagacgagttagaacgacagaagcatatgtatgatcaacttgagcaagatctgcttttgtgccagttggagcttaaagagttgaaggccagccatcccatccctgaggataaagggaaatgtgcgaataagtgtgacaccctgctcagccgacttacagagctgcaggaaaagtacaaggctagccagaaggagatggggcagctgcaaatggagcaatgcgagctcctggaggatcaacgtcggatgcaagaagagcagggccaactgcaggaggagttgcaccggctcactctcccactgccgaagtctgggctactactaaaaagccaggaattgcttacaaaactagaagatctttgtgagctgcaattactttaccagggaatgcaggaagaacaaaagaagctgatccagaatcaggattgcgtgttgaaggagcaactcgaaattcacgaggagctgcgccgtttcaaggagtcgcacttccaggaggtactcgagaatcctgatgacagcaagttagcgaaatcatctaagtgcaacagaaacaagcagagtaaactgttgatggaacagatgcaggcactccaagtgatgtatgacgctggtcaggcgaaacaggaactgctacagcaagagcaaggtcgtctccttgaagagcgaaagcgtttgcaggcagacttgcaattatgcctggaggagatgcaactattacaggtccagagccccagcatcaagatgtcgttggagagctacgggaagtcatacggttcgatggtaccatcaaatgaaaattgcagaaagacctacgacacaactgtggatgacaatgagtcttattataagagctacacgagtacgcagacctcctcaaagagtttcctgaagtcttacgatagctcaactagtgcctccgaagcctacggaaaatcctactgtactacatctaatagctctatcacctataaaaagagctacggtagcacttcctcatcggatacgtgccagaaatcatttgttagtagctgcacagatgaagaaccagcggagccagaggatatggaacgttttgaagagatggtggtgaaagtgttgattaaactccaagccgtccaggctatgtatcaaatttctcaggaagagcactcgcaacttcaggaacagatggagaaactcttagcaaaacaaaaagacctcaaggaggagttggatgcctgtgagcgcgaattcaaagaatgcatggagtgcttagaaaaacctatggcaccccagaatgataaaaacgaaatcaaagagttgcagacaaagttgagagagctgcagctccaatatcaggctagtatggacgaacagggccggttgttagttgtgcaggagcaattggagggacagttacagtgctgtcaggaagaactcagacagttgcgagagaaaaggccttcagtcgtcaaagaggcccggggtaagaatgcgaataaaaacatgaataagaacgcaaatggagtgaaaatgaagaaagtgaccaagccttgcagtgacacttctgagtcggacctagaaacccgcaaaagtcttgaggtggttctgtattacaaggccagtcagcgcaaactggacggtctcgccaaggaggaggagaaaaaggaagaaatggaggaggagaagaaacaagttaaagaggaggccaaagaacagtgcggtgacgagctcgtagcagagccagctgatcctgaggaagctaaatcaacagaggaccaggaagagaacgaagaagacaaggaggaggaggagaaggaggaagacagcgaggaggaggaggatgatgccgacagctccctagagagtcccgaggagaataatcccctgcgattatcagagagcaaaaaaaatatgttcggcttatggaaacctatggtcttcttggccatcgccgctgtggctctctacgtcctgcctaatatgcggcagcaggagagcgagttttgcctgatggagtag

SEQ ID NO: 112596 - DNA, 309 bp, synthetic construct
  misc_feature 1..309: note = Description of Artificial Sequence: Synthetic coding sequence
  source 1..309: mol_type = other DNA
atgcaggccatggagggcgaggtcttgttgcctgctctatacgaagaggaagaggaggaggaagaggaagaggaggaggtagaagaagaagaggagcaggtgcaaaaagggggctcagtaggctcattgtcagtgaataaacataggggtctttcattgacagaaactgaattggaggaactacgtgcccaggtactgcagctggtggccgagcttgaagagacaagagagctcgctggacagcacgaggacgacagcctcgaactgcagggtctgctggaagatgaacgcttggcttccgcccagtag

SEQ ID NO: 112597 - DNA, 1341 bp, synthetic construct
  misc_feature 1..1341: note = Description of Artificial Sequence: Synthetic coding sequence
  source 1..1341: mol_type = other DNA
atggaggctggtgcaggcgccggcgctggggctgccggctggtcttgtcctgggcctgggcccacggtgacaacacttggatcctacgaagcctccgaaggctgtgaaaggaagaaggggcagaggtggggctccctagagcgtagaggcatgcaggccatggaaggcgaggtactgctgccagctctgtacgaggaggaagaggaggaggaagaggaagaagaggaggttgaggaagaagaggagcaggtgcagaaaggggggtctgttggatcactgagcgtgaataagcatcgaggattgtctctgaccgagaccgaacttgaagagctcagagctcaagttcttcagcttgtagctgaacttgaggagacccgagagctagccggacagcacgaggacgattctctcgagttgcagggtctcttagaggacgagcgcttggctagcgcccagcaggcagaggtttttactaaacaaatccagcagctgcagggagaactgaggtctctgagggaagaaatcagccttctggagcatgagaaagaatctgaattgaaggaaattgagcaggagctgcacctggcacaggccgagatccaaagcttacgacaggctgctgaggactcagccactgaacacgagtccgatatcgcgtccctccaggaggacctgtgcagaatgcaaaatgaactcgaggacatggagcggatccggggtgactacgaaatggagatagccagtttgagagccgagatggaaatgaagtccagtgagccaagcggaagcttgggcttgagtgactactccggcctgcaggaggaactccaggaacttagggagaggtaccactttctgaatgaagaatatagggcattgcaggagagcaactcttcactgacaggccagctcgctgacctggagtcagagaggacgcagcgagccacagagcgatggctgcagtctcagacactgagcatgacatcagccgagagccagacatcggagatggatttcctggagcccgaccctgaaatgcagctactacggcaacaattgcgagatgccgaagagcagatgcatgggatgaagaacaagtgtcaagagctgtgttgcgagctggaggagctccagcatcacaggcaggtgtcagaagaggaacagcgacgcctccagagggaactgaagtgcgcccagaacgaagtcttacgttttcaaacctctcattctgtgacgcagagctctccaactcctaacccccctattttctccctcccactggtgggcctggtggtgatttccgccctgttgtggtgttggtgggccgaaactagctcttag

SEQ ID NO: 112598 - DNA, 21 bp, synthetic construct
  misc_feature 1..21: note = Description of Artificial Sequence: Synthetic coding sequence
  source 1..21: mol_type = other DNA
atgcaggccatggaggggtag

SEQ ID NO: 112599 - DNA, 414 bp, synthetic construct
  misc_feature 1..414: note = Description of Artificial Sequence: Synthetic coding sequence
  source 1..414: mol_type = other DNA
atgcaggccatggagggggaggttctgctgcccgcactttacgaggaggaagaagaggaggaggaagaggaggaagaagtggaggaagaagaagagcaggtccaaaagggaggatctgtgggcagtttgtcagtgaataagcatcgagggctatccctgaccgagacagaattggaggaactccgggcccaagtgttgcagttggtcgctgagctggaagagactagggagctggctgggcaacacgaggacgatagcctggaactgcaagggcttctggaggacgaacggctggcgagcgcccagcaagcagaagtgttcacaaagcagattcagcaactacaaggcgagctcagaagtttacgagaagagataagcctcttggagcatgagaaagagtcagaactcaaatag

SEQ ID NO: 112600 - DNA, 192 bp, synthetic construct
  misc_feature 1..192: note = Description of Artificial Sequence: Synthetic coding sequence
  source 1..192: mol_type = other DNA
atgcaggctatggaaggcgaggtactgctgccggccctgtacgaggaggaggaggaggaagaagaggaagaagaggaggtggaagaggaagaggagcaggttcagaaaggcgggtctgtcggttctctttccgtgaacaagcataggggactcagcctaactgaaactgagcttgaggaattacgggcttag

SEQ ID NO: 112601 - DNA, 870 bp, synthetic construct
  misc_feature 1..870: note = Description of Artificial Sequence: Synthetic coding sequence
  source 1..870: mol_type = other DNA
atggccggtgcggggcgcggcgcggccgtcagcagagtccaagccggacctggttccccacgcagggctcggggtcgccaacaggtccagccactcgggaaacagagacccgctccatggccgggcctgcggtctaaagaaaaaaaaaaggttaactgcaaaccaaaaaaccaggatgaacaagaaattccatttaggcttagagagataatgagatcgaggcaagaaatgaaaaacccgataagcaacaaaaagcgcaaaaaggcagctcaagtgacattccggaaaaccctggaaaaggaggcgaaaggtgaggagccggacattgccgttccaaaattcaagcagaggaagggtgagtcagacggggcatatatacatcggatgcagcaggaggcacagcacgttctgttcctatctaagaatcaggcaattcgacagccagaggtacaggcagctccgaaggaaaagagtgaacagaagaaagctaagaaagctttccagaagagaaggttagacaaagtgagaaggaagaaagaggaaaaagctgctgacaggctggaacaagaattgctcagggacaccgtcaaattcggggaggtggtgcttcaaccaccggaactgactgcccgcccacagagaagtgtttcaaaagatcagcctggcagacgctctcagatgctgcggatgctgctctctccagggggggtctctcagcctctcacagcctcactcgccagacagcgcattgtggaggaggaaagagagagagctgtgcaggcctatcgggcattgaagcaaaggcaacaacagttgcacggagagcgcccccacctgacatctaggaaaaagcctgaacctcagctgtag

SEQ ID NO: 112602 - DNA, 1656 bp, synthetic construct
  misc_feature 1..1656: note = Description of Artificial Sequence: Synthetic coding sequence
  source 1..1656: mol_type = other DNA
atgccattaagcaccgccggaatcctgagcagctcttccgctgcctctaaccgatctcggaacaaagctcggtatagaaccaaggctgtgtccagcgaggtggatgagtccttgtttggggacataaagagccccgcgcagggccagtctgattctcctatcgttcttctacgagataagcatacactccagaaaaccctgacagctctaggtctggatagaaagcccgagaccattcaacttattacacgggatatggtgcgggagttaatcgtgcctaccgaggacccctccggggagtcattgatcataagtcctgaagaatttgaaaggatcaaatgggctagccatgtgctcacgcgggaagagctggaagcaagggaccaggccttcaaaaaggaaaaggaagccactatggacgccgtgatgacacgtaagaagataatgaaacaaaaggagatggtctggaataacaacaaaaagttaagtgatctggaagaggtagccaaagaacgcgcccaaaatttgttgcaacgtgccaacaagcttagaatggagcaagaggaagagctcaaagatatgagcaagatcatcctaaacgccaagtgtcacgcaatacgagatgcacaaattctggagaagcagcagattcagaaggagcttgataccgaggagaagaggctcgatcagatgatggaggtggaacgacagaagtctattcaacggcaggaagagctcgagaggaagcgccgggaagagagaattcgcggacggcgccagatcgtggaacaaatggagaagaatcaagaggaaagatcgctgctcgccgagcagcgcgagcaagaaaaagagcagatgttggagtacatggagcagttacaagaggaggatcttaaagacatggaacgaagacagcagcaaaaactgaagatgcaggctgaaataaaacggattaacgatgaaaaccaaaaacagaaagctgaattgttagctcaggaaaaactggccgaccaaatggttatggagttcacaaagaagaaaatggcccgcgaagcagagttcgaggcggagcaggagagaattagaagggagaaggaaaaagagattgcaaggctgcgagcaatgcaggaaaaggcccaggattatcaagccgaacaggatgcactgcgtgccaaaaggaaccaggaagtcgccgacagggagtggagacgcaaggagaaggaaaatgcccgcaagaagatggagaccgaggcagagctcagaaagagtaggctcgagcaggtggcttttaaagagcatgcgctagccgtacaggtgcagagggatcgtgacgagttcgaaaggattctcagagcgcaacgcgagcaaatcgagaaagaacggctcgaggaggaaaagaaggcaacaggacgtctgcagcacgccaatgagttgagacgacaagtgcgggaaaaccagcagaaggaggtgcagaatcgtattgctacattcgaggagggaaggaggctcaaagaagaagcccaaaaaagacgtgaacgcatagatgagattaagcggaaaaaactggaggagcttagggctactggcctaccagagaaatattgcatagaagccgagcggaaggctaatattctgcccgcaacatccgttaattag

SEQ ID NO: 112603 - DNA, 1401 bp, synthetic construct
  misc_feature 1..1401: note = Description of Artificial Sequence: Synthetic coding sequence
  source 1..1401: mol_type = other DNA
atggttagagagctgatcgtgccaaccgaggatcctagcggcgagtctcttattatttcacctgaagagttcgaaaggataaagtgggcttcgcacgttcttacccgcgaggagttggaagctcgggaccaggccttcaagaaggagaaagaggcgaccatggacgcagtcatgacccgtaaaaaaattatgaagcagaaggaaatggtgtggaacaacaacaagaagctgtcagacttggaggaagtggctaaggagcgggcccagaatttgctgcagcgtgccaacaagctcaggatggagcaggaagaggaactaaaagatatgagcaagatcatcctgaatgcgaagtgtcacgccattagagatgctcagatactcgagaagcagcagatccaaaaggagctggacaccgaagaaaaacgcctggatcagatgatggaagtcgaacggcaaaaatcaatacaaaggcaggaggagctggagcgcaaaaggcgggaggagcgtattcgtgggcgtcgccagattgtagaacagatggagaaaaatcaggaagaacgatccttactggcggaacagcgcgaacaagaaaaggagcagatgctcgagtatatggagcagctgcaggaagaagatctgaaggatatggagcgaagacagcaacagaagctgaaaatgcaggctgagatcaaacgcatcaacgacgagaatcagaagcagaaagctgaactcttggcgcaggaaaaactggcggaccaaatggtgatggagttcactaaaaagaagatggctcgagaggctgaattcgaagcagagcaggaaagaattagaagagaaaaggagaaggagatagcccgtctgcgagctatgcaggagaaagcacaggactatcaggccgagcaggacgctctgcgcgcgaagcggaaccaggaagtggcagaccgcgagtggaggagaaaggagaaggaaaacgcaaggaagaagatggagacagaggccgaattacgtaagtccaggctggaacaagttgccttcaaagaacacgcactggccgtgcaggtgcaacgcgacagagacgaattcgaaaggatcctgcgggcacaacgggagcagatcgaaaaagagaggctggaagaggaaaaaaaagcaacgggtaggctgcaacatgcaaatgagctgcgccgtcaggtccgcgagaaccagcagaaggaagtgcagaaccgcattgccaccttcgaggaagggcgcaggctcaaggaggaagcacagaaaagaagggaaagaattgacgagattaagcgtaagaagctcgaggaactgagggccacggggcttcctgagaaatactgtattgaggcagagaggaaagccaatatcctgcccgcaaccagtgtgaactag

SEQ ID NO: 112604 - DNA, 1884 bp, synthetic construct
  misc_feature 1..1884: note = Description of Artificial Sequence: Synthetic coding sequence
  source 1..1884: mol_type = other DNA
atggaggaggccgatcgtatattaatccattccttgaggcaggcaggcacagctgtgcctccggacgttcaaaccctgagggcctttacgactgagctagtggtcgaggccgttgtgagatgtctgcgagtaatcaatccagccgtgggaagcggactcagcccactgttaccgctggcgatgtcagcaaggttcagactcgccatgtcactcgcacaggcttgtatggacctgggctatcctcttgaactcgggtatcaaaacttcttgtatccttccgaacccgacctccgagatctgctgcttttcctcgccgagagactgcctacagatgcctcagaggacgccgatcagcctgctggggattccgcaattcttctgcgagcaattggaagtcaaatccgcgaccaactggccctgccctgggtcccacctcatctgcggacacctaaactgcagcacctgcaaggttcagctctccagaagcccttccacgcctcccgcctcgtggtccctgagctttcctctcgcggagaaccacgcgaatttcaggcctcccctctgttactgccagtaccgacccaggtgcctcagcctgtagggcgtgtggctagtctgcttgaacaccacgcacttcagctatgccagcagacgggccgggatcgccctggagatgaggactgggtgcaccggaccagtcgcctcccgccacaagaggacaccagagcccagagacagaggcttcagaaacagttaaccgagcatctgagacagtcatggggactgttgggcgccccaattcaggcacgcgatctcggtgaattgttgcaggcctggggggcaggcgccaagactggggctcccaagggaagccgcttcacacacagcgaaaagtttacatttcaccttgagcctcaggcccaggcaactcaggttagtgatgtgccggcaacatcaagacggcccgaacaggtgacgtgggcagcccaggaacaagagctcgaaagccttagggagcagctggagggtgtaaaccgctcaattgaggaagtggaggccgacatgaagacactcggtgtatcgtttgtgcaggctgagtctgagtgcaggcactccaagctaagtacggctgagcgtgaacaggcccttcggcttaagtctagagcagtggaattgctgccggacgggactgccaacctggcaaagctccagctggtggtggagaacagcgcccaaagagttatacacctcgcaggacagtgggagaagcatagggtgcccttactagctgagtaccggcaccttcggaagcttcaggattgtagggagctcgagtctagtcggcgtctggcagaaatacaggagctgcaccagtccgtccgggccgccgcagaggaggcgaggaggaaagaggaggtgtacaagcaactgatgtcagagctggagacattaccacgcgatgttagtcgccttgcatacacccagaggatcctcgagatcgtgggcaatatcaggaaacagaaagaggaaataacgaagatcttgagtgataccaaagaactccagaaagagatcaactctctgagcggcaagttagaccgaacatttgctgtcacagatgagctggtgtttaaggatgcaaaaaaagacgatgcagttcggaaagcctacaaatacctcgccgctctgcacgagaattgcagtcagctcattcagacaattgaggacacaggcactattatgcgggaggtgcgcgatctggaggagcagatcgagaccgaattgggaaagaagacactgtctaatctggaaaaaatccgtgaggactacagggcccttcgccaggaaaacgcaggcctgctgggccgcgtcagggaggcctag

SEQ ID NO: 112605 - DNA, 1743 bp, synthetic construct
  misc_feature 1..1743: note = Description of Artificial Sequence: Synthetic coding sequence
  source 1..1743: mol_type = other DNA
atggaagaggcggacagaattctcattcacagcctgcggcaggctggcactgcagttcctcccgatgtccagactctgagagctttcactaccgagctggtggtagaagctgtcgtacggtgcttgagggtgatcaaccctgcggttggatccgggctatctccattgctgcccctggccatgtctgctagatttagacttgctatgagtctcgcccaggcatgtatggacctcggataccctctagaactgggttatcagaatttcctctacccctctgaacccgatcttagagatctcctgctttttctggctgaacggctcccaacagacgcttctgaagacgccgaccagccggccggcgattccgccatcttactcagggctatcgggagtcaaatcagggatcagttggcgctgccatgggtgcctccgcatctgcgcacacctaagctccaacatcttcaggggtccgccctgcagaagccatttcacgccagtcggcttgtcgttcccgaactgtcctcccgcggcgagcctcgcgaattccaggccagccccctgctcctcccagtgcccacccaggtcccacagccagtggggagggttgcatcgctgctcgagcatcacgcactgcagttgtgccagcagaccggacgagatcgtccgggcgacgaagactgggtccacagaacgtcccggttgccccctcaggaggatacaagagcacaaaggcagcggttgcagaaacagttaactgagcaccttaggcagagttggggtctactgggtgcccctatccaagcccgagacctgggcgagcttctacaagcatggggggccggtgccaaaaccggcgcccccaagggtagtcgttttactcactcggagaaattcacctttcatctggagccacaagctcaggcaactcaggttagcgacgtcccggctacatctcggcggcccgagcaggtgacctgggctgcacaggaacaagaattagaaagtctccgggagcagctggagggcgtgaatagatccatcgaagaagtggaagccgacatgaagacactgggagtgtcatttgtccaggctgaatctgagtgccgacattccaagctaagcacagctgagagggaacaggctctgcgactaaagtctagagccgttgagctgttaccagatggaacggccaatctggccaaactgcagctagtggttgagaactcggcccagcgagtcatccatctggccggacagtgggagaaacacagagtcccgttactggccgagtaccggcacctacgcaagctgcaggactgccgcgagcttgagtccagcaggagactggctgagattcaggagcttcatcagtccgtccgcgccgccgccgaagaagcccggagaaaagaggaggtgtataagcaattaatgagcgagctagaaacacttcctcgagatgtctccaggctagcatatactcaacgcattctggaaatagtcggtaatatccgaaagcagaaagaagagatcactaagattctcagcgacactaaagaacttcaaaaggagattaacagtctctctggcaagcttgatagaaccttcgcggtgaccgatgagttggtcttcaaggacgccaagaaggatgacgccgtgcgcaaggcctacaaatacctcgcggccctccattttatcggagatggcaccgttgggtggggtccctggatccctaataagtag

SEQ ID NO: 112606 - DNA, 603 bp, synthetic construct
  misc_feature 1..603: note = Description of Artificial Sequence: Synthetic coding sequence
  source 1..603: mol_type = other DNA
atggatgacaagaaaaaaaaaagaagcccgaagccatgtttagcccaacctgcgcaggcaccgggaacactgcgaagagtgcccgtgcccacgtctcacagtgggtcacttgcactgggtctacctcacttgcccagccctaagcagagagccaaattcaagcgcgtggggaaggagaagtgtcgcccagtcttggccggcggcggtagtgggtccgccgggacccctttgcagcatagctttctgactgaggtcacggatgtatacgaaatggaagggggtctcctgaacctcctcaatgactttcactccggaagattgcaggcgtttggtaaggaatgttcgttcgaacagctggagcatgttcgggagatgcaggaaaagcttgcaagactgcacttcagtctcgatgtttgcggtgaggaagaggacgacgaagaggaagaagatggagtcacagaaggattgcctgaggaacagaagaagactatggccgatcggaatctggatcagctgttgtctaacttagaggacctctctaattcaatccagaaactccatctggctgagaatgccgagcccgaggagcagtctgctgcttag

SEQ ID NO: 112607 - DNA, 690 bp, synthetic construct
  misc_feature 1..690: note = Description of Artificial Sequence: Synthetic coding sequence
  source 1..690: mol_type = other DNA
atgtgggcagccggcagatggggacccaccttcccctcatcgtacgctgggttttcagctgattgtcgccccagatcaaggccttcatccgactcatgtagtgtgcccatgaccggagcgcgcggacagggccttgaagtggtgcgcagcccaagccctccattaccactgtcttgttcaaacagcacccgatctctcctcagtccccttggacaccaaagttttcaatttgatgaggacgacggggacggggaggacgaggaggacgtggatgatgaggaggatgtcgacgaggacgcacatgattctgaggcgaaagtggcaagcttgagaggcatggaactacagggctgtgcctcaacgcaagtagagtccgagaacaatcaggaggaacagaagcaggtgcggctgccagaatcgagactcactccttgggaggtgtggtttatcgggaaggaaaaggaggaacgggacaggctgcagttgaaagctcttgaggaactcaatcaacagctagaaaagcgcaaggaaatggaagagagagaaaagagaaagataattgcggaagagaagcataaggaatgggttcagaagaagaacgagcaggtccgtaggggcaagtggattcataccctaactagcctgcttcagaacatctcctcgtactatacttccctcccacggttttag

SEQ ID NO: 112608 - DNA, 1122 bp, synthetic construct
  misc_feature 1..1122: note = Description of Artificial Sequence: Synthetic coding sequence
  source 1..1122: mol_type = other DNA
atgtgggcagccggtcgctggggccctacgtttccttcaagctacgctgggttctctgcagattgccggccgaggagcagaccatcatcagactcttgcagcgtgccaatgactggggcgcgaggccagggcttagaagtggtgaggagcccgagtcctcccctccccctgagctgtagcaactcaacccggtctctgctaagccccttgggccaccagtctttccagtttgacgaggatgatggagacggggaagacgaggaggacgtggacgacgaggaagacgtggacgaagatgctcacgatagcgaagcaaaggtagccagtcttagggggatggaactccagggctgtgcttctactcaggtcgaatctgaaaataaccaggaggagcagaaacaagtgagactcccagaaagtcgactcaccccatgggaagtgtggtttatcggcaaagaaaaggaggagcgtgataggctgcagttgaaggccctggaggagctaaaccagcagctggaaaagcggaaggaaatggaagaacgtgaaaagagaaagataatagccgaagaaaaacataaggagtgggtacagaaaaagaacgaacagaagaggaaggagcgcgaacagaagatcaataaggagatggaagagaaagccgcaaaggagttggaaaaagaatatctacaggaaaaagctaaggaaaaataccaggagtggcttaagaagaagaatgccgaggagtgcgagcggaagaagaaagagaaggaaaaggagaagcaacagcaggccgagattcaagaaaagaaagaaattgccgaaaagaaattccaagaatggctggagaacgccaaacacaaaccgagacccgctgcaaagagctatggctacgccaatggtaagcttactgggttctattctggcaacagttatcctgagcccgccttctataatccgataccatggaaaccgattcacatgccacccccaaaagaggccaaggacctgtcgggacgcaagagcaaacggccagtgattagccagcctcacaagtccagttccttggtgattcacaaggctcgatcaaacctctgtctaggaaccttatgccgaatccagaggtag

SEQ ID NO: 112609 - DNA, 2268 bp, synthetic construct
  misc_feature 1..2268: note = Description of Artificial Sequence: Synthetic coding sequence
  source 1..2268: mol_type = other DNA
atggaatacatcttcccaaacaccggcgtgctttggagttggcttattaacattttgtgcaatcggcgcatcgtctggttcacctccagccaactgcctagaggcccacctgcttcgagcggaggacatagctttcacacgctgcgggaaagatccgagagtcgactgttcgtggagtcctacgctgctgcctggcagcctcctggcacctctggcggcgcctcttgttgttccagccttagcgcccaagtgatgtccagcgagttcctagctgagctgcactgggaggacggcttcgccatccctgtggcaaacgaagaaaacaagctgttggaagatcaactttctaaattgaaggacgagcgcgccagcctgcaggacgaactccgcgagtatgaggagagaattaattccatgacctctcactttaaaaatgtcaagcaagaactgagtattacccagtctttgtgtaaagcacgtgaacgcgagacagaatccgaggagcacttcaaagccattgcccaacgcgaattgggacgtgttaaggatgaaattcaaagactggaaaacgaaatggcatcgattctggaaaaaaagagcgacaaagaaaacggcatcttcaaagccactcaaaagttagacgggctgaagtgtcagatgaactgggatcagcaggctctcgaagcatggctggaagaatcagctcacaaagactcagacgcactgacgctgcagaaatacgcccagcaggacgacaacaagatcagagcgctgacactacagctggaaagactcacccttgagtgcaaccaaaaaaggaagatactggacaatgagctcactgaaactatatctgctcagctcgagctggataaagccgctcaagacttccgcaagatccacaacgaacgacaggagctgataaagcagtgggaaaacaccattgagcagatgcagaaaagggacggagacatagacaattgcgccctcgagttggcccgaattaagcaggaaactcgggaaaaggagaatttggttaaggaaaagatcaagttcttagaaagcgagatcgggaataatacggagttcgaaaagcggataagtgtcgcagacaggaaactcctgaagtgtcggaccgcatatcaggatcatgaaacttcacggattcagcttaagggagaactggattctctgaaagccactgtgaaccggacttcctccgatctggaagccctccggaagaatatcagtaagatcaagaaagatatccacgaggagaccgccaggctccagaagacgaagaaccacaacgagattatccagacaaaactcaaagagattacagagaagactatgtcagtcgaagagaaggcaactaacctggaggatatgttaaaagaagaggaaaaggatgtgaaagaggtcgatgtgcagctgaacctaattaagggtgtgctgttcaaaaaggcacaggaactgcaaacagagaccatgaaggagaaggccgtgctttctgagattgagggcacgagatcctctctgaaacacctgaaccaccagttgcagaaactcgactttgagacacttaagcagcaagagatcatgtattcccaggactttcatattcaacaagttgagaggaggatgagtcggttgaagggcgaaattaacagtgaggagaagcaagctctggaggctaagattgtagagctgcgcaaaagcctggaggagaaaaagagcacatgcggattgctggagacgcagatcaaaaaactgcataatgatctttatttcattaaaaaggcacacagcaagaattcagacgaaaaacagtccttgatgactaagattaacgagttaaacctgttcatcgatcgatccgaaaaagagctcgataaagcgaaaggcttcaagcaggacctgatgattgaggataacctcctgaagttagaagtcaaacgcaccagagagatgctacactctaaagccgaggaggtcctctcccttgaaaagaggaagcagcaactctacaccgcaatggaggaaaggacagaggagatcaaggtacataaaaccatgttggcgagccagatacggtacgtggaccaggaacgggagaacatttctacagaattcagggaacggctctcaaaaattgagaagctgaagaatcggtacgaaatcctgactgttgtgatgctgccccctgagggggaggaggagaaaacgcaggcctactacgtgattaaagtgatgagtatgtcctag

SEQ ID NO: 112610 - DNA, 2826 bp, synthetic construct
  misc_feature 1..2826: note = Description of Artificial Sequence: Synthetic coding sequence
  source 1..2826: mol_type = other DNA
atgtccagcgaatttctggcggaattgcattgggaggatggcttcgctatcccggtcgccaacgaggagaataaactgctcgaagaccaattgagcaagctgaaggatgagcgagcgtcattgcaagatgagcttagggagtatgaagagcgtataaacagcatgacgtcccattttaaaaacgtgaagcaggaactatccatcacacagagcctgtgcaaggcgcgggaacgagagaccgagtctgaagaacactttaaggctatcgcccaaagagagctcggacgcgtgaaggacgaaatccagcgattagagaatgagatggcatcgatactggagaagaagagcgataaagaaaatggcatcttcaaggctacgcagaagctggatgggctaaagtgtcaaatgaattgggaccagcaggcgctggaggcatggctggaggagagcgcccacaaagacagtgacgcactcacactgcagaaatacgctcagcaagatgacaataaaatcagggccctgaccctgcaactcgagcgtctgactttggagtgtaatcaaaaaaggaagattctggacaatgaactgactgaaactatatcagcacaattggagttagataaggccgcgcaggatttcaggaagatccataatgagcggcaggaactgattaaacagtgggaaaacaccatagaacagatgcaaaaacgggatggcgatatcgataattgcgccctggagctggcaagaatcaaacaagaaacacgggagaaggagaatcttgtgaaggagaagattaaatttcttgaatcagagatcggcaataacacagagttcgagaagaggattagcgtggccgaccgtaagttactgaagtgccgcacagcctatcaagaccatgaaacttctcggattcagctgaagggcgagttagactcactgaaagccaccgtgaatcgcacaagctccgacctggaggctttgagaaagaatatttctaagatcaagaaagatatccatgaggagaccgccaggttacaaaaaactaagaaccacaacgaaattatacaaaccaaactgaaagagatcaccgaaaagaccatgtcggtcgaagaaaaggctactaatctggaagatatgctgaaagaggaagaaaaagacgtgaaggaggttgatgttcagttgaacctgattaaaggtgtgttatttaagaaggcacaggagctgcaaaccgaaacaatgaaggaaaaggcagtccttagcgagatagagggtacaaggtcctcactcaaacacctgaaccaccagttgcagaaactggatttcgagacgctaaagcagcaggagattatgtattctcaagacttccacatccagcaagttgaacgccggatgagcaggctgaaaggagagatcaattccgaggaaaaacaggctcttgaggctaagatagttgaactacgaaaatccctcgaggagaaaaagtcaacctgcggactactggagacacaaatcaaaaaactccataatgatttgtactttatcaagaaagcacattcaaaaaatagtgacgagaagcagtcattaatgacaaagatcaacgagctgaacctgttcattgaccgaagcgaaaaagaattggacaaagccaaaggattcaagcaagatttgatgatagaggacaacctcctcaaactagaagtaaaacggacccgagaaatgctgcacagtaaagcggaagaggtgttgtctttggaaaaacgcaagcagcagctatataccgcaatggaggagcgcactgaagagataaaggtgcacaaaaccatgctggcctcccagattaggtacgtcgaccaggagcgagaaaacatctcaactgagtttcgggagaggctcagtaagatcgaaaaactgaaaaaccgttacgaaatcctgactgtcgtgatgctccccccagaaggagaagaagaaaaaacccaggcttattacgtgattaaagctgctcaggagaaggaggagctccagcgcgagggcgattgtctggacgccaaaattaacaaggcagaaaaggagatttatgcactcgagaacaccttacaggtgctgaattcttgtaacaataattataaacagtcgtttaaaaaagtaactcccagttcggacgagtacgagctgaagattcagctcgaggaacaaaagagggccgtagacgagaagtatcgctacaagcagagacagatcagagagttgcaggaggatattcaatccatggagaataccctagacgtcatcgagcacttagctaacaacgtgaaagaaaagctctcagagaaacaggcttatagcttccaactgtccaaagagaccgaggagcaaaagcccaagctggagcgagtgaccaaacagtgcgctaagctgacaaaggaaataaggctactgaaggatactaaggacgaaaccatggaggagcaggacattaaactgcgggagatgaagcagttccacaaggtcatcgatgagatgctggtggacattatcgaagaaaatactgagatcagaataatcttgcagacgtactttcaacagtctgggctggaattaccaacagcctccacaaagggaagtcggcaatcctctagatccccatcccacacatccctgtccgctcggtcatcaagaagcacgtccacttctacctcccagtcctctataaaggtgttggagctaaagtttcccgcctctagctcgctagtgggtagtccttcgcgtccttcatccgcctcttctagctcttctaacgtcaaatccaagaaatcctcaaaatag

SEQ ID NO: 112611 - DNA, 1740 bp, synthetic construct
  misc_feature 1..1740: note = Description of Artificial Sequence: Synthetic coding sequence
  source 1..1740: mol_type = other DNA
atggccgagcctggaggggccgccggacgtagccatcccgaggacgggagcgcaagcgaaggggagaaagaaggcaataatgaaagccacatggtgagtcctcccgaaaaggacgatgggcagaagggggaggaagctgtagggagcacagagcaccctgaggaggtgacaacacaggccgaggccgctatcgaggagggagaagtagagactgagggcgaggcagcggtcgagggtgaggaggaggccgtgagttatggagacgccgagtctgaagaggagtattattataccgagacaagctccccagaggggcagatcagcgctgccgatacgacatacccttactttagtcctccacaggaattgccgggggaggaagcctacgactctgtcagcggagaagctggactgcaaggattccaacaggaggcaaccggtccacccgaaagtcgggaaaggagggttacatcacccgagccgagccacggggttctgggcccctccgagcagatgggtcaggttacttcgggacctgctgtaggtcggcttaccggcagcacagaagagccccaggggcaagtcttgcctatgggggtgcagcaccgatttcgcctaagccacggcagtgacatcgagagcagcgacttggaagagttcgtgagccaggagcctgtcattcccccaggcgtgcccgacgcacacccccgtgagggtgacctcccagtgttccaggatcaaatccaacaaccaagtacagaagaaggagcgatggcggagagggtcgaatccgagggctccgacgaagaagccgaggacgagggaagtcagctcgttgttctggatcctgaccatcccttgatggtcagatttcaggccgcccttaagaattacctgaatcgtcaaatcgagaagctgaagttggacctccaggaattggtggttgcgacaaaacagagcagggcccagcggcaagagcttggggtgaacctgtacgaggtgcagcagcatctggtccatcttcagaaactgctcgaaaaaagtcacgatagacatgccatggcctctagtgaacggcgccaaaaagaagaggagctgcaggccgctcgtgcactgtacacaaaaacctgcgctgcagccaatgaagaaaggaagaaactggccgcactgcaaactgagatggaaaatttggccttacacctgttctatatgcagaacatcgaccaagatatgagagatgacatcagagtgatgacacaggtcgtgaaaaaggccgagaccgagcgaattagagccgagatcgaaaaaaagaagcaggacctgtatgtggatcaattgacgacgcgcgcacaacagctggaggaagatatcgcgctgtttgaagcccaatatctcgcccaggccgaagatacgaggatcttaaggaaggcagtcagtgaggcttgtaccgagattgacgctataagtgtggagaaacggcggatcatgcagcagtgggcaagctccctggtgggaatgaaacatcgcgacgaagcacaccgggctgttctcgaggctctcagcgtgtccctggagaggttcccaagccagaacattaacactgcgcggagccgactctcgacgacttggcacagtgccggcattctcctgcgaggctcattcctgcccggggctagtcgcgcgtttgccagcgtgtgctacggaggggccgcggttgacaatcgcatccgggaatgttag

SEQ ID NO: 112612 - DNA, 1437 bp, synthetic construct
  misc_feature 1..1437: note = Description of Artificial Sequence: Synthetic coding sequence
  source 1..1437: mol_type = other DNA
atggcggagcctggaggggccgcaggaaggtcgcatcctgaggacgggtcagcctcagaaggcgaaaaagagggcaacaacgaaagtcatatggttagcccacctgaaaaggatgatggacagaaaggggaggaggccgtcggctcgaccgagcaccccgaggaggtgacaactcaggccgaggctgctattgaagagggagaagtggagactgaaggagaggccgccgtggaaggtgaggaggaggctgtgagctatggggacgcagagagtgaagaagagtattattacaccgagaccagtagtcccgagggacagatcagcgccgctgacactacctatccttatttctctccaccgcaggagctgcctggggaagaagcctacgattctgtttcgggtgaggccggactccaagggttccagcaggaggccaccgggcccccagagtcccgagagcgccgcgtgacgagtccggagccatctcatggtgtgctggggcccagcgaacaaatgggtcaggttacctctgggcccgccgtgggacgattgaccggaagtacggaggaaccgcagggccaggttttgccaatgggcgttcagcaccggtttcggttatcccacgggagcgacatcgagagtagcgatcttgaagagtttgttagccaggagcctgtgattcctccaggggtccctgacgcgcaccccagggagggtgatttgccggtcttccaagaccaaattcagcagccttctactgaggagggggcaatggcggagcgtgtggaatccgaagggtccgatgaggaagccgaggacgagggatctcagctggttgtcctggatcctgatcatcccctgatggtgcgctttcaagcagccctcaagaattacctgaacaggcaaattgagaagttgaaactggatctgcaggagctcgtcgtcgccacaaaacagtcgcgcgcccagcggcaggaactgggcgtgaatctgtacgaggtacagcagcacttggtgcacctacagaaactgctggaaaaatcccacgatcggcacgccatggcgagctccgaacgtaggcagaaggaagaagaactccaagccgcgagggctttatataccaagacctgcgcagctgctaatgaggagcgcaagaagctcgcggcacttcagacagagatggagaatctggcgctccacctgttctacatgcagaatattgaccaagacatgagggacgacatacgggtcatgacacaggtggtcaagaaggctgaaactgagagaatccgggccgagatcgagaagaagaaacaaggcgtgggcgacacaggcgctgcttttatcccaaagacaacacagggggatcaggtaagcggacgaggaaagaaaaagcccggcacagtagtagctcgggtcagtcctgcagagctctag

SEQ ID NO: 112613 - DNA, 3093 bp, synthetic construct
  misc_feature 1..3093: note = Description of Artificial Sequence: Synthetic coding sequence
  source 1..3093: mol_type = other DNA
atggctgagcctggaggggcagcaggacgctcccaccccgaagacggctcagcgtcagagggagaaaaagagggcaataacgagagccatatggtgtcgccacccgaaaaggatgacggccagaagggagaagaggccgtggggtccacagaacacccagaggaggtgaccacccaagccgaggccgctatagaggagggagaagtggagaccgagggcgaagcagctgttgagggtgaggaggaggccgtcagctacggagatgctgagtctgaggaagaatattactacactgaaacctcctctcccgaagggcagatatccgccgccgataccacatatccgtacttctctccgccccaggaattgccaggtgaagaagcttatgattctgtgtcgggagaggcagggctgcagggcttccagcaagaagccaccggtccaccggagtccagggagagacgggtgaccagtcccgagccgtctcacggggttctcggcccttccgagcagatgggccaggtcacaagtggaccggctgtcgggaggctcaccggctctaccgaagagccccagggtcaggtcctccctatgggggttcagcacagattcagactcagccacgggagcgacatagaatcctcggacctggaggagttcgttagtcaggagccagtcattcccccaggggtccccgacgctcatccacgggaaggagatcttcctgtgtttcaggatcagatacagcagccatctactgaggagggagccatggcagagagagtcgagtcagagggttctgacgaagaagcggaagacgaaggatctcaactggtggtgctggatcccgaccaccccctcatggttaggttccaagccgccttgaagaattacttgaacaggcaaatagagaaactgaaactcgacctacaggagctagtcgtagcaacgaaacagtctagggcccagagacaggagctgggcgtgaacctctatgaagtccagcagcatctggttcatttacaaaagctgctggaaaagagccacgaccggcacgcaatggcctctagtgaacgccggcaaaaagaagaggagctgcaggcggcccgcgccctatacaccaagacctgtgccgcagccaatgaagaaagaaagaaattggccgctctgcaaactgagatggagaacctggcgcttcacttgttttatatgcagaacattgaccaggacatgagagatgatattagagtgatgactcaagttgttaaaaaggccgagactgagaggataagggctgagattgagaagaaaaaacaggatttatatgtagaccagcttaccacaagagcacagcagttagaagaggacatcgcgctcttcgaggcacagtacctggcacaggcggaggacaccagaattttaaggaaggccgtttctgaggcctgcaccgagatcgacgccatttcagttgaaaagcggcgtataatgcagcagtgggcaagcagtcttgttggcatgaaacatagggatgaagcgcatcgtgcggtcctcgaagcacttagagggtgccagcatcaggccaaaagtaccgatggcgaaatcgaagcatacaagaagtcaatcatgaaagaggaggagaaaaatgagaagctcgcatctatcctgaaccgcactgaaaccgaggccacgctgctgcagaaacttactacacagtgtctcaccaagcaagtggccttgcagagtcagttcaatacctataggctgaccctccaggacaccgaggatgcgctgtcgcaggaccaactggaacagatgatactcacagaggagcttcaggccatcagacaagcgattcagggagagctcgagctgcggaggaagactgacgcggcaattagagagaaactccaggagcacatgacaagcaataaaaccaccaagtatttcaaccaactcatactacgtttgcagaaggagaagaccaatatgatgacccatcttagcaagattaatggagatattgctcaaaccaccttggatattacccacacttcttcgcggttggacgcccatcagaaaaccctggtagaacttgaccaagacgtgaagaaggttaacgaactgattaccaatagtcagagcgaaatatcaagacggaccattctgatcgagcgaaagcagggccttattaacttcctaaataagcaactcgagcgtatggtaagcgagttaggcggagaggaagttggtcctctcgagctggaaatcaagcgcctatcaaaactgatagacgagcacgatggcaaggccgttcaagctcaagtaacgtggctgaggcttcagcaggaaatggtgaaggtgacgcaggagcaagaggaacagctagccagcctcgatgcgagtaaaaaagagctgcacataatggaacagaaaaagctccgggtggaatcaaagatcgagcaggagaagaaggagcagaaggagatcgaacatcacatgaaggatctggataatgaccttaagaagctaaatatgctgatgaacaagaatagatgttcctccgaagaactggagcaaaataacagagtaaccgaaaacgagttcgttcgcagcctgaaggcatctgaaagggagacaattaaaatgcaggataagctgaatcaattgtctgaggagaaggccacacttcttaaccagctagtggaagccgagcaccagattatgctgtgggagaagaaaattcaacttgccaaggagatgcggtcttcggtggatagcgagattggacagaccgaaatccgcgctatgaaaggtgagatccatcgaatgaagaagtattgtagaaccacacaggacgcccaccgccacgtacacgaacagcacgggacacatgcaggcacttgtactaagaacaccggtagagctcaggctagggcccgaaccactagggacgctagaggacatgtgcatgagcagcatgggaccagagcggggacttgtacgaacaacactgggcgcgcccaagcccgcgccagaacccgggatgcccgcagacatgtccacgagcacaggacccacacagcccgtgcctag

SEQ ID NO: 112614 - DNA, 3429 bp, synthetic construct
  misc_feature 1..3429: note = Description of Artificial Sequence: Synthetic coding sequence
  source 1..3429: mol_type = other DNA
atggccgaacctggaggcgccgccggacgctctcacccagaggacggcagtgccagcgaaggcgaaaaggaaggcaacaatgagagtcatatggtgtccccacccgagaaagatgacggccaaaagggtgaggaggcggttggttccacggagcaccccgaggaggttacaacacaggcagaggctgctatcgaagaaggagaggtggagacagaaggtgaagcagctgtcgagggggaggaagaagctgtcagctatggcgatgccgagagcgaggaggaatactattacacggaaacatcaagtcctgaaggccagatttcagccgcagacactacctatccttacttttctccgccacaggagctgcctggagaggaagcctatgacagtgttagcggtgaggctggtctccagggtttccagcaggaggcaacaggtccacccgagagccgggaacgccgggtcacctcaccagagccttcacatggcgttctggggcccagcgagcagatgggccaggtcaccagtggacctgctgttggaagactgaccggctctactgaagaaccccagggtcaagtcctgccaatgggagtccagcaccggttccgcctgtcacacggctcggacattgaatcttctgatctagaggagttcgtgagtcaagaacctgtcatcccaccgggggtgcccgacgcccacccacgggagggggacctgccagtctttcaggaccagatccagcagccatcgacagaagaaggggctatggccgaaagggtggagtcagaaggttcggacgaagaagccgaagatgaggggagccaactcgttgtgctggaccccgaccatccactgatggttcggttccaggccgcactgaagaattacctgaaccgacagattgagaaactaaaactcgatctgcaggaactcgtcgtcgctacaaaacagtccagagcccagagacaggagctgggcgtgaacctttatgaagttcagcaacatctggtacatcttcagaaactccttgaaaagagccacgacaggcacgcaatggcgtccagcgaacggcgccaaaaagaggaggagctgcaggcagctcgggctctatacaccaaaacgtgtgctgcagcgaatgaggagcgtaagaaactggcagctttgcagacagaaatggaaaacctggccttgcatctgttttacatgcaaaacatcgatcaggacatgagggatgacatccgggtgatgactcaagtggtcaagaaggcggaaacggagagaatccgagctgaaatcgagaagaaaaagcaggacttatacgtagatcagctgaccacacgggcacagcagctcgaggaggacatcgctttgttcgaggcccaatatcttgcccaggccgaagatactcgtattcttcggaaggctgtctcagaagcttgtaccgaaatcgacgcgatatccgtcgagaaaaggaggatcatgcagcagtgggcctcatctctagtgggtatgaagcaccgggatgaggctcaccgcgctgttcttgaagctctgagaggatgtcagcaccaggcgaaaagtaccgacggggaaatcgaagcctacaaaaaatccattatgaaggaggaggagaaaaatgaaaagctcgcaagcattctgaacagaactgaaacagaggctaccctgctgcagaaactaacaacccagtgtctgacaaaacaggtggctctgcaatcccagtttaacacttaccgcttgacattgcaggatacagaagatgccctgtcccaggaccagctagaacagatgattcttaccgaggagttacaggctataagacaggcaatccaaggagagctagagctgagacgcaaaacagacgccgcaatccgtgagaaactgcaggaacatatgacttccaataagacgaccaagtattttaatcagcttattctgagacttcagaaagaaaaaaccaatatgatgacccatctgagcaagattaatggcgacatagcacagaccaccttggacataacccataccagtagtcgcctcgacgcgcatcagaagaccttggtcgaacttgaccaggatgttaagaaggtgaatgaactcatcactaattcccagtctgagatcagcagaagaactatactgatagaaaggaaacaggggctgattaactttctgaataaacaattagaacgcatggtctctgagctggggggagaagaagtggggcctctggagcttgagattaaacgtctctccaaacttattgatgaacatgatggaaaggccgtgcaagctcaggtcacctggctaaggttacagcaggaaatggtaaaagtaacccaggaacaggaggagcaactggccagtttggacgcatccaaaaaagaattgcacatcatggagcagaagaagttgagggtggagtcaaaaattgagcaggagaaaaaggaacagaaggaaatcgaacaccatatgaaagatctggacaatgaccttaagaaactcaacatgctgatgaacaaaaaccgctgtagctccgaagagttggagcagaacaaccgagtgactgagaatgagtttgtacgcagcctcaaggctagcgaacgcgagacaatcaagatgcaagataagctgaatcagctgtctgaggaaaaggctacattacttaatcagttggtcgaagctgagcatcaaatcatgctgtgggaaaagaaaattcagctcgcaaaggagatgcgaagtagcgtcgattctgaaatcggtcagacagaaatccgcgccatgaaaggcgagatccatcggatgaaggtgcgtctcggtcaactactgaaacaacaagagaaaatgatccgggccatggaactggccgttgcccgccgcgagaccgtgacaactcaggcggagggccaacgaaaaatggaccgcaaagcactcacacgcaccgactttcatcataagcagctcgaactgcgaaggaagattcgagatgtgaggaaagccacagatgagtgtactaagacggtgctggagctcgaagagacacagaggaacgtctcatcctcattgctggaaaaacaggaaaagctctctgtcatccaggccgacttcgatacccttgaagccgacctgactcgtctcggggccctgaagcggcagaacctgagcgaaatagtcgctcttcagacccgactgaagcacttgcaggccgttaaggaaggccgttacgtgtttctgttccgatccaagcaatctctggtcctggagcgacagcgtctggataaacgtcttgccctcattgctaccatcttggatcgcgttagagacgaatatcctcagttccaggaggccctgcataaagtgtcacagatgatcgccaacaagctggaatctcccggcccgtcttag

SEQ ID NO: 112615 - DNA, 921 bp, synthetic construct
  misc_feature 1..921: note = Description of Artificial Sequence: Synthetic coding sequence
  source 1..921: mol_type = other DNA
atggctgaggtatctatcgaccagtccaaattgccgggagtgaaggaagtctgtcgggactttgctgtgctcgaggatcatactctggctcattctctgcaggagcaggagatcgagcatcatctagcgtctaacgtgcagcgcaatcgcctggtgcagcacgacctgcaggtcgccaaacagttgcaggaagaagacttaaaagcccaggcccagttgcagaagagatataaggatctcgagcagcaggactgcgagatcgcccaggagatccaagagaaactggcgattgaggcagaaagaagaagaattcaggaaaaaaaagatgaggatattgcgcggctgctgcaggaaaaggagctccaggaagaaaaaaagcgcaaaaaacacttccctgagtttccggccacacgggcctatgccgattcatattactatgaggatgggggcatgaaaccacgagtaatgaaggaagccgtgtctactccctcacgcatggctcaccgtgaccaggaatggtacgacgccgagattgcaaggaaattgcaggaggaggagctccttgctacccaggtggacatgcgagcagctcaggtggcacaagacgaggagatagctaggctgctgatggctgaggagaagaaggcctacaaaaaggcaaaggaaagggagaagtccagcttggataagcgaaagcaagatcctgagtggaagccaaagacggctaaagctgccaactcgaaatctaaagagagcgacgaaccacaccattcgaagaacgagcggcccgcgcgcccccctcccccaataatgaccgacggcgaggacgccgattatacccattttaccaaccagcaaagttccacacggcatttttccaagagcgagtcatcccataaaggcttccactacaaacactag

SEQ ID NO: 112616 - DNA, 1449 bp, synthetic construct
  misc_feature 1..1449: note = Description of Artificial Sequence: Synthetic coding sequence
  source 1..1449: mol_type = other DNA
atggcagaggtcagcattgatcagtcaaaacttccaggggttaaagaagtctgtcgggactttgctgtcctggaagaccacactttggctcattccctgcaggaacaggagatcgagcatcacttggctagcaacgtgcaacggaaccgcctggtccaacacgatcttcaggtggccaaacagctgcaggaagaagatctgaaggcccaggcacagctgcagaaacgctacaaggacctggaacaacaagactgtgaaatcgcgcaagagatacaagagaagctggcgattgaagccgaacggaggaggatccaggagaagaaggatgaagatattgccaggctactgcaggagaaggagcttcaggaagaaaagaagcggaaaaagcacttcccagagttccctgccaccagggcgtatgctgattcttattattacgaggatggtgaccagcccggatcacgcagagcgcgagagcttggttcaggcttcagtcgcccgtgtcggttacagagggatggcaaaaccgtgaaacacaagaaggagaagcctgagcacccgctggaaaatttggaggagccagagcagcactgcagcagtaaaaggagtcttagtagctcttcctctggcaaagggcgcgacaatccacatatcaacaacgaacaacacgagagaaaacggtcgacacaagagagacctaggcgacctctgctgccgaccatcagcggcgaggtgttcctgagtacggaatgcgatgattgggagacaaagatcaaccaccagacccggaactgggaaaaacaatccagacaccaagacagactctctccaaaaagcagtcaaaaggctggactgcactgcaaagaagtggtgtacgggcgggatcatggccagggtgagcaccgaaagagacgccatcgccctcgaacccctccattctccgaatcagaggaacagcttcacttacacgacgcaggtatgaaaccccgggttatgaaggaggctgtgtccactccaagtcgcatggcccaccgggatcaagagtggtacgatgcagagatcgcacgaaaactgcaggaagaagaacttctggcaactcaagtcgacatgcgagctgcacaggtggcccaggacgaggaaatcgctagacttttgatggccgaagagaagaaggcgtataagaaggccaaggaaagggaaaaatcatccttggataaacggaagcaggaccctgagtggaaaccaaaaacagctaaagctgccaactcaaagagtaaggaatcagatgaaccacatcactccaaaaatgaaagacccgcacggccacctccaccaatcatgactgatggagaggacgcggattatactcatttcactaatcagcaatcttccacaagacatttctccaagtccgagagctcgcataagggcttccactataagcattag

SEQ ID NO: 112617 - DNA, 1425 bp, synthetic construct
  misc_feature 1..1425: note = Description of Artificial Sequence: Synthetic coding sequence
  source 1..1425: mol_type = other DNA
atggcggacagtgccagtgaaagcgatactgatggcgccggcggcaacagctcaagctccgctgcaatgcaatcatcctgttcctcaacctccggaggaggcgggggcggcggcggtggcggcgggggggggaagtctggtggcattgttatcagcccattccgtctagaagagttgacaaacagactcgcaagcctccaacaggaaaacaaagtgctcaagatcgagcttgaaacttataagctgaagtgtaaggctcttcaggaagagaatcgggacttgcgcaaagctagtgtgaccatccaggctcgggccgagcaagaagaggagtttatctccaatacactgtttaagaagatccaggctctgcagaaggaaaaggagaccttagcagtgaattacgagaaggaagaggagttcctgaccaatgagttatcacgcaagctgatgcagctgcaacatgagaaggctgaactggagcaacatctggagcaggaacaggaatttcaagtgaataaactgatgaaaaaaattaaaaaactcgagaatgacaccatctctaaacagcttactctcgagcagctcagaagagaaaaaattgatctggagaacacccttgaacaggaacaagaggcgttggtcaatcgcctgtggaaacgtatggataagctcgaggccgaaaagcggatactgcaagagaaactagaccaacctgtgagtgcacccccttctccacgagatatttctatggagatcgacagtcctgaaaatatgatgcggcatattcgcttccttaagaacgaagtcgagcgtctgaaaaagcaacttagggctgcccagctgcagcattcagagaagatggctcagtatctcgaagaggagcgtcacatgcgcgaggagaatctgcggctgcaaaggaaacttcaacgggagatggagcggcgcgaagccttatgcaggcagctgagtgagagcgagagttcgctggagatggatgacgagagatattttaacgaaatgtccgcccagggactgaggccccggacggtctctagtcccatcccttataccccttccccaagttcctcacgcccaatcagccctggcctttcctatgcctctcacaccgtgggctttactcctcctacctctttaaccagggctggcatgtcttattataacagccccggccttcatgtccagcacatgggcacatctcacggcattactaggcctagtccccggcgttcgaactcgcccgataagttcaagagacctacacctccccccagtcccaatactcaaaccccggtgcagccgccccctccgcccccacctccacccatgcagccaaccgtgccctccgcggccacctcccaaccaacaccttcccagcatagcgcacacccgagttctcagccctag

SEQ ID NO: 112618 - DNA, 2055 bp, synthetic construct
  misc_feature 1..2055: note = Description of Artificial Sequence: Synthetic coding sequence
  source 1..2055: mol_type = other DNA
atgaacccacctgcggcatttctcgcgggccggcagaacatcggctctgaagtcgagatttcaactattgaaaaacagcgtaaagagctccagctgctgattggtgagctgaaggatcgagacaaagagctcaacgatatggtcgccgtgcaccagcagcaactgctatcctgggaggaggacagacagaaggtgttaaccttagaagagcgatgtagtaaactggagggtgaacttcataagcgaacagaaattattaggagtctgacaaaaaaggttaaggccctcgaaagcaatcagatggagtgccagactgccctgcagaagactcagttgcagctgcaagagatggcccagaaggccacacacagctctctactttccgaagatctcgaggctcgtaatgaaacactatcaaacactctggttgaactgagcgcacaggttggccagttgcaggccagagagcaggcgctaaccacaatgataaaactgaaagacaaggacatcatcgaagcagtgaatcatatagctgactgcagcggaaaatttaagatgctggaacatgctcttcgagacgccaagatggctgagacttgtatcgtgaaggaaaaacaggattacaaacagaaactaaaggctctcaagattgaggtgaacaagcttaaagaggacctgaatgagaagacaacagagaataacgaacagcgggaggagatcattcgccttaaacaggaaaaaagttgtcttcacgatgagttgctgttcaccgtggaaagagaaaagcggaaagacgaactcctgaatatcgccaaaagcaaacaggagcgcactaacagtgagctgcacaacttgcgtcagatctacgtaaagcagcagagcgatttgcagtttctaaactttaacgttgaaaacagccaggagctcatccaaatgtatgactcaaagatggaggagagcaaagcactcgactcgagtcgcgatatgtgcctgtctgatctggagaacaatcaccctaaggtcgacatcaagcgggaaaagaatcagaaaagtctctttaaggatcagaaattcgaagccatgctagtgcagcaaaaccgctccgacaagtcaagctgcgacgagtgcaaagaaaaaaagcaacagattgataccgtgttcggagagaaatcagtgatcaccctgagctcaatcttcacaaaggaccttgtggagaaacacaacctgccttggtcccttgggggtaaaacgcagatcgaaccggagaataaaattacgctgtgtaagatccacacgaaaagccctaaatgccacggaaccggcgtgcagaatgaggggaagcaacctagtgaaactcctactctctctgatgaaaaacagtggcacgatgttagtgtgtacctagggctcaccaattgcccgtcgagtaagcatccagaaaaacttgacgttgagtgccaggatcagatggagagatccgaaataagctgttgtcagaaaaatgaagcttgtctcggagagagcggaatgtgcgattcaaagtgctgtcacccatccaatttcatcattgaggcacccggccatatgagtgatgttgaatggatgagtattttcaagccgagcaagatgcagcgtatcgtgagactgaaaagcggctgtacatgtagcgaaagtatatgtggcacacagcacgattctcccgcttctgagctgatcgcaattcaggatagccatagcctggggtccagcaagagcgccttacgggaggatgagacggagagctcctcaaacaaaaaaaatagccccacctcgctgctcatttataaggatgcaccggctttcaacgagaaggccagcatagttctacctagccaggatgactttagtccaacatcgaaactgcagagactgcttgcggaatctcgtcagatggtcaccgacttggagctgtctacactcctcccaatctcacacgagaatctgaccggcagcgccactaacaaatccgaggtgccagaggaatccgcgcagaagaacacgttcgttagctattag

SEQ ID NO: 112619 - DNA, 1338 bp, synthetic construct
  misc_feature 1..1338: note = Description of Artificial Sequence: Synthetic coding sequence
  source 1..1338: mol_type = other DNA
atgcctaattcctccccaaaagatcccaccaccgccagtggcaacggaagcaaggtggaacgggaaaagcgcaaagatgaacttctaaacatagccaaatccaagcaggagcggacaaattccgaactgcacaacctcagacagatatacgtgaaacaacagagcgatcttcaatttctcaatttcaacgtggaaaattctcaggagctcattcaaatgtacgactcaaaaatggaggagagcaaagccctagacagttcacgtgacatgtgcctcagcgacctagagaataaccaccctaaagtggatattaaacgggaaaagaatcagaaatcgcttttcaaggaccagaaatttgaagccatgttggttcagcaaaataggtccgataagtcctcatgcgacgagtgtaaagagaagaagcagcagattgatactgtgtttggcgagaagagcgtgattacattgtcgagtatcttcactaaagaccttgtcgaaaagcataatcttccatggagcctaggcggtaaaacccaaatagaacctgaaaacaaaattacactgtgtaaaatccacacgaagtctccaaagtgtcacggcaccggggtgcagaatgaagggaagcaaccaagcgagacaccaacgctatcggacgaaaagcagtggcacgacgtgagcgtatatctggggctcaccaactgccctagtagtaaacatcctgaaaaactcgacgtcgaatgccaggatcaaatggaaaggagcgaaatatcttgctgtcagaaaaatgaagcctgtctcggcgaatctggaatgtgcgatagtaagtgttgccacccatcaaactttatcatcgaagcgccaggacacatgagcgacgttgaatggatgtcaatctttaagccatccaagatgcagaggattgtgcgacttaagtctggttgcacgtgctccgagagtatatgcgggacccaacacgacagcccagcctcagagctgatcgcaattcaagacagccactcactaggatcctcaaagtccgccctccgcgaggacgagaccgaatctagcagcaacaaaaagaatagtcctactagtctattaatctacaaggacgcacctgcatttaacgaaaaagcctctattgtcctgccgagccaggatgatttttctccaacctctaagttgcagaggctactcgccgaatccaggcaaatggtcaccgatttggaactgtcaacgcttcttcctattagtcacgagaaccttacaggtagtgccacaaacaaatccgaagtgccggaagagtcagcccagaaaaatacgtttgtgtcatattag

SEQ ID NO: 112620 - DNA, 2049 bp, synthetic construct
  misc_feature 1..2049: note = Description of Artificial Sequence: Synthetic coding sequence
  source 1..2049: mol_type = other DNA
atgaacccaccagctgcgtttctggctggccgccagaacattggctctgaagtggagatctccaccattgagaagcagcgaaaagagctgcaactgttgattggcgagctcaaagacagagacaaagaattaaacgacatggtcgccgtccaccagcaacaactcttgtcgtgggaagaggacaggcaaaaagtacttacgctggaagaaagatgtagcaaactggaaggggaattacacaaacgtaccgagattatcaggagcctcactaaaaaagtcaaggcacttgaaagtaatcaaatggagtgccaaactgctcttcagaagactcagttgcaactccaggaaatggcccagaaagctacgcacagcagtcttctgagtgaggatctggaggctaggaatgagacacttagtaatacgttggtggagctaagtgctcaggtagggcaactgcaggccagagaacaagctctaaccaccatgattaagttgaaagacaaggatatcatcgaagccgtgaatcatatcgccgactgctccggcaaatttaagatgttggagcatgctctccgcgacgccaaaatggcagaaacttgcatcgtcaaagaaaagcaggattacaagcagaagctcaaagccctgaagattgaggtaaacaaacttaaagaagatctcaacgagaagactaccgagaacaacgaacaacgggaggaaatcataagactcaaacaagaaaaatcctgcctccacgacgagctgctatttaccgtggaaagagagaagagaaaagatgagttactaaacattgccaaatctaagcaggagcgcacaaactcggaactgcacaacctcaggcaaatctacgtcaagcaacagagcgacctgcaattcctcaactttaatgtggagaattcacaagaactgatccagatgtacgattctaaaatggaggaatctaaagctctggactccagccgggacatgtgcctctctgacttagaaaacaatcatcccaaagttgatatcaagcgtgaaaagaaccagaaaagtctattcaaggaccagaaattcgaggcaatgctggtccaacagaatagatccgacaagtccagttgcgacgagtgtaaagaaaagaaacagcagatcgacacagtctttggagaaaaaagtgtcatcacgctgtcgtcaatctttaccaaagacctggttgaaaagcacaacctgccgtggtcactaggtggcaagacacagatcgagccagagaataagataactctttgtaaaattcacacaaagagtccaaagtgtcatggcactggggtgcagaatgagggaaaacagcctagcgagacccccaccctatcggacgaaaagcaatggcatgacgttagcgtgtacctgggccttacaaactgccctagctctaagcatcctgaaaaactagacgtggagtgccaggatcagatggaaaggtcagaaatttcatgctgccaaaaaaatgaggcctgccttggggagtctggaatgtgtgattctaaatgttgccacccctctaattttatcattgaggctcccggacatatgtcagatgtcgagtggatgagcatcttcaagccttcaaagatgcaacggatcgttcgcttgaagtctggatgcacctgctccgaaagcatctgcggcacccagcacgatagtcctgccagtgagttaattgccatacaggacagtcatagcctgggaagtagcaaatcagctctaagggaggacgagacagaatcctcatcaaacaagaaaaacagccctacctcgctgctcatttacaaagacgcccctgctttcaatgaaaaggcatccatcgtcctcccatcacaagacgatttctccccgacatccaagcttcagagacttctggcggaatctagacagatggtgacagatctcgaactgagtactctgctcccaatttcacatgaaaacctgaccgggagcgctactaatatcagccatctgtgcgggagacagaaagctgacaccaacaccgaatag

SEQ ID NO: 112621 - DNA, 1494 bp, synthetic construct
  misc_feature 1..1494: note = Description of Artificial Sequence: Synthetic coding sequence
  source 1..1494: mol_type = other DNA
atgcctaaaaaggaaaagatggccaaaacaccactaagtgatgaaaaacaactgctcctgttccagcaaaaactgctagcagaggaggagatggcaaagaagaaggagcggctattaagccaatttcttaaagacaagttggcgaaagaggaacataatagtgcactgaacctgaataaaataaatacccagtggcgaacggtgctacgcgaggttaaaacccgggaactacataaagacatcgagatcttgtctcaaacttttgaacgggtggtggattgtaaggacaacgtgattaaaagcctggccaaagatctgagcgaagctgaagagcagtacgctcacgcgctgagaagtcatctgcacaatgttgatcagctgcttgccttgcaaagacatagactgagtttactcgaggagtcatacaacatggaactggaggccctgaccaaagagtttgagaccgaacggaaaaccattatcgaccagcatgaaaaggagattcactacctgcaagacatctttatggccatggaacagaactacatcgactccgagtacgaaagcaaactggagtttcagagcatgtggaacgacctcaaaaatatgaacttggaggaaaaacactttctgagactgcacttagagaatagagtagaggacctctggcggaagtttcaggatgtgctcaagaattataccgatgcgaccgaggacagaaaggctgctttcgagacactgcaggtgaaagacgaaaaaagcagcaaggaaatcgaagtgcagatgaaaaagatccagaaactgcaagatgccattactataagcaaaggtaaaattatgattcacagccgcgaatctgaagatgagaaccggtacattaggaacgacaaggaactcgtgttagtgcagcttcgcaaactgaaggcccagagaacacaggcccgcgcagcatcacagaagaacctcgtgcggcttaccctagaatccaatgccactctgaaagcccttcggaaaatcgtcgacaaaggagagaagattctaaagctcgcagaaatatgccgtaagttcgaaacagaggaggaaaaggtgctacccttttattcttccgtcctgactcctaaagaacaggagggtatacaaaagaacaacctggaagagctcaccgaggagctgacgaaggtgatggtggactatatcggaatggaaaatttctggaagcgctacaataaagtgaaactggaacagctgtcacttcaacaccgcagggcccagcttttggacatcaacggtaagcttcgggagatgctgaaacagtacctggacggaatttctgtcagcgatgaggtcctctcccagcttaatcccttattcatcgttaattatcagtctaacttgctgcagccgctgtcaattaggatcgcacacccaggaagcacgagtcccagtgcgccctggcgcgatcaacggaggtccttttttctggggagctcatag

SEQ ID NO: 112622 - DNA, 1455 bp, synthetic construct
  misc_feature 1..1455: note = Description of Artificial Sequence: Synthetic coding sequence
  source 1..1455: mol_type = other DNA
atgcccaagaaggagaagatggctaagacacccctgtccgatgaaaagcaactcctccttttccaacaaaagcttctcgcggaggaagagatggccaaaaaaaaggagcggctgctcagccagtttctgaaggacaagctggccaaggaggagcacaacagtgccttgaatttgaacaaaattaatacacagtggagaaccgtcctgagagaagtcaaaacccgtgagttgcacaaggacatcgaaatccttagccagactttcgagagggtggtcgactgtaaggacaacgtgatcaagagtttggcgaaagacttaagtgaggcagaggaacagtacgcccatgcactccgatctcacctgcacaatgttgatcagctgctggccttgcagaggcatagactttcactgcttgaggaaagttataatatggagctcgaagctttaaccaaagaatttgagaccgagcggaaaactataattgatcagcacgagaaggagattcattacttacaggacatttttatggcaatggagcagaactacatcgactctgaatatgagtctaagctggagtttcagtcaatgtggaacgacctcaagaacatgaacttggaggaaaaacacttcttacgtcttcaccttgagaatagagtggaggacttatggcggaagttccaggacgtgctcaagaactacacagatgcaactgaagataggaaggcagcatttgagaccttgcaggttaaggacgaaaagtcaagcaaagagatcgaagtgcagatgaagaagattcagaaactgcaagacgccatcacaatcagcaaggggaaaatcatgatccactcacgcgaatctgaggacgaaaacaggtacatccggaacgacaaggaattagttctagtgcagctgaggaagctgaaagcccaaaggactcaagctcgcgccgcaagtcagaaaaatctggtgaggcttacactggagagcaacgcaacactcaaggccctgagaaaaattgtggacaagggtgagaaaatcttgaaactggctgagatttgccgtaaattcgaaactgaggaggaaaaagtgctacccttctactcctctgtgcttacccccaaggagcaggagggaatacagaaaaataatctcgaagaactgacagaggaattaactaaggtgatggtagactatatcgggatggagaacttttggaagcgttataataaggtcaagttagagcagctgagcttgcagcacaggagagcacagctcctcgatattaatgggaagctgcgagaaatgttgaaacagtatctggatggcatttccgtcagtgacgaagtactgtctcagctcaatccactgtttattgtgaattaccagtctaacctgcttcaacctctgtccatacggattgcacaccctggagacaaacagcaccccactacatag

SEQ ID NO: 112623 - DNA, 3240 bp, synthetic construct
  misc_feature 1..3240: note = Description of Artificial Sequence: Synthetic coding sequence
  source 1..3240: mol_type = other DNA
atggagagcaattttaataccgaaagctcatctacgtttacactgcaaagttcaagtgagactctttttagcatccagttgctcgacttcaaaacttctcttctggaagctcttgaagaactgaggatgagacgcgaagcagagattcattatgaagagcagattggaaagatcattgtcgaaacccaggaactgaagtggcaaaaagaaacactgcagaaccagaaggagacactggccgaacaacataaagaggccatggccgtatttaagaaacagcttcagatgaagatgtgcgccctggaagaggagaagggcaaatatcagctcgctacagaaattaaagagaaagagatagaagggctgaaagagacactgaaagctcttcaagtgagcaagtatagcctgcagaagaaggtcagcgagatggagcaaaaggtgcagctgcatcttttggccaaagaagactaccataagcagttatctgagatagaaaagtactacgctactatcactggtcagttcggactagtaaaagagaaccatgagaagctggagcagaatgtgagggaggccattcaatctaataaacgcctttccgccctcaacaagaaacaggaggctgaaatatgcagcctcaagaaggaacttaagaaggctgcctctgatttaatcaaaagtaaagtgacgtgtcaatataagatgggagaagaaaatatcaacctgaccattaaagagcagaagttccaggagcttcaggagagactcaatatggaactggaattgaatgaaaagatcaatgaggagataactcatattcaggaggagaaacaagatatcattatctcattccagcatatgcagcagcttctgcggcagcagatccaggccaataccgaaatggaggccgagcttaaggtcttgaaggaaaacaatcagacactagagagagacaacgagctccagagagagaaagttaaggagaacgaggaaaagttcctcaacctgcagaatgagcacgagaaggctctcgggacctggaagaggcacgcggaggaacttaatggggagataaataagattaagaacgaactctcttctctgaaggaaacccacatcaagctccaggaacactacaataagttgtgcaatcaaaagacttttgaagaagataaaaagtttcagaacgtccccgaagtgaacaacgaaaatagtgaaatgagcaccgagaagtccgagaatacaatcattcagaaatacaataccgagcaggagatcagagaggagaatatggagaatttctgcagcgataccgagtacagagagaaagaagagaaaaaggaggggagcttcattgaggagattattatcgatgatctgcaactgtttgagaaaagctttaaaaacgagatcgacaccgtggtgagccaggacgaaaatcagagtgaaatttccttgtcaaagacactgtccttagacaaggaggttatatcacagggacagaccagcaacgttaccgacaataggaaaagcgtcaccactgagataaaggataagatctgcctcgaaaaagataatggatgcaccgaatttaagtcgcctaataatcattttgtggtgcttgacaccgccatcgagaccgagaaaattcacctggagagaacgagaggcctggacgtgcatcatacagatgtaaatcttgaagtggagaacaataagaccagtttcaactccatccttaacgagacggcccataacacttatcacaacaacaataaagacgtatccgagaatgagcccttcaagcagttcagactcctgcctggcactcgagaacacgcgctggagaaagagataacgaactccgaccaaacgaaggccgacctggactccagtctcgatatcaaaaagaacccagtcccctgccagaagtattccctgaggaactctagcaatgtgatgctggacgacaaacagtgcaagatcaaacagatccaactgctaacaaagaagtcagagtgtagcatcctgctgagcaagcagacctctgacttcctgcaggtttgcaacgatactcttgagaagtcagaactgactgtgccatgcgacattgtgattgaccatcacgtgtcatatgccgctttcagcgcaaattcaaaactcctcctgaagaattctgataaaaacgtgcattctatgagcatgttagtgaaaccgaattccagtcccggtggcaaaaccatgtgcaaaaatatgagcgacatgcaaaactcacagttcaacaactgtctcgggtacctcgagaatacaaacgtgaatatcagtcatctccacctgaacaacgagaactcacatgcctctcaggctaaggatgtgaagaccgcggttcatatgaaaacttgcaccgaaacggagttttctaataagaaaaaccagattgacgagaatcaggtgacagaggcaaccaagaacgatctgtttctgtttgtgtctatcaatgagcgccagcatacactgctcaataacacagagaaaaccgaatcattaaacgacattgtttccgggaaaatgttctcggaagggcagttggaagaaagtcactcattccacatagaaccatccggcgatttggtcaatagaagtggtagaagcaccttcgacctttccaccagcgacaagaagacagagaagacccccgtgtacatgaattttagtgatccaggtccctggagtaaggttaaccacatagagtcccagacagcttcttcttccacgccctgcatctctttgttgctaaaagaacggcctctcgacccctccgaaaacaaaaagattatatccatggctctttgcaagaacataggcgtggacgacgtaggcaaggatatcggaccggacaccacctcaattaaccgagttgcagataccctgaacaattggagtatacacccggatcctaaaggcgaacccagcgaggaaaaaaacgctatggccaaaactttctatgattcctctttcccaacggagcacgtcaagacaaaaccattaatcagcacgccactgcagtcccatctgcaggccattaagacaacgaaaaatacatctggagatgatgattggcagtctttgatcacaaatcagctgaataaaagcgagaacctgttatcacttgagaatgacaaccagccaaagaaaagaaaggccgaggaaacactcgagaaaaacaaccggctaaagtag

SEQ ID NO: 112624 - DNA, 1617 bp, synthetic construct
  misc_feature 1..1617: note = Description of Artificial Sequence: Synthetic coding sequence
  source 1..1617: mol_type = other DNA
atgctgcagataggtgaggacgtggattacttgctcatccctcgggaggtgcgcctggccggtggcgtatggagggtgatcagcaagcctgccacaaaagaagccgaattccgcgagcggctgactcaattcctggaagaggaggggagaactttagaggacgttgctagaattatggagaaatcaacacctcacccaccccagccaccaaaaaagcccaaggaacctagggtgcgccggagagtgcagcagatggtcactcccccaccaagactagtcgtgggcacctatgacagttcaaatgcgagtgatagcgaattttccgacttcgagaccagccgggacaaatcccgccagggcccaaggaggggaaaaaaggttcgcaagatgccagtgtcctatttagggagcaaattccttggctctgacctcgaaagtgaggacgacgaagagctcgttgaggcctttttgaggcgccaggaaaagcagcccagcgcccctccggcgcggcgccgggtcaatctgcccgtgcccatgttcgaggacaacctcggcccccagctatccaaggctgatcgctggcgcgagtacgtcagccaggtgagttggggcaagctgaagcgaagagtgaaagggtgggcacccagagccggtccgggagtgggcgaagctcgactcgccagcacagccgttgagagcgcaggcgtgagcagtgctccagaaggtacaagtccgggagaccgccttggaaatgcaggtgacgtgtgtgtcccccaggcatcacctcggagatggcggccgaaaattaattgggccagtttcagacgccggaggaaggaacagactgcaccaaccggccaaggcgccgatattgaagccgaccaggggggggaggccgccgacagtcagcgggaggaggcaattgcggatcagcgtgaaggggctgcaggcaatcagagggccggagcccctgctgaccaaggcgcagaggccgctgacaatcagcgcgaagaggcagccgacaatcagcgggctggagcccccgcggaggagggcgccgaagccgccgacaaccagcgagaggaggcggctgacaaccagcgcgctgaagcccctgccgatcagcgtagccaggggacggataatcaccgcgaagaagctgctgacaaccagcgcgcggaggctcccgcagatcaggggtcggaagtgaccgacaatcaaagagaggaagccgtgcacgatcagcgagaacgcgctcctgcagtgcagggagccgacaaccaaagagcccaggccagagctggccagcgggccgaggccgcccataaccagcgagccggcgctcccggtatccaagaagcagaggtgtcagccgctcaggggaccacaggcaccgctcccggcgcaagggcccggaagcaggtaaaaactgtgcgcttccagacaccaggcaggttttcttggttctgtaagcgtcgcagagccttctggcacactcctagactgcccacactgcccaagagggtgcctcgagccggggaggctagaaatctccgcgtcctgcgggcggaagctagggccgaggccgaacagggtgaacaggaagaccagctgtag

SEQ ID NO: 112625 - DNA, 975 bp, synthetic construct
  misc_feature 1..975: note = Description of Artificial Sequence: Synthetic coding sequence
  source 1..975: mol_type = other DNA
atgctgcagatcggcgaagacgttgattacctgttgatccccagagaggtcagactcgccggcggcgtttggagggtcatcagtaaaccagccacgaaggaggccgagttcagggaacggctcactcagtttctggaagaggagggcaggaccctggaagacgtggctcgtatcatggaaaagagcacgccacatcctccccagccacccaagaagccaaaagagccacgcgtgcgccgtcgagtgcagcagatggtcactcctccaccccggctcgtagtgggaacttacgactcttcgaatgcttctgattccgagttttccgactttgagacaagcagagacaaatcgaggcaggggccacggagaggcaaaaaggttcgcaagatgcccgtgtcgtatcttggatcaaagttcctgggttctgacttagagtcagaagacgacgaagaactagttgaagccttcctgaggcgccaagggctgcaggtgatccgaggccaaggaccccagctaactcgcggccagcgcctgcagataatcaggggaaaacgccttcaaatcattcgtggtcagggtccacagctcaggcggggacaacggctgcagataacgcgcggcaagcgccttcagataatccgggggcagagaccccaattaactcgcgggcaccgggcgcagatcaccacagggaagaggctccagatcatcaggggccggaggccacagctcacaagagggcagcgtctgcagattatcaaagggaagcgcccttatatgactagaggcaagggtccgcagctgagtagggttcagatcatccgcggccatcggcctggactggcccggggtcagcgtttgcatatcatccggggccaaggcccgcaggtctcaaggaaactgaagagccaactgccgaaagggccacaggaacagttacaggaaccgggcccgggcaatagatccagacagtag

SEQ ID NO: 112626 - DNA, 5532 bp, synthetic construct
  misc_feature 1..5532: note = Description of Artificial Sequence: Synthetic coding sequence
  source 1..5532: mol_type = other DNA
atggagaatgaaattttcaccccgctgctagagcagtttatgaccagcccactcgtcacctgggtcaaaacttttggccccctggccgcgggcaacgggactaacctcgacgagtacgttgctttagtggacggagtgtttctgaaccaagtgatgttacagattaatcctaagttggagagtcaacgagtgaacaagaaagttaacaatgacgcctctttgagaatgcacaatctctcaatcctggttcgccagattaagttctactaccaggagaccctccaacaacttattatgatgagcctcccaaatgtcttaatcatcgggaaaaatccattttcagagcagggcactgaagaagtgaagaaattacttctgttgctcctcggttgtgcagtacaatgccaaaaaaaagaggagttcatagaaaggatccagggcctggactttgacaccaaagcagcagtagcagcccatatccaagaggttacacataatcaagagaatgtgtttgatctccagtggatggaagtgaccgacatgagccaagaggacatagaacccctgctgaagaacatggctctgcatctgaagcgcttgatcgatgagcgcgatgaacactctgagacaatcattgagctgagtgaggaacgcgacgggctccatttcctccctcacgcttcctcaagtgcccagtctccttgcggtagcccaggtatgaaaagaacagagtccaggcagcatttgtcagtggagctcgccgacgctaaggccaaaatcaggcggctgaggcaggagctggaagaaaagacagaacagctgttggattgcaaacaggaactcgaacagatggaaatagagcttaagcggttgcagcaggagaatatgaacctgctgtccgatgccaggagtgctaggatgtaccgtgacgaattagacgcactgcgcgagaaagcagtccgagtcgacaagcttgaatccgaggtttccagatacaaggaacgcctccacgatattgagttttacaaggcgagggtggaagaactaaaggaggataaccaggtgttgctggagacgaaaactatgctggaagaccagctcgagggaaccagggctcgttcagataagctgcatgaactggagaaggagaacctccagttgaaggcgaagctacacgatatggaaatggagagggatatggaccgcaaaaaaatagaagaattgatggaagagaatatgacgctggagatggcccaaaaacagtccatggatgagtccctgcacctggggtgggaattggagcagatatcgcgtacatccgaactgtctgaagccccgcagaagtccctcggacatgaggttaacgagctgacaagcagcaggcttttaaaattagaaatggagaaccagagcctgaccaaaacagtggaagaactgcgtactaccgtggattccgttgaaggtaacgcgtcgaagatccttaagatggagaaagaaaaccagaggctttctaaaaaagtggagatcctcgagaatgagatcgttcaggagaaacagtctcttcagaattgtcagaacctttcaaaggacctgatgaaagaaaaggcgcagctggagaagacgatcgagacgctcagggagaattccgaaagacaaatcaaaattctggaacaggaaaacgagcacctaaatcagacagtgagttcccttagacagcgatcccagattagtgccgaggcccgagtgaaggacatagagaaggaaaacaaaatactgcacgaatccatcaaggagacttcatctaaactgagtaaaatcgaatttgaaaagagacaaatcaagaaagaactggaacattacaaggagaagggagagcgagcggaagaactggagaacgagcttcatcacctggagaaggagaacgagttgctgcagaaaaaaatcaccaacttgaaaatcacatgtgagaagatcgaggcccttgaacaagagaattccgagctagagagggaaaataggaaacttaagaagactttagattctttcaagaatctgaccttccagcttgagtcgctggaaaaggagaattcccagctggatgaggaaaacttggagctccgcaggaacgtcgagagtctgaaatgcgcctccatgaagatggctcaattgcagctggaaaataaggaattggaatccgagaaagaacagttgaaaaaggggctagagctcctgaaagccagtttcaagaagactgaacgactggaggtatcgtaccaaggcctagatatagagaaccagaggcttcagaagacactggagaattctaataagaagatccagcagctggaatctgaactccaggatcttgagatggagaatcagaccttgcagaagaacctggaagaactgaagatctctagcaagagactcgagcagctcgagaaagaaaataaatctctcgagcaggaaacctcacaactggagaaggacaagaagcagcttgagaaggagaacaagcgcctccgtcagcaggcagaaatcaaggacactaccctggaagagaataacgtgaagataggcaatctggaaaaagagaataagaccctgagtaaggagattggaatttacaaagaatcctgcgttaggctcaaggaactcgaaaaggagaataaagagttagtgaagagggccaccatcgacatcaagaccctggtcacccttcgagaagacttagtctccgaaaaattgaaaactcagcagatgaataatgaccttgaaaaacttacccatgagctggaaaagatcggcctgaacaaggagcggcttctccatgatgagcaatcgacggacgactctcgctacaagctgctcgagtccaaattggagtccactctgaagaagagtctcgaaatcaaggaggaaaaaatagctgctcttgaggctaggctcgaggagagcacgaattataatcagcagctgcgccaggagctgaaaacagtgaaaaagaactatgaggcactgaagcaacgccaggatgaagagcggatggttcaatcctctccccctatctctggcgaggacaataagtgggagagggagagccaggaaacaaccagagagttactcaaagtaaaggatagattgattgaagtagaacgcaacaatgctaccctgcaggccgaaaagcaggctctgaagacccagttgaaacagcttgagacgcagaataacaatctgcaggcacagatcctcgccctgcaaagacaaaccgtgagtctgcaggaacagaacacaacccttcagactcaaaacgccaaacttcaggtcgagaatagcacattgaatagccagtccacctccctcatgaaccaaaatgctcagctgttgatccagcagtcatcgctcgaaaacgagaatgaaagcgtgataaaggagagggaagacctgaagagtctctacgacagtctgatcaaagatcacgaaaagctggaactactgcatgagcggcaggccagcgagtacgagtccctgatttcaaaacacggtacactcaagtcggcacataaaaatttggaggtagagcaccgggatctggaagacagatacaatcagttgttaaagcagaaaggtcagctcgaagacttagaaaaaatgcttaaggttgaacaggagaaaatgctgctcgaaaacaaaaatcacgaaaccgttgccgccgagtataagaaattatgcggagaaaacgatagactgaatcacacttactcacagctccttaaagaaacagaggtcctacagacagaccacaaaaacttgaaaagtctacttaataactccaaattggagcaaacccgcctcgaggccgaatttagcaagttgaaggagcagtaccagcagctggacataacctcaaccaagcttaacaatcagtgtgagctgctctctcagctgaagggaaatctggaagaggagaacagacatttactagaccagatacagacactcatgctccagaacagaactttactggagcaaaatatggagtctaaagacctattccacgtagaacaaaggcagtatattgacaaattgaatgaactaaggcggcagaaagaaaagctggaggagaagatcatggatcagtataagttctacgatccgtccccaccaaggagaagaggaaattggatcactttaaagatgcgcaaactgattaagagtaagaaggacataaatcgcgagagacaaaagtccctcacgctcaccccgactagatccgattcaagcgagggattcctgcagctgccccatcaggactcacaagatagcagctctgtcggaagcaattctttagaggacggacaaacgttggggacgaagaagagtagcaccatgaatgatctagtccagtctatggtcctggccgggcagtggacaggaagcacggagaatttagaagtgcctgacgacatatctaccgggaaaaggaggaaggagctgggtgctatggccttcagtactacggctattaacttttccacggttaatagttcggctgggtttcgaagcaaacagctggtgaacaataaggacactacttccttcgaagacataagcccacagggggtgtccgacgattccagtaccgggagtagagtgcacgcatccagacccgcctcactagacagcgggagaacatccacgagtaactctaataataacgcttccttgcacgaggtgaaggccggtgccgtaaacaaccaatcgcgcccacagagccattcaagcggcgagttttcactcttgcacgaccacgaagcttggtcctccagcggaagtagcccaatccagtatctgaagcgccagactaggagctcacctgtactacaacacaaaattagtgagaccttggagagccgacatcacaaaatcaaaacaggaagtccagggtccgaggtggtcacattacagcagtttttggaagaatccaataagctgacatctgttcagatcaagagcagcagccaggaaaatctgctggacgaagtaatgaaaagcctttccgtgagctctgactttctaggcaaagacaaaccggtgagctgtggactcgctagaagtgtcagcgggaaaacacccggggacttctacgatcgccgaacaactaaacctgaattccttcggccgggaccaagaaagaccgaggatacgtatttcatctcgtctgcaggcaagcccaccccagggactcagggcaagatcaaactagtgaaagagtcgtctttatctaggcaaagcaaagatagcaacccctacgcaaccctgccccgggcttcctcggttatttctactgccgagggcactacgaggaggacctctattcatgatttcctgaccaaggactcacggttgccaatctctgtcgatagtcctccagccgcagccgactctaatactacagccgctagcaatgtcgataaggtacaggagagcaggaattcaaaaagccggagtagggaacagcagagcagctag

SEQ ID NO: 112627 - DNA, 5613 bp, synthetic construct
  misc_feature 1..5613: note = Description of Artificial Sequence: Synthetic coding sequence
  source 1..5613: mol_type = other DNA
atggagaacgaaatctttacaccccttcttgagcagtttatgacttcgcccctggttacatgggttaagacctttggaccattggctgctggaaatggcaccaacttagatgaatatgttgccctggtggacggagtgttcctgaaccaggtcatgctgcagatcaaccccaagctggaaagtcagcgtgtaaacaagaaagtgaacaacgatgcctccttaagaatgcacaatttgtccatcctcgttcggcaaatcaagttttactaccaggagactctccaacaactgattatgatgagcctacccaatgtattgatcatcgggaaaaatcccttctccgagcaggggacagaagaagtgaaaaagttgctcctgctcctgctgggctgtgcggtccagtgccaaaaaaaagaagagttcatagaacggattcagggcctggactttgatacgaaggctgcggtggccgcccacatccaggaggtgactcacaaccaggaaaacgttttcgacctacagtggatggaggtgacagatatgtcgcaagaggacatcgagcccctcctgaagaacatggctctgcatctgaagcgactgattgacgaaagggatgaacacagtgaaaccattatagaactgtccgaggagagagacgggctgcacttcctgccccatgcttcatcatctgcccagagtccgtgcggtagtccaggaatgaaacggaccgagtctcgccagcacttgagtgtcgaactggccgacgctaaggcaaagatccgcaggctccggcaggagctggaggaaaagacagaacagcttctcgactgtaaacaggagctcgagcaaatggaaatcgaactgaagaggctgcagcaggagaacatgaacttactctccgacgccaggtctgccagaatgtatagggacgaactcgatgcactgagggagaaggcagttagggttgataaactcgagagtgaagtttcccggtacaaggaacggctgcacgatatcgaattctataaggcacgagttgaggaacttaaggaagataaccaggttctgctcgaaacgaaaacgatgctcgaggaccaattggaagggactcgcgctaggagtgataagctgcacgagctcgaaaaagagaaccttcagctgaaggcaaaattgcacgacatggagatggagcgagatatggaccggaagaaaattgaagagctgatggaagagaacatgaccctggaaatggcccagaagcaaagtatggacgaatctctgcatttggggtgggagctggaacagataagccgaacctccgagctgagcgaagcccctcagaaatcacttgggcatgaggtaaatgaattgacatcctccagattgctgaagttggagatggagaaccagagtctgactaaaactgtcgaagaacttcgcaccaccgtcgattccgtcgaaggcaatgctagcaaaatattaaagatggaaaaagagaaccagcgtttgtcgaagaaggtagaaatcctcgaaaacgaaatcgtacaggagaagcagtcccttcaaaactgccagaacctctccaaggacttaatgaaggaaaaggcacagcttgaaaagaccatagagacactgcgggagaactcggaaagacagattaagattctggagcaagaaaacgagcacctgaaccagaccgttagctcgctgagacagagatctcaaataagcgccgaggctcgcgtgaaagacattgaaaaagagaacaaaattctacatgagtctatcaaagagacaagctctaaactgagtaagattgaatttgaaaagagacagattaaaaaagagctggagcactacaaggaaaagggggaacgtgcggaggagctcgagaacgagttacaccacttggaaaaggaaaacgaacttctgcaaaagaagattacaaatctgaaaattacttgcgagaaaattgaggcgctggagcaggaaaatagtgaactcgagcgggagaaccgcaaacttaagaagacgctggattctttcaagaacctcaccttccagctggaatccctcgaaaaggaaaacagccagttggacgaagagaatctggaactccggagaaacgttgagagtctcaagtgcgcctcaatgaagatggcccagttgcagctcgaaaataaagagttggagagtgagaaagagcagctgaagaaaggtctggaactcctgaaggcgagctttaaaaaaacggagcggttggaggttagttaccaaggactagatattgagaatcaacgcttacagaagaccttagaaaacagcaacaagaaaatccagcaattagaatcagagctccaggaccttgagatggagaaccagacccttcaaaagaacctggaagaactcaagatcagctcgaagcgcctcgaacagctcgagaaagagaataagtcgctcgaacaggagacctcccaactagaaaaggataagaaacaattagaaaaggaaaacaaacgtttgcggcagcaggcagagatcaaggacacaaccctggaggagaataacgtgaagattggtaaccttgagaaggagaataaaaccctgagtaaagagattggtatttataaggaaagctgcgtgagacttaaagaactggagaaagaaaataaagaattagtaaaaagagcaacaattgacattaaaaccctagttacattacgcgaagacttggtgtctgagaagctcaagacccaacagatgaataatgacctcgagaagctgacgcacgaactagagaagattgggttgaacaaggaacgccttttgcatgatgagcaatctaccgacgaccggtataagctgctagaaagcaaactagaaagtactttgaagaagagccttgagattaaggaagaaaaaatagcggccctggaggctagactcgaggaaagcactaactataatcagcaactgcgccaggagctgaaaactgttaaaaagaactacgaggctctgaagcaacggcaggatgaggagcgaatggtacaatcctctcctccgatctctggggaagacaataaatgggagcgggagtcacaagagactactcgcgagctacttaaagtgaaggataggctgatcgaggttgagcgtaacaatgccaccctgcaagcagaaaaacaggccctgaaaacacaactcaagcagcttgagacgcaaaataacaacctccaagcacagatccttgcactgcagaggcagacagtgtcccttcaggaacagaacacaaccctccagacacagaacgcaaaactgcaggtggagaattctaccctcaattctcagagtacttctctgatgaaccagaacgctcagctactgatccaacaaagctctcttgagaatgaaaacgagagcgtgattaaagagcgcgaggacctgaagtcattgtacgactccctcatcaaggaccacgaaaagctagagttactgcacgagagacaggcttctgaatatgagtcattgatcagtaagcacggaactctcaaaagcgctcacaagaatctggaggtcgaacatcgagacctggaggaccggtataatcaactcttgaaacagaaaggccagctcgaggacttggaaaaaatgctcaaagtggagcaggagaagatgcttctggaaaataagaaccacgagacagtcgcagcagaatataagaagctctgtggcgagaacgaccggctcaaccacacctactctcagttgttgaaagaaactgaagtgcttcagacggatcataaaaacctcaaaagcctcctgaataactccaagctggaacagactcgactggaggccgagttttctaaactgaaggagcaatatcagcagctcgacatcacaagcaccaagctgaataatcagtgtgagctactgagtcagcttaaggggaatctggaggaggagaatcggcacctgctggaccaaatacagacactgatgcttcaaaatcggaccttactggaacagaacatggaatctaaagatttgtttcatgtggagcagcggcagtacatcgacaagttaaacgaactgagaagacagaaggagaaactcgaagagaagatcatggatcagtacaaattctatgaccccagccctccacgccggagagggaattggattacgctgaagatgcgcaagctgattaagtctaaaaaggatatcaaccgagaaaggcagaagagcctgaccctcactccaacacggtcagactccagcgaaggtttcttacagctgcctcatcaggactctcaagacagtagctctgtcggaagcaattcgctggaggatggtcagaccctaggcactaaaaaatccagcatggtggcactgaaacgcctgccatttctaaggaataggcccaaagataaagataaaatgaaggcctgttaccgaaggagcatgtcgatgaatgacctcgtgcagtccatggtgctggccggccaatggactggatctaccgagaatctggaggtcccagacgatatatctaccggaaagcgccggaaggagcttggagccatggccttcagtactactgccatcaacttttccacggtcaattccagcgccggcttcagatcaaaacagctggttaataataaagacacgacttctttcgaggacatctccccccaaggagtcagcgatgatagttccaccgggtcccgggtccatgctagcagacctgcatcgctcgattccggccggactagcacgagcaattctaataacaacgcctctctgcatgaggtcaaagcaggagccgttaataaccagtccagaccccaatctcactcttctggcgagttttctctgcttcatgatcacgaagcatggtcttcttcaggctcatcgccaatccagtatctgaaaagacagacaaggagttctcccgtcctacaacataagatctcggagacccttgagtctagacaccacaaaatcaaaactggatcccctggctccgaggtggtcaccttacagcagttcctggaggagtcaaacaagctgacatccgttcagatcaagagcagttcccaggagaatctcctggatgaggttatgaagtctctctccgtgtcttccgatttcctgggcaaggataagcctgtgtcttgcggcctcgcacgcagtgtcagtggcaaaacacccggtgacttttatgatagaagaaccaccaaaccagagtttctgaggccggggccgagaaagactgaagatacctacttcatatctagtgctggtaagccaactcccggtacacaggggaagatcaaactggtgaaagaatccagcctgagccgccagtctaaagactcaaatccctacgccaccttgccccgagcttcaagcgtcataagtaccgccgaagggaccacccgtagaacttctatccacgattttctgactaaagacagccgccttccgatatccgtggattctcctccagcagctgccgattcgaacacgacagcggcatcaaatgtggataaggtacaggagagcagaaatagtaagagcagatctagagaacagcaatcatcatag

SEQ ID NO: 112628 - DNA, 2667 bp, synthetic construct
  misc_feature 1..2667: note = Description of Artificial Sequence: Synthetic coding sequence
  source 1..2667: mol_type = other DNA
ctcttggaatcaaagttagaatcaactttaaaaaagagtttggagataaaggaggagaagatagccgctctggaggcgaggctcgaggagtcgactaattacaatcagcagctgcgccaggaacttaagacagttaaaaaaaattatgaagcgctgaagcagcggcaggacgaagaacgcatggtgcagtcgtctccgcccattagcggggaagataacaaatgggaaagggagtcgcaagaaactacacgagagctgctgaaggtaaaagatcgactgattgaggtcgagaggaacaacgccaccctgcaggctgagaagcaggccctcaaaacccagttaaagcaacttgagactcaaaataataatctccaagctcaaatcctcgccctccagcggcagaccgtctccctccaggaacaaaacaccacccttcaaacccaaaatgcaaagctgcaagtagaaaattctacactgaactcacaaagcacatctcttatgaatcaaaacgcccagttgctgattcagcaaagcagtctcgagaacgagaacgaatctgtgattaaggagagggaagacctgaagtccttgtatgactcactgattaaggatcatgagaaactggagctactgcatgagcgccaggctagcgagtatgagagcctgatatccaaacacggcaccctgaagtctgcccacaagaacttagaggttgagcacagagacctagaagaccgctataaccagttgctgaaacagaaagggcaactggaagacctggaaaaaatgctgaaagtagaacaagaaaagatgctgttagagaataagaaccatgaaactgtggcagctgagtacaagaaactctgcggcgaaaacgatcgcctgaatcatacatactcccagctgctcaaagagacagaggtgctgcagacggaccacaaaaatttgaaaagccttctgaataattccaaactagaacagaccaggctcgaagccgaattttccaagcttaaagagcagtatcagcagctcgacatcacaagcacgaaacttaataatcagtgcgaactgctgtcccaattaaaggggaatttggaggaggaaaaccgccacctcctagaccagattcagactctgatgctccagaaccgcactctgctagaacaaaatatggagtccaaggacctcttccacgtcgagcagcgccaatacatcgacaaactaaatgaactgcgacggcagaaggaaaagctcgaggaaaaaattatggaccagtataaattctatgatccctccccacctaggaggcggggtaactggatcaccctgaagatgcggaaactcattaagtccaagaaggacattaaccgggaaaggcaaaaatccctgactcttaccccaaccaggagtgatagctcagaaggcttcctacagcttccccatcaggattctcaggattcaagcagcgtcgggtccaactctctcgaagacgggcagacactcgggaccaaaaagtcttcaacaatgaacgatcttgtgcaatccatggtgctagctgggcaatggacaggaagtaccgagaatctagaggtgcctgacgatatttccaccggcaaacggagaaaggagctgggagcaatggctttctcaacaacagcaattaacttctcaacggttaactccagcgctggatttcggtctaaacagctggttaataacaaagacacgacttcgttcgaggacatcagtccccagggggtatcagacgatagcagcactggaagcagagtacatgccagtcggcctgcctccctggactccggcaggaccagcacttcaaacagcaataataacgcatccctgcacgaggttaaagcgggcgccgtgaataatcagtcgcggccacagtcacatagctcaggggaattctcacttctacatgaccacgaagcatggagctcgagcggaagctctcctatccaatacctgaaaaggcagacgcgatcatctcccgtgctgcagcacaaaatctctgagacactagaatcgaggcaccataagatcaagaccggaagccctggcagcgaagtggtgactctgcagcaattcctagaagaatccaataaactgacctctgttcaaattaagagttcatcccaagaaaatctgttggacgaagtgatgaagtcgctgagcgttagcagtgatttccttgggaaggataaacctgtctcttgcggcctcgctaggtcagtttccggcaaaactcctggagatttttacgaccgccgcacaaccaagcctgaattcttgaggcctggaccgcggaaaaccgaagatacttatttcatttcctcagccggaaaacctaccccaggcacgcagggcaagatcaagctagtcaaggagagcagtttgtctcgccaatctaaggatagcaatccgtacgcgacactcccgcgtgcttctagcgtgatctcaaccgcggaaggaactactagacggactagcattcacgatttccttaccaaagactctagactgcccatctccgtggactcccctccagctgcggctgactctaataccacagcagcaagcaatgtcgataaagtgcaagagagcagaaacagcaaatcacgctctcgtgagcagcagtcttcctag

SEQ ID NO: 112629 - DNA, 5391 bp, synthetic construct
  misc_feature 1..5391: note = Description of Artificial Sequence: Synthetic coding sequence
  source 1..5391: mol_type = other DNA
atggaaaacgaaatcttcacccctctcctggaacagttcatgacatctcctcttgtaacctgggtaaagacattcggacctctggcagcagggaatggcacaaatcttgacgaatacgtggctcttgtggatggcgttttcctcaatcaagtgatgctgcaaatcaaccctaagctcgaatctcagagggtgaataaaaaggtgaacaacgacgcatccctcagaatgcacaacttgtccatcctcgtcaggcaaataaagttctattaccaggaaaccttacagcaattgatcatgatgtctctgcccaacgtcctgattattggcaagaacccattttccgaacaggggacagaggaggtgaagaagctgctacttctattgctggggtgcgccgtacagtgccagaagaaagaagagtttatcgagcggatccaaggattggattttgatacaaaagcagctgtcgccgcacatattcaggaagtgacccataaccaggaaaacgtgtttgacctccaatggatggaggtgaccgacatgagtcaggaggacatagaacctctcctgaaaaatatggcgctgcacctaaagagactgatcgacgagagggatgagcacagtgaaacaattatcgagctgagcgaagagagagacggcctacactttctaccgcacgccagctcgtcagctcagagtccctgtggctcccccggaatgaagcggactgaatccagacaacatctctctgttgaactcgcggacgcgaaagccaagatacgtcgtttaagacaagagctcgaggagaagaccgaacagttgttggactgtaagcaggaactggagcaaatggagatagagctcaaaaggcttcaacaagagaacatgaatctgttgagtgatgcccggtccgcccggatgtaccgcgacgaactggacgccctgcgcgagaaggcagttcgggtagataagctggaaagtgaggtctctcggtataaagaaagactccatgatatcgagttctataaggccagggtggaggaacttaaagaggacaaccaggtcctgctggagaccaagactatgttggaggatcagctggaaggaacccgtgcacggagcgacaagctccacgagctcgaaaaggaaaatctgcagcttaaggctaagctgcacgatatggagatggaaagggacatggatcggaaaaaaatcgaggaactgatggaggaaaatatgaccctcgaaatggcccagaaacaatccatggatgagagtctccatctcggctgggagttagaacagatttcccgtacatctgagctatctgaggctccccagaaatccctcgggcatgaagtcaacgaactgacaagctcccgcctgctgaagctcgagatggagaatcaaagcctcaccaagacagtcgaggagctgcgcaccaccgtggactctgtggaggggaacgctagcaagatactgaagatggagaaggagaaccaacgactctctaaaaaggttgagatcctagagaatgaaattgtccaggagaaacagagtcttcagaactgtcaaaatctctcgaaagacttgatgaaggagaaggcccaactagaaaaaacaattgagacccttcgggagaatagcgagcggcagattaagatcctggagcaagaaaatgagcacctgaatcagacggtttcttctctgcgccagaggtcacagatttccgccgaggcacgcgtcaaagacatagagaaagagaataaaatactgcacgagtccattaaagagacatcatccaaactctccaagatcgaattcgagaagagacagattaaaaaagagctcgagcattacaaagagaaaggagagcgggccgaggagttggagaacgaacttcaccatctcgagaaggaaaatgaacttctccagaagaaaatcacaaatctgaagatcacatgtgagaagattgaagctttagaacaggagaactccgaactggaaagagagaatagaaagctaaagaagacactcgatagctttaaaaacttaacattccagctcgagtctctggaaaaagaaaatagtcagcttgacgaggaaaacttggaactgagacgtaacgtagaatcgctcaaatgtgcatccatgaaaatggctcagttgcagttggaaaacaaggaacttgagtcagaaaaagagcaactgaagaagggactcgagctgctgaaggcatccttcaagaagactgaacggctggaagtgagctatcaggggcttgatattgaaaaccagcgattgcaaaagacgctggagaactctaataagaaaatccaacagctggaatcagagctgcaagatctggagatggagaaccagactctccagaaaaatctggaggagcttaagattagttctaagaggttggaacaattggaaaaggagaacaaaagcctcgagcaggagacatcacagttggagaaagataagaaacaactggagaaggaaaacaaaaggttgagacagcaagcagagatcaaagataccacactggaggagaacaacgtaaagattggaaacctggaaaaggagaacaagacattgtctaaggagattggtatctacaaggagagctgcgtacgccttaaagagcttgagaaggagaataaagaactggtgaaaagagccaccattgacataaagacccttgtcaccttaagagaagaccttgtgtcagaaaaattaaaaacgcagcagatgaacaatgatctcgagaagctcactcacgagctggagaaaattggacttaataaggagcggctgctgcacgacgaacagtcaacggacgacaggtacaaactgctggagtccaaactggaatctactctgaaaaaatcgctcgagattaaagaggagaagatcgctgctctggaagcaaggcttgaggagtccaccaactataatcagcagctcaggcaggagctcaagaccgtgaagaagaattacgaagctctgaagcagagacaggatgaagagcggatggtccagagttcaccccctatctctggagaggacaataagtgggagagggagagccaggagactaccagagagcttctgaaggtaaaagacaggctgattgaggtggagcgtaacaacgccaccttgcaagcagaaaagcaagcacttaagactcagctgaaacagctagagactcaaaacaataacctacaggcccaaatcctagcactgcaacggcagacagtgtccttacaggagcaaaacactacgctgcaaactcagaatgcaaaattgcaggtggagaactccaccttgaactcccagtcaactagcctgatgaaccaaaacgctcagctgctcatccaacagtcatcgctcgagaatgagaacgagtccgtcatcaaggagagagaggacctgaaaagtctctacgactcccttatcaaagaccacgagaagctggaactgcttcacgaacgacaggccagcgagtatgagtcacttatttcaaaacatggcacgctcaaatcagctcacaaaaacctcgaggttgagcaccgcgacctggaagaccgctataaccagctgctaaaacaaaaaggccagctggaggatctcgagaagatgctaaaggtggagcaggagaaaatgctgctcgagaataagaaccacgagaccgttgctgccgagtataaaaaactctgcggggagaatgataggcttaatcacacgtactcccagctattgaaggaaaccgaggtgctccagacagaccacaagaaccttaagtctctattaaacaatagcaagttggagcagaccaggctcgaagctgagttctcaaaactgaaggagcaatatcaacaactcgatattacatccactaagttgaataaccagtgcgagcttctgagtcagctgaagggaaacctggaggaggagaatcgccatctccttgatcagatacagactctgatgctccagaataggacactgttggagcagaacatggaatccaaggacctgtttcacgtggaacagaggcagtatatcgataaactgaacgagttgagacgacaaaaggagaagctggaggaaaagataatggaccagtataagttctatgatccaagcccaccccggcggcgcggcaattggataacccttaagatgcgaaaattaataaagagtaagaaggatattaatcgggagaggcagaaatcgctgaccctgacccccactagatccgactcgtccgaggggtttttgcaactgccccaccaggacagccaagactccagttccgttgggagcaatagtttggaggacgggcagactcttggtaccaaaaaatcgtctatggttgcgctgaaacgtctaccttttctaagaaatcgacccaaagacaaagataagatgaaggcatgttataggcgcagtatgtccatgaacgacctggtccaatccatggtcttggctggacagtggacaggtagcacagaaaacctagaagtgcccgacgacatctccacggggaaaaggcgaaaggagctcggtgctatggcattctcaacgacggccatcaattttagtaccgtcaattcttccgcaggatttcggtcaaaacagctggtgaacaataaagatactacatccttcgaggacatctcaccccaaggagtgtccgacgactcatccaccggtagcagggtccatgcgtcacgccccgccagtctggactctggcaggacctcaacctcaaactctaataataacgcctctctgcacgaagtcaaagctggggctgtaaataaccaatccagaccacagtcccattccagcggtgaattcagtctgctccacgatcacgaggcctggtcaagtagcgggtcttcccccatacaatatctgaagaggcaaactaggtccagtcccgtgctgcagcataagataagcgaaacactcgaatcacgccaccataaaatcaaaaccgggtcacctgggagtgaggtcgttactctgcagcagttcctcgaagaaagcaataagctcacctccgtgcaaatcaagagtagctcccaggagaacctgttagacgaggtgatgaaatctctctccgtcagttcggattttctgggaaaagacaaacccgtcagctgtggtctggcgtccgtcatatcaacagctgaggggactaccaggagaacgagcatccatgactttttgactaaagatagcaggttgcccataagtgtggacagtccacctgctgccgccgattccaacacgaccgccgcgagcaatgttgataaagtgcaggagagcagaaacagcaaatcaagatccagagagcagcagagctcctag

SEQ ID NO: 112630 - DNA, 1119 bp, synthetic construct
  misc_feature 1..1119: note = Description of Artificial Sequence: Synthetic coding sequence
  source 1..1119: mol_type = other DNA
atggatcaatacaaattctacgaccctagcccgccccggcgccggggcaactggatcaccctcaagatgcgaaaactaattaaaagcaagaaagacatcaatcgggagcggcagaagtcattaactttgacacccactcgctcggactcctcagagggctttctacagctgcctcaccaggatagccaagatagctcctccgtggggagtaactcactggaagacggacagacactgggtaccaaaaaatcttctaatacgacgtcttttgaggacatctctccgcagggcgtaagcgatgattcatccaccgggtcacgggtccacgccggcgccgttaataatcagtccagaccgcagtcacattcaagcggcgagttttcactgcttcacgatcacgaggcatggtcttcatctgggtcgtccccaatccagtacctgaagcgccaaacccgaagctccccagttctgcaacataagattagcgagacattggagtctcggcaccacaaaattaagactgggtcccctggctcagaagttgtgacattgcaacagtttttagaggagagcaataagctgacctccgtccaaatcaagagcagctctcaagagaacttgcttgacgaagtgatgaagagtttaagtgtgagctccgattttctgggcaaagacaagccagtcagctgcgggctagctcgctccgtgagcgggaagacacccggcgacttctatgaccggcgaactacgaagcccgagtttctgaggccaggccctaggaagacagaagacacctatttcatctcatccgcaggaaaaccgacgcccggaacgcaggggaagatcaagctcgttaaggagtcgagtctgtcaaggcaatcgaaggattccaacccatacgcaaccttaccgcgcgcttcatccgtgatcagtacagccgagggaactacaaggcggacctctatccatgatttcttgacaaaggactcacgactccctatctctgtggatagccctccagctgctgcagatagtaataccaccgccgctagtaacgttgacaaagtgcaggagtccaggaactctaagagcagatcacgggagcaacagtcctcttag

SEQ ID NO: 112631 - DNA, 5616 bp, synthetic construct
  misc_feature 1..5616: note = Description of Artificial Sequence: Synthetic coding sequence
  source 1..5616: mol_type = other DNA
atggagaatgagatcttcacaccactgctggagcaatttatgacctcgccactggtgacttgggtgaagactttcgggcccctggcggctggtaacggcacaaacctggacgagtacgtggctttggtcgacggggtgttcctcaaccaagttatgcttcagatcaaccctaaattagagagccagagggtcaacaagaaagtaaacaacgacgcatccttgaggatgcacaatttgagcatcctggtgagacagataaaattttactatcaggagaccctgcagcagctgattatgatgtcattgccaaatgtacttattattggaaagaatcctttcagcgagcagggcactgaagaggtgaaaaaactcctcctcttgctcctaggttgcgctgttcagtgtcagaagaaggaggaatttatagagcgaattcaaggactcgacttcgacaccaaagctgccgtggcggcacatattcaggaagtgactcacaaccaggagaacgttttcgacctccagtggatggaggtgactgacatgtctcaagaagatattgagcccctgttgaaaaacatggcgctccatctgaaacgactgatcgacgagcgagatgagcactccgaaactattatcgaactcagcgaagagcgggatgggttacacttcctcccgcacgcctcctcctcagcccagtccccatgcggatctcctggaatgaagagaacagagtcacggcaacatctgtctgttgaattggccgatgccaaggccaagataagacggctcaggcaggagctggaagagaaaactgagcagctgctggactgcaagcaagaactcgagcagatggaaattgagcttaagcggttacagcaagaaaatatgaatttgctgtcggatgcgcgcagcgctcgcatgtatagagatgaactagatgcactgagggaaaaagccgtgcgtgttgataagctggagtctgaggtctcaagatataaggaaaggctgcatgatattgaattctataaggcgcgggtggaggagctgaaagaggataatcaggtgctgctggagactaagaccatgttggaagatcagctggaagggactagggctcggagcgacaagctgcacgaactcgagaaagagaatctccaattgaaagcaaaacttcatgatatggaaatggagcgcgatatggaccgcaagaaaatcgaggagctcatggaggagaatatgaccctagagatggcccaaaaacagtccatggacgagagcctgcacttgggctgggaattggagcagatttcaagaacctccgaattgagcgaggccccacagaagtccctgggacatgaagtgaatgaattgacctcttcacgattactgaagctcgaaatggaaaaccagagtctcaccaagacggtggaggagctcagaaccactgttgattccgtagagggcaacgctagcaaaatcctgaagatggagaaggaaaatcaaagactctccaagaaagtggaaatactggagaatgaaatcgtccaggaaaagcagagcttgcagaactgccagaatttgtcgaaggacctcatgaaggaaaaggcccagctggagaagactatcgagaccctgcgtgagaatagcgagaggcagatcaagatactcgaacaggaaaacgagcacctgaaccaaacagtgagcagtcttcggcagcgttcccagatctcagccgaggcacgggtcaaggacatcgaaaaagaaaacaagattttgcacgaatccattaaggaaacatcaagtaaactgagcaagattgaattcgagaaaaggcagattaagaaagaattagaacattacaaggaaaagggtgagcgggctgaggaattggagaatgagctccaccatttggagaaggaaaacgagctcctgcagaaaaaaatcactaacctgaagataacctgtgagaaaatcgaggctctcgaacaggaaaactcagagctggaaagggagaatcgaaagctgaagaaaaccttggactcatttaaaaacctaacctttcaactcgagtctttggaaaaagagaatagtcagctcgatgaggagaacctcgaactcagacggaacgtagagtccctgaagtgcgcttcgatgaaaatggcccagctgcagctagaaaataaagagctggagtctgagaaagagcagcttaagaagggactcgagttgctcaaggcctcgttcaagaaaactgagagactagaagtgagttatcagggccttgatatagagaatcagcggctgcagaaaacgctggagaattccaacaaaaagatccagcagttagagtcagaattgcaggacttggaaatggagaatcagaccttacaaaagaatctggaggaactgaagatctctagtaagagactggagcagctcgagaaggaaaataaatcattggagcaagaaacatcgcagctggagaaggacaaaaagcagctggaaaaggagaacaagagactgagacagcaggcggagataaaggacactactttggaggagaacaacgtgaagattggaaacctggaaaaagaaaacaagactctctccaaagaaatcggtatttataaggaatcttgcgttcgcctgaaagaattagaaaaggaaaataaggaactggtcaagagggccaccattgacatcaagaccttagtaacattgagggaggacctggtgtcagagaagctgaaaacacaacagatgaataacgacctggagaagttgactcacgagctggagaagatcggcttaaacaaagagcgtctgttgcatgacgagcagtcaacagatgactcccggtataaactgctggaatcgaaacttgaatcaaccttaaagaagtcacttgaaataaaggaggagaagattgctgccctggaggccaggctggaagagagcacaaattataatcagcaactccgccaggaattaaagaccgtaaaaaagaattacgaagccctgaaacagagacaggacgaggagagaatggtgcagtcctcacctcccattagcggagaagataacaagtgggagagggagagccaggaaacaacccgtgaattactgaaggttaaagatcggctgatcgaagtcgaacgcaataacgcaactctccaagctgaaaagcaagcattaaaaacccagctgaaacaactcgagacacagaacaacaacctgcaggcacaaattttggcgctgcaacgccagacggtgtccctgcaagagcaaaacacaaccttgcagacccagaacgcaaaattacaagtggagaactccaccttaaacagccagtctaccagcctgatgaatcagaatgctcagctccttattcagcagagttcactcgagaatgagaacgagagcgtgatcaaggagagggaggatctgaagtcgctgtatgattccctcattaaggaccacgaaaagcttgagttgctgcacgaaagacaagcatctgagtatgagagtctcatctcgaagcatggtaccctgaaatcagcccataaaaatctggaagtggagcatcgggatttggaggacagatacaaccagctccttaagcagaaggggcagttggaagatctggaaaagatgctcaaggttgagcaagagaagatgctactagaaaataagaaccatgagaccgtggccgcagaatataaaaaactttgtggcgaaaacgaccgcctcaatcatacctattctcagctactgaaagagacggaagtcctccagacagatcataagaacctcaaatcgctgttaaataactccaagctggagcaaacccgcctggaggcagagttcagtaaattaaaagagcagtatcagcagctcgacataacatccaccaagctgaataaccagtgtgaactgctttcacagctaaagggaaacctcgaggaggaaaaccgccatcttctcgatcagatccagaccctgatgctccaaaatagaactctgctggaacagaatatggaatcaaaagacctgtttcatgtcgagcagaggcagtatatcgacaagcttaacgagttacgcaggcaaaaggaaaagctagaggaaaaaataatggaccagtacaagttttatgatccttctcctccaaggcgaagaggcaactggataaccttgaaaatgcggaaattaattaaaagtaagaaagatattaatagggaacgtcagaaaagccttacactaacccctacacggtctgattccagcgagggcttccttcagttgccccaccaggactcacaggactcttcatctgtcggctccaacagcttagaggacggtcagacgctggggacaaagaaatccagtatggtcgctcttaaacggttgcctttcctccggaaccgccccaaagacaaagataagatgaaagcctgttaccgaaggagcatgtctatgaatgatttggtacaaagtatggtgctggcaggccaatggacgggtagtactgaaaatctggaagtgccagatgatatctcaacaggaaagaggcgtaaagagttgggggctatggcttttagtaccaccgctatcaacttctctacagtgaactcttcggccgggtttaggagcaaacaacttgtgaataacaaagacaccacctcttttgaggacatcagcccccagggcgtaagcgatgactcctccactggctcgagggtgcatgcctcgcgcccagcttctctggatagcggacggactagtacatcaaacagtaataataacgcatcacttcatgaagtgaaagctggggccgtgaacaaccagtcccggccccagtctcattcttccggtgagtttagccttctccatgatcatgaggcttggagcagtagcgggtcaagccccattcagtatttgaagcgccaaaccaggagcagtccggtgcttcagcacaaaatatcagagacccttgagagtcggcatcataagattaagacaggctcccctggctctgaagtggtgacgttgcagcagttcttggaggaaagcaataaattaacttccgtccagataaagtccagttcccaggagaacctgctggacgaggttatgaagtcactctccgtgtcatccgatttcctgggaaaagacaaacccgtgtcatgtggcttggcccgaagcgtcagcggcaagactccaggcgacttttatgacaggcggaccactaaacctgaattcctacggccagggccacgaaagactgaggatacctacttcatctcatctgccggcaaaccaacgcctgggactcaaggcaaaatcaagttggtcaaagagtcctcactgagccgccagtcaaaggactctaacccttacgcaaccctccctcgggccagctctgtcatcagtactgcagagggcacaacaaggcgtacttccatacatgactttctgaccaaagacagcaggctacctatctcagtggatagcccaccagctgccgctgactcaaacacaactgccgcctccaacgtagataaagtacaggagtctagaaactccaagtcccggagtcgcgagcaacaatcttcttag

SEQ ID NO: 112632 - DNA, 420 bp, synthetic construct
  misc_feature 1..420: note = Description of Artificial Sequence: Synthetic coding sequence
  source 1..420: mol_type = other DNA
atgccatgcgctgcacgaagccgatctagctggcggagatcctggacaaatacagcttgctggtctctgtgcccttgtccaggcccgcgttccccctcccctgcacctatgcgacgcgcccagtccagcttatgtttgcgcgacgagaccctcgcgggcggccagagacggaaactatcctctagattccctgtggggcggtcctcggagtctttttcgcccggcgacacgcctcgtcagcgattccggcagaggcacccaggtccactgggtgccccagtgtcccatagtaaagggcccggtgttggatgggagaattctgccgagaccctgcaagagcacgagacggatgcgaatagggagggacctgaggtgcaagaaccagagaagcggccgctgacccctagcctgtctcagtag

SEQ ID NO: 112633 - DNA, 4431 bp, synthetic construct
  misc_feature 1..4431: note = Description of Artificial Sequence: Synthetic coding sequence
  source 1..4431: mol_type = other DNA
atggaagggggaaaggggccccggctgagagactttctttcaggcagcctggcaacttgggctctgggtctggcaggcctcgttggggaggccgaggactctgagggagaggaggaagaagaggaggaagaacccccgctgtggctggagaagaggttcttgcgcctgagcgatggcgctctgttactgagagtgcttggcatcatcgccccatcatcccgaggcggccccaggatgctgagaggtctcgatggccctgctgcgtggagagtctggaacctgaatcatctttgggggagactgcgcgacttctaccaggaagaactgcagctgctcattctgtcaccccctcccgacctccagactctgggcttcgaccctctctccgaggaggccgtagaacagctggaaggggtgttacgccttctcctcggcgcgagcgtgcagtgtgagcaccgtgagctcttcatccgtcatatccagggactgagcttggaagtacagagcgaactggccgccgccatacaggaggtgacacagcccggagccggcgtagttctggctctgagtggcccagaccccggggagctggctcctgctgaactggaaatgttgagtcgctccctgatggggaccctctcgaaactagcccgggaacgtgatcttggtgctcagcgcttggcagaacttctgctggaacgggagcctttgtgtctcagaccagaagcaccttcgcgggcacccgcagagggaccatcccatcatcttgctcttcagctggccaacgccaaggctcagcttcgaaggctgcggcaggagcttgaggagaaggccgaattgttgctggactcacaggctgaggtacaagggctggaagcggaaataagacgtctgcgtcaggaggctcaggctctctcgggccaagctaaacgcgccgaactttatagagaggaagcggaggcactgcgggagagggctggccggctgccgcggctacaggaggagctcaggcgctgccgtgagcggctgcaggctgctgaggcctacaaaagccaactggaggaagagcgcgtcctcagtggggttttggaggcatccaaggctttgttggaagagcagctggaggcagcacgggaacggtgcgccagactccacgagacacagagggagaatcttctgttgcggacacggctgggcgaagcccatgctgagctggatagcctgcggcatcaggtggaccaactcgccgaggaaaacgtcgaattagaacttgagttacagaggtcactcgaaccccctcctggaagtcccggggaggccccgctagccggggccgcccccagcctgcaggatgaggttcgtgaagccgaggctggaaggctgaggaccctcgagagagagaatagagagctgagggggctcctgcaggtcctgcagggtcagcctggaggccagcatccgttgcttgaggcccctagggaagatcccgtcctgcccgtgttggaggaagcccctcagacccctgtagcatttgaccatagtcctcagggccttgtgcagaaggctcgggacggcgggccccaagcactggatctggctccccccgccttggacagcgttctggaggcctcagctgaatgtccccaggcgcccgactccgatccacaggaagcagagtctccactgcaggccgcagcgatggaccctcaggcatcagactggtcgccccaggagagcggcagccctgttgaaacccaggagagcccggaaaaggccggacggaggtctagtcttcaatctccggcctctgttgctcctccccagggccccggtaccaagatccaagctccccaacttctgggtggtgagaccgagggcagagaggccccccagggcgagctcgtgcccgaggcatggggactgaggcaagaaggccccgaacacaagccaggcccatccgagccatcatcagtccagctggaagagcaggaaggtccgaaccagggacttgacttggctaccgggcaggccgaggcaagggagcacgaccaacggcttgaaggaacagtgcgggatcccgcctggcagaagccccaacagaaaagcgagggtgcactggaagtccaggtgtgggaaggccctataccaggagagtcactcgcatcaggagtggccgagcaggaagcccttagagaagaggtggcgcaactccgtaggaaggcagaggctttgggcgacgagttggaagcccaggcacgcaaactggaggcgcagaacacagaggctgctcgcctcagtaaagagctggcccaggccagacgggcagaggccgaggcacaccgtgaagcggaggctcaggcttgggaacaggccagattaagagaagctgtggaggcggcggggcaagaactggaatccgcttcgcaggaacgagaagccctggtggaagccttggctgcagcaggccgggagagaagacaatgggaacgggaaggatcacgcctccgcgctcagtctgaagctgcggaggaaaggatgcaggtgttggaatcagagggacgacagcatttagaggaggccgaacgggaacggcgagaaaaagaagccttgcaggccgagttagaaaaagcagtggtgaggggaaaggagctcggggataggttggaacatctgcaaagggagctggaacaggccgctctggaaagacaggaatttcttagagaaaaagagtcccagcaccagcgctatcaaggactcgaacagcggctggaagccgaacttcaggctgccgcgacatcaaaggaagaggcactgatggaactgaagactcgcgcactgcagctggaggaggagttattccagctgcggcagggcccagccggacttggaccaaagaagcgcgccgagccacagctcgtggaaacacaaaacgttcgtctaatcgaagtggagcgctccaacgccatgttggtcgcagagaaagccgcactgcaaggccagttgcagcacctggaaggacagctcggttccctccaggggcgcgctcaggagctcctgctccaaagccagagagctcaagagcattcatcccgtctgcaggctgaaaagtcagtgctggagatccaagggcaggagctccatcgcaagcttgaagtactcgaggaggaagttcgcgccgctagacagagccaggaggaaactcgtggtcagcagcaagcgttgcttagggaccataaagctctcgcgcagctccagaggcgacaggaggctgaactagaagggctcctggtgaggcacagagatctgaaagccaatatgcgagccctggagttggcgcatcgcgagttacagggacgccacgagcagctgcaagcacagagggcctcggtagaagcccaagaagtggcactcctcgctgagcgcgaacggctcatgcaagatggacatcgacagagaggtttagaggaagaactccgcaggctccagtcagagcatgatagagcgcagatgctgctcgcggagctgtcacgtgaaagaggtgagctgcagggcgagaggggagaacttcggggaagactggcacggcttgaactcgaacgggcacagctcgaaatgcagagccagcagctcagggaaagcaaccagcagctcgatctatcagcatgccggctgaccactcagtgcgagctcctgacccagctgcgatcagcgcaggaagaggaaaaccgccagctgctcgcggaagtgcaggcactaagccgcgaaaatcgagagctcctcgagcgtagcctcgagtctagagatcatctgcaccgcgaacaacgggaatatttagaccagctcaacgctctgcgccgcgaaaaacagaagctggtggaaaagattatggaccagtaccgcgtgctggaacccgtgccactgccgcgcacaaagaaggggagctggctggcggacaaagtgaaaagacttatgcggcctaggcgcgaaggcggccctcccggtggtcttcgccttggcgccgatggagctggtagcaccgaatccctgggcggtcctcctgaaaccgaactgcctgaaggcagggaagcggacgggactggtagcccttcacctgcgcccatgcgaagagcccagtcgtcactgtgcctcagggatgagactttggcgggcggacagaggaggaaattgtcatcccggtttcctgtcggacggtcctctgaaagcttcagcccgggtgacacacctcggcagcgtttccggcagcgccatccagggcccctgggcgctccagtgtctcatagtaagggccctggggtgggatgggagaacagtgccgaaactcttcaggagcatgaaacagacgcaaatcgggagggcccggaagtgcaagagccagagaagaggccgttaacaccttccctgtcccaatag

SEQ ID NO: 112634 - DNA, 2139 bp, synthetic construct
  misc_feature 1..2139: note = Description of Artificial Sequence: Synthetic coding sequence
  source 1..2139: mol_type = other DNA
atggccggggtcgcagcgcatcgcgcacaccccccgtttacagctcatatgaaaaatcgcggcctgcgtgaggaacttgaaaaggcagtggtgcgaggaaaagagctgggcgatcgccttgaacatctgcagcgggaattagaacaggctgctttagagaggcaggagttcctgcgcgaaaaagagagtcaacatcagaggtaccaaggcctggaacagcgcctagaagcggagttacaggctgccgccaccagcaaagaggaggctctgatggagctcaagacacgggccttacagttagaggaagaactattccaactgcgtcagggccccgccggccttggtcctaagaagcgggccgaacctcaactggtggagacccaaaacgtcagattgatagaggtggagcgctccaatgctatgctggtagccgagaaagcagcactccagggacagctgcaacacttggaggggcagctgggctctttgcaggggagggcccaggagttgctgcttcagtctcagcgagcacaggagcactccagtagactacaagcagagaagtccgtgttggaaatccaggggcaggagctgcacaggaaactcgaagtgctggaggaggaggtcagggctgccagacaaagtcaagaggagacccgagggcagcaacaggctttactgagggatcacaaggcacttgcacagctccagcggcggcaagaggccgaacttgagggtcttctggtgaggcaccgtgatctgaaggcaaacatgcgagctctggaattggcccatagggagctacaagggagacacgaacagctccaggcacagcgagcaagtgttgaggctcaggaggtcgccctgctggcagagagggaaagactgatgcaggacgggcaccgtcagcgcggcctggaggaggagctgcgtcgcttgcagtcagaacacgatagagcccagatgctgctggcggaactgtctagggaaagaggagaactgcagggtgaaagaggcgagctgcgtggtcggcttgcgcggctcgaactggagcgagctcaactcgaaatgcagtcccagcaactgagggagagcaatcagcaattagatctatctgcctgcaggctgacgacacaatgcgaacttctcacacaactccgctccgcacaggaggaagagaatcgacaactcttagccgaggtgcaggcactgtcgagagaaaacagggagcttctggaaaggtccctcgagagcagagatcacttgcatagggagcaaagggagtacctggaccagcttaatgctctgcgaagagagaaacaaaaactggtggaaaagatcatggaccaatatagggtgctcgagccagtccctctgccacgaactaaaaaaggtagctggctggccgacaagggaccactgccgaggcatccatgcgctgggcccagagctccatccgcctgcggtatgagaccctggcaggctgggtcggggggcaacagcgcccagggatcccggtggggggaagccctgagccatagcgctcttggaacacctttggggaacgacagtgactctgctattcaggcaccctggggcaggccatcaccaaccgccaaagacttagtgtgggacggccgcacacccctccgcccatgtagaaatacaaagcaaatgcccaccgaacgggccctccgttaccggaaccggcgcaatgtacctagtcctcaccctagcgccagcgatactgtagggactgcaggtctgggcgtgcagccaagtcgccactggagtgtctcgggcggcccgcgccaacccaagtcatctggtagtcagggtccgcaaggagagagcctggacaaagaggcatgggcactgcgcagctcaacggtgagtgccggggcccggcggtggagttgggatgaatgcgtagaccgaggagatggatggcccccacgggctgcacctgggtggtcctccgggtccagccggtggctccctctgaggcagcgatcgctaggagatccgccagctgaaggcggctggcaggaacttgctagggagcctcccgccctgagcaggtgggaagctgagtcgcagtgctggggaaccgttgcctgggccgatctggagccatag

SEQ ID NO: 112635 - DNA, 4077 bp, synthetic construct
  misc_feature 1..4077: note = Description of Artificial Sequence: Synthetic coding sequence
  source 1..4077: mol_type = other DNA
atggaaggcggcaaggggccaagacttcgcgattttctgtccggcagcctagcaacctgggccctgggcctcgcaggcctcgtgggggaggccgaagattccgagggcgaggaggaggaagaagaagaagaaccacccttgtggctcgaaaagcggtttctgcgcttatctgatggggctctgttgctgagggtacttggaattattgccccctctagtagagggggcccacgcatgcttcgcggactcgacgggccagccgcatggcgcgtctggaacctcaatcatctttggggcagactacgggatttctaccaggaagaactgcaactgcttattctgtcccctccccccgacttacagaccctcggctttgacccattgagtgaggaggccgtcgaacaactcgaaggagtgctgagattgttgctcggcgcttccgtgcagtgcgagcatagggagctgttcatcaggcatattcagggtctcagcctagaagtccagtctgaactcgccgccgcaatccaggaggtgacgcaaccgggtgcgggggttgtgctggcactgtctggaccagatcccggggagctcgccccggcagaactggagatgttgagcaggtcactgatgggaacactgtctaaattagcccgcgagcgcgatcttggagcccagagattagccgagcttctcctggaaagagaacctctctgtctaagacccgaagccccctcacgggcccctgccgagggtccaagtcatcatctggcactccagctggcaaatgcaaaggcccagctgcgccgactgcgccaagaactggaggagaaggctgagttgctgcttgatagccaggcagaagtgcaagggctggaggccgaaattagacgtctaagacaggaagctcaggctctctccgggcaagctaaacgtgcggaactgtacagggaagaggccgaggccctaagggagagggcaggacggttgccccgtctccaagaggagctgcgccgctgtcgggaacggttgcaggctgctgaagcgtataaaagtcagctggaagaggagagagtgctcagcggtgtattggaagctagtaaagcactcctagaggaacagttggaggcagcacgggaacgctgcgcccgtctgcacgaaacccagcgtgagaacctgctcctccgtaccagacttggcgaggcccatgccgaactggactcactccggcatcaagttgaccagctggctgaggaaaatgtggagctggaactcgagctacagcgaagtctagagccaccacctggcagccctggcgaagctcctctcgctggagcggcacccagccttcaagatgaggtacgggaggctgaagcagggcggctgaggacccttgagcgcgagaatagagagctgcgtggcctgctgcaggtccttcagggtcagcctggcgggcagcaccccctcctcgaggcacctagggaggacccagtactgcccgtgttagaagaagcccctcagacgcccgtggcatttgatcatagcccccaaggtctggtgcaaaaagcacgcgacggcggaccgcaggcattggacctcgctccccctgcactggacagtgtgttggaagcttccgcagagtgtccacaggctcctgatagtgatccccaggaggcagaatcccctctgcaggcagcggcaatggatccacaagcctctgactggagccctcaagaatcaggttctcctgtggagactcaagaaagtcccgaaaaggctggtagacggagtagccttcagagccccgcctcggtggcccctccacagggtccaggtacgaagatccaggccccccaacttctggggggagagaccgaaggaagggaggcacctcagggcgagcttgttcctgaggcttggggacttcgacaggagggccctgaacataagcctggtccctcagagcctagtagcgttcagctcgaagaacaagaggggccgaatcagggccttgacctggccaccgggcaggccgaagcaagggaacatgatcagaggctggagggcaccgtgcgggaccctgcctggcagaaacctcaacagaaaagcgaaggagccctcgaagtgcaggtttgggaggggcctattcctggtgagtctctcgcatcgggggtggcagagcaagaggccttacgcgaggaggtcgcgcagctcagaaggaaagccgaagcgctaggcgatgaactggaagcccaggcgagaaaactggaagcccagaacacggaggccgctcggcttagtaaggagctggctcaagcccgacgggctgaggccgaggcacatcgggaggcagaggcgcaggcatgggagcaagctcgcctcagagaggctgtggaggccgcaggacaggagcttgagagcgctagccaggaacgagaagcactcgtcgaagcactcgccgccgctggccgcgaaagacggcagtgggagagagagggtagcagactacgtgcacagtctgaggcagctgaggagcgcatgcaggtgttggagtccgaagggcgccagcacctcgaggaggccgaaagggaaagacgtgagaaagaggccttgcaggccgagctggagaaagcagtcgttagagggaaggaactgggcgacagattagagcatctgcaaagggagctcgagcaggccgccttagaaagacaggaatttcttcgcgaaaaggaatcacaacatcaacgctatcaggggctagagcagcggttggaggccgaactgcaggccgctgcaacttctaaagaggaggcgttaatggaactcaaaacgcgagcacttcagcttgaagaagaactgtttcagctaaggcaaggccctgcaggccttggacccaagaagagggccgagccccagctagtagaaacacagaacgtgagactgatagaggtcgagcgcagcaacgctatgttagtagcagagaaggccgcgttgcagggccagctgcagcaccttgaaggccagctgggctccctgcagggaagagcccaggaactgctgttagccgagcgagaaaggctgatgcaggatgggcatcgccagcggggtctagaggaggagctccggcggctccagtccgaacacgacagagcccagatgctgctagccgaactttctcgggagaggggtgagctgcagggagaaaggggggagttacggggccgactggcccggttagagctggagcgcgcacagctcgagatgcaaagccagcagctacgcgaatccaaccagcagttggacttgtctgcctgcagacttactactcaatgcgaactcctgacacagcttagatccgcacaagaagaagaaaatagacagctcctggctgaagtccaagccctgtctcgcgagaatagggaactgcttgagcggagcctcgagtctagagaccacctccacagggagcaaagagaatatctagatcagttaaatgctctgcggcgtgagaagcagaaacttgtagaaaaaatcatggatcaatatcgggttttggagccagttccgctgccccgcactaagaaggggtcttggctggcagataaggtaaagcgtctgatgcggccccggcgtgaaggcggcccccctggcggcctgcgactgggcgccgacggcgcgggatccacagagtctctgggcgggcctccagagaccgagctccccgaggggcgggaagcagatgggactggctcaccgtccccggcccctatgagaagggcccagtcttccctatgtctgcgagacgagactctggcaggcggtcagaggcggaagctctcctcaagatttcctgtcggcagaagctccgaatcgttttctccaggggacaccccgagacagcgttttcgccagcgtcaccctggacctttaggcgcacctgtatcacactccaagggtcctggcgttggttgggagaactcagcagagactctgcaagagcatgagaccgatgccaatcgtgaagggcctgaagttcaggagccggagaaaaggcctttgactcctagcctgagtcagtag

SEQ ID NO: 112636 - DNA, 684 bp, synthetic construct
  misc_feature 1..684: note = Description of Artificial Sequence: Synthetic coding sequence
  source 1..684: mol_type = other DNA
atgggcggtacaacctcgaccagacgagtgacctttgaggctgacgagaatgaaaacatcaccgtggtgaaggggatccggctcagtgagaacgtcattgacaggatgaaggaatcgtccccgagtggctctaaatcccaaagatacagcggggcgtacggggcatccgtaagcgacgaggaattgaaacgaagggtagctgaggaactagctctggaacaggcaaagaaggaatccgaggatcagaaaagactgaagcaggccaaagagctcgaccgggaacgcgcagctgccaacgagcagcttacccgtgccatcctcagagagcggatctgttcagaagaagagcgagccaaggcgaaacatcttgctagacagcttgaagaaaaagacagggtcttgaaaaagcaagacgccttttacaaggaacagctagcccgcttagaggaaagaagcagtgaattctacagggtgacgacagaacagtaccagaaggcagccgaggaggtagaggccaaattcaagaggtacgagtcacacccagtgtgcgctgacttgcaggccaagatcttacagtgttatcgcgagaatactcaccagacactcaaatgctcggccctggctacccagtatatgcactgcgtcaatcatgccaaacaaagcatgctggagaaaggcggatag

SEQ ID NO: 112637 - DNA, 417 bp, synthetic construct
  misc_feature 1..417: note = Description of Artificial Sequence: Synthetic coding sequence
  source 1..417: mol_type = other DNA
atgggcgggacgactagcacaaggagggtgacctttgaggccgatgagaacgaaaacattacagtggtcaagggtataagactgagtgagaatgtcatcgaccgcatgaaggaatctagtccctctggctccaaatcacagaggtactctggtgcttatggcgcctccgtttctgacgaagagctgaagcgacgcgtggctgaagaactggccttagaacaggccaagaaggagtccgaagatcagaaaaggttgaagcaagccaaggaacttgatagggaaagagctgctgcgaacgagcagcttaccagagcgatcctgagagagaggatttgctccgaagaagagcgcgccaaagcgaagcatctgatcaaggtggaacttctgtgggtgaaacctggcgtcctcacagcatag

SEQ ID NO: 112638 - DNA, 333 bp, synthetic construct
  misc_feature 1..333: note = Description of Artificial Sequence: Synthetic coding sequence
  source 1..333: mol_type = other DNA
atgaaatgtgaggagactcatgcacccaatagtaattgggtctatgtgatgttgccctccaagaagacggtccgaatgccttctgttacacagcgtttaagagatccagacatcaacccttgcctgagcgaatccgatgcttccacgcgctgtctggatgagaacaactatgatagagagcgatgttctacttactttctgcggtataagaattgtagaaggttttggaattccatcgttatgcagaggaggaaaaatggagtaaagccattcatgcccacagctgccgagcgtgacgagatcctgcgggcagtcgggaatatgccatactag

SEQ ID NO: 112639 - DNA, 258 bp, synthetic construct
  misc_feature 1..258: note = Description of Artificial Sequence: Synthetic coding sequence
  source 1..258: mol_type = other DNA
atgccgagcgtcacccagaggctgagggacccagacattaatccctgcctgtcagagagcgacgcttcaacgaggtgtctggacgagaataactacgaccgggaacggtgctccacttacttcctcagatataaaaactgccgacggttttggaacagcatagtaatgcagcggcgcaagaacggcgtcaagcctttcatgcctacggcagcagagagagatgaaattttgagggcagtcggcaacatgccatattag

SEQ ID NO: 112640 - DNA, 285 bp, synthetic construct
  misc_feature 1..285: note = Description of Artificial Sequence: Synthetic coding sequence
  source 1..285: mol_type = other DNA
atgctgcccagtaagaagacggtgcggatgcctagcgtaacacagaggctgcgggaccccgatattaatccctgtctgagcgaatctgacgcctcaacccggtgtctcgatgaaaataattacgacagggagcggtgttctacctatttcctcaggtataaaaattgtcggaggttctggaactcgatcgttatgcagagaagaaagaacggcgtgaagccattcatgcctactgccgctgaacgcgatgagatactccgtgccgttggaaacatgccctattag

SEQ ID NO: 112641 - DNA, 135 bp, synthetic construct
  misc_feature 1..135: note = Description of Artificial Sequence: Synthetic coding sequence
  source 1..135: mol_type = other DNA
atgccatctgtcacacagagattacgggaccccgatattaacccctgtctgagtgaaagcgacgcaagtaccaggtgtctggatgagaataactatgaccgggaacggtgttctacctatttcctgcggtactag

SEQ ID NO: 112642 - DNA, 294 bp, synthetic construct
  misc_feature 1..294: note = Description of Artificial Sequence: Synthetic coding sequence
  source 1..294: mol_type = other DNA
atgcatcagacgcggactggcaaaaagaccgtccgcatgccatctgtaacacagagactccgcgacccggacatcaacccttgtctcagtgaaagtgacgccagcactcgatgcctagacgaaaataactacgaccgagagcgatgtagtacctattttctgagatataagaactgccgcagattctggaattctattgtgatgcagagaagaaaaaacggagtgaagccgttcatgcccacagccgctgaacgagacgaaatcctgagagctgttgggaacatgccttactag

SEQ ID NO: 112643 - DNA, 207 bp, synthetic construct
  misc_feature 1..207: note = Description of Artificial Sequence: Synthetic coding sequence
  source 1..207: mol_type = other DNA
atgcatcagactcgcactggaaagaagactgtgagaatgccaagcgtgacccagcggctcagggatccagatattaatccatgcttgtcaatcctgttctatcttttaaatgacgccagtcttatcagcgtgaggaatttaatgctgccaccagacgtgtggatgaagataaccatgacaggaaaaggagtgcctctgacctcttag

SEQ ID NO: 112644 - DNA, 264 bp, synthetic construct
  misc_feature 1..264: note = Description of Artificial Sequence: Synthetic coding sequence
  source 1..264: mol_type = other DNA
atgtccacatccgtgccacagggccatacctggacacagcgcgtgaaaaaagacgatgaagaagaggatcccctagaccagctcattagccggtctggatgcgctgcctcccactttgcagttcaggagtgcatggcccaacaccaggattggcggcaatgtcagccccaggtgcaagcgtttaaggactgtatgagtgagcagcaagcacgccggcaggaggagttacagagacgccaagaacaggccggggctcaccactag

SEQ ID NO: 112645 - DNA, 264 bp, synthetic construct
  misc_feature 1..264: note = Description of Artificial Sequence: Synthetic coding sequence
  source 1..264: mol_type = other DNA
atgtccacgagcgtaccccagggtcacacttggacccagagagtaaagaaggatgatgaggaagaagatccacttgatcagttaatatcgaggagcggctgtgcagccagccactttgcagttcaggagtgcatggcccagcatcaggactggaggcagtgccaacctcaggtgcaggccttcaaagattgcatgagtgagcaacaggccagaagacaggaggagctgcagaggaggcaggaacaagccggagctcatcactag

SEQ ID NO: 112646 - DNA, 291 bp, synthetic construct
  misc_feature 1..291: note = Description of Artificial Sequence: Synthetic coding sequence
  source 1..291: mol_type = other DNA
atgttttatcgcctgccaataccacggatgagtacatcagtccctcaggggcacacctggacacagcgagtgaaaaaagacgacgaggaagaagatccactggaccaactcatatctaggtcaggatgcgcagcctcacattttgccgtccaggaatgtatggcgcaacaccaggactggaggcagtgtcagccgcaggtgcaggctttcaaagactgcatgtccgagcagcaagctaggcgccaggaggaactccagcgtcgacaggagcaagcaggggctcatcactag

SEQ ID NO: 112647 - DNA, 264 bp, synthetic construct
  misc_feature 1..264: note = Description of Artificial Sequence: Synthetic coding sequence
  source 1..264: mol_type = other DNA
atgagcacctcagtcccacagggacacacttggacgcaaagagttaagaaggacgacgaggaggaggatcccttggaccaattaatctcaagaagtggctgcgccgcatcgcactttgcggtccaggaatgcatggcccagcaccaggactggcgtcagtgtcaaccccaggtgcaggcattcaaagattgcatgtcagagcagcaggctcgccgacaggaggagctgcagaggcgtcaggaacaggccggagcccaccactag

SEQ ID NO: 112648 - DNA, 1731 bp, synthetic construct
  misc_feature 1..1731: note = Description of Artificial Sequence: Synthetic coding sequence
  source 1..1731: mol_type = other DNA
atggccgcctctgaaactgtccggctgagactgcaatttgattaccccccccctgccacacctcactgcacagcattctggctcctggtcgacctgaacaggtgcagagtcgtgacggacctgatctccttgatcagacagagattcggctttagctctggcgctttcttgggactgtacctcgagggcggtctgctccctccagcagaaagcgcccggttggtgcgtgacaatgattgcttgagagttaaattagaggagcggggcgtcgccgaaaattccgtggtcatctctaatggcgatattaatttaagtttgcgcaaagccaagaagagggcctttcaattagaggagggtgaagagaccgaacccgactgcaaatacagcaaaaagcattggaaatcgcgcgagaacaataataataacgagaaggtgctggaccttgagcccaaggctgtcacagaccagactgtgtccaaaaaaaataagcggaagaacaaggcaacctgcgggactgttggagacgacaacgaggaagctaaaagaaagtctcccaagaaaaaggagaaatgcgaatacaaaaaaaaggcgaagaatccaaaatcacctaaagtacaggcagtgaaagactgggcaaatcaaagatgctcctcccctaagggaagcgcaaggaattcactggtgaaagctaaaagaaaggggtcggtctcagtatgctctaaagagtctcctagcagttccagtgagagcgaaagctgtgacgagtccatctctgatggaccttcaaaagtgaccttagaggctaggaactcgagtgagaaattacctacagagttgagcaaggaggagccgtctactaagaatacaaccgccgataagctggctatcaagctcggcttctcactaacaccatccaaggggaagacctctggaaccacttcatcatcgagtgatagtagcgccgagtctgacgatcaatgtctgatgagcagctcaactcccgaatgcgccgctggattcctgaaaacagtcgggctcttcgcgggccgcggccgcccgggccctggcctcagcagccagaccgccggagcagcgggctggagacggagtggctcaaacggcggcggccaagcccctggggctagtccatccgtatctctgccggcctctttgggtcgagggtggggtagggaggagaatctgttttcctggaaaggagccaagggaaggggcatgcgggggagagggagaggtagagggcacccagtgtcctgcgttgtgaacaggagtactgacaaccaaagacagcaacagttaaacgatgttgtgaagaacagttcaacgatcattcaaaaccccgtggagacgccaaagaaggactactcccttctccccctgctagctgccgcgccacaggtcggggagaagatagcctttaagttgctggaactgacttcaagctactcccctgacgtttctgattacaaggaaggcagaattttgagccataacccagaaacccagcaagttgatatcgagatcttgtcatctttgccggccctcagagagccaggtaagtttgatctggtctaccacaacgaaaacggtgccgaagtcgttgaatatgcggtcacgcaggagagcaaaatcactgtattctggaaagagctgatcgaccctcgattgatcatcgaatcaccaagcaacacgtcttccaccgagcctgcctag

SEQ ID NO: 112649 - DNA, 519 bp, synthetic construct
  misc_feature 1..519: note = Description of Artificial Sequence: Synthetic coding sequence
  source 1..519: mol_type = other DNA
atggcttccgacgagggcaaactctttgtaggtgggcttagtttcgacaccaatgagcagagcctggaacaggtgttctccaagtacggccagatcagcgaagtggttgtggtgaaagacagagagacacagaggagccgcggttttggctttgtgaccttcgagaatatagacgacgcaaaggacgccatgatggcgatgaacgggaaaagcgtggacggcagacagatcagggttgatcaggctggcaaatcatctgacaatcgaagcagagggtatagggggggaagtgccggtggaagaggcttcttcagaggcggccggggccgaggacgtggattttctagaggcggaggagataggggatacggaggcaatcggtttgaatcaaggtcgggagggtacggcggatctcgcgactattacagcagccggtctcagtccggtgggtactcggacaggtcctccgggggtagctaccgcgactcctacgattcctatgccacccacaacgagtag

SEQ ID NO: 112650 - DNA, 792 bp, synthetic construct
  misc_feature 1..792: note = Description of Artificial Sequence: Synthetic coding sequence
  source 1..792: mol_type = other DNA
atggcaagtgatgaggggaagttgtttgtcggaggtctatcgttcgataccaacgagcagtccctcgaacaggtcttttctaagtatgggcagatttccgaggtggtcgtggtcaaggatagggaaactcagaggagccgtgggtttggattcgttacattcgaaaatatagatgacgctaaagatgcaatgatggcaatgaatggcaaatccgttgatggccgacagatccgagtggatcaagccggtggtggcgaccgcgggtacggaggcaataggttcgagagccgctcaggtgggtacggtggttcgagagactactacagttctcggtcacagagcgggggttattcagatagatcatcagggggatcgtatcgcgactcatatgactcgtacgggaagtctcatagtgagggagctactctgctgtggcctgcggtaggcgcccggtttactctcgtgccttcaccttctacactgggctggaccctccgtccctgccattgcgcttgtccagaagaggcccacctttccagtcagagccacttctaccgtcgaacacagaaacctaacgagacagaccagaaagggaagggggagcggggccccgccggacagagcgcccggtgtatgtgcgggcgtcggcccgcaagcttgggctgtggaggctggctgctacctggtagacgcccaaggcctgggctggcgtcaggggtgaaactgcccttggtagcctcagtgccactgcattgcgcgtgctttttaagtagtgccacccacaacgagtag

SEQ ID NO: 112651 - DNA, 735 bp, synthetic construct
  misc_feature 1..735: note = Description of Artificial Sequence: Synthetic coding sequence
  source 1..735: mol_type = other DNA
atgtcctccagatggtcaagatcaagtcagtctaccgataggtcactaaagtctgtagacgggaggcagatccgcgtggatcaggccggtaaatccagcgacaaccggtcccgtggctaccgcggcggctccgccggggggagaggattctttcggggcgggaggggtcgtggtcgcggtttctctagaggagggggggaccgtgggtacggtggtaaccggttcgagtccagaagcgggggttatggaggcagtcgagattactattcttcccggtcacagtccggagggtactctgataggtctagcggcggcagttatagggactcctacgactcctatggcaagtctcatagtgaaggagccactctgctctggccggcagtgggcgctcggtttactctggtgccttctcccagcacactcggatggaccttgagaccgtgtcactgtgcatgccccgaagaggcgcacctcagctcccagtctcacttctatcgaaggactcagaaacccaatgagaccgaccagaaaggcaagggcgaacgaggccctgccggacagtccgcgaggtgtatgtgcggtcgtagacccgcgagcctcggttgtggcggatggctgttgcctggacgccgtccccggcctggtctggcatcaggtgtgaaattgcctctcgtggcctccgtgccactgcactgcgcctgctttctcagtagtgccacgcacaacgaatag

SEQ ID NO: 112652 - DNA, 519 bp, synthetic construct
  misc_feature 1..519: note = Description of Artificial Sequence: Synthetic coding sequence
  source 1..519: mol_type = other DNA
atggcctccgatgaaggaaagttgtttgtgggggggctgtctttcgacactaatgagcaatcgctggagcaggtgttttccaaatatgggcaaattagcgaggtggtggtggttaaggaccgcgagactcagagaagtagaggcttcggcttcgttacatttgagaacatcgatgatgccaaggatgctatgatggctatgaatggcaagagtgtagatggacgtcaaatacgagtggatcaggcagggaagtccagtgataatcggtcccgtgggtaccggggcggaagcgccggtggacgggggttcttccggggcgggcgagggagaggccgcgggttcagcagaggtggaggcgaccgcggctatggaggcaacagattcgagtctagatcaggaggttacggaggatcccgagactattactcttcccggagtcaatctggcggttactctgacaggtccagcgggggttcatacagggactcatatgattcctacgccacgcacaacgagtag

SEQ ID NO: 112653 - DNA, 2304 bp, synthetic construct
  misc_feature 1..2304: note = Description of Artificial Sequence: Synthetic coding sequence
  source 1..2304: mol_type = other DNA
atgtcattcgaccctaatttgctgcacaacaacggccacaacgggtatccaaacggcacatctgccgctctgcgcgaaacgggggtaatagaaaagctgctgaccagttacggcttcatccaatgctccgagagacaggcacgcctctttttccactgttctcagtacaatggcaacctgcaggaccttaaagttggtgacgacgtcgaattcgaggtttcaagcgaccgacgcaccggcaaacctatcgctgtcaagctagttaaaatcaaacaagagatcctgccagaagagagaatgaacggccaggaggtcttctatttaacgtacactccagaagacgttgaaggaaatgtgcaacttgaaactggagacaagatcaactttgtgattgacaataataagcacaccggtgcagtgtctgcaaggaacattatgctgctgaaaaaaaaacaggccaggtgccagggagtggtgtgtgctatgaaagaggcattcgggtttatcgaacgcggtgacgtggttaaggagatcttttttcactatagtgagttcaagggggacctggaaactctgcagccaggagatgacgtcgagtttacgataaaggaccgcaacgggaaagaggtggccaccgatgtgcgcctgcttccccaggggaccgtgatatttgaagacatttcaattgagcatttcgagggaacagtgacaaaggtaattcctaaggtgccatccaagaaccagaacgatccactgcccggacggataaaagtggacttcgtcattccaaaagaactgcccttcggggataaagatacgaaatcaaaggtgacactcctggagggagaccatgtcagatttaatattagcacggaccggcgtgacaaactggaaagagccacgaatatagaagtcctgtctaatacatttcaattcacgaacgaagctcgggagatgggagtgatcgccgccatgcgagacggcttcgggtttattaagtgcgttgatcgcgacgttcgcatgtttttccatttcagcgagatattggacgggaaccaacttcacatagcggacgaagtggaatttacggttgtgcccgacatgctttcagcccagagaaaccatgcaattcgcatcaaaaaactcccgaaaggtacagtctctttccactcacactccgatcatcggttcctggggacagttgagaaagaagctacattctctaaccccaagacaacatctccaaacaagggaaaagaaaaggaggcagaagatggaattatagcctatgatgattgcggtgtaaaactcacgattgccttccaggctaaggatgtggagggatctacaagccctcagatcggcgataaggtggagttctccatttccgacaagcagcggcccggccaacaggtcgcaacgtgtgtgcggttgctgggaagaaatagtaactccaaacggctgctgggctacgtggctacactgaaagataacttcggatttatagagactgctaatcacgacaaggagattttttttcattattctgagttcagcggcgacgtcgactccctggaacttggggacatggtggagtattctttatccaaggggaagggaaacaaagtgtcggccgagaaggtgaataagacacatagtgttaatggtatcacagaggaagctgaccccaccatctatagcgggaaggttatccgcccactgcgatcagtcgatcccactcaaactgaataccagggtatgatagagatcgtcgaagaaggagatatgaagggagaagtctaccccttcggaatcgttggtatggccaataagggcgactgtcttcagaaaggggagtctgtgaagttccaactttgtgtcttagggcagaacgcccaaacaatggcctataatatcacacccctgcgccgcgcaaccgttgagtgcgtgaaagaccagttcggcttcatcaattacgaagtgggtgactccaagaagttattctttcatgtgaaagaggtgcaggacggcatcgagttgcaggccggtgacgaggtagagttctctgtaattttgaatcagcggactggaaagtgctcggcatgcaatgtttggcgagtgtgtgagggacctaaggccgtagctgccccccggcccgatcggcttgtgaatcggctgaagaatatcaccctggacgacgcctccgcccccagactgatggtactcagacagcctaggggcccagataattccatggggtttggggcagaacgcaagattaggcaggccggcgtgatcgactag

SEQ ID NO: 112654 - DNA, 2304 bp, synthetic construct
  misc_feature 1..2304: note = Description of Artificial Sequence: Synthetic coding sequence
  source 1..2304: mol_type = other DNA
atgagctttgatccgaacctcctgcacaataatggacataatggataccctaacggaacttccgctgctctgcgggaaactggcgtaatcgagaagctactgacttcttatggattcatccagtgttctgaaagacaagccagactgttcttccactgttcacagtataacgggaaccttcaagatctgaaagttggtgacgacgtcgaattcgaggtgtcttccgacagacgcacaggaaaacccatagctgtgaaactcgtgaaaataaagcaggagatactacccgaggagcgcatgaatggacaggaggtgttttatttgacgtacactccggaagacgtggagggcaatgtccagcttgagaccggagacaaaattaattttgtgattgataataataaacacacaggcgcagtgtcggcgagaaacatcatgctgcttaaaaagaaacaggcccgttgccaaggcgtggtctgtgccatgaaggaggcttttggtttcattgaacggggcgacgtggtcaaggaaatcttttttcactactccgagtttaagggggatttagaaacactgcagcccggtgacgatgttgaatttactattaaagaccggaacggaaaggaagtggcaacagacgtcagacttttaccccagggaacagtcatctttgaagacattagcatcgaacactttgaaggtaccgtcactaaagtcataccaaaggttccaagtaagaatcagaacgatcctctgcctggccggatcaaggtggactttgtcattccaaaagaactgccttttggtgacaaagataccaagtccaaggtcacgttgctggagggggatcacgttcgatttaatatatctaccgatcgacgagataagctggaacgggcgacaaatatagaagttctgtcaaacaccttccagttcactaacgaagcacgcgagatgggcgttattgctgctatgagggacggtttcgggtttatcaaatgcgttgatcgcgacgtacgtatgttcttccattttagtgagatcttggatggaaaccaactgcatatcgctgatgaggtcgaattcaccgtcgttcctgacatgctgtctgctcagcgtaaccatgctatacgaatcaagaaactgcccaagggcaccgtctcatttcattcccatagtgatcacagattcctgggcaccgtggagaaagaggccactttctctaatcctaaaaccaccagcccaaacaagggcaaagagaaggaagccgaagatggcattatcgcatacgatgattgcggtgtcaagttaaccattgcttttcaagccaaagatgtcgagggaagcactagtccccagatcggggacaaggttgaattcagcatctcagataaacagcggcccggacaacaagttgccacctgcgtacgactactgggacgcaatagcaattccaagaggctcttaggctacgtcgcaaccctgaaggacaatttcgggtttatcgagaccgctaatcacgataaggagatcttttttcattactcggagttctctggcgatgtggattcactggagctgggcgatatggtagagtactctctgtcgaagggtaaggggaataaggtgtctgcagagaaagtgaacaagacacattcagtcaacgggatcacagaggaggcggaccctaccatctactccggaaaggtaataaggccccttagatcagtggacccgacacagaccgagtaccaagggatgatcgagatagtggaggaaggagatatgaagggggaagtgtatccgttcgggatcgtggggatggccaataaaggtgattgtctgcagaaaggcgagagcgttaaattccagctgtgtgtgcttgggcaaaacgcccaaacaatggcttataacatcacccctctgcggcgcgcgaccgtggaatgcgttaaagaccagttcggctttataaactacgaagtgggggactctaaaaaactgtttttccatgtgaaggaagtccaggacggaatagaattacaggctggagatgaggtggaattcagcgtgattctcaatcaaaggactggaaaatgtagcgcctgcaatgtgtggcgagtttgcgagggccccaaggccgtggccgctcctcgaccggacagacttgtgaaccgcctgaaaaacattaccctagacgacgcatctgcccctcgcctcatggtgctgcggcagccacgcggcccagacaattctatggggttcggagctgagcgtaaaatccggcaggccggggttattgactag

SEQ ID NO: 112655 - DNA, 2397 bp, synthetic construct
  misc_feature 1..2397: note = Description of Artificial Sequence: Synthetic coding sequence
  source 1..2397: mol_type = other DNA
atgtccttcgatcctaacctactccataataacggacacaatgggtacccaaacggtacatctgccgccctgcgcgaaacaggcgttatcgaaaagttgctcacgtcgtatggatttattcaatgttccgaaagacaggccaggctgttctttcattgcagtcagtacaacggtaatctccaggacctcaaagtcggagatgacgtggaattcgaggtatctagtgacagacgtaccggaaaacccatagctgtgaagctggtgaaaattaaacaggagatactgcctgaggagaggatgaatggtcaagtagtctgcgcagttccccataatctagagagcaagtcccctgccgcccctggccagtcaccgactggatctgtatgctatgagcgcaatggcgaggtcttctacctgacctatacccctgaggacgtcgaaggcaacgtccagctggaaaccggcgacaagataaatttcgttatagataacaacaagcatacgggggctgtgagcgctcggaacatcatgttactcaagaagaaacaggcccggtgtcagggagttgtatgcgctatgaaggaggctttcggttttattgagaggggcgatgtggtgaaagaaatcttcttccattattccgagttcaagggcgatctggagactttacagccaggggatgacgttgaatttactattaaagatcggaatggaaaggaggttgccaccgacgttagattactacctcaggggacagtgatctttgaggacatttccattgagcacttcgaaggtaccgttacgaaggttatccctaaagtcccctctaagaatcagaatgaccccctccctgggcggattaaagtggactttgtgattcctaaagagctgccctttggagataaggatacaaagtcgaaggtgaccctgctggagggtgatcacgtacgctttaacatttctactgaccgtagagataaactggagagggccaccaacatcgaggtcctgtcaaataccttccagttcactaatgaggcaagagaaatgggtgtgatcgccgccatgagggacggctttggttttattaagtgtgtcgacagagacgtgagaatgttcttccatttctcggaaatccttgacgggaaccagttgcacatcgctgatgaagtcgaattcactgttgtgcccgatatgctcagcgcacagcgtaatcacgccatccgaatcaagaagctacccaagggcacagttagttttcattctcactcagaccaccgcttcctgggcactgttgaaaaagaagccactttctccaacccgaagaccacatcaccaaataaaggaaaagagaaagaagctgaagatggaataatagcgtacgatgattgcggagtcaagcttacaatcgcttttcaggccaaagacgtcgagggctccacctccccacagattggggacaaagtcgagtttagtataagcgataaacaaaggccaggacagcaagtggccacttgcgtgcgactgctgggccgcaactctaatagtaaaaggctcctaggctacgtagccacattgaaggacaacttcggattcattgaaacagctaatcacgataaggaaattttctttcactatagtgagtttagcggagatgtagacagtttagagcttggcgacatggtggagtatagcctgtccaaaggaaaaggcaataaggtttctgcagagaaagtgaacaaaacccatagcgtcaatgggattaccgaggaggccgatccaacgatttacagtgggaaagtgatccgaccgttgagaagcgtcgatcctacccagaccgagtaccagggtatgatcgagatagtggaagagggggatatgaagggcgaagtctacccctttggcattgttgggatggctaataaaggcgactgcctgcagaaaggcgaatcagtgaagtttcagctctgtgttctgggacaaaacgctcagactatggcttataacattaccccattacgtagagccaccgtcgagtgtgtgaaggatcaatttgggttcatcaactatgaagtgggtgatagcaagaagctgttcttccacgtgaaagaagtccaagatgggatagagctgcaggcaggcgatgaggtggagttctctgtgattctaaatcaacgcactggaaaatgttcagcatgtaatgtgtggcgtgtatgcgagggacctaaagcagttgccgctcctcggcccgacaggctggtaaataggctgaagaacattacactcgatgatgccagtgcccctcgactgatggtgctgaggcagccccggggaccagacaattccatgggatttggcgcagaaaggaagatcagacaggctggagtgatcgactag

SEQ ID NO: 112656 - DNA, 2442 bp, synthetic construct
  misc_feature 1..2442: note = Description of Artificial Sequence: Synthetic coding sequence
  source 1..2442: mol_type = other DNA
atggaaaacgtctttacagtctcaagcgaccctcaccctagccccgctgctccacctagccttagtttgccccttagtagctcctccaccagttcaggaaccaaaaagcagaaaagaacacccacctatcagagatccatgtcgttcgaccccaatctgctccacaataatggtcacaatggctaccccaacgggactagtgcagcactgagagagactggagttatcgagaaacttctcactagctatggcttcatccaatgtagcgaacgccaggccagattattttttcattgctcccagtacaacgggaacctccaggatctcaaggtcggcgatgacgtggagtttgaagtgtcctctgatagacgtaccggcaagccaatcgctgtgaagttagttaagataaagcaggagatccttccggaggagagaatgaatggacaggaagtgttctatcttacctacacccccgaggacgttgaggggaatgtgcagctcgaaacaggtgacaagatcaatttcgtgattgataataacaaacataccggggccgtgtccgctagaaatattatgctgctgaagaagaaacaggcccgatgtcaaggcgtcgtgtgcgccatgaaagaagcattcgggttcatcgaacgcggcgatgtcgtgaaagagatcttttttcactatagcgaattcaagggggacctggagacacttcagcctggagatgatgtcgagtttacgataaaggataggaatgggaaagaagtggctactgatgtgaggctgctgccccaaggaaccgttatttttgaggacatatctattgagcattttgagggcactgtcactaaggtgattcccaaagtgccttctaagaaccagaatgatccactgcctggccgaatcaaagtggattttgtaattcccaaagaactgcccttcggagacaaagatacaaagtcaaaagtaacacttctagaaggagatcacgtgcgatttaacatctctaccgatcgaagggacaagcttgagagggcgaccaacattgaggtgctctctaacactttccaattcactaacgaggcccgggagatgggagtaattgcggctatgcgcgatggatttggcttcatcaagtgcgtggaccgggacgtacggatgtttttccacttcagcgaaatcctggatggaaaccaactgcacatcgcagatgaggtggaattcactgtggtgcctgatatgctgagcgcccagaggaaccatgcaatccgcattaagaagctgccaaagggcacggtgagttttcattcccactccgaccaccgctttctgggcaccgttgaaaaggaggcaacgttctcaaacccaaagaccaccagtccgaataaggggaaggagaaggaggccgaggatggcattatcgcctatgatgactgcggagtcaaactgacaatcgctttccaggctaaggacgtggaagggagtacctcccctcagatcggcgacaaagtggagttctcgatctctgataaacagcgacccggacagcaggtggccacctgtgtgcggctgctggggcgcaatagcaatagcaagcgcctgttagggtacgtcgcaacactgaaagataactttggtttcatcgaaactgccaatcatgataaggagatcttcttccactactccgagttcagcggcgacgtagacagcctggagctcggggatatggtggagtactccctgagcaaggggaaaggaaataaagtatctgccgagaaggttaacaagacccactcggtgaacggaatcactgaggaggccgaccccactatatattcagggaaagtgattagacccctgcgcagcgttgaccccacccagaccgaataccaggggatgatcgaaattgtcgaggagggcgatatgaaaggcgaggtgtaccctttcggcatcgtcggtatggccaacaagggcgactgtctacaaaaaggggagtctgtgaaattccaattatgcgtgttgggccaaaatgcccaaactatggcatataatataacccctctccggagggccacagtggagtgcgtgaaggaccagtttggtttcataaactacgaggttggcgattcgaagaagctctttttccacgtgaaagaggtgcaggatgggatagaacttcaggctggggacgaagtcgagtttagcgtgatcctgaaccagcggactggaaagtgtagcgcctgtaacgtctggagagtgtgtgagggccccaaggcagtcgccgcccctcgccccgatagactggtgaatcgcctcaagaacatcacgctggacgatgctagcgctcctcggctgatggtgctaagacagcctcgtgggcccgataattcaatggggtttggggcagagagaaaaatcagacaggcaggcgtgattgactag

SEQ ID NO: 112657 - DNA, 2535 bp, synthetic construct
  misc_feature 1..2535: note = Description of Artificial Sequence: Synthetic coding sequence
  source 1..2535: mol_type = other DNA
atggaaaatgtgttcacagtgagctcagatccccacccttctccagccgctcccccatccctgagtctgcccctgtcctcttcgtccacatcctccgggacaaaaaagcaaaagaggacgcccacttatcaacgcagtatgtctttcgaccccaacttgctccacaacaacggccacaatggctaccccaacggcacgagcgcagctctacgtgagactggcgttattgaaaaacttttgacgtcatacggcttcattcaatgtagtgagcggcaagcgcgactgttttttcattgttctcagtataacggcaatctccaggacctcaaagttggcgacgatgttgagttcgaagtctcctcagaccggaggacgggtaaaccgatagcggtgaagttagtgaaaatcaagcaggagatcctgcctgaggagaggatgaatggacaagtggtttgcgccgtacctcataatctggagtctaagtctcccgcagcccctgggcagagtcccactggcagcgtgtgttacgaaagaaatggggaggtgttctacttaacatacacccctgaggatgtcgagggcaacgtgcagttggagacgggggacaaaataaacttcgtaattgataacaacaagcatacaggcgccgtgagcgctagaaatatcatgctactcaaaaaaaagcaggctcgttgccagggtgtggtgtgcgcaatgaaagaggcgttcggctttatcgagcggggagatgtggtcaaagagatcttctttcactactctgaatttaagggcgatctggagaccttacagcctggtgatgatgtagagttcacaatcaaagacagaaatgggaaggaggtggccaccgacgtccgccttctcccccaaggcacagtgatctttgaagatatctcaatcgagcatttcgagggaactgtgaccaaggtcattccaaaagtacccagcaagaaccaaaacgatccactgcccggaaggataaaagtggattttgtgatccctaaggagctgccgtttggtgataaggatacaaagtcaaaggtaaccctccttgagggcgaccatgtgaggttcaacatcagcacggacaggagagataaacttgagcgagcaacgaatatcgaggtgctctcaaacacttttcagtttaccaatgaggctcgcgagatgggggttattgccgccatgagagatggatttggtttcattaaatgtgtggatcgggacgtccgcatgttctttcatttctccgaaatcctggacgggaatcagttacatattgccgatgaggtggaatttacagtggtccctgacatgttatctgcacaaaggaatcacgcaattaggatcaaaaagctccctaaaggaactgtgagcttccactcccacagcgaccacagatttctcggcaccgtggagaaggaggctaccttttccaatcctaagaccaccagcccgaacaaagggaaagagaaagaggccgaggatgggataatagcctatgatgactgtggcgtcaagttaacaatagccttccaggccaaagacgttgagggatctacatctccgcagatcggggacaaggtggaattctccatatcagacaagcaacgccctggccagcaggtggccacatgtgtgaggctgctcggaaggaattcaaattcaaaacgactcctgggctacgtggctacactcaaggataattttggattcatcgagaccgctaatcacgataaggagatttttttccattattccgagtttagcggtgacgttgatagtctcgagcttggcgacatggtagagtatagcctgagcaaaggcaagggcaacaaagtatccgccgagaaggttaacaagacccatagcgtgaacggcatcacggaggaggcggaccccactatttactccgggaaagtgatcagacccctgagatccgtcgatcccactcagacagaataccaagggatgatagaaatcgtggaagaaggggatatgaaaggcgaggtgtacccttttggcattgtcgggatggccaacaagggagattgcctgcagaaaggagaaagtgtcaaattccagctgtgtgttctgggacagaacgctcagaccatggcctacaatatcaccccgctgaggagggctaccgtggagtgtgtcaaagatcagtttggttttatcaattatgaggtgggcgattctaaaaagttgttctttcatgtaaaagaggtccaggacggcattgaacttcaagccggggatgaggtcgagttcagtgtgatcctgaaccagcgaacagggaagtgttctgcctgtaatgtgtggcgggtgtgtgaaggtccaaaggctgtcgccgccccacgccccgataggcttgtgaacaggttgaaaaacataaccctggatgacgcgagcgcccccaggctcatggtgctccgccagccaagagggcctgacaacagtatggggttcggtgccgagaggaagatccggcaagccggcgtgatagactag

SEQ ID NO: 112658 - DNA, 141 bp, synthetic construct
  misc_feature 1..141: note = Description of Artificial Sequence: Synthetic coding sequence
  source 1..141: mol_type = other DNA
atgtctttcgatcccaatctgctccacaacaacgggcacaacggctaccctaatggaaccagtgcagcactcagagagactggtgtcattgagaagctgctgacgtcatacgggtttattcagtgttcagaacgtcagtag

SEQ ID NO: 112659 - DNA, 24 bp, synthetic construct
  misc_feature 1..24: note = Description of Artificial Sequence: Synthetic coding sequence
  source 1..24: mol_type = other DNA
atgagctttgatcctaacttgtag

SEQ ID NO: 112660 - DNA, 2007 bp, synthetic construct
  misc_feature 1..2007: note = Description of Artificial Sequence: Synthetic coding sequence
  source 1..2007: mol_type = other DNA
atgaacggacaggaggtgttttatctgacttatacccccgaagatgtcgagggcaacgtacagctggaaaccggggacaagatcaactttgtgatcgataataataaacacactggagcggtttccgctagaaatattatgcttttaaaaaagaagcaggcccgctgccagggggtcgtgtgtgcaatgaaggaggcgttcggtttcattgagcgcggagatgtcgtcaaggagatcttctttcattactcagagttcaagggtgatctggaaacgctccagccgggcgatgacgtggagtttactattaaggacagaaatggcaaagaagtcgctactgatgtgagactcctcccacagggaaccgtgatcttcgaagatatttccattgagcattttgagggcacagtgactaaggtaattcccaaagttccctcgaagaaccagaacgaccccttgcctggccgaataaaagtggactttgtgatccctaaggaactgcctttcggagacaaagataccaaaagcaaggtgactctgttggaaggggaccatgtgcggtttaacataagcacagaccggcgagacaagctggaacgagctacgaatattgaggttcttagcaatactttccaatttactaacgaggcccgcgagatgggggtaattgctgcaatgagggatgggttcggattcataaagtgtgtggacagagatgtgagaatgttttttcatttctctgagattctagatggaaatcaattacatattgccgacgaagtggaatttaccgtagtgcccgacatgctttcagcacaaaggaatcacgccataagaatcaagaaactccctaaaggcacagtgagcttccatagccatagcgaccacaggttcctgggaaccgtagagaaggaagctacattctcaaaccccaaaaccacaagtcccaacaagggcaaagagaaggaagctgaggatggtataattgcttatgacgactgcggtgtaaaattaacaattgcctttcaagccaaggacgttgaaggtagtaccagtccccagattggagataaggtggagttttccatttccgataaacagcgccctggccaacaggtggcaacctgcgtgcggctgctgggaaggaacagtaattctaagaggctattagggtacgttgccacactcaaggacaattttggcttcattgagactgcgaaccacgataaagagattttcttccactacagtgaattctctggcgacgtcgactccttggaacttggggacatggtggagtactctctcagcaagggtaagggaaataaggtttccgcagaaaaggtaaacaagacccacagcgtaaacggtatcacggaggaagctgacccaactatttacagtgggaaagtaatcagacctctaagaagcgtggatccgacccagaccgagtaccaaggtatgatcgagattgtggaggaaggggacatgaaaggagaagtgtacccattcggaatcgttggcatggccaataagggtgattgcctgcagaagggcgaaagtgtgaagtttcagctgtgcgtcctggggcaaaatgcacagactatggcctacaacattacccctcttaggagggctacggttgaatgcgtgaaagatcagttcggattcataaattacgaggttggcgactcaaaaaagctgttcttccatgtgaaagaagtgcaggatggcatagaactgcaggcaggtgatgaggtggagttcagtgtcattctaaatcagcgcacaggaaagtgctctgcctgcaacgtgtggcgcgtttgcgagggacccaaagccgtggccgcccccaggcccgatcgactggtcaaccggttaaagaacattactctggacgacgccagtgctcccagactgatggtactcagacagcctaggggcccagacaatagcatgggcttcggggccgagagaaaaattcggcaagccggtgttattgattag

SEQ ID NO: 112661 - DNA, 288 bp, synthetic construct
  misc_feature 1..288: note = Description of Artificial Sequence: Synthetic coding sequence
  source 1..288: mol_type = other DNA
atgtctttcgatcccaatcttctgcataacaacgggcacaatggctacccgaacggcacatccgcagctctacgtgagaccggagtcatcgagaaattgctcacgtcttatggctttatacagtgttctgaacgtcaggctcgcctcttttttcattgcagccagtataacggtaacttgcaggacctgaaggtgggggatgacgtcgagttcgaggtatccagcgacagaaggaccggaaagccaatcgcagtcaaactggttaagattaaacaagaaatactgtag

SEQ ID NO: 112662 - DNA, 2397 bp, synthetic construct
  misc_feature 1..2397: note = Description of Artificial Sequence: Synthetic coding sequence
  source 1..2397: mol_type = other DNA
atgtcctttgatcccaatctgcttcacaacaatggacataatggttacccgaatggcactagcgctgcactgagggagaccggcgtgatcgaaaaactcttaacctcttacggatttatacagtgcagcgaacgacaggcccggttattctttcactgttcccagtacaatggaaacttgcaggacctcaaagttggtgatgatgtggagtttgaggtcagctctgacaggaggacgggcaagcccattgcagtcaaattggttaaaatcaagcaggaaatcctgccagaggagcgcatgaacggccaggtggtttgtgctgtcccccacaatttggagagcaaaagccctgccgcaccagggcagagccctacaggaagtgtctgctatgaaagaaacggcgaagtattctatctgacatacaccccggaagacgtggaggggaatgtgcaactggagaccggcgacaaaatcaattttgtgatcgataataataagcacaccggggctgtgtctgccagaaacatcatgctgctgaagaaaaagcaagcacggtgccagggcgtggtgtgtgcgatgaaagaagctttcggtttcatcgagcgcggagatgtggttaaggagatctttttccactacagcgaattcaaaggggacctggaaactctgcagccgggcgacgacgtcgaatttacaatcaaggatcggaacggaaaagaagttgccaccgatgtccggctgttgcctcagggtacggtcattttcgaagatatatccatcgagcatttcgagggaacggttacaaaagttataccaaaggtgccatccaagaaccagaacgacccactacctggccgcatcaaggtcgattttgtgatcccaaaggaactgccattcggtgacaaagataccaaatctaaagtgactctgttagaaggggaccatgtgcggttcaatatcagcaccgacaggcgtgacaaacttgaacgcgcaactaacattgaagtcctcagcaatactttccagtttaccaacgaggcccgggagatgggcgtcatcgccgcaatgagagatggcttcgggtttatcaaatgcgttgacagggatgtcagaatgttcttccacttctcagagatcctggacgggaaccagctccacattgctgacgaagtggaattcacggttgtccccgacatgctgagtgctcagagaaatcacgcaatccgcatcaaaaaactgccaaaaggaaccgtttcatttcactcccatagcgaccatagatttttgggcaccgtagagaaagaagcaaccttctccaacccaaagacaacatctcctaacaagggtaaagaaaaggaggcggaggacggaattattgcctacgacgattgcggtgtaaaattgactatcgcatttcaggctaaagacgtggaaggctctacctcgccccaaatcggtgataaggtggagttctctatttctgacaaacaacgtcccgggcaacaagtggccacctgtgtgcgcttgctcggcaggaacagtaactccaagcgattgttaggttatgtggccacgttgaaagataactttggcttcattgaaacggcgaatcacgacaaagaaatcttttttcattactccgaattctctggagatgtagactctctggagctgggcgacatggttgaatacagcctgtctaaaggcaagggaaataaagtttccgcagagaaagttaacaaaacgcattcagtgaatggaataaccgaagaggctgacccaaccatctactcaggcaaagtcatccggcctctgcgatccgtggatcctactcagacagaatatcagggcatgatcgaaattgtggaagaaggcgatatgaaaggagaagtctacccttttggaattgtgggaatggccaacaagggggactgcctgcagaagggagagtcggtgaagtttcaactgtgcgtcctcggccaaaacgcgcaaaccatggcctacaacatcacccctctaaggcgggcaaccgttgaatgcgttaaggaccagttcgggtttattaactatgaggtgggtgatagcaagaaacttttcttccatgtcaaagaggtgcaggacggcatagagctgcaggcaggcgatgaggtagagttttcagtgattctgaaccaaaggaccgggaagtgcagcgcgtgcaacgtgtggcgcgtgtgcgaaggtccaaaagccgttgccgcgccgagacccgatagactggttaaccggctcaaaaatatcacgctggacgacgcttctgccccacgcctgatggtcctgcggcagcccagaggccctgacaattctatggggtttggtgcagagcgcaaaattcgtcaagctggcgtgatcgactag

SEQ ID NO: 112663 - DNA, 1329 bp, synthetic construct
  misc_feature 1..1329: note = Description of Artificial Sequence: Synthetic coding sequence
  source 1..1329: mol_type = other DNA
atggaggcttcacggtgtaggctgtccccttcaggtgatagcgtgtttcatgaagagatgatgaaaatgcgccaagccaagttggactaccagcggcttcttctcgagaagagacaacggaagaaacgtctggaaccctttatggtgcagcccaacccagaagctaggctccgccgagccaaaccacgtgccagcgacgagcagaccccccttgtcaactgccatactccacatagcaacgtgattctccacggaattgacggaccagccgcagtgcttaagcctgatgaggtgcatgccccgagcgtgagtagcagtgtggtggaagaagatgcagaaaacacagttgacaccgcctcaaagccaggccttcaggagaggcttcaaaagcacgatattagcgagtcagtcaactttgatgaagagaccgacgggatttcacagagtgcttgcctggagcggcccaacagcgcgagcagccagaacagcaccgacacagggacatcaggcagcgcgacagctgcacaacctgccgacaatctcctcggggacattgacgacctcgaagatttcgtctactcacctgcccctcagggggtgactgtgcgctgcaggatcatacgcgataagagaggaatggacagaggactattccccacatactatatgtaccttgagaaagaggaaaaccagaagatttttctgctcgcggcaagaaaaagaaaaaaatcaaagaccgccaattacttgatctccatagatcccgtggacctgagccgcgagggcgagtcatatgtcgggaagctcaggagcaatcttatgggaacaaaatttactgtatacgacaggggaatctgccccatgaaaggacggggcttggtgggtgctgcccatacccgacaggagctcgccgccatttcctacgaaacaaacgtattaggtttcaaggggcctaggaaaatgtccgtgatcattcccggaatgacgctcaaccataagcaaatcccttaccagccacagaataaccatgacagcctgttgagtcgctggcagaatagaacaatggagaacctggttgagcttcacaacaaggcccccgtctggaattcggacactcagagctatgtgctgaactttaggggacgggtaacgcaggccagcgtgaaaaatttccaaatcgtacataaaaatgaccctgactacatcgttatgcagttcggccgggtggcagacgacgtgtttaccctagactacaactaccccctttgcgccgttcaagcgttcggcataggactcagcagttttgatagcaaactcgcctgcgagtag

SEQ ID NO: 112664 - DNA, 912 bp, synthetic construct
  misc_feature 1..912: note = Description of Artificial Sequence: Synthetic coding sequence
  source 1..912: mol_type = other DNA
atgtctgaagcaggcgaggcaaccactacaactaccactactctgcctcaagctcccacagaggctgccgccgcagctccccaggacccagcccccaaatcccctgttggctcaggtgcacctcaggcagccgcacccgcccccgccgctcacgtagcaggcaatcccgggggggacgccgccccagctgcgacgggcacggctgctgcagcaagtctggctacggccgccggcagcgaagacgcagagaagaaggtgttggctacaaaggtcctcggcacagtgaagtggtttaacgtcagaaatggatacggctttatcaacagaaacgatacaaaagaggacgtattcgtacaccagaccgccatcaagaagaataatccccgaaagtatttgaggagtgtgggggacggcgagactgtcgaatttgacgtggtggaaggagagaaaggagcagaggcagctaatgtcaccggccccgatggagttccagtggaaggctccagatacgccgccgatcggcggcggtaccggcgcggatattatggccgccggcggggcccaccaagaaacgcgggcgagattggcgagatgaaggacggcgtgcccgagggggcgcagctgcaaggccccgtacacaggaaccccacctatagaccaaggtataggagcagggggcctccacggcctcgacctgcacccgcggtgggagaggctgaggacaaggagaatcagcaggctacctccgggcctaaccaaccctctgtgagacgcggttacagacgtccttataattacaggcggcgcccccgcccgcccaacgccccatcccaggacggtaaagaagccaaggctggagaggcgcctaccgaaaacccggctccccccacacagcaatcctctgctgagtag

SEQ ID NO: 112665 - DNA, 339 bp, synthetic construct
  misc_feature 1..339: note = Description of Artificial Sequence: Synthetic coding sequence
  source 1..339: mol_type = other DNA
atggagaagatcttgattctcctgctagtggctctgtccgtcgcgtatgcggcaccaggccctcgaggtattattataaacctggagaatggcgaactctgcatgaacagcgcccagtgcaagagtaactgctgccaacactcctctgcactaggcctggctcgctgtaccagcatggcttcagagaattctgagtgctctgttaagacgctctatggaatctactacaaatgcccctgcgaaagggggttaacctgcgaaggggataagaccatcgtcggatcgataacaaataccaacttcggcatctgccatgacgccggccgtagtaaacagtag

SEQ ID NO: 112666 - DNA, 216 bp, synthetic construct
  misc_feature 1..216: note = Description of Artificial Sequence: Synthetic coding sequence
  source 1..216: mol_type = other DNA
atggaaaagatcctgatcctgttactcgttgctttgtcagtggcttacgcggcccctggccctcgtggcataattattaatttgacactatacggaatctattacaagtgcccctgcgagcgtggtttaacatgtgagggcgacaaaaccattgtggggagcataactaataccaatttcggtatatgccacgatgcagggcgctcaaaacagtag

SEQ ID NO: 112667 - DNA, 408 bp, synthetic construct
  misc_feature 1..408: note = Description of Artificial Sequence: Synthetic coding sequence
  source 1..408: mol_type = other DNA
atgcaactgacttgggcttcaatcagcttggtcacacgctgctggcctcagacaccgaccttccaagacctgctcgcgtgtcttggtgcgcgcgctcttcccgggccccccggtgccccagggagggatgggtctaaaggggagcggggcgcccccggccctcgcggatccccggggcccccggggtccttcgactttttgctactgatgttagcggatatcagaaacgatatcacagagctccaggagaaggtgtttgggcaccgcacccattcctcagccgaggaattcccactccctcaggaatttcccagttaccctgaggctatggatctgggttctggcgacgatcacccccgacggaccgaaacacgcgacttgcgcgccccacgtgatttctacccctag

SEQ ID NO: 112668 - DNA, 1221 bp, synthetic construct
  misc_feature 1..1221: note = Description of Artificial Sequence: Synthetic coding sequence
  source 1..1221: mol_type = other DNA
atggtcccacctcccccttcacgcggaggagccgcccgggggcagctgggacggtccctggggccccttctcttactgctcgcactgggccacacatggacctaccgcgaagaaccagaagacggagatagagaaatatgcagtgagtcaaaaatcgccacaacaaagtacccttgcctcaagagttcaggagaattgaccacctgctatcggaaaaagtgttgtaaaggctataaattcgtactgggacagtgcatacccgaagactacgacgtctgtgcagaagccccatgtgagcagcaatgcactgataatttcggccgtgttctttgcacatgttatccaggatatcgttatgaccgagaacgccatcggaagagagagaaaccttactgcctcgatattgacgaatgcgccagttctaatgggactctttgtgctcatatatgtatcaacacacttgggtcttatcggtgtgagtgtcgagaggggtacattcgagaggatgacgggaaaacgtgcacgcggggagataagtatcccaatgataccgggcatgagaagtccgaaaatatggttaaagctgggacctgctgcgctacttgtaaggaattttatcagatgaagcaaacagtcctccagctgaagcagaagattgcactcttgccaaacaacgcagcggacctcggaaagtatatcaccggggataaggtcctggcgtcaaacacatatttgcccggcccaccaggactccccggcggacagggtccccccggcagtcccggacccaaaggctctccaggttttccaggcatgccaggccctccagggcaaccagggcccaggggaagcatgggtcccatgggcccgtcccccgatctgagccacattaagcaaggtcgcagggggcccgttggcccccctggagcccctgggcgtgacgggtctaagggcgaacgcggggccccaggtccacgcgggtcccctggaccgcccggatcatttgactttttgcttctcatgctcgctgacatccggaatgacattacagaattgcaggaaaaggtgttcggacaccggactcacagctccgcggaagagtttcctttaccacaggaattcccaagctacccagaagccatggacttgggttcaggcgatgaccacccacggcgaactgagactcgggatttaagagctccacgggatttttacccctag

SEQ ID NO: 112669 - DNA, 699 bp, synthetic construct
  misc_feature 1..699: note = Description of Artificial Sequence: Synthetic coding sequence
  source 1..699: mol_type = other DNA
atgtggccaccaggacgcagtatcacagtgaagctcagagagaagaccgtgtcacgcaagctggaaatgaacgggccctccgcgttccaggggctaatatgtggcaagtataacgggatgtgtctgcagggccccgctggtgtgcctggccgtgatgggagtcctggcgctaacggtatccccgggactcccggaatccctggccgagatggcttcaagggcgaaaaaggagagtgtttacgagaatccttcgaggaatcctggacgccgaattacaagcagtgctcatggagctctttgaattatggaatcgatctggggaaaattgctgagtgcactttcaccaagatgaggtccaatagcgctctgcgcgtgctgtttagcggcagcctcaggctgaagtgccggaacgcttgctgccagagatggtatttcacctttaatggcgccgaatgctcaggtcctctgccaatcgaggcaattatctacttagaccaggggtcccctgagatgaattctaccattaatatccaccgaacctcttctgttgaggggctgtgcgaaggaataggagcgggcctcgtggatgtggccatctgggtcggcacatgttccgactatccaaaaggtgatgccagcaccggctggaattcagtttcgcgcatcattatcgaggaattacccaactatctcttctag

SEQ ID NO: 112670 - DNA, 732 bp, synthetic construct
  misc_feature 1..732: note = Description of Artificial Sequence: Synthetic coding sequence
  source 1..732: mol_type = other DNA
atgagaccccagggtccagccgcttctcctcagaggctccggggccttcttcttctgctattactacaactgccagccccctcttcagcatctgagatccctaagggaaaacaaaaggcccaactaaggcagcgagaagtggtggacctgtacaatggcatgtgtctacaggggcccgccggtgttcccggtcgggatgggtcacccggtgctaatggtataccgggaactcctggaattcctggtagggatggtttcaaaggggagaagggggagtgtttgagggagtcctttgaagagtcctggacccctaactacaagcagtgctcctggtccagcctgaactatggtattgatctaggcaaaatcgccgaatgtacttttaccaagatgcgcagcaactctgcactacgggtcctgttctctgggtctttgcggctcaagtgcagaaatgcatgctgtcagcggtggtacttcacgtttaatggcgcagaatgttccggacctctcccgattgaggcaattatttatctggaccaagggtccccggaaatgaactccactataaatattcaccgcacgagttccgtcgagggactgtgcgagggtatcggagccggcctggtcgatgttgcaatttgggtggggacttgttccgattacccaaagggtgatgcatccactggctggaattccgtgagccgtataataattgaagagcttcccaagtag

SEQ ID NO: 112671 - DNA, 690 bp, synthetic construct
  misc_feature 1..690: note = Description of Artificial Sequence: Synthetic coding sequence
  source 1..690: mol_type = other DNA
atgtggccaccaggccgatccataacggtcaaattgagagaaaaaacagtgagccgaaaactggagatgaatggcccatctgcattccagggacttatatgtgggaaatacaacggtatgtgcctgcagggtcccgcaggagtccccggccgggatgggtcacccggtgccaacggaatcccagggactccaggcatcccagggagagatgggttcaagggcgagaagggggaatgcctgagagagtcctttgaagaatcttggacccccaattataagcagtgttcttggagcagcctcaattatggaatcgacctgggcaaaattgccgagtgtaccttcactaaaatgcgaagcaatagtgctctgagagtgttgttttccggctccttgcgcctgaaatgtcgcaatgcttgctgccagcgatggtatttcacttttaatggcgcagagtgctccggccccctccctatcgaagcgattatatacttggaccagggaagtccagaaatgaattctaccatcaacatccatcgtacttcaagcgtggagggactgtgtgagggaatcggagccggcctggtagacgttgccatatgggttggcacctgtagtgattatccaaaaggcgacgctagtaccggctggaactcagtgagtaggattatcatcgaggagttgccaaagtag

SEQ ID NO: 112672 - DNA, 5037 bp, synthetic construct
  misc_feature 1..5037: note = Description of Artificial Sequence: Synthetic coding sequence
  source 1..5037: mol_type = other DNA
atgcacccgggactttggctactgctggtgactctgtgtctaacagaagagctggccgctgctggggagaagtcctatggtaagccttgtggcggccaggattgctctggaagctgccagtgtttccctgagaaaggagcacgaggaagacccggccccataggtatacagggccccacgggtccgcaaggctttaccggcagcaccgggctgagcgggctgaaaggcgagcggggatttccaggtctattgggcccttacgggccaaagggtgataagggacccatgggagttcccgggttcctcgggataaacggaattcccggtcatcctggacagcctgggcccagaggtccacctggcttagacggttgcaacggtacccagggcgccgttggatttcctgggccagatggatatccggggctgctaggcccccccggactgcccggacagaagggatccaagggagatcccgttctggcacctggtagctttaaagggatgaaaggcgacccggggctgccaggtctcgacggtattaccggacctcagggagcacctggcttcccaggcgcagtcggtcccgccggccctccagggcttcaaggtccacctggacccccaggcccactcggcccagacgggaacatgggacttggcttccagggtgaaaagggagtgaaaggggatgtgggcctgccaggtccggccgggccaccacccagcacgggtgaattagaatttatgggattccccaagggcaaaaaggggtctaaaggggaaccgggaccaaaaggttttcctgggatttctggacctcctggcttccccggcctgggcaccaccggcgaaaagggggagaaaggagagaagggaatacctgggctcccaggccccagggggccgatgggatcagagggcgtgcaaggcccaccgggtcagcaaggcaagaagggaacccttgggttccccggactcaatggattccagggaattgaagggcaaaagggtgacattggcctgccggggccagacgtattcattgatatcgacggcgccgtaatctctggcaacccaggcgaccctggcgtccctggcctccctggattgaagggggacgaagggatacagggactgcgcggtccatccggagtgcctggtctgccggccttgtctggcgtgccaggcgccctcgggccccagggattccccggcctcaagggggatcagggaaatcctgggaggaccaccatcggcgccgctgggctacctggccgcgacggactgcccgggccaccaggaccacccgggccacccagccccgagttcgaaactgagacacttcataacaaggagtctggcttccctggacttcgcggggaacagggacccaaaggtaaccttggtctgaagggtatcaaaggcgacagcggattctgcgcttgcgatggtggtgtgcccaatactggacctccaggcgagccaggtccccccggcccgtggggactgatcggcctgccaggcctaaaaggcgccaggggagatagaggttccgggggggcacaggggcccgcgggtgcaccagggctggtgggcccactcggcccgtctggcccaaagggaaaaaaaggagagccaatactgagcaccattcagggcatgccaggcgacaggggagactcaggaagccagggattccggggagtgattggggagccagggaaagacggtgtgcccgggctgcctggattgccaggactccccggcgatggtgggcagggattcccaggggaaaaaggtctgcccgggctgcccggcgaaaaaggccatccaggacctcccggcttaccgggcaacggtttgcccggcctgccaggacctcgaggacttcctggcgacaaggggaaagatggccttccaggccaacaggggctgccgggaagcaaaggcataacactgccatgcatcattccggggtcatatgggccctcggggtttcctggaactccaggcttccccggacccaaaggatccaggggtttgccaggcaccccaggccagcctggcagcagtgggtccaagggcgagcccggatcacccgggctggtccatctccccgagctgcccggttttcctggaccgaggggtgagaaaggcctgcctgggttcccaggcctccccgggaaagacgggctgcctgggatgatcggcagccctgggctgcccgggagtaagggtgccactggagacatcttcggagccgagaatggcgcacctggtgagcagggacttcaggggcttaccggccacaagggcttcctcggagactcggggctgccgggcctgaaaggggtgcacgggaaaccaggtctgttgggccccaaaggagagagaggctccccgggcacccctggacaggtcggtcaaccagggactcctggctcctcaggaccatatgggattaagggcaaaagtggcctccctggagcccctggtttccctggaatctcaggccacccaggaaaaaagggaactcgcggcaagaagggccctcccgggtccattgtcaagaaagggctgccgggactgaagggcctccccggaaatcccggtttagtgggactgaagggaagccctgggagcccaggagtggcaggactgccagcactgagtggcccaaagggcgaaaagggatctgtgggctttgtcggcttccctggaattcctggccttccaggcatcccaggcaccagggggctgaagggaattccgggaagcacaggaaagatgggcccttcaggaagagcggggacccctggggaaaaaggagaccgcggtaacccaggtccagtcggtatccccagtccacggagaccgatgagtaacctgtggttgaagggcgacaaaggatcgcaggggtctgctggaagcaacggtttcccaggtcccaggggagataaaggcgaagccggccgacccggccccccaggactgccgggagcaccaggcctgcccggtataattaagggagtgtctgggaaaccaggcccaccagggttcatgggcattcggggcctccctggtctcaagggatcgtcgggaattactggattccccggcatgccaggcgagagcggaagccagggcatcagaggttcccccgggttgccgggcgcatcaggtctgcccggcttaaagggagataatggacaaaccgtagagatcagtggcagcccaggacccaagggccagcccggagaatcggggttcaagggtactaagggacgggacggactgattgggaatattggattccccggtaacaagggagaggatgggaaagtcggtgtgagtggagacgtgggcctgcccggggcccccggcttccctggagtggctggtatgaggggagaaccagggctcccgggatcctcgggccaccagggggccataggtcctctcgggagcccaggactcatcgggcccaagggcttcccaggcttccctggactccatggcttgaacggcctgccggggacaaaaggaacacacggcacacctggtcctagtataacaggtgttcctggacccgctgggctgcccggacccaaaggagaaaaaggatatccaggcatcggcatcggtgcaccgggtaaacctggccttcgcggccaaaagggagatcggggcttccctgggctccaaggccccgctggtctaccaggcgccccagggatcagtttgccttcactcatcgcagggcagcccggcgacccaggccggcccgggctggatggtgagagaggtcgtcctggcccagccgggccccccgggccgcccggtccttccagcaatcagggcgatacaggcgatcccggcttcccaggaattccaggattctcagggctgcccggcgagctagggctcaaaggtatgcggggggagcccggatttatgggaacgccaggtaaagtaggcccaccaggtgacccagggttccccgggatgaaggggaaggccgggccccggggaagttctggcttgcagggcgaccccggtcagacgcccacagctgaagccgtacaggtgccaccaggcccattgggcctgcccggcattgatggaatccccggactgaccggcgatcctggagcgcaggggcctgtggggctccaggggtctaaggggttgcctgggatacccggaaaagacgggccctctggccttcccggccccccaggcgctctgggtgacccaggcctgcccggacttcagggcccgccaggttttgagggagcccccgggcagcagggaccttttgggatgccaggcatgcccgggcaaagtatgagggtcggttacaccctcgtgaaacactcacaaagcgaacaggtccctccatgccccatcgggatgtctcagctgtgggtgggttactccctgctcttcgtcgaaggacaggaaaaagctcacaatcaggatcttgggttcgccggatcctgcttaccacgcttttctacaatgcccttcatttattgtaacattaacgaggtgtgccactacgctagacgcaatgataagtcctactggctgtccaccaccgctccaatacccatgatgccagtttcccagacacaaattccacagtatatttccaggtgttctgtttgtgaggctccttctcaggccattgccgtgcacagccaggatatcacgattcctcaatgccccctgggttggagatcattgtggattggttattcctttttaatgcatactgctgccggtgccgaaggagggggccaatccctcgtgtcccccggaagctgtttggaggactttcgcgctaccccattcattgagtgtagtggtgctcgcggaacttgccattattttgccaacaaatactctttttggctcaccactgttgaggaaagacagcaatttggggagctccccgtctcagagactcttaaggcaggacaactccacacacgggtgagtcggtgccaggtgtgcatgaaatcattgtag

SEQ ID NO: 112673 - DNA, 3087 bp, synthetic construct
  misc_feature 1..3087: note = Description of Artificial Sequence: Synthetic coding sequence
  source 1..3087: mol_type = other DNA
atgagagcggcgagagccctcctcccactgttactccaagcttgctggactgctgcccaggacgaacccgaaacaccaagggccgttgcattccaggattgccccgtggatctcttttttgtattggacacctccgaatccgttgcccttcgtttgaagccatatggtgcactggttgataaggtgaaatcctttacgaaacgctttatcgataacctgcgcgatcggtactacagatgcgatcgaaacttggtgtggaatgcaggggccctgcattactccgatgaggttgagatcatacaggggcttacacggatgcctggggggcgcgatgcattgaaaagttcggtggacgcagtgaagtactttggcaaaggcacatataccgactgcgctatcaagaaagggctggagcagttattggtgggggggagtcacctgaaagagaacaagtacctgatcgtggtgacagacggccatcccctggagggatacaaggaaccttgtggcggactcgaagatgccgtgaacgaagcgaaacacctgggggtgaaggtgttctctgttgccataacacccgaccaccttgaacctaggctctcaatcatcgcaacagaccacacctatcgaaggaacttcacggcggccgattggggacagtctcgggatgcggaggaggcaatcagccagaccattgataccatcgttgacatgattaagaacaacgttgagcaggtctgttgttccttcgaatgccagcccgcaaggggaccccctggattacgtggagacccaggcttcgagggagagcgtggcaaacccggcctccccggcgaaaagggagaggctggggaccccgggcggccaggagatctggggccggtgggctatcagggaatgaagggtgaaaaggggagccgaggagagaaaggaagtaggggcccaaaggggtacaagggcgagaaaggcaaaagagggattgatggcgtcgacggcgtcaagggtgaaatggggtaccccggcctgcccggatgcaagggctccccaggatttgatggcattcagggccccccgggcccaaaaggggaccctggggcattcggattgaagggtgagaagggcgagccaggagccgacggcgaggctgggagacctgggagcagtgggcctagtggagatgaaggtcagcccggcgagccgggccctccaggggagaagggcgaagcaggcgatgagggcaatccaggtccggacggagcccctggcgagaggggtggccctggggaaaggggccctagaggaaccccgggaacccgggggccccgcggggaccccggggaggccggccctcaaggagatcagggacgcgagggccctgtgggagttcctggtgatccgggagaggcaggtcctattggccccaaggggtacaggggcgatgagggccctcctggaagcgagggagcccggggagcacctggacccgctggcccacccggggaccctggactgatgggagagaggggcgaagacgggccagcaggtaacggaacagaaggattcccaggattccccggataccctggcaatcgcggggcccctggaatcaatggaacgaagggctatccaggcctgaagggagatgagggcgaggctggggaccccggcgatgataacaatgacatcgcgcctcgcggagttaaaggcgcaaaaggttatcggggccctgaaggccctcagggcccccctgggcaccaaggacctcccggccccgatgaatgcgagatcctggatattattatgaaaatgtgctcatgttgcgaatgtaagtgcgggcccatcgacttattatttgttctggactctagtgagtcaatcggtctgcagaactttgaaatagctaaagatttcgtcgttaaggtgatcgaccgcttgagcagggacgaactggtcaagtttgaaccaggtcaatcctacgccggggtcgtccagtactcccattcacagatgcaagaacatgtgagcttgagaagtccatccatccgtaacgtgcaggagctgaaggaagccattaagagtctgcagtggatggctggcgggacctttaccggggaagcccttcagtacacccgggatcagctcctgccaccaagccctaacaacaggatagctttggtcattaccgacggccgatccgatacccagagagacacaaccccactcaatgtgctttgttctccggggattcaggtggtgtccgtgggaattaaggacgtctttgacttcatcccggggagcgatcagctgaatgtcatatcgtgtcagggcctcgctccatcacaggggagacctggcctgtccctggtaaaggaaaattatgcagaactgctggaagacgcattcctcaagaacgtcactgctcaaatatgcatagataagaaatgtcccgactatacgtgccccataacttttagctctccagcggatatcacaatcctactggacggctctgccagcgtgggctcgcacaacttcgataccactaagcgattcgctaaacggctcgccgagcgatttttaaccgcgggacgcaccgatcctgcacatgatgttagagtcgcagtggtgcaatattccggtactggccaacagagaccagagcgagcctccctgcagtttcttcagaattataccgcgctcgccagtgccgtggacgctatggacttcatcaacgatgccactgacgttaacgatgctctggggtatgtgacaaggttctaccgcgaggcctctagcggcgcagcgaagaagcgtctgctgctgttctctgatggcaactcgcagggggccacgcctgccgcaatagaaaaggcggtccaagaggctcagagagctgggatcgagatatttgtggttgtggtgggtcggcaggttaatgaaccccacatcagggtactcgtgacggggaagaccgccgagtatgatgtggcgtatggagaaagccacctctttcgggtcccttcataccaagctctgctgcgaggggtgtttcaccagactgtgtccagaaaggtggccctgggttag

SEQ ID NO: 112674 - DNA, 1770 bp, synthetic construct
  misc_feature 1..1770: note = Description of Artificial Sequence: Synthetic coding sequence
  source 1..1770: mol_type = other DNA
atgagagctgccagggcactgctccctcttctcctgcaggcttgttggacagcggcacaagatgaaccggaaaccccgcgggctgtcgccttccaggattgccctgtggacctgtttttcgtcctggatacgtctgaatccgtggccctgagattgaagccttacggcgctctagtagacaaggtcaaatccttcaccaaacgtttcatagataatttgagagatcgatactaccgatgcgatcggaacctggtctggaacgctggcgctctgcactactccgatgaggtcgaaattatccagggtctgacacgaatgcctggcgggagagacgccctgaaaagttcagtcgacgccgtaaagtatttcggaaaaggtacttataccgactgtgctataaagaagggtcttgaacagcttctggtgggaggctctcacctgaaagaaaacaaatatttaatcgtggtgacagatggtcaccctttggagggatacaaggaaccatgtggcgggttagaagatgccgtcaatgaagccaaacatctgggggttaaggtgttctcggtcgccattactccagaccatctcgaacctcggctttcaatcattgctacagatcacacatacaggcggaactttaccgctgctgattggggccagtctagagacgccgaggaggccatctcccagaccattgataccatcgttgacatgatcaagaataatgtggaacaggtatgttgttcatttgaatgccagcccgcccgcggaccaccaggccttagaggggatcccgggtttgaaggggagagaggcaagcctggcctcccaggggagaagggggaggccggcgaccctggacgacctggcgacctggggccagtgggctatcagggtatgaaaggcgaaaaaggcagtcggggagagaagggcagtcgcggccctaaggggtataagggcgaaaaagggaagcgcggaattgacggtgtggatggggtcaagggtgaaatgggataccccggcctccctggctgtaagggcagccccggctttgatggcatccagggaccacccgggcctaagggagatcctggggcttttggcctgaagggcgaaaagggagaaccgggggcggatggggaagcaggtagaccagggagttctggcccttccggggatgaaggccaacccggagaacccgggcctcctggggagaaaggcgaggcgggggatgaaggtaatccaggtccggacggagctcccggtgaaagaggggggcctggcgagaggggtccgcgaggaactcctggcacccgtgggcctcgcggggatcccggcgaggcaggacctcaaggcgaccaaggacgggagggaccggtcggggtgccgggtgatcccggggaagccggacccattggcccgaaggggtacagaggagacgagggaccacctggctcagaaggagctcggggcgccccagggcccgcgggacccccgggagatcccggactaatgggcgaacggggcgaggacggtccggcaggcaatggtaccgagggctttcctggctttccaggatatcccgggaatcgtggcgcaccagggatcaacggtaccaagggctacccagggctgaagggcgacgagggagaggccggcgatcccggcgacgacaataatgatatcgccccgaggctgctgcgtgtgcttctggtgaccgggttggacctcggtcccacagccctggaggccgctgccgaccagcactag

SEQ ID NO: 112675 - DNA, 324 bp, synthetic construct
  misc_feature 1..324: note = Description of Artificial Sequence: Synthetic coding sequence
  source 1..324: mol_type = other DNA
atgcgcgcggcccgagcattactgcctctcctgttacaggcgtgctggactgctgcacaggacgagccagaaacacctagggccgtggcatttcaggactgccctgtagacctgttctttgtgctagatacttctgaatcagtggctctgcgtctgaagccatatggggcattggtcgacaaagttaagagttttaccaaacgctttattgacaatttgcgagaccgatactatagatgtgatagaaacttagtgtggaacgccggcgctctccattactctgacgaggtagaaatcatccagggcctgaccaggatgccatag

SEQ ID NO: 112676 - DNA, 3060 bp, synthetic construct
  misc_feature 1..3060: note = Description of Artificial Sequence: Synthetic coding sequence
  source 1..3060: mol_type = other DNA
atgttgcagggcacatgtagtgtactgcttttgtggggtattctgggagcaatccaggcccagcagcaggaggttatctcgccggataccacagaaagaaataataattgtccggagaaaactgattgcccaatacacgtctattttgtactggacacctctgagagtgtgacaatgcaaagccccacagacatcctactcttccacatgaaacagttcgtccctcagtttataagtcagctacagaacgaattttatttggatcaagtagccttgtcgtggcgatacggcggactacacttctctgaccaagttgaagtgtttagtccaccaggctctgatcgtgcgtccttcatcaaaaatctgcaggggatttctagcttccggcgcggtacatttacggactgcgctctggcaaatatgactgagcagatacgccaggataggagcaaggggacagtgcattttgccgtggttataactgacgggcacgtcaccggatctccctgtggcgggatcaagctgcaggccgaaagagcacgtgaagaggggatccgcttattcgcagtggcacccaatcaaaacctgaaagagcagggtctgagagacatcgccagcaccccacacgagctgtatcgaaatgactatgcgacaatgcttccagactcgactgagattgatcaggatacaatcaacaggatcatcaaagtcatgaagcacgaggcttatggcgagtgttacaaagtttcctgcctggaaatacctggtccctctggccctaagggatatcgaggacaaaagggggccaaggggaatatgggtgagccgggtgagccagggcagaaaggaagacaaggcgatccgggcattgaaggcccaattgggtttcccggcccaaagggtgtaccgggtttcaagggcgagaagggcgaattcggtgcggatgggcggaagggtgctcctggactggccgggaaaaacggcacagacggccagaaaggaaaactcggaagaatcggtccacccggatgtaagggagatcccggtaacagggggcccgatggttaccctggcgaggcagggtctccaggggaacgcggggaccagggcgggaagggcgatcctgggaggcccggccgtcgtgggccaccgggggagattggagcaaaaggtagcaaagggtaccagggaaattccggagccccgggaagtccaggcgttaaaggcgctaagggtggccccggaccccgtggccctaagggagagccaggcaggagaggtgatccgggcaccaagggaagccccgggtcggatggccctaagggggagaaaggcgatcccggccccgaagggcctaggggtttagcaggagaagtcggcaacaagggtgccaaaggagacagaggcctcccaggtccccgtggacctcagggggccctgggagaacctggcaaacaaggctcaaggggtgatccaggggatgcgggaccaaggggagatagcgggcagcctgggccaaagggggacccaggcaggcctggtttctcctaccctggacctagaggggcccccggggaaaagggagagcctgggccacgtggccccgaaggtggccggggtgattttggtctgaaaggggaacccgggagaaaaggggagaagggagagccagccgatccaggaccccccggggagcccggcccaaggggccctcgcggcgtccccggccctgaaggcgaacctgggcctcccggtgaccctggacttacagaatgtgacgttatgacgtatgttagggaaacttgtggctgttgcgattgtgagaaaaggtgtggggccttggacgtggtttttgtgatcgactcctcagagagcatcggttacacaaatttcactctggagaagaacttcgtcattaatgttgtaaatagactcggggcaattgccaaggatccaaagtcagagactggtaccagagtcggagtggtgcagtatagtcacgaaggtactttcgaggctatccagctggatgacgaaaggattgactctctctcctccttcaaagaggccgttaagaatttggagtggattgcggggggcacttggacccctagtgctcttaagttcgcttacgaccgcttgatcaaggaatcccgtaggcagaagacccgcgtgttcgccgtggtgatcacggacggacggcatgacccgagagacgatgatctcaacctcagggcgctgtgcgaccgagacgtcactgtaacagccatcggaatcggcgatatgttccacgagaaacacgagagcgagaatctgtacagcattgcgtgtgacaaacctcagcaggtgaggaacatgacactgttctcagacctggtggcagagaagttcatcgacgatatggaggatgtgttgtgccccgacccccagatcgtgtgtccagatctgccttgccagacggagctttccgtggcacaatgcacccaacgcccagtcgatatagttttcctgctcgatggaagtgagaggttaggggagcaaaattttcacaaggcccgcaggttcgtagaacaagtggccagaagactgacgctggcacgcagagacgacgatcccctcaatgccagggtcgcccttctgcaatttgggggacccggtgagcagcaggtggccttcccactcagccacaatcttacggcaattcacgaagcactggagaccacccaatacctgaacagctttagtcatgttggcgcaggtgtcgtacacgcgattaatgcaatcgttcgttcacccaggggcggggcgcggcggcacgcagaactgagcttcgtgttcctgactgatggcgtcacaggtaatgattctctgcatgagtcagcccattctatgcgtaagcaaaacgttgttcccaccgttctggctctgggctcggatgtggatatggacgtcctgactaccctgtctcttggtgaccgggccgctgtgttccacgaaaaggactacgacagtctcgcccagcctggcttttttgacaggttcatacgctggatctgttag

SEQ ID NO: 112677 - DNA, 2487 bp, synthetic construct
  misc_feature 1..2487: note = Description of Artificial Sequence: Synthetic coding sequence
  source 1..2487: mol_type = other DNA
atgctgcaagggacctgttcagtgctgctactctggggcatactgggggccattcaggcccaacaacaagaagtaatctccccggatacaaccgagcggaacaacaactgcccagaaaaaaccgactgcccgattcacgtctactttgtgcttgacacaagtgagtccgtcaccatgcaatctccgactgatattctcctttttcatatgaagcaattcgtcccacagtttatctcacaactccagaacgaattctatctagaccaggtcgctcttagttggcgatacggcggcctgcactttagtgaccaggttgaggtgttttcccctcctggttctgatagagccagcttcattaaaaaccttcagggaatcagttcttttcggcggggtacttttacagattgtgccctggccaatatgaccgagcagatacggcaagatcgctcgaaagggacagttcactttgcagtggtcataacagatgggcatgttaccggctcgccttgcggaggaatcaagcttcaggccgagcgggccagggaagagggcataagactattcgccgtcgccccaaatcagaacctgaaagagcaagggctcagggatatcgcatcaactcctcatgaactgtaccgcaatgattacgcaacaatgctgcccgattcaacggagatcgaccaggataccattaacagaataatcaaggttatgaagcacgaagcctatggggagtgctataaggtctcgtgcctcgagataccaggcccaagtggccctaagggctataggggccaaaaaggcgcgaagggcaacatgggggaacctggtgagcccggccaaaaaggaaggcagggggatcctggaattgaggggccaatagggttccctggccctaagggagtgcccgggttcaagggagagaagggagagttcggcgctgatggtcgtaaaggtgcgcctggcctagccggtaagaatggaaccgacggccagaaggggaagctgggcaggattggcccccccggctgcaaaggagaccctggaaaccgggggccagatgggtaccctggcgaggccggttcccctggggaaagaggtgaccaggggggcaaaggggaccctggccggccaggccggcggggtccacccggcgaaatcggcgcgaaggggtccaaagggtatcagggcaactctggggcacctggatctccaggtgttaagggagcgaagggaggtccaggtccgcgcggccctaagggggagcccggcaggaggggcgatcccggaactaagggttcaccagggtccgacggaccaaagggagagaaaggcgaccccggaccggagggcccccggggcttagccggggaagttggcaacaaaggtgccaagggcgatagagggctgccgggaccgcgcggccctcaaggcgctcttggggaacccggtaagcaggggagtcggggggaccctggggatgcggggccccggggcgactcaggacagcctggccctaaaggcgatcccggtcgtcctggtttttcatatccaggtccgcgtggagcccctggcgaaaagggcgaaccgggccccagaggccccgaggggggccggggggattttggcttaaagggtgagccgggaaggaagggggagaaaggggagccagcagatcccggcccgcccggtgagcctggaccaaggggtcctaggggtgtgcccgggcctgaaggagaacccggtcctcccggcgatcccggattaactgagtgcgacgtgatgacctatgtcagggagacttgtggatgctgcgactgtgaaaagagatgtggagcactagacgtagtgtttgtgatagattcttcagaaagcattggttatactaacttcacgctcgaaaagaattttgtcattaacgtcgtcaatcgccttggagcaatcgctaaggaccccaaatccgaaacagggacacgggtaggcgtggtgcagtattcgcacgagggcacattcgaagccattcagttagatgatgagcgaatcgacagcctgagtagtttcaaggaagccgtgaagaacctggaatggatcgccggcggcacgtggacaccgtctgcactgaaattcgcctacgaccggctcatcaaggaatcaaggaggcagaagaccagagtgttcgctgtggtgattaccgacggcagacacgaccccagagatgacgacttaaacttgagagccctgtgcgatcgcgatgtgaccgttaccgccataggcattggagatatgttccatgagaagcatgagtcggagaacctctattctattgcctgtgataagccacagcaagtccgtaacatgacattattctcagatcttgtggcagagaagtttatcgatgatatggaagacgttttgtgcccagaccctcagatcgtctgtccagacctgccttgtcaaacagggttggacggcgcagtactgtgttag

SEQ ID NO: 112678 - DNA, 2757 bp, synthetic construct
  misc_feature 1..2757: note = Description of Artificial Sequence: Synthetic coding sequence
  source 1..2757: mol_type = other DNA
atgctccaaggcacctgtagtgtgctgctgttgtggggtattcttggagccatccaggcgcagcagcaggaagttatatcccctgataccacagagcgcaataataactgtcctgaaaaaaccgactgtcccatacacgtctattttgttcttgacacaagcgaatctgtgactatgcagtcccccactgacatcctcctgttccacatgaagcaattcgttccccagtttatctcacagctgcaaaacgaattttatctcgatcaggtggcccttagttggagatacggaggcttgcatttcagcgatcaggtggaagtgttctcccctccaggaagcgacagggctagctttataaaaaatttgcagggaatctcctccttcagacgaggcacattcaccgactgcgccttagccaacatgaccgaacagatcagacaagaccgcagcaagggtaccgtgcacttcgccgtggtgataaccgatggacacgtcactggctctccttgcgggggcatcaaactgcaagctgaacgagcccgggaagaagggattagactgttcgcggttgcacctaaccagaatctcaaagaacaaggattgcgagatatcgcctccacacctcacgaactgtaccgcaacgattatgcgacaatgttgccagactccacagaaattgatcaggatactatcaaccggataatcaaagttatgaagcatgaagcatacggggagtgttacaaagtctcctgcctagaaatccccggtccatcaggtccaaagggctacaggggccaaaaaggagccaagggtaacatgggagaacccggcgagccaggccagaaaggtcggcagggagaccccggaatcgaagggcccatcggcttccccgggccgaagggagttccaggttttaaaggagaaaagggggagttcggagctgacggtcgaaagggcgcccctggactggccggaaaaaacgggaccgatgggcagaaggggaaactgggccggatcggcccaccaggctgcaagggggatcccggtaacagaggccctgacggctatcccggcgaagccggatcacctggcgaacgaggagaccagggggggaaaggggacccaggtcggcccggaagacgcggtccaccaggcgagattggggccaaagggtccaagggttatcagggaaactccggcgctccaggctcccccggggtaaaaggggccaaagggggtcccggtccacgcggtcctaaaggagagccaggccggaggggcgaccccgggactaagggttcccccgggtccgatggacccaagggagaaaaaggtgacccagggcccgaaggccccagagggcttgccggggaggtgggtaataagggcgccaagggcgataggggtctgcctggaccccggggaccccagggggccttgggcgagccaggcaagcaagggtccagaggcgaccccggtgacgcaggccccagaggagactctggacagcctgggcccaagggcgaccccggtcggccaggattcagctaccccggtcctcgcggggccccaggagaaaaaggcgaaccagggcctcgagggcccgaaggagggcgaggtgattttggcctgaaaggagaaccagggcgcaaaggagaaaagggggagcctgctgatcccggaccccccggggagcccggaccaagaggacccaggggcgttcctgggcccgagggagagcccggacccccgggcgaccccggcttgactgaatgtgacgtgatgacctatgttcgcgagacgtgtgggtgctgcgactgcgaaaaaaggtgtggcgcacttgacgtggtgtttgtgatcgatagctctgaaagcattggttataccaattttacgttagaaaagaactttgtgataaatgtcgtgaatcgtctgggcgccatcgctaaggatccaaagagcgagaccggtacccgggtcggggttgtgcagtactcacatgagggaacctttgaagctattcagctcgacgacgagcggatcgactcactgagtagcttcaaggaggctgtaaaaaacctggaatggatcgccggaggaacctggacaccatccgctctaaagtttgcgtatgaccgacttataaaagagagcagacgacagaaaacccgtgtgttcgcagtggtcataacagatgggaggcacgaccctcgggatgatgatcttaatctccgagccttatgtgatagggacgttacggtcacggctattggcatcggagatatgttccatgaaaagcacgagagtgaaaacctatacagcatagcatgtgacaaaccccaacaggtgcgcaacatgacgctcttttctgacctggtggcagaaaagttcatagacgatatggaggatgttctgtgccccgatccgcaaattgtatgtcctgacctgccatgccagacggacgccccttggcccggaggtgagcctccagttactttccttagaacagaagagggacctgatgctacatttcccagaacaattcctttaattcagcagcttttgaacgcaaccgaactgacacaagatcccgcagcttactcacagctggtggcagtcttggtttatacagccgagcgcgcgaaattcgcaaccggagtggagaggcaggattggatggaactattcatagacacttttaaattagtgcatcgggatatagttggtgatcccgagacagctctcgctctgtgctag

SEQ ID NO: 112679 - DNA, 2757 bp, synthetic construct
  misc_feature 1..2757: note = Description of Artificial Sequence: Synthetic coding sequence
  source 1..2757: mol_type = other DNA
atgctgcagggtacctgtagcgtgctcctgctttggggcattctcggggccattcaggcacagcagcaggaggtgatctctcctgataccaccgaaaggaataacaactgccctgaaaagacggactgtcctatacacgtgtattttgtactcgacaccagtgaaagtgtcactatgcaaagtccgactgatatcctccttttccacatgaagcagtttgtgccacaattcattagccaattgcaaaacgagttctatctggaccaggttgctctctcatggcggtacgggggcttacatttttcagaccaggtcgaggtgtttagccctccagggagcgatagggcttccttcattaagaatctgcagggaatctcatcattccggagaggaaccttcacggattgcgcgctcgccaacatgaccgagcagattcgacaggacaggtcaaaggggacggtgcacttcgccgtagtgataacagacggccacgtgaccggctctccctgcggcggcataaagctgcaggctgaacgggcccgagaagaaggaattcgccttttcgccgtggccccaaatcagaacctgaaggagcagggcttaagagacatcgcatcaacaccccatgagctctaccggaatgactacgcaacaatgttgccagacagcaccgaaatcgaccaggataccattaacaggataatcaaggttatgaagcacgaggcctacggggaatgttacaaggtctcctgtttggaaatcccgggcccaagtggccctaagggctaccgggggcaaaaaggtgcaaagggcaacatgggcgaacccggcgagcccggtcagaagggtcgtcagggcgatcctgggatcgagggcccaattggcttcccgggaccaaaaggggtgcccggctttaagggcgagaagggggagtttggagctgatgggcgaaagggcgcccccggattggcaggcaaaaacggtaccgacggtcagaaggggaagctaggcaggattggcccacctggctgcaagggggatccgggaaaccgaggacccgatggctatccgggtgaggccggctctcccggggaaaggggcgaccagggcgggaagggcgatcccggtcggcccggtcggcgtggaccacctggagagattggcgccaagggcagcaaaggttaccaagggaacagtggtgccccagggtcccctggcgtgaaaggagctaagggcggccccggacccagagggcctaagggggaaccaggcagacgaggcgaccctggaaccaaaggatctccggggagcgatgggcccaaaggtgagaagggggatcctggccccgaagggccaaggggactggctggtgaagtgggaaacaaaggcgccaagggcgaccggggcttgccgggaccccgcggaccacaaggagcactaggggagcccgggaagcagggctctagaggggacccaggggatgcagggccacgcggggacagcgggcagccaggacccaaaggagatccagggaggcctggattctcttaccctggacctcggggggctcctggcgagaagggcgaacccggaccacggggtccagagggcggaagaggtgattttggtttaaagggtgagcctgggaggaagggagaaaagggcgaaccagcagaccccgggcccccaggggagccggggccaagaggcccgcgcggtgtcccaggacccgagggcgaacccgggcctcctggcgaccctgggctgactgagtgtgatgtcatgacatacgtgcgagaaacctgcgggtgctgcgactgtgagaagcgatgtggtgcacttgacgtggtgtttgtcattgactcttccgagtccattgggtacacaaacttcacattggagaaaaattttgtcatcaatgtcgtgaatcggcttggcgccatagcaaaagaccccaagtccgaaaccggcactagggtcggtgtcgtgcagtatagtcacgaaggaacctttgaggcaatccaactcgatgatgagcgcattgattccttatctagctttaaagaggccgtgaagaatctggaatggattgctggcggtacatggacccccagcgctctgaagttcgcgtatgaccgcttgatcaaggagagcaggagacaaaaaactcgcgtattcgccgtcgtcatcacggatggtcgacacgacccacgcgacgacgatcttaacctgagagctctttgtgaccgagacgtgacggtgactgctataggcattggagacatgtttcacgagaaacacgagtctgaaaacctgtacagcattgcctgcgacaaaccccagcaggtcagaaacatgacccttttctcggatctcgtagctgagaagttcatcgatgatatggaggacgtcttatgtcccgacccgcagatcgtttgcccagatcttccctgtcaaacagatgccccatggcctggaggagagccaccagtcacatttctgcgaaccgaggaggggccagacgctacattccccagaaccatccctctgatacagcagctgctgaatgctaccgaactgacacaggaccccgctgcctactctcagctagttgccgttctcgtgtatacagcagagcgggccaagtttgctacaggtgtagagcgccaggactggatggaactgttcatcgacacttttaaactggtacatagagatatcgttggggacccggagacagctctggcactgtgctag

SEQ ID NO: 112680 - DNA, 2487 bp, synthetic construct
  misc_feature 1..2487: note = Description of Artificial Sequence: Synthetic coding sequence
  source 1..2487: mol_type = other DNA
atgttgcaaggaacctgctccgtgctccttctatgggggatcctgggagctattcaggcccagcagcaggaggtcatctcgcccgatacgaccgagaggaacaataactgccccgagaagacagattgtccaatccatgtctacttcgttcttgacacctctgaaagcgtaaccatgcagtctcccactgatattctccttttccatatgaagcaattcgtccctcagttcataagccagttgcaaaatgagttttaccttgaccaggtcgcactatcctggcggtatggtggacttcacttttccgatcaggtggaggtgttcagtcctccaggcagtgaccgtgctagctttataaaaaatctgcagggaatcagcagttttagacgaggcacctttactgactgtgccctcgccaacatgactgaacagattcggcaggacaggtctaagggaaccgtgcacttcgccgtggttattaccgacggccacgttaccggatcaccttgcggcggaattaagctccaggcagaacgcgctagggaggagggtatcaggctgttcgccgtggctccaaaccaaaacctgaaagaacaggggctgcgagatatcgcaagtacaccccacgagctgtatcggaatgactatgctactatgttgcccgacagtaccgaaatcgaccaggatactattaatagaataattaaggtgatgaagcacgaagcctacggtgaatgttataaggtttcttgcctcgaaatcccaggtccgtcaggcccaaaagggtaccgtggccagaagggagcaaaagggaatatgggtgagcccggggagccaggccagaagggtcgccaaggtgaccccggcatcgaaggcccaatcggatttccgggcccaaagggggtgccaggattcaagggcgagaagggggagttcggagcagatggccgaaaaggagctcccgggctggccggcaagaacggtaccgacgggcagaagggtaaactgggccgaattggcccgccaggctgcaagggcgacccgggaaaccgaggtcccgacggttatcccggggaggccgggtccccaggtgagagaggcgaccagggagggaagggagacccagggcgtccaggtcggcgcggacctcctggggaaatcggcgccaagggttcgaaaggataccagggcaatagcggggcccctgggtctcctggagttaagggtgctaaaggcgggcccggaccccggggcccaaagggtgagcccggcaggcgtggtgaccctgggacaaaagggtccccgggctctgatggccctaagggtgagaaaggtgatccaggcccagagggtccaagagggctggctggggaggtggggaacaagggggctaagggtgaccggggcctcccagggccacgcggtccacagggggcattaggcgagcccggcaaacaagggtcccggggcgaccccggggacgccgggcccagaggggatagcgggcagcctggacctaagggcgaccccggtcgacccggcttttcgtatcccgggcctcgcggcgctcccggagagaagggggaaccagggccaaggggccccgaggggggccggggggactttggcttgaaaggcgaacctggcagaaagggtgagaagggcgagccagcagaccccggtcccccaggagaaccgggcccaagaggtccacgcggagtcccaggacccgagggggagcctggcccccccggcgatccagggcttaccgagtgtgacgtcatgacatatgtgagagaaacttgtggttgctgtgactgtgagaaaaggtgtggggcactggatgtggtgttcgtgatagattcatctgagtccatcgggtatacaaacttcacattggagaagaacttcgtaatcaacgtggtcaaccgcctgggagcgattgcaaaggaccccaaaagtgaaacagggacccgggttggcgtggtgcagtactcccatgaggggacttttgaggccattcaacttgacgatgaaaggattgactccctatcgtcttttaaggaggctgtgaagaatctcgagtggatcgccggtggtacctggaccccatccgcactgaagtttgcttacgaccgcttaatcaaagagagtagaagacagaaaacaagagtgtttgcagtcgttattaccgacggcaggcacgacccaagggacgatgacctgaaccttagagctttgtgtgatagggacgtgactgttacagccatcgggatcggagatatgttccatgaaaagcatgagtccgaaaacctctatagcattgcctgcgataaaccacagcaggttcgcaacatgaccctcttcagcgatttagtcgcagagaaatttatagatgatatggaggatgtcctttgtcccgaccctcaaatcgtctgtcctgacttaccttgccagaccggccttgacggtgcagtattgtgctag

SEQ ID NO: 112681 - DNA, 543 bp, synthetic construct
  misc_feature 1..543: note = Description of Artificial Sequence: Synthetic coding sequence
  source 1..543: mol_type = other DNA
atgcttcaggggacatgttccgtgctgctgctctgggggatcttgggagctatccaggcccaacagcaggaggtgatcagccctgataccacagagcgtaataacaattgcccagaaaagacagactgcccgattcatgtgtatttcgtactggacactagtgagtctgtaacaatgcagagtcctactgatatcttactcttccacatgaaacaattcgtgccacagttcatctcccagcttcaaaatgagttctacctggatcaggttgctctgagctggcgctatggtgggctgcacttttcagaccaggtggaagtttttagcccaccagggtccgatagggccagtttcataaagaatctccagggaatatctagcttccgtcgtggcacctttacagactgcgctctcgccaacatgactgaacagatccgacaagatcgctcaaaagggacagttcattttgctgttgtgattacagatgggcacgtgacaggaagcccatgcggaggcatcaaattacaggctgaacgggcatag

SEQ ID NO: 112682 - DNA, 2235 bp, synthetic construct
  misc_feature 1..2235: note = Description of Artificial Sequence: Synthetic coding sequence
  source 1..2235: mol_type = other DNA
atggccgtgttacctgggccactgcagttactgggggtcttattgacaatcagtctgagttccattcggctcatccaggccggagcctactacgggatcaagcccttgcctccccagatccccccacaaatgccgccacagattccacagtatcagccactggggcagcaggtcccgcacatgcccctcgctaaggacggcttggccatgggtaaggaaatgccacacttgcaatacgggaaggaatatccccacctgcctcagtacatgaaggagatccagccagcccctcggatgggtaaagaggccgtccccaaaaaagggaaggagatccccctagcttctctcagaggggaacaaggcccacgtggcgaacccgggccacggggccccccggggccacctggccttcctgggcacggcattccgggtatcaagggcaagccaggcccgcaggggtaccctggggttggcaaaccagggatgcccgggatgcccgggaaaccaggggcaatgggcatgcccggtgctaaaggagagattgggcagaagggggaaattggcccgatgggtatcccaggaccacaaggcccgcccgggccccatggtctaccaggcatcggaaagccaggcggacccgggcttccgggtcaacccggtccaaagggggatcgcgggccaaaagggttgccaggaccacaaggcctgagaggccctaagggggacaaaggatttggaatgcctggtgcgccaggagtgaagggcccgccaggcatgcatggccccccaggaccagtgggcctcccaggcgtaggcaaacctggggtgacaggttttccaggcccccagggccccctcggcaaaccaggggctcccggcgaacccggaccacagggcccgattggcgtgccaggtgtgcaggggcccccaggcattcccggcattggcaagcctggccaggacggaatccccggccaacctggatttcctggaggtaaaggagaacagggccttccgggtttgccgggaccaccaggtctccctgggatcgggaaaccaggctttcctggccccaagggcgataggggtatgggaggagtgccgggagctctcggaccaaggggcgagaaaggacctataggggctcctggtatcggcgggcctccaggagaacctggacttcctgggattcctggtcctatgggtcctccaggagccatcggatttcccggcccaaagggcgagggtgggatcgtgggaccccagggcccccccgggcccaagggagagccaggactgcaagggtttccaggtaagcctgggtttttgggcgaagtgggtcccccaggtatgagggggctccctggaccgattggccctaaaggagaagccggacaaaagggagtgcccgggctgcctggggttcccggccttctgggccccaaaggcgagccgggcataccaggggaccagggtttgcaggggcccccaggcatacctggaatcggtggcccttcaggccccatcggcccaccaggtatccctgggccaaagggagagcccgggctccctggaccacctgggtttcctggcattggcaaacctggagtagctgggttacacgggccaccaggcaagcccggcgctcttgggcctcaggggcaacccggactcccaggacccccaggaccaccgggaccccccggtccccctgctgtgatgcccccaactccccccccacagggcgaatatctcccagacatggggctgggaattgatggagttaaaccacctcatgcctacggggccaagaaggggaagaatgggggacctgcctacgagatgcctgcatttactgcagaactgactgcccccttccctccagtgggtgcacctgttaagttcaataaactgctttacaatgggcggcagaactataacccccagacagggatatttacatgcgaagtccctggcgtctattattttgcatatcacgttcactgcaagggaggtaacgtatgggtcgccctgttcaaaaacaatgagcccgtaatgtacacttatgatgagtataagaagggctttctcgaccaggcctcaggaagcgcagtgctgcttctcaggcctggggatcgggtttttttgcagatgcccagcgagcaggccgctgggctgtatgccggccagtacgtccactcaagcttcagcgggtatctcctgtacccaatgtag

SEQ ID NO: 112683 - DNA, 2235 bp, synthetic construct
  misc_feature 1..2235: note = Description of Artificial Sequence: Synthetic coding sequence
  source 1..2235: mol_type = other DNA
atggctgtgctgcccggccctctgcagctgctgggggttttgctaacaatttccctgtcaagtatccgcctcattcaggccggcgcttactacggaattaaacctctccccccccagattccccctcagatgccccctcagatcccacagtatcagccactggggcagcaggtcccccatatgccccttgctaaggacgggctggctatgggcaaagagatgcctcatctacagtacggaaaagaatatcctcacttgccccagtacatgaaggagattcagcccgcaccaaggatgggtaaagaggctgtgcctaaaaaaggtaaggagatccctctcgccagtctaaggggtgagcagggtccacgaggggaacccggtccaaggggacccccaggaccgccagggttgccaggtcacggaatacccggcattaagggaaagcctggaccccagggatacccaggagtcgggaagccagggatgcccggcatgccaggaaagccgggcgccatgggtatgccaggtgcaaagggggaaatcgggcagaaaggcgaaatcggacctatgggaattcccgggccacagggacccccaggcccccacggcttgccaggcattggcaaaccaggcgggcctggcctccctgggcagcccggccccaaaggtgaccggggccccaaaggcctccccggtccacagggtctgagaggaccaaagggagacaagggatttggtatgccaggagcaccaggtgtcaagggcccccctggcatgcatggtccccctggcccagtaggactgcctggcgtagggaaaccaggcgttactggctttcccggccctcagggaccactcgggaagcctggagcccctggtgaacccggcccacaggggcctataggcgtacccggagtgcagggtcccccgggtattcccggcattggcaagcccggtcaggacggcatccccgggcagcctggcttcccaggtgggaagggagagcagggcctgcctgggctccccggacctccgggccttcctggcattggaaaacccggtttcccgggacctaaaggggatagaggaatgggtggtgtgccaggggctctgggtccgaggggtgaaaagggacccatcggagcaccaggcatcggtggacctccaggcgagccaggcttacccggcatcccaggccccatgggccctcctggggctattgggttcccaggacctaagggcgagggaggcattgtcggcccacagggtcccccaggacctaagggagagcctggcctgcagggttttccagggaagccaggattcctgggagaggttggccctcctggcatgcggggcctgcctggccccatcggccctaaaggtgaggccgggcaaaagggggtcccaggactgcccggggtgcctggattgctcggccccaagggcgaacccgggattccaggcgatcagggtcttcagggaccccccggtataccaggtatcggagggccatctggccctatcgggcctcctggcattccggggcccaagggagaaccaggattacccggccctcctggcttcccggggattggcaaaccaggtgtcgccgggctgcacggccctcccggcaagccaggggccctgggcccgcagggacagcctgggctgccagggcccccagggcctccgggcccccccggacctccagcggtgatgccacctactcccccaccccagggagagtacctgcctgacatgggcctgggtattgacggcgtgaagccaccgcacgcctacggggcgaagaagggaaagaacggaggcccagcttatgaaatgcccgcttttaccgctgagttaactgcacccttccccccagtgggtgcccccgtcaagttcaacaagctattgtacaatggccgacagaattataacccacagacggggatcttcacctgcgaggtcccaggagtttattacttcgcctatcacgtccattgcaagggggggaacgtatgggttgctttgttcaaaaataacgaaccagtgatgtatacctatgacgagtataagaaggggttcctggatcaggcttccgggagcgctgtcctcctgctgagacccggcgacagggtgttcttacagatgccttcagagcaggccgctgggctgtatgcaggacaatatgttcactcatctttcagtgggtatctgctttatcctatgtag

SEQ ID NO: 112684 - DNA, 345 bp, synthetic construct
  misc_feature 1..345: note = Description of Artificial Sequence: Synthetic coding sequence
  source 1..345: mol_type = other DNA
atggcggtgttgcccgggcccttgcagctgctgggcgtgttgttgacaataagcctgagcagcattcgcctgatccaggccggagcttactatggcatcaagcccttgccccctcaaattccgcctcaaatgccacctcaaatccctcagtaccaaccactcggtcagcaggttccacatatgcctcttgctaaagacggactggccatggggaaggagatgccacatctgcagtacggcaaggaataccctcacctcccacagtacatgaaagaaattcaacctgctcccagaatggggaaagaggctgttccaaaaaagggcaaagagatccccttagcttag

SEQ ID NO: 112685 - DNA, 2061 bp, synthetic construct
  misc_feature 1..2061: note = Description of Artificial Sequence: Synthetic coding sequence
  source 1..2061: mol_type = other DNA
atggttgccgagcgcactcacaaagcagctgctaccggtgctcgagggccgggagagttgggagctccaggaactgtcgccttagtcgccgctcgagcagagagaggagcgcgcttaccctctcctgggtcttgcggcctgttgacattggctctttgtagcctcgctttatcgctcctcgcacactttagaaccgccgagctccaggcccgggtgctccggctagaggctgaaagaggcgaacagcagatggaaactgccattctgggtagagtgaatcagctgctggacgaaaagtggaagctgcactcgcgccgacggcgcgaggctccgaagacctcacctggatgtaactgtccgcccggtcctccgggacccactgggcgcccaggcctgcccggtgataagggagctattgggatgcctggtcgcgttggctcccctggcgacgctggcctcagcattataggacccagaggaccaccagggcagcccggcacaaggggttttccagggtttcccggccctatcgggctggatgggaagcctggccatcctggaccaaagggtgacatgggccttaccggcccacccggtcagccagggccacaaggacaaaagggggaaaaagggcagtgtggtgagtatcctcataggcttcttccccttcttaatagtgtacggttggctcctcctcccgtgatcaaacgccggaccttccagggggagcaatcgcaggcttctatccaggggccaccaggtcctcctgggccaccaggtccgtcggggcccctaggtcaccccggactccctggaccaatgggtccacctggactcccaggcccccccgggccgaagggggatccgggcatacagggctatcacggccgcaagggcgagaggggcatgcctgggatgcccggaaagcacggtgcaaaaggtgctccaggaattgcggtggccggtatgaagggggagccaggaatccctggcaccaagggtgaaaaaggggccgagggtagtcccggacttcctggactccttgggcagaagggcgagaagggggatgccggaaatagtatagggggcggtcgtggcgaaccagggcccccgggcctgcccgggccacccggaccaaagggcgaggccggtgtagatggtcaggttggacctcccggccagcccggcgacaagggcgagcgcggcgcagcaggcgagcaggggccagacggaccaaagggttcaaaaggggagccagggaagggagagatggtggactacaatggcaacataaatgaggcccttcaagaaatccgaacacttgctctgatgggaccacccggactgccagggcagatcggccccccgggagcccctggtatcccaggtcagaaaggtgaaatcggacttcccggcccccccggccacgatggagagaagggcccgcgggggaagcccggtgatatgggccccccaggcccccaaggccctcccggcaaagacggcccccctggggtgaagggagaaaacggccatcccggctcaccgggcgagaagggtgagaagggcgaaactggacaggcaggatcgcctggggaaaaaggcgaagcaggagagaagggcaatccaggagccgaagttccagggctgccgggcccggaaggacctccgggaccccccggcttgcagggagtgcccgggccaaagggtgaggccgggttggatggcgctaaaggggaaaaggggtttcagggggagaaaggagatcgtggaccccttgggctaccagggactcctgggcctatcggagtccccggacctgctggcccgaagggagagaggggttctaagggggatccaggcatgaccgggcctacaggcgccgccggcctgcctgggttgcatgggcctccaggggacaaggggaacaggggcgagagaggcaagaagggatcgagaggccccaagggggacaaaggcgaccagggcgcacccggtctcgacgccccctgccctttaggagaggatggactgcctgttcagggctgctggaacaaatag

SEQ ID NO: 112686 - DNA, 1338 bp, synthetic construct
  misc_feature 1..1338: note = Description of Artificial Sequence: Synthetic coding sequence
  source 1..1338: mol_type = other DNA
atgacaggatctagtttttctctggcccaccttctgatcatctctggactgctttgctatagcgccggctgtttagctctccctagcttagaccagaagaaaagaggtggccacaaagcctgttgtctcctgaccccgcctcccccacccttgtttccccctcccttttttcgagggggtcggtcgcctctgctttcccccgacatgaaaaaccttatgctggaattggagacgtctcagtcgccatgcatgcagggctctctcggttcacccggcccccccggtcctcagggacctcctggcctcccaggcaaaacaggaccaaagggcgaaaagggagaattgggaaggcccgggcggaaaggcaggcccggtcctcctggcgtccctgggatgcctggccctatagggtggcctggtcccgagggacccaggggggagaaaggcgacctgggaatgatgggactgccaggttctcgtggcccaatgggatctaaaggatatcctggttcccggggcgaaaagggcagcaggggggaaaagggggacctaggtcctaagggggagaagggattccccggcttcccaggaatgctgggacaaaagggggagatggggcccaaaggtgaacccgggatcgcagggcatagaggacctacgggacgaccgggcaagagaggaaaacagggccaaaagggggattctggcgttatggggcccccagggaaaccgggtccgagcggccaacctgggaggccagggccccccggacccccacctgcggggcagcttattatgggccctaagggtgagcggggcttccccggtcctcctggtagatgcctttgcggacccacaatgaacgttaataacccttcctatggcgagagcgtgtacggcccaagctcaccacgtgttcccgtgatcttcgttgtgaacaaccaagaggagttagagaggctcaatacacaaaacgcaatcgccttcagacgtgaccaacgatctctatattttaaggattccctgggatggctgcccattcagctcacccccttctatcccgtggattataccgctgatcagcacggaacgtgcggcgatggtctactgcagccgggggaggagtgcgacgatgggaacagtgacgtcggcgacgattgcatcagatgccacagggcttactgcggtgacggacatcgtcacgaaggggttgaggactgtgacggcagcgactttggctatttgacttgtgagacatatctgccagggagttatggcgacctccagtgcactcagtactgttatatagattctactccctgtagatactttacctag

SEQ ID NO: 112687 - DNA, 876 bp, synthetic construct
  misc_feature 1..876: note = Description of Artificial Sequence: Synthetic coding sequence
  source 1..876: mol_type = other DNA
atggttgtgctgaatcctatgacacttggcatttatctgcagctgtttttcttatcgattgtcagtcaacccaccttcattaattccgtacttcccatctcggcagccctaccatccctggaccagaagaagcgcggaggccataaagcctgttgcctcctaacgcccccaccaccgccactttttcctcctccatttttccgcggcggacgatcacctctgctctctccagacatgaaaaacctgatgttggaattggagacgagccagagcccttgtatgcagggctcattgggatcaccggggccccctgggccacaaggcccaccgggcctccctggtaaaacaggacctaaaggagagaagggggagctgggtcggccaggacggaagggcagaccgggacccccaggagtgccagggatgcccgggccaatcggctggccggggccggaagggcccagaggcgagaagggcgacctcggcatgatgggtttgcctggtagccgaggccccatgggtagcaaaggctaccctggaagccgaggcgagaaggggtctagaggcgaaaagggagacttaggaccgaaaggggagaaaggcttcccggggtttcccgggatgctgggacagaaaggggagatgggaccaaaaggggagcccggtatcgctggccataggggacccaccggaagacccggaaaacggggaaaacagtccagtagaaccccttgcacactcccccggaggcccccagtgccatgcggacaggggtctcgtagtccggtcaccgtggtggccggcaaagaaagccaggcatgccttctgccgaggttcgaggaagattatataagctcaggaaccgagcgcggatag

SEQ ID NO: 112688 - DNA, 1266 bp, synthetic construct
  misc_feature 1..1266: note = Description of Artificial Sequence: Synthetic coding sequence
  source 1..1266: mol_type = other DNA
atggttgtccttaaccccatgaccctgggaatatatcttcaactgtttttcttgagtattgtgtctcaacctacgttcatcaacagcgtgctgcctatctcagcagctcttccatctctggatcagaagaagcgtggaggccacaaagcgtgctgtctccttacacctccgccaccccctctattccccccgcccttttttaggggaggcagatccccgggacctcccggattaccagggaaaacaggacccaagggagaaaaaggagaactgggaaggccaggcaggaaaggccgccctggtccacctggtgtccctggcatgccaggacccattggctggcccgggccggagggacctaggggagaaaaaggcgacctcgggatgatggggctaccaggaagccgggggccaatggggagtaaggggtatccggggagccgtggggaaaaggggtctagaggagaaaagggagatctgggacctaagggagagaagggtttccccgggtttccagggatgctcggtcaaaagggcgagatggggcccaaaggcgagccgggtattgccggacacagagggccgaccggccgacccggcaagagggggaagcaaggacaaaagggcgattccggtgttatgggacctcctggaaaacccggaccttccgggcaacccgggcgccccggtccacccggcccgcccccagccggccagttgatcatgggtcccaaaggagagcgcggtttccctggtcccccaggacgatgtctgtgtggaccaacaatgaatgtaaacaaccccagctatggtgaatcggtctatggtcctagcagtcccagagtgccagtaatctttgttgtgaataatcaggaggagctggagaggctgaacacacaaaacgctatcgcattccggcgggaccaacgctctctatattttaaggacagtctcgggtggctgcccatccagctcacaccattttacccagtggattacacagccgaccagcacggaacatgtggtgacggtctcctccagcctggggaggaatgtgacgacggtaacagtgacgtgggagatgactgcattcggtgtcaccgcgcttattgtggtgacgggcacagacatgagggcgtggaagattgtgatggtagcgactttggctacctgacatgtgagacatacctgcctgggtcgtacggggacctgcagtgcacccagtattgttatattgattcgacgccctgtcgctactttacctag

SEQ ID NO: 112689 - DNA, 1341 bp, synthetic construct
  misc_feature 1..1341: note = Description of Artificial Sequence: Synthetic coding sequence
  source 1..1341: mol_type = other DNA
atggtggtactgaatcccatgacccttggaatttatttacagctctttttcctgagtatcgtgtcacagccaacctttattaattccgtgcttccaatctctgctgccttgccctcccttgaccagaaaaagcggggcggccacaaagcctgttgtttactcaccccacctccacctccactctttcccccacccttctttcgaggcggacgaagtccacttctctccccagatatgaaaaacttaatgttagagcttgagacaagtcagagcccctgcatgcagggcagcctgggatccccaggcccgccaggaccgcaaggcccccccggactgccaggcaagactggacccaaaggagaaaaaggccgccccggccctcccggtgtcccaggcatgcctgggcccattggctggcccgggccagaggggccacgtggagagaaaggagatcttggcatgatgggactgcctgggtcacgcggccccatgggaagcaaaggttaccccggcagtagaggcgagaagggaagtcggggtgaaaagggcgatttgggacccaaaggtgagaagggtttccccgggtttccagggatgctggggcagaaaggcgagatgggccccaaaggcgaaccgggaatcgccgggcacaggggacctacgggaaggcccggcaaaagaggtaaacaggggcagaaaggcgatagtggcgtgatggggccccctggaaaaccaggaccctcaggccagcccggaagacccggtcccccaggcccccccccagccggtcaactgatcatggggcctaaaggtgagcgcggctttcccggacctcctgggcgatgcctgtgcggcccgacaatgaacgtgaacaatccatcttatggcgaatcagtttatggtccttcttcgccgagagtgccagttatctttgtggtcaataaccaagaggagctcgagagactgaacacgcaaaacgctatagcattccgacgcgatcagagatctctgtactttaaggattccctgggatggttacctatccagctgacgccgttttatcccgtcgattataccgcagaccagcacggcacatgtggtgacggtctgcttcaaccgggcgaggaatgcgacgatggtaactcagatgtgggagatgattgcatacggtgccaccgggcttattgcggagatggtcaccgccacgaaggtgtcgaggactgtgatggatctgattttggctacttgacctgcgaaacctacctcccaggctcctacggagatctgcagtgcactcagtattgctatattgattcgacaccatgtcggtattttacctag

SEQ ID NO: 112690 - DNA, 1368 bp, synthetic construct
  misc_feature 1..1368: note = Description of Artificial Sequence: Synthetic coding sequence
  source 1..1368: mol_type = other DNA
atggtagtgctgaaccccatgacactggggatttacttacaacttttcttcctgagtatcgtgagccaacccacatttataaacagcgttctccccatttctgcagcgcttcccagtctggaccagaaaaaaagaggcggccataaggcatgctgcctcttgacccctccaccaccacctctctttccacccccctttttcaggggtgggcggtcccctctcctcagtcctgacatgaagaatctcatgctggaactcgagacgagccagtcaccttgtatgcaaggctcgcttgggtccccagggccgcccgggccccagggcccccccggactgcctgggaaaacgggaccaaagggggaaaaaggggagctgggccgaccaggaaggaaggggcggcccgggccgcccggtgtccctggtatgcctggcccaatcgggtggcctggtccggagggtccacggggtgaaaagggagatctcgggatgatgggtttgcctggttcccgaggtcctatgggctccaaaggttacccgggcagtcggggtgagaagggatccagaggagaaaagggcgatcttgggcccaagggagaaaaggggtttcccggatttcctggaatgctgggacagaagggagaaatgggccctaagggagagcctggaatcgccggccatagaggccctaccggcagaccagggaagcgcgggaagcagggacagaagggggattctggtgtgatgggtccaccgggcaaacccgggcccagtggccaacctggtaggccagggccacccggacccccccccgccggccaactaattatgggtccgaagggggagaggggctttccaggaccacctggtcgttgtctgtgcggtcccactatgaacgtgaataaccctagctacggggagagcgtgtatggaccatcttcacctcgagtgcctgtgattttcgtggtcaacaatcaggaggaactcgagcgtctcaatacccagaatgccatagcatttcgaagagatcagcgctctctctacttcaaagattccctgggctggttgccaatccagttgacacctttttatcctgttgactacacagccgatcagcacggaacctgcggcgacggcctattacagccaggggaggagtgtgatgacggtaactcagacgttggcgacgattgcattcggtgtcatcgtgcttattgtggggatggccacagacacgaaggagttgaggactgcgacggctcagatttcggctacctgacatgtgagacttatcttcccggatcatacggagacctgcagtgtactcagtattgctacattgattctactccatgtaggtactttacctag

SEQ ID NO: 112691 - DNA, 1338 bp, synthetic construct
  misc_feature 1..1338: note = Description of Artificial Sequence: Synthetic coding sequence
  source 1..1338: mol_type = other DNA
atgacaggatcaagtttctcactcgcccatctgctgatcatcagcggcctgctatgctattccgccgggtgtctggctctcccgagtctggaccaaaagaagaggggaggccacaaagcgtgctgcctgcttactcccccacctcctcccctgttccccccgccattcttcagaggcgggagatccccactcctcagccccgacatgaagaacctgatgctcgagctcgagacctcccaatctccctgcatgcaggggagccttggtagcccgggcccacctggccctcaaggccctccaggcctgcctgggaaaactggccccaagggagagaagggtgagctgggtcggccggggaggaagggccgccctggcccccccggggtgccaggtatgccaggtcctattggctggcccgggcctgagggccctcggggagagaagggagacttgggaatgatgggtctgcctggtagccgagggccaatgggatcaaaaggctacccagggtcgcgcggtgaaaagggaagcagaggtgaaaagggggatctcggccccaagggggaaaagggatttccaggtttccctgggatgctcgggcagaaaggggagatgggtcctaagggggagcccggcatcgccgggcacaggggcccaacagggcgccctggaaaacggggaaaacaggggcagaaaggggactctggtgtaatgggtccccccggcaaacctggtccctctggtcagcctggccgccctgggccacccggcccgccccccgcgggccagttgatcatgggccctaaaggtgagcgggggttccccgggccgcctggaaggtgcctctgcggcccgaccatgaacgttaacaatcctagctacggcgagtccgtgtacgggccgtcttcacccagggtaccggttatctttgtcgtaaataaccaggaggagctggagcgcctgaacacccaaaatgcaattgcattcagacgggatcaacgcagcctgtatttcaaagactcccttggatggctgcccattcagctgacacccttctacccagttgactataccgctgatcagcatgggacatgtggagacggattactccagccaggcgaggagtgcgatgatggaaactccgatgttggggatgactgcatcaggtgtcaccgggcttactgcggtgacggacaccgtcacgagggggttgaagactgcgatggctcagactttggatatctcacctgcgagacttacctcccaggatcctacggcgacctccagtgcactcagtactgctatatagattctaccccttgccggtactttacctag

SEQ ID NO: 112692 - DNA, 585 bp, synthetic construct
  misc_feature 1..585: note = Description of Artificial Sequence: Synthetic coding sequence
  source 1..585: mol_type = other DNA
atcagtggcttactgtgctactccgccgggtgtctcgccctgccctcccttgaccagaagaaaaggggcgggcataaagcttgttgcctcctgacacctccccccccccccttattccccccaccattttttcgcgggggcaggtctccaggccctccaggcttacccggtaagacaggacccaagggagaaaaaggcgaacttggccggcctggcaggaaaggaaggccgggcccccccggtgtgcctggaatgcctgggcctatcggctggcccggtcctgaaggtccccggggtgaaaagggagacctggggatgatggggctccctggctcaagggggccaatgggaagcaagggctatccgggcagtaggggcgaaaagggtagcagaggtgaaaagggcgatcttggacctaagggagaaaagggctttccaggcttcccggggatgcttgggcagaaaggggaaatgggccctaaaggagagcctggaatagccggtcatcgaggccccacgggcaggcctggtaagaggggcaaacaaggccagaaaggtgattcaggggtgatggggcctccttag

SEQ ID NO: 112693 - DNA, 1338 bp, synthetic construct
  misc_feature 1..1338: note = Description of Artificial Sequence: Synthetic coding sequence
  source 1..1338: mol_type = other DNA
atgactggatcgtcgttcagcttagcccacctcctcatcatcagcggcctactgtgttacagcgccggttgtctggcgctacccagcctcgatcaaaagaagcgaggaggccacaaagcttgctgcctcctgactcccccacctcctcctctctttccacctccttttttccgtgggggccgcagcccacttttgtctcctgacatgaaaaacttgatgctggaattggagacctcgcagtcaccctgcatgcaggggtccctgggcagccctggcccgcccggaccccaggggccacctggactcccggggaagactggcccgaagggggaaaaaggcgagctcggacggcctggcagaaaagggcggccaggacccccaggtgtaccaggcatgcccgggccaattggatggcccggcccggaagggccacggggggaaaagggggatcttggcatgatgggtctcccgggatctcgaggccccatgggatctaaaggatacccaggaagcaggggcgagaagggttcccggggggaaaagggggatctgggccctaagggggagaaatgtaaccctttgctattgttgtttccaagctttcagggcgagatgggaccaaaaggggagcctggtatcgctggccacagagggcctactggcaggccaggcaaaagaggcaaacagggtcagaaaggggactcgggggtcatgggcccacccggtaaaccaggcccctctggccagcccggccggcccggccctcccggcccaccacccgcaggacaactgatcatggggcccaaaggcgagagaggtttcccaggcccccccggaagatgtttgtgcgggcccacaatgaatgtcaacaaccccagctacggtgagagtgtatacggcccctcctcaccaagagtgcccgttattttcgtagtcaacaaccaggaggagctggagaggctgaacactcagaatgcgatcgctttcagacgggatcaacgctccctgtatttcaaggacagcttgggctggctgccaattcagttgactcccttttacccggtcgactatactgccgatcagcacgggacatgtggcgacggactactccaaccaggggaagaatgtgatgacggaaacagtgacgtgggggatgactgtattcgatgccatcgtgcctattgcggagatggccaccgacacgagggcgttgaagactgcgacggtagtgatttcggctatctgacctgcgagacttatttgccaggcagctatggagaccttcagtgcacacagtactgctacatagacagtacgccatgcagatatttcacctag

SEQ ID NO: 112694 - DNA, 2061 bp, synthetic construct
  misc_feature 1..2061: note = Description of Artificial Sequence: Synthetic coding sequence
  source 1..2061: mol_type = other DNA
atggcagatcggagaagagcatggaatacagaggatgacctgcctgtctacctggcccggcctgggtcagccgcacagactcctagacagaaatatgggggtatgttcgccgccgtcgaaggagcctatgagaacaagacaatagattttgacgcttacagcgtcggaaggcgtggttccgcccggacgccaaggtctgccggccgaccagatgccgttggcctgccaggacctggaggaagtgaagacaccgcatctgatgtgtccgagccctccgggtctgccgtatcaagcccgggcgaaagggatgaacgcccccctactctcaggattagaaggcccgctccacgggatttgcccctcggtcgcgacaacggccaatcagaccgcttgcttattaaaggagggcggatcatcaacgacgatcagagcctgtatgccgatgtatacttagaagacggcctcatcaagcagataggcgaaaacctgatcgtacccggtggcgtgaagaccattgaggcaaatgggaggatggtaatccccggaggcatcgatgttaatacataccttcagaagccctctcagggtatgactgctgcggacgacttctttcaggggacaagagccgcacttgtagggggaacaacaatgattatagatcacgttgtcccggagcccggcagttctttgttgacgtcattcgaaaaatggcatgaagcagccgataccaagtcctgctgcgactatagcctccacgtcgatataactagttggtatgatggtgtcagggaggagcttgaagtactagttcaggataaaggtgtgaactcattccaggtatacatggcatacaaggatgtataccagatgagcgatagccagctgtacgaggcttttacgtttctgaagggactgggagctgtaattctcgtccacgcagagaatggtgacctgattgctcaggagcagaagagaatcctcgaaatgggaattaccggaccagaggggcacgctctttccaggcctgaagaactcgaggccgaggctgtgtttcgtgcaatcacgatcgccggcaggattaattgccccgtgtacattacaaaggtgatgagtaaaagcgccgccgacatcatcgccctggcgcgtaaaaaaggcccactcgtgttcggcgagcccatcgccgcatctctcggcaccgatggcactcattactggtccaaaaactgggcaaaagctgctgcttttgttacatccccccctctgtctcctgatccaaccacaccggactacctgacaagtctgctcgcatgtggcgacctccaggtcacgggcagcggccactgcccctactctactgcccaaaaggccgtgggtaaggacaattttactctaatcccggaaggagtcaatggcatagaggagagaatgacagtggtgtgggataaggccgtcgccaccggcaaaatggatgaaaaccagtttgtcgccgttacatcaacaaatgccgcaaagattttcaatctctacccccgcaagggccggatagcggtaggcagcgatgccgatgttgttatctgggacccagacaaattaaagaccattactgcaaaatcacataaatccgcagtggagtacaatatctttgagggtatggagtgccacggcagccccttagtggtgatttcacaaggaaaaatagtattcgaggatggcaacatcaacgtgaataaaggtatgggccgcttcatacctcgtaaggcctttccagagcacttataccagcgcgtcaaaattagaaataaggtattcgggctgcaaggagtcagccgtgggatgtacgacggaccagtgtatgaggtacctgctactccaaagtatgccaccccggccccatctgctaaatcgagcccctcaaaacatcagccacccccaataagaaacctccaccagagtaacttttcactttccggagcccagatcgatgataacaaccctaggcgcactggccataggattgtcgcaccccctggaggacgttcaaatattacaagcctgggatag

SEQ ID NO: 112695 - DNA, 1719 bp, synthetic construct
  misc_feature 1..1719: note = Description of Artificial Sequence: Synthetic coding sequence
  source 1..1719: mol_type = other DNA
atgagttatcagggcaagaagtctatccctcacataacctccgacagactgctaattaaggggggtagaattataaacgacgatcagagcctttacgccgacgtgtacctcgaagacgggctgataaaacagattggcgaaaatcttatcgtgcctgggggagtgaaaaccattgaggctaacggacgtatggtcatcccgggcggcattgatgtgaacacctatctgcagaaaccctcacaaggtatgaccgctgctgacgacttctttcagggcacccgggctgctttagtcgggggcacgaccatgatcatcgatcacgttgtgcccgaacctggaagctcgctgctgacttcctttgagaaatggcacgaagccgctgataccaagtcatgttgcgattattctctgcacgtagacatcacatcttggtacgatggtgttagagaggaactcgaagtcctggtgcaggataagggggtgaattccttccaggtgtatatggcttacaaggacgtgtaccaaatgtctgatagtcaactgtacgaagccttcactttcctcaaagggctgggtgcagtgatccttgtgcacgctgaaaatggggatctgattgcccaggaacagaaacgcatactggaaatgggtatcacgggacctgaaggacacgccctgtcaagaccagaggagcttgaagccgaggctgttttcagggccatcaccatcgctggccgaattaattgtcccgtatacatcacaaaggtgatgtccaagagtgccgccgacattattgcccttgcccgtaaaaagggtcctttggtgtttggggaacctattgcagcgagtctagggaccgacggcactcattactggagcaaaaactgggccaaggcagccgccttcgtgactagccctccactgtctcctgaccccaccaccccagactatctcacatccttactcgcctgtggcgacctgcaggtcaccggatcaggccactgtccttattcaactgcccaaaaggcagtgggcaaggacaacttcacgctgatacctgaaggcgtaaatggtattgaagaacgtatgaccgttgtctgggacaaagccgtggctaccgggaagatggacgagaatcaatttgtcgcggtaacttcgaccaacgccgcgaaaatcttcaatctctacccacgtaagggtcgcatagcagtggggtcggacgccgatgtggtcatttgggaccccgacaagcttaagactataacggcgaaaagccacaagtctgcagtggaatataacatcttcgagggaatggaatgtcacgggagtcctttagtggtgattagccagggaaagattgtgttcgaggacggcaacatcaatgtcaataagggcatggggcggtttatcccacgcaaagctttcccggagcacctgtatcaacgagtgaagatccgtaacaaggtgttcggcttgcaaggggtgtctagaggaatgtacgacggcccagtgtatgaggtgccagcaacacccaaatacgccacccctgctccaagcgctaagtcaagtcccagcaagcaccagcccccacccatcagaaaccttcatcaaagtaattttagtctaagtggcgcacagattgatgataacaaccccaggcggactgggcatcggatcgtcgccccgcccggtggaagatcaaatatcactagtctgggctag

SEQ ID NO: 112696 - DNA, 1713 bp, synthetic construct
  misc_feature 1..1713: note = Description of Artificial Sequence: Synthetic coding sequence
  source 1..1713: mol_type = other DNA
atgcagaagatgaataatgaagttgtagacaaatcggatagacttctgatcaaagggggacgaattatcaatgacgatcagagcttgtatgcagatgtttaccttgaggatggtctcatcaagcagattggagaaaacctcattgtccccgggggcgttaagaccatcgaagctaacggcagaatggtgattcccggggggattgatgtgaatacatacctgcaaaaaccttcacaaggaatgacggccgctgatgacttctttcaggggactcgggcagccctggtcggaggcacaaccatgatcatagaccatgttgtgcctgagcccggcagtagcctgctaaccagctttgaaaaatggcacgaggccgcagatactaagtcatgttgtgattacagcctacatgtggatattacttcttggtatgatggcgttcgtgaagaattagaggtcctggtgcaggacaaaggagtgaacagttttcaggtatacatggcatacaaggatgtttaccagatgtcggactcccagctctatgaagctttcacattcctgaagggtcttggggccgtgattctcgtccacgccgaaaatggagacttaatcgcccaggagcaaaagagaatcctcgaaatgggaatcacaggccctgaggggcacgcactctcccgccctgaagagttggaggctgaagcagtttttcgagctattacgattgccggccggattaattgtcctgtttatatcaccaaagtgatgagcaagtccgccgccgacatcatcgccttggctagaaaaaagggaccgctggtgttcggggagccaattgccgcaagcctgggtactgacggtacacactactggagtaaaaactgggccaaggcagctgctttcgtgactagcccccccctctctcctgatcctactactcccgactacctgaccagcttgctggcgtgcggcgacttacaagtaacaggttctgggcattgcccctattccacggcccaaaaagccgtgggtaaggacaacttcactcttattccagaaggggttaacgggattgaggagcggatgacagtggtatgggataaagcagtggctacggggaagatggacgagaatcaatttgtggccgttacaagcactaatgcagcgaagatattcaatctgtaccctagaaaagggcggatcgccgtcgggagtgatgccgatgtagtgatatgggatccagataagctaaagacaattaccgctaagtcacacaagagtgccgtcgagtacaacatcttcgagggtatggaatgccacggctctccccttgtagtgataagtcagggtaagatcgtgtttgaagacggaaacatcaatgtgaacaaaggaatggggcgatttattcctcggaaagcattccccgagcacctgtaccagcgggttaagatccgaaacaaagtgtttggcttgcaaggggtctccaggggcatgtacgacggaccagtctatgaggtccccgccaccccaaagtacgcaaccccagccccctccgccaaatcatccccatccaagcaccaacctcctcctattagaaatctgcaccaatccaacttctctctatccggggctcaaattgatgataacaacccacggagaactgggcaccgcatcgtagctcccccagggggtcgttcaaatatcaccagtctgggctag

SEQ ID NO: 112697 - DNA, 1719 bp, synthetic construct
  misc_feature 1..1719: note = Description of Artificial Sequence: Synthetic coding sequence
  source 1..1719: mol_type = other DNA
atgtcataccagggcaagaaaagtataccccacatcacgagtgaccgcctgcttatcaaaggcgggagaataattaatgatgatcaaagcctgtatgccgacgtttacctcgaagatggcctaatcaagcagatcggagagaacctgatcgtgccagggggcgtaaaaacaatagaggcaaacggtagaatggtgattcctggaggcatcgacgtgaatacgtatctgcagaagccctcgcagggtatgacagccgcagacgactttttccagggcactcgagccgccctagtgggcgggacaacaatgatcattgatcacgtggtaccggagcccggcagctctctactcacgtccttcgagaaatggcacgaagcagctgacactaaaagctgttgtgactactccttgcatgtcgacataacgagttggtacgacggtgtcagggaggaactcgaagtcctggtacaggacaagggcgtaaacagtttccaggtgtatatggcttacaaagacgtgtatcagatgtctgactcccagctctatgaggccttcacatttctgaaaggactgggcgccgtgatcctggtgcacgctgagaatggagacctgatcgcccaagagcagaagcgcatcttagaaatgggtataacaggccctgagggccatgcgctgtctagacctgaagagttggaagccgaggccgtgtttcgagcaattaccatcgcgggaagaattaactgtcctgtttacatcaccaaagtgatgtcaaagtccgcagctgacatcattgccttggcacgcaagaaggggccccttgtttttggcgaaccaatagctgccagtttgggcacagatggaacgcattactggtcaaagaattgggcaaaagccgctgcgttcgtcacttcccctcccctctcgcccgatcctacaacccccgactatcttacttcgctgctggcctgtggagatctgcaggtcactggaagtgggcactgtccatattctactgcacaaaaggccgtgggcaaggataatttcacattgattcccgaaggtgtcaatggtatagaagagaggatgacggtggtgtgggacaaggcagttgccactggcaaaatggacgaaaatcaatttgtggcggtgactagcaccaatgccgctaaaatcttcaacctctatcctaggaaaggcagaattgcggtgggctcagatgcagacgtagttatttgggatcctgataaattaaagacaatcactgcaaagtctcataagtccgctgtagagtacaacattttcgaaggcatggagtgtcatggtagtcctttggtggtgatctcccaaggcaagattgtgtttgaagacgggaacataaatgttaataaaggtatgggaagattcataccccgaaaagcattcccagaacatctttaccagagagtcaagattaggaataaagttttcggcctgcaaggggttagccgggggatgtatgacggacctgtgtatgaagtaccggcaactcccaagtatgcgacacccgcgccgtctgccaaaagcagcccctccaaacaccagccgccacctatccgcaacctgcaccagagcaatttcagccttagcggtgctcagattgatgacaacaaccctcgccggacaggacatcgtattgtggccccccccggtggacgctctaatatcacttctttaggctag

SEQ ID NO: 112698 - DNA, 834 bp, synthetic construct
  misc_feature 1..834: note = Description of Artificial Sequence: Synthetic coding sequence
  source 1..834: mol_type = other DNA
atgaacggattcgcgtcgctccttcgtcggaatcagttcattctgttggtacttttcctcctccaaatccagagtctgggcctggacatcgacagccgtcccactgccgaggtgtgtgccactcatacaataagccctggccccaagggcgacgatggggaaaagggcgatcctggggaagaaggtaaacacggcaaggtggggcgtatgggcccaaaggggattaagggggagctaggagatatgggtgatcaagggaatatcgggaagacaggaccaatcgggaagaagggggataaaggcgagaagggtcttttaggtattccaggcgagaaggggaaagctggcacggtgtgtgattgcgggaggtatcgcaagtttgtcggacagctcgacatcagcatcgctagactgaagacttctatgaagtttgttaagaatgtgatcgccggtatacgggagacagaagagaagttttactatattgttcaagaggagaaaaattacagagagtccctgacccattgtaggatccgtggtgggatgctcgccatgcccaaagatgaagctgccaacactctgatcgccgattatgtcgctaagtcaggtttttttagggtatttataggagtaaacgacctcgagagagagggtcagtatatgttcaccgacaatactcccctacagaactactctaattggaatgagggagaaccctcagacccatacgggcacgaagactgtgttgaaatgctgagcagtggacgatggaatgacacagagtgccatttgaccatgtatttcgtatgtgagttcattaagaaaaaaaagtag

SEQ ID NO: 112699 - DNA, 807 bp, synthetic construct
  misc_feature 1..807: note = Description of Artificial Sequence: Synthetic coding sequence
  source 1..807: mol_type = other DNA
atgactcctgccctttgcagatcatcttctctggcttcgaagggtatgagggaacgccgagaaaccaaagccccaccagatggtcttgaggaaagcgccccccgcgagaaaaaacagagccagcccgttgtaaccgcatccgacatatctaaacggaaatgtacctcgtcctttgtcgaaatgggctcccagggtgatatgggtgataaaggccagaaagggtcggtgggccgacacggtaagattggacccataggctctaaaggagaaaaaggcgactctggcgacatcggccctccaggtccaaacggcgaacccggcctaccctgcgaatgcagtcagctgcgcaaagccataggcgagatggacaatcaggtgtcccagctgacatcagagctgaaattcataaagaacgctgtggcgggagtcagggagaccgagtccaaaatctatctcctggtcaaagaagaaaagagatacgccgacgcccagctctcctgccagggcagaggcggaacattaagcatgcctaaggatgaggctgctaatgggcttatggccgcttatctggcacaggccggtttggcccgtgtgtttataggaattaatgacttggagaaagaaggagcattcgtctacagcgatcacagccctatgcggacctttaacaagtggagatcgggcgagccaaataatgcctacgacgaggaagattgtgtggagatggtagcctctggtggctggaacgacgttgcttgtcacactaccatgtactttatgtgcgagtttgataaggagaacatgtag

SEQ ID NO: 112700 - DNA, 816 bp, synthetic construct
  misc_feature 1..816: note = Description of Artificial Sequence: Synthetic coding sequence
  source 1..816: mol_type = other DNA
atgagggggaacctggcgctagtgggggtgctcatatcccttgccttcctttcattgctcccaagtggccatccccagcccgccggtgacgatgcctgctcggtgcaaatcctcgtgcctggcctgaagggcgatgcgggcgaaaagggggataaaggtgcccccggaaggccaggtcgagtgggtccaaccggtgagaagggtgacatgggagataaaggacaaaagggatctgtgggcaggcatggcaaaatcggcccaatcggttccaaaggggaaaagggcgactccggggatattggacctcctggccctaacggcgaaccaggcctgccttgtgagtgttcccaactgagaaaggctatcggagaaatggataaccaggtttcacagctcacctccgaactaaaattcatcaagaatgcagtggcgggtgtgcgggagacggagtctaagatctacctgctcgtcaaggaggaaaagaggtacgctgatgcccagctgagttgtcaagggagaggagggacattgtcaatgcccaaagacgaagctgccaacggtctgatggcagcctacctggcccaggccgggttagctcgagtgtttattgggatcaatgatctagaaaaggagggcgcttttgtttattccgatcacagccctatgcggacattcaacaaatggcggagcggcgaacccaataatgcctatgatgaggaagattgtgtggaaatggtagccagcggtggttggaacgatgttgcctgtcacaccaccatgtactttatgtgtgagtttgacaaggagaatatgtag

SEQ ID NO: 112701 - DNA, 744 bp, synthetic construct
  misc_feature 1..744: note = Description of Artificial Sequence: Synthetic coding sequence
  source 1..744: mol_type = other DNA
atgcgcggaaatctggctctcgtcggagtgctgattagcctggctttcctgagcctattgccatctggacatccacagcctgccggggacgatgcttgctctgtgcagatcttggtacctggtttgaaaggcgacgccggagagaagggcgacaaaggcgcccctggccggcccggccgtgtgggacccaccggagaaaagggcgagaagggcgattcgggggatatcggtcctcctgggccgaacggtgaacccggtcttccctgtgagtgttcccagctgaggaaggctatcggtgagatggacaatcaggtatcacagctcacatccgagctaaagtttatcaagaatgcagtagcaggcgttcgtgagactgagtcaaagatttatctgctggtgaaggaggaaaaaagatacgcagatgcccagctatcctgccagggcagaggcggcactctatctatgccaaaagacgaggcggccaacggtttaatggctgcctatctggcccaggccgggctcgctcgcgtgttcatcggcattaatgatctggaaaaagaaggagctttcgtttattccgaccatagtcccatgcggactttcaataagtggcggtccggagaaccaaataacgcatacgacgaagaggactgcgtggagatggtagcctcgggcggctggaatgacgtggcatgtcataccacgatgtactttatgtgcgaatttgataaggaaaatatgtag

SEQ ID NO: 112702 - DNA, 858 bp, synthetic construct
  misc_feature 1..858: note = Description of Artificial Sequence: Synthetic coding sequence
  source 1..858: mol_type = other DNA
atgaaaaagcagcgcggggttggcgttctgcctgcacttcgcatgcggggcaatctggctctggtaggcgtccttatatccttagcattcttgtctctcctaccgagtggccacccccaacccgcaggagacgatgcctgctcagtacaaatcctcgtgccgggactcaaaggggacgctggggaaaaaggcgacaagggagcaccaggccgtcccgggagggtagggccgactggagaaaaaggggacatgggtgacaagggccaaaaaggcagcgtcggcagacatggcaagatcggtccaatcggttctaaaggcgaaaagggggattccggggacatcggaccccccggccccaatggagagccaggactgccttgcgaatgcagccagctccgtaaggctatcggcgaaatggataatcaagtatcccagttgacctcggaactaaaatttattaagaatgcggtcgccggtgtgcgagaaacggaatccaaaatctacctgttggtgaaggaggaaaaacgatatgccgatgcccagctatcctgtcagggcagaggcggaacactctcgatgcctaaagacgaggcagccaacgggctcatggcggcttatctcgcacaagccggtttggctcgcgtttttatcggcatcaatgacctggagaaggaaggcgcctttgtttactccgatcacagccctatgcggacgtttaacaaatggaggtccggggaacctaacaacgcttacgacgaggaggactgtgtcgagatggttgcctcagggggatggaatgacgtcgcttgccataccacaatgtatttcatgtgcgaatttgataaggaaaatatgtag

SEQ ID NO: 112703 - DNA, 666 bp, synthetic construct
  misc_feature 1..666: note = Description of Artificial Sequence: Synthetic coding sequence
  source 1..666: mol_type = other DNA
atgtggtgggtgcctccatcaccatacggctgcctcccttgcgccctccctggcgacatgggggacaagggacagaaagggtccgtggggcggcacggaaaaatcggacctatcggtagtaagggagagaaaggcgatagtggcgacattggtccaccaggtccaaacggagagccgggactgccgtgcgaatgctctcaactccgaaaagctattggtgaaatggacaaccaggtgtcccaactgacctctgagttaaaattcatcaaaaatgcagtggctggtgtgcgcgagactgaaagcaaaatctatctcctggtgaaggaggagaagcggtatgctgatgcgcagttaagctgccagggccggggcggcacactctctatgcccaaagatgaagctgcaaacggccttatggccgcgtacttggcgcaagccggcctggccagagtgtttatcggaatcaacgacctcgagaaagagggggcgttcgtctactcagatcactctccaatgaggactttcaacaagtggcggtcaggcgaacctaacaacgcttacgacgaggaagattgtgtcgaaatggttgcaagcggcggttggaacgatgtcgcatgtcacaccactatgtactttatgtgcgaattcgacaaggaaaatatgtag

SEQ ID NO: 112704 - DNA, 666 bp, synthetic construct
  misc_feature 1..666: note = Description of Artificial Sequence: Synthetic coding sequence
  source 1..666: mol_type = other DNA
atgtggtgggtgccgccatctccgtacggatgtttgccctgcgccctgcccggcgatgcaggagagaagggcgacaagggggcccccggaagacccggcagagtggggcccaccggcgaaaaaggcgaaaagggtgatagtggcgacatcggaccacctggccccaacggagagcccgggctgccttgtgaatgctcccagttgcggaaggccatcggtgagatggataaccaggtcagtcagctgacctccgagttgaagtttataaaaaatgccgttgcaggggtgcgcgaaacagagtcaaagatctatctcctggtaaaagaggagaaaagatatgcagatgcccagctctcctgccaaggaaggggcgggactctcagtatgcccaaggatgaagctgccaatgggctaatggcagcttatctggcccaagccggactcgccagagtctttatcggtatcaacgaccttgaaaaggaaggagcctttgtgtactccgatcactcccccatgcgcacttttaacaaatggagatctggggagcctaacaacgcctacgatgaggaggattgcgtggaaatggtagcatcgggaggttggaatgatgtggcatgtcataccaccatgtattttatgtgtgagttcgataaggaaaacatgtag

SEQ ID NO: 112705 - DNA, 594 bp, synthetic construct
  misc_feature 1..594: note = Description of Artificial Sequence: Synthetic coding sequence
  source 1..594: mol_type = other DNA
atgtggtgggtcccacccagcccatacggctgtcttccatgcgctcttcccggagaaaagggagattcaggagatatcggacctccgggccctaacggcgagcccggtctgccttgcgagtgctcacagttacggaaagctattggcgaaatggacaatcaagtttcacagctcactagtgaactgaaatttatcaaaaacgcagtcgcgggggtccgggagacagaaagcaagatttacctgttggtgaaggaggaaaaacgttacgctgatgcacaactgtcttgccagggacgcggcggcacattgagtatgcccaaggatgaagctgccaacggactcatggcagcctacttggcgcaggcaggactagcaagagttttcattgggatcaatgacctcgaaaaagaaggggctttcgtttattcagatcacagcccaatgcgaactttcaacaaatggcgctcaggggagcccaataacgcctacgatgaagaggattgtgtggagatggttgcaagtggtgggtggaatgacgtcgcttgccacactacaatgtacttcatgtgcgagtttgataaggagaatatgtag

SEQ ID NO: 112706 - DNA, 2229 bp, synthetic construct
  misc_feature 1..2229: note = Description of Artificial Sequence: Synthetic coding sequence
  source 1..2229: mol_type = other DNA
atgaaggacgactttgcagaagaagaggaggttcagagctttggatataagagatttggtattcaggaaggcactcaatgtacaaagtgtaagaacaattgggctcttaagttttccattattctcttatatattttgtgcgcattgctcacaattaccgtcgctatcctgggttataaagtggtggagaagatggacaatgtgaccggcgggatggagacttcaagacagacatacgatgataaattgacggcagtcgagtccgatttaaaaaagctcggtgaccagaccggcaaaaaggctatcagtacaaatagcgagctgtctacatttcgcagcgatatcctcgatttgcggcagcagctgcgtgaaattaccgagaagaccagcaaaaataaagacactctagaaaaactccaggcctcgggtgacgccctggtggatcggcaaagccagctgaaggagacattagaaaataactcattcctgatcaccaccgtgaataagacccttcaggcgtacaatggttatgtgactaacctccagcaagatacttccgtattacagggcaacttgcaaaaccagatgtattcacataatgtcgtgatcatgaacctgaataacctgaaccttactcaggttcaacaacggaatttaatcacgaaccttcagcgatccgtggacgacacgtcccaggcaattcagagaatcaaaaacgattttcagaatttgcagcaagtgtttctgcaggcgaagaaggacacggactggctaaaagagaaggttcagtcattgcagactcttgccgctaacaacagcgccctggcaaaagcaaataacgacactctcgaagacatgaactcacagctgaactcattcaccgggcaaatggagaatataacgacaattagccaggccaacgaacagaacctcaaggacctccaggacctccacaaggacgccgagaaccgcaccgccatcaaattcaatcagctcgaggaacgttttcagctattcgagaccgatatcgtgaatatcatttctaacatcagctacaccgcccaccatctgagaaccctaacctctaatctgaatgaagtgcgcactacatgtacagacacactgaccaagcatacagatgatctcacatccctgaataatacactcgccaacatccgtcttgattctgtttcactaaggatgcagcaggaccttatgcgcagccggctggacaccgaggtggctaacctctccgtgatcatggaggagatgaagttggtggacagcaaacatgggcagttgattaagaatttcacaattttacaaggccctcctggaccaagaggcccaaggggggacaggggatcccagggccctccaggcccgacaggcaataagggacagaaaggggaaaagggcgagcctggtccgccaggtcccgccggggagaggggaccgattgggccagctggccctcccggggagagaggggggaagggatccaaggggtcgcagggtcccaagggatctcgcggctcaccgggtaagcccggcccgcagggcagttcaggtgaccccggccctccaggaccaccaggaaaggaagggctgcctggccctcagggacctcctgggtttcagggtctccagggcactgtcggggagcctggtgtccccggacctcgcggtctgcccggcctccccggcgtgcctgggatgccaggcccgaagggccccccaggacccccaggaccttctggagccgtggttcccctggccctgcaaaatgaacccactccggcccccgaagataatgggtgtcccccacattggaaaaatttcacagacaaatgttactacttctccgtggagaaggagattttcgaagacgctaagctgttttgtgaggataaatcctctcacctggtgttcatcaatacccgcgaagagcagcagtggatcaagaaacagatggtaggaagagagagtcactggatcgggctgactgactcagagagggaaaacgaatggaagtggcttgacggcacatctccagactataagaattggaaggccggacaaccagataactggggccatgggcacggacctggtgaggactgtgcggggctgatctatgcgggacagtggaatgatttccagtgtgaggacgttaacaattttatttgcgagaaggacagagaaaccgttctctccagcgctctttag

SEQ ID NO: 112707 - DNA, 2919 bp, synthetic construct
  misc_feature 1..2919: note = Description of Artificial Sequence: Synthetic coding sequence
  source 1..2919: mol_type = other DNA
atgggccctggagtgcttctgttgcttctagtcgctactgcgtggcatgggcagggaattcccgtgatcgaacccagcgtgccagagcttgttgtaaagccgggcgcaaccgtcaccctaaggtgtgtgggaaacgggtcagtggagtgggacggacccccatcccctcactggaccctgtattctgatgggtccagcagtattctttcgaccaacaatgctaccttccagaacactggcacatatcggtgcacagagccgggtgacccactagggggatcagctgctattcacctgtatgtcaaggatcccgcccgaccctggaacgtcctggctcaggaagtggttgtcttcgaagatcaggacgccctgttgccatgtttgctgaccgaccctgtgttggaggctggagtgtctctcgtgcgcgttagaggacgcccactcatgcgccatacaaattacagcttctccccttggcacgggtttaccatccaccgggccaagttcatccagagtcaggattatcagtgttctgcactgatgggggggaggaaggtgatgagtattagcatcagactgaaggtgcagaaggtgatcccaggcccacctgcactcaccctcgtgcctgcggaattagtgagaattcgaggagaggcggcccaaatcgtctgcagtgctagctccgtggacgtgaacttcgatgtgtttctgcaacacaataacaccaaacttgcgatcccgcagcagtctgacttccacaacaaccggtatcaaaaggtgctgaccctgaacttagaccaagtagactttcagcatgccgggaactatagctgtgtggcctctaatgttcaggggaaacacagtacttccatgttctttcgtgttgtggaaagtgcttacctcaacctgtcttccgagcagaacttgatccaggaggtcacagttggtgaaggattgaacctcaaggtgatggttgaggcttatcccggcttacaggggttcaactggacctacttaggacccttcagtgaccaccagccagagccaaagctggcaaatgcgacgactaaggatacctacagacacacatttacactctccctgcccagactcaaaccttctgaggcaggtcgatacagctttctcgcaaggaatccaggcggctggcgggccttgacattcgagttgacacttcgttacccaccagaggtgtctgtgatctggacatttatcaacgggagcggcaccctcttgtgcgctgccagcggatatccccagcccaacgtcacgtggctacagtgctccggacacacagatcgctgtgatgaggcacaggtgctgcaggtgtgggatgacccgtatcccgaagtgttatcacaagaaccttttcacaaggtaacagtgcagagcctgttgaccgttgagacactggaacacaaccagacctatgagtgtagggcccataatagtgttgggtcagggagctgggcgtttatccccatctcagctggcgctcacacccatccgcctgatgagtttctgtttacacccgtggtggtggcctgtatgagcataatggctctcttactgctgctgcttctgctgctcctctacaaatataagcagaagcccaaataccaagtccgctggaagatcattgagtcctatgagggaaactcctacacctttattgatcccacacagctaccctacaacgaaaagtgggagttcccacgcaacaacctccagttcggtaaaaccttaggcgccggcgccttcggaaaggtcgtagaagctactgccttcggtttgggcaaagaagacgcagttctgaaggttgcggtcaagatgctcaagtcaactgcacatgccgatgagaaggaggcactaatgagtgagctgaagattatgagccacctaggacagcacgagaatatcgtgaatctgctgggcgcttgtacgcatggggggcctgtgctcgtaattacagagtattgttgctatggggacttgttaaattttctccggcgaaaagccgaggctatgttaggccctagtctttctcctgggcaagaccccgaagggggggttgattacaagaacatccacctggagaaaaaatacgtccgaagagactctgggttctccagtcagggagttgatacatacgtcgaaatgagacctgttagcacttcctctaacgacagctttagcgaacaggacttggataaggaggatggccgacccctggagcttagggacctgctgcatttttctagccaagtagcacaggggatggccttcttggcctcaaagaactgcatacatcgagacgtggcagctcgtaacgtcctattaactaatgggcatgtcgccaaaatcggcgacttcggcttggcccgggatatcatgaatgactctaactatatagtgaaaggtaatgctcggctgccagtcaaatggatggcaccagaaagtatttttgattgtgtgtatacagtgcagtctgatgtgtggtcgtacgggatcttgctttgggaaatcttctcactggggctcaacccttatcccggcattctggtcaattctaagttctataaactggtgaaggacggctaccagatggctcaacctgcttttgcccctaagaacatttactctatcatgcaggcatgttgggctctggagcccacccacagaccgaccttccagcagatttgttcttttctgcaagaacaggcccaggaggatcggcgcgaacgagattacaccaacctgcccagcagtagccgctccggtggatccggttcttcctccagcgaacttgaagaggagagcagcagcgaacatctcacatgttgcgaacaaggcgatatcgcccagccactcctccaaccaaacaattaccagttttgttag

SEQ ID NO: 112708 - DNA, 1506 bp, synthetic construct
  misc_feature 1..1506: note = Description of Artificial Sequence: Synthetic coding sequence
  source 1..1506: mol_type = other DNA
atgagacacaccaactactcttttagtccctggcacgggtttactattcatagggccaaattcattcaaagtcaggattatcaatgctctgccttaatggggggaaggaaagtgatgagcatctctattcgcttgaaagtccagaaagtcatcccagggcccccagccttgaccttggtgccggctgagcttgtcaggattcggggtgaggctgcccagatcgtttgctccgctagttcagtggatgtgaactttgatgtgttcctgcagcataataatacaaagctcgccattcctcagcagtcagatttccataataatcggtaccagaaggttctcactctgaacttggaccaggttgacttccaacacgccgggaactactcctgtgtcgcctcaaatgtccagggtaagcacagcacaagcatgtttttccgggtggtcgaatctgcatacttaaacctgtcttctgagcagaatctgatccaagaggtgaccgtaggtgaagggcttaatctgaaggtcatggtggaagcctaccccgggctgcaagggtttaactggacataccttggccccttctctgaccaccagccagaacccaaactggccaacgctacgacaaaagatacatatcggcatacctttactctgtcactgcccagattgaagccaagcgaggctggcaggtacagctttcttgccagaaaccccggtggatggagggcccttacgtttgaacttactttaaggtatccacccgaggtgtccgttatctggactttcatcaatggctcaggcaccctcctgtgtgccgcaagcggctacccacagccaaatgtaacttggctgcagtgctctggacacaccgacaggtgtgatgaggcccaagtgctccaagtctgggatgacccctaccctgaggtactgagccaggagcctttccataaggtgacagtgcaaagccttcttactgtggagactctcgaacataaccagacttacgagtgtcgagcccataattctgttggttctggcagctgggccttcatcccgatctcagcaggggctcacacccatccaccggatgagttcctctttacccccgtcgtggtcgcttgtatgtcaatcatggctctgctcctcctgttgctgcttctgctcttgtacaaatacaagcagaagccaaaataccaggtgcggtggaagataattgaaagctatgagggtaactcctacactttcattgaccccacccaactgccatataacgagaagtgggaattcccacgaaataatctgcaattcggaaagacactcggtgccggagctttcggaaaggtagtcgaggccacagcatttggcctcggtaaagaggatgctgtgctgaaggtggcggttaagatgttgaagtccacagctcacgcggacgaaaaggaagcctccggattgtaccagagcgctgaacagcagcagaagcgctggcagcgacaacagcagcagtag

SEQ ID NO: 112709 - DNA, 2016 bp, synthetic construct
  misc_feature 1..2016: note = Description of Artificial Sequence: Synthetic coding sequence
  source 1..2016: mol_type = other DNA
atggggcccggggtgttactgctgctcttggtcgcaaccgcctggcacgggcagggcatcccggttatcgaaccttctgtgcctgaactggtggtaaaacccggtgctaccgtcacactacggtgcgtgggcaatggcagcgttgagtgggatggaccgccctcaccacactggaccctgtactccgacggtagctccagcatacttagtaccaacaatgcaaccttccaaaatactggcacctatcgctgtaccgagcctggagatccattgggcggtagcgctgccattcacctatacgtgaaggatccagcccggccctggaacgtgcttgcccaagaggttgtggttttcgaggatcaggacgcgttgctgccctgtctcctaaccgatcccgtgctggaggccggcgtcagtctcgttcgcgttagaggcaggcctttaatgcgacacacaaactactccttttctccttggcatggctttaccatccatagagctaaattcatacagtcccaggattaccagtgctcagcactgatgggcggtaggaaggtgatgtcaatcagcatcaggctcaaagtgcagaaagtgatcccagggccacctgctttgactctggtgcctgcagagctagttcggatcaggggtgaagctgcacagatcgtgtgctcagcttctagtgtagatgtcaactttgatgtctttctgcagcacaataataccaaattggccatcccacagcagagcgacttccataacaatcgataccagaaagtcctgaccctcaatctcgatcaggtggactttcagcacgcaggaaattactcatgtgttgccagcaacgtgcagggcaaacattcaacgtccatgttctttcgcgtcgtggaatccgcctacctcaacctatctagtgaacagaacctcattcaggaagtcacagtgggagaggggttgaacctaaaggtcatggttgaggcttatcctggactccaagggtttaattggacctacctgggccccttctctgaccatcagcctgagccaaaactcgcaaacgcaaccacaaaagacacttatagacatacttttactctttctctaccccggctgaagccatcagaggccggtcgttattcttttttggctcggaaccccggcgggtggcgcgcactgacttttgagctgactctccgctatccaccagaggtcagcgtgatctggactttcatcaacggttccggaactctgctttgcgccgcgagtgggtacccacaacccaacgtgacgtggctccagtgcagcgggcacacagaccgctgcgacgaggcacaggtgctgcaagtctgggatgatccctaccccgaagtcctaagccaggagccttttcacaaagttacagtgcagagcctgttgacagtggagaccctggagcacaatcagacctatgagtgtcgcgcacacaacagcgtggggtccggaagctgggcatttatcccaatctcggcaggagcccatacccaccctcctgacgagttcctgtttacacctgtggtggtggcctgcatgtctattatggccctcctgctgctgctgctgctcttgctcctctataagtataagcagaagccgaaataccaagttcgctggaaaattatagagtcatatgagggaaactcatatacctttattgatccaactcagttgccgtacaacgaaaaatgggaatttccacgcaataacctccaattcggtaaaaccctaggggcaggtgcctttggtaaagtggtagaggcaaccgccttcggtctggggaaggaagacgctgtgctgaaggtggctgtaaaaatgctgaaaagtaccgcccacgcagacgagaaggaggctcttatgtctgagctaaaaatcatgagccacctcggacaacacgagaacatcgtcaacctcttgggagcctgtactcacggtggaacggtggccagccctgccagggtctggacgcccatgtggagatag

SEQ ID NO: 112710 - DNA, 921 bp, synthetic construct
  misc_feature 1..921: note = Description of Artificial Sequence: Synthetic coding sequence
  source 1..921: mol_type = other DNA
atgggccctggtgtgctactcctgctcctggtcgcgactgcttggcacggacagggaattcccgtaatcgaacccagcgttccagaactggtggtcaagccgggagccacagtcacccttcgttgcgtcggtaatggatctgtggagtgggatgggccgccttctcctcactggaccttatactccgatggctcaagtagtattctatccaccaacaacgccaccttccagaacaccggcacctaccgctgcactgagcccggggacccgctggggggatcagccgctatccacctctacgtgaaagatccggctagaccttggaatgtcctcgcccaagaggtggtcgtttttgaagaccaggacgcactgctgccatgtttgctgacagatccagtactggaagctggtgtgagcctcgtgagggtgcgcgggcgaccattgatgcgccataccaattactctttttccccctggcacgggtttaccatccatagagccaagttcattcaatctcaggactaccagtgttccgcattgatgggtggtaggaaggtaatgtccatcagtattcggcttaaggtgcagaaggtgatcccgggacctcctgccctgactctcgtaccggcggaattggttagaattcggggagaagcggcccaaatcgtttgttcggccagtagtgtggacgttaatttcgacgtcttcctgcagcacaacaacactaagctagctattcctcagcagtccgacttccataacaaccggtaccagaaggtgctgactctcaacttggaccaggtggatttccagcacgcaggtaattacagctgtgttgcatctaatgttcaaggaaaacactcaactagtatgttcttcagagtcgtcggaaccccttccccgtcattgtgtccggcgtag

SEQ ID NO: 112711 - DNA, 1134 bp, synthetic construct
  misc_feature 1..1134: note = Description of Artificial Sequence: Synthetic coding sequence
  source 1..1134: mol_type = other DNA
atgcttttactcgtgaccagcttgctcctgtgtgaactgccacatcctgctttcctcctgattccagaaaagtccgacctgaggaccgtagcacccgctagcagtcttaatgtgcggttcgactctaggactatgaatctctcatgggactgtcaggagaatacaacctttagcaagtgcttcctaaccgataaaaagaacagagtggtggaaccgcgactctcgaacaatgaatgtagctgcacattcagagaaatttgtctccacgagggtgtgacctttgaagtgcatgtaaacacatcgcagcgaggtttccagcagaagctgctctaccccaacagtggccgtgaaggaaccgctgcccaaaattttagttgcttcatctacaatgcagacctaatgaattgtacttgggcccgcgggccaaccgcacctcgtgatgtgcagtacttcctctacattcgcaactcaaagagaaggcgcgagatacgttgtccctactatatccaagacagtggcacccatgtaggatgccacctcgacaacctctcaggactcacttccaggaactacttcttggtgaacggtaccagccgcgagatcggtattcagtttttcgacagtcttttggatactaaaaagatcgagcgctttaaccctccctctaacgtaactgtcagatgtaataccacccattgcctcgtacgctggaaacagcccaggacataccaaaagctgtcatacttagatttccaatatcagctggacgtgcatcggaaaaatacccagcccggaaccgagaatcttctaataaatgtctcaggcgacctggagaatcggtacaactttccttcctccgagccaagggcgaagcattcagtaaagatacgagcagcggacgtaagaatcctgaactggtcctcctggagtgaagctatcgagttcgaccaccttggtggcatacatccacgcggcagggaaaggcttccgagacgtggcttggaccgggaaggcaactacctaaggccacgtgggtgccgcaacggaatggatatctctgcttccgccacccggggtaactgttttttggacgacgcggtgaatttgtacatcatcttttacgtgttcatctag

SEQ ID NO: 112712 - DNA, 702 bp, synthetic construct
  misc_feature 1..702: note = Description of Artificial Sequence: Synthetic coding sequence
  source 1..702: mol_type = other DNA
atgctccttctggtaactagtctcttgctgtgcgagctgccgcaccccgccttcttgctgatcccagaaaaatccgaccttcggactgtagccccagctagttctctgaacgtgagattcgattccagaacaatgaacctgtcctgggactgccaggagaacactaccttcagtaaatgttttctgacagataagaagaaccgggtggtcgagcctagactgtcgaacaatgagtgttcttgcacgttcagagagatttgtctacacgagggggtgactttcgaagtccacgtcaatacaagccagcgtggctttcagcagaaactcctgtacccaaactcgggaagagaagggacggctgcccaaaatttttcatgtttcatttataacgccgatttaatgaactgcacctgggcccggggccccacagcccctagggatgtccagtacttcctgtatattaggaactcaaaaagacggcgggaaatcaggtgcccttactacatacaagactccggcactcacgtcgggtgtcacctggacaacctctccggactgacatcccgcaactatttcctggtgaacggtacctcccgcgagattggcatccaatttttcgatagcctgctcgatacaaaaaaaattggctccttgggctactcgggatgttcccgccagtttcatcgctccaaaacgaactag

SEQ ID NO: 112713 - DNA, 1002 bp, synthetic construct
  misc_feature 1..1002: note = Description of Artificial Sequence: Synthetic coding sequence
  source 1..1002: mol_type = other DNA
atgctgctgctggtaacttcgctgcttctgtgcgagttaccccatcctgcctttctcctgattcctgagaagagcgacctcagaactgtcgcccctgcctctagtttgaacgttcggttcgactcgcgtaccatgaacctgtcttgggattgtcaggaaaataccacattctcaaagtgtttcttgacagataagaagaaccgtgtggtggagccacggctgtctaataacgaatgttcttgcaccttcagagagatctgcttgcacgagggagtgactttcgaggtgcacgtgaataccagtcaaaggggtttccaacagaagctgttgtatccaaactccgggagagaaggtacagctgctcagaatttttcctgtttcatctataacgctgatctcatgaattgtacctgggccagggggcctacagccccacgtgatgtgcagtactttctttacatccggaacagtaagagaagacgggagatcaggtgcccgtattacattcaggattctggtacgcacgtcggttgtcacttggataatttaagcgggcttactagcaggaattacttcctggtgaatggtaccagccgggaaatcggcatccagttcttcgatagtctgctggacacaaagaaaatagagagattcaatccgccttccaacgtcactgtgaggtgcaacactacacactgtctggtgagatggaaacaacccagaacctaccagaagctgagttatctcgattttcagtaccaactcgacgttcatcgaaagaatacacagcctggcacagaaaatcttcttatcaatgtgtcaggcgacctggagaacagatataactttccatccagcgagccaagggctaaacatagcgtgaagattagggctgccgacgtgcgcattctgaactggtcatcctggagcgaggctatcgagtttgggtcactgggatactccgggtgctctcgccagttccatagaagcaagacaaattag

SEQ ID NO: 112714 - DNA, 1002 bp, synthetic construct
  misc_feature 1..1002: note = Description of Artificial Sequence: Synthetic coding sequence
  source 1..1002: mol_type = other DNA
atgctactcttggtgacatcgcttctgctttgtgagctgcctcatcccgcatttctgttgattccagaaaaatctgatctgcgcaccgtagcccccgcatcatctctcaatgtgcgattcgactccaggacaatgaatctgagttgggactgccaagagaataccacattttctaagtgttttttaactgacaagaaaaaccgcgttgttgagccacgcctctcgaataacgagtgctcctgtactttcagagaaatctgcctgcatgaaggcgtaactttcgaggtccatgtgaacacctctcagcggggcttccagcaaaaactcctgtatccgaactctgggagagaaggaaccgcagcccagaacttctcgtgtttcatttataatgcggacctcatgaactgcacatgggccagaggtcctaccgctcctagagacgtccagtattttctgtatatcaggaacagcaagaggaggcgcgaaatcaggtgtccctattacatacaggattcagggactcatgtgggctgtcacctcgataacttgagtgggctcacatcacgaaactatttccttgtgaacggcaccagtagggaaatcggcattcagttctttgactctctcttggacaccaaaaagatagagagattcaatccgccgtcaaacgtgactgttaggtgtaacaccactcactgtctggtcaggtggaaacagcctcgcacctaccagaagctctcttatctggacttccagtaccagctcgatgtacatcgcaagaacactcagcccgggaccgaaaacttgctgatcaacgtgagtggtgacctcgagaacagatacaatttccccagcagcgagcctagggccaagcactctgtgaagatccgcgcagccgacgtgagaattcttaactggagttcatggtctgaggctatcgagtttgggagcctcgggtacagcggctgttccagacagttccacagatcaaagaccaactag

SEQ ID NO: 112715 - DNA, 861 bp, synthetic construct
  misc_feature 1..861: note = Description of Artificial Sequence: Synthetic coding sequence
  source 1..861: mol_type = other DNA
atgctgctgctggtcacatctctactgctctgcgaactcccacatccagcttttcttctgatcccagagaaatcagacctgcggaccgtcgcaccagccagctccctgaatgtcaggttcgattctcgaacgatgaacttatcgtgggactgccaggaaaatacaacattctctaagtgttttttaactgacaagaaaaatcgcgtggtcgagcccagattaagcaacaacgaatgttcatgtacttttcgtgagatttgcctccacgaaggggtcacttttgaggttcatgttaacactagccagagagggtttcagcagaagctgctgtaccccaattcaggtcgggagggtaccgcagcccagaatttctcttgcttcatttacaatgctgatctgatgaactgtacgtgggctcgaggccctaccgcccctagggacgtgcagtacttcttatacatccgcaattctaagagaagacgggagattagatgcccttactacattcaagactcaggtacgcacgttggctgccatctcgataatctgagcggcctcacttcccggaactatttccttgtcaacgggacatcgcgcgagatcgggatccaattctttgatagtctcctggacaccaagaagatcgaacgatttaatcctccatccaatgtaaccgtgcgatgtaacaccacgcattgcctggttcgatggaagcagcctcggacttatcagaaactgtcttaccttgatttccaataccagctggacgtacatcggaaaaacactcaaccgggcactgaaaacctcctggtagttctgaccaccggcacctccgccttatgcacctttatgtgcagctag

SEQ ID NO: 112716 - DNA, 1233 bp, synthetic construct
  misc_feature 1..1233: note = Description of Artificial Sequence: Synthetic coding sequence
  source 1..1233: mol_type = other DNA
atgctgctgcttgtgacttcactgctgctctgcgagctgcctcaccccgcctttctcttgatcccagaaaagagtgatctcagaacagtggcgccagcttctagcctgaatgtccggttcgatagcaggaccatgaacctgagttgggactgccaggagaacaccaccttcagtaagtgcttcctgacggacaagaaaaatagagttgttgagcctagacttagcaacaacgaatgctcttgtaccttccgcgaaatctgcttacatgagggggttaccttcgaggtccacgtgaacacgtcacaacgaggcttccaacagaaattattatacccgaattcaggtcgagagggcacagctgcccagaatttttcatgttttatttacaatgctgaccttatgaattgcacgtgggccaggggaccaactgccccgcgggacgtacagtactttctgtatatcagaaactcaaagcgccggcgcgagatacgctgtccttactacatccaggatagcggcacccacgtcgggtgccatttggacaacctgagcggtctgaccagccggaactatttcctggttaacggaacatcacgagagataggcatacaattcttcgacagcttgctggacacaaagaaaattgaaagatttaaccccccaagcaacgttaccgtacgctgtaataccacccattgtcttgttcggtggaaacagccccggacttaccagaagctgagttacttggacttccagtaccaactggacgtgcacagaaaaaatacacaacctggcaccgaaaatctgctgataaatgtgagcggcgatctggaaaaccgctataactttcctagctccgagcctcgagctaaacatagcgtaaagataagagctgcggacgtccgtattctgaactggtcttcctggtctgaggctatcgagttcggatccgacgatggtaacttaggttcagtttatatttatgtgcttcttatcgtgggaacacttgtatgcgggatagtgttgggattcttattcaagcgtttcctgcggatccagcgacttttccctcccgtccctcagataaaagacaaactgaacgacaatcacgaggtggaggatgaaatgggaccacagcggcaccatagatgtggctggaatctatatccaacccccggtcccagtccaggctcagggtcttccccccgtctcgggtctgaatcatccctctag

SEQ ID NO: 112717 - DNA, 1203 bp, synthetic construct
  misc_feature 1..1203: note = Description of Artificial Sequence: Synthetic coding sequence
  source 1..1203: mol_type = other DNA
atgctgttgctcgttactagcctgctgctgtgtgagcttccccacccggcattcctgctgatcccagagaagtctgacctgcggactgtcgcgccggctagttcgctgaacgtcagattcgattcccgtaccatgaatttgtcctgggactgtcaggagaacacgacttttagcaagtgtttcctgacggataaaaagaaccgagtcgtcgagcccaggttgtccaataacgaatgtagctgtacatttagagagatatgtctgcacgagggagtcactttcgaggtgcacgtgaatacttcccagcgagggttccagcagaagctcctctacccgaacagcggccgcgaagggaccgcggcgcagaatttcagttgtttcatttacaatgccgatctgatgaactgtacgtgggcccgcggacccacagcccctcgggacgtgcagtacttcctttatatccgcaattcaaagcgccggagggaaatacggtgcccttattatatacaggacagtggcactcacgtgggatgtcaccttgataacctgagtgggctcacgtcccgcaattacttcctggttaacggtacctcacgcgagatcggcattcagttctttgacagcctccttgatactaagaagatcgagaggtttaaccctccgagcaacgtaaccgtgaggtgcaatacaacgcactgcttggttagatggaagcagccacggacttatcagaagctgagctatcttgatttccagtatcagcttgacgttcaccgtaagaatactcagcccggcacggaaaacctactaatcaacgtgtcgggggacttggaaaaccgttataacttcccatcttcagagccacgggccaaacacagtgttaagattagagctgcggacgtgagaatcctgaattggtccagctggtcagaagccatcgagttcgggtctgacgacggaaacctgggcagcgtgtacatatacgtcttgctgatcgtcggaacgctcgtatgcggtatcgttctggggtttctgttcaaacggtttttacgcatccagcgcctttttcctccagttccacagataaaagacaaactgaatgacaaccacgaggtggaggacgaaatcatatgggaagagttcacacctgaggagggaaagggatatcgggaggaagtactgaccgtcaaggagatcacctag

SEQ ID NO: 112718 - DNA, 1203 bp, synthetic construct
  misc_feature 1..1203: note = Description of Artificial Sequence: Synthetic coding sequence
  source 1..1203: mol_type = other DNA
atgttgctgttagttacctcacttttgctgtgtgagttgccacatcctgcatttcttttaatccctgaaaagtcagatcttcggaccgtcgcccctgcctcctccctgaatgtgcggttcgacagccgcacgatgaacctaagttgggattgccaggagaacaccaccttctccaagtgctttctcacggataagaaaaacagagtggtcgagcccaggctgtcaaacaacgaatgttcatgcacattccgcgagatttgtctgcatgaaggtgtgactttcgaggtacacgtgaatacatctcagaggggattccaacagaaactgctgtacccgaactcgggaagagaagggacggccgctcaaaatttttcctgttttatctacaatgctgacttgatgaactgcacctgggcgagggggcccacggctcctagagatgtgcagtacttcctttatatccgcaattctaaaaggcgccgagagattaggtgtccctactacatacaggattcaggcactcacgtcggctgccacctggacaatctttctggattgacatcccggaactattttctggtgaacggcacgtcccgagaaattggtatacagttcttcgatagcctgctggacaccaaaaagatcgaacggttcaacccaccaagcaacgtaacagtgcgttgcaatactactcattgccttgtacgatggaaacaaccaagaacttatcagaagctctcttacttggactttcagtaccagctggatgttcaccgcaaaaacactcagccaggaaccgaaaatctgctcatcaatgtcagtggggaccttgagaacagatacaacttcccgagctcagagcctcgggccaagcatagtgtaaagatccgagcagccgatgtgagaatattgaattggtcctcctggagtgaggccattgagtttggtagtgacgacgggaatctgggaagcgtctatatctacgtcctcctcatcgtgggcacactggtctgtggtatcgtcctggggtttttgttcaagcgattcctaaggattcagaggctctttcctcctgtgccgcagattaaggacaagttaaacgacaaccacgaggtcgaagacgagatcatctgggaagagtttacgcctgaggagggcaaggggtaccgtgaagaggttttgaccgtgaaggaaatcacgtag

SEQ ID NO: 112719 - DNA, 717 bp, synthetic construct
  misc_feature 1..717: note = Description of Artificial Sequence: Synthetic coding sequence
  source 1..717: mol_type = other DNA
atgttgctcttagtgacaagcctactgctatgcgagctccctcatcccgctttcctcctaatcccagagaagagtgacctgcggacagttgctccagcctctagtttgaatgtgcgttttgattcaagaacaatgaatctgtcatgggactgccaggagaacactactttcagtaagtgctttttaacagataagaagaatcgagttgtggagcctcggctgagtaacaatgagtgcagttgcacgtttcgagaaatttgcctccatgagggcgtcacattcgaagtgcatgtgaatacctcccagagggggttccagcagaaattgctgtatcccaatagcggaagagaggggacagctgctcagaatttttcttgtttcatctacaatgccgaccttatgaattgtacctgggcaagaggcccaactgcccctagggacgtccagtacttcctctacattcggaattccaaacgtagacgggaaatccgctgcccctattatatccaggactctggaacccacgtgggttgtcacttagacaacctgtccgggctgaccagtcgtaactatttcctggtgaacggaaccagtagagagatcggcattcagttctttgactccctgctagacacaaagaagattgagcgatttaatccgccttccaacgtgactgtccgctgcaacactacccattgtttggtgaggtggaaatag

SEQ ID NO: 112720 - DNA, 1305 bp, synthetic construct
  misc_feature 1..1305: note = Description of Artificial Sequence: Synthetic coding sequence
  source 1..1305: mol_type = other DNA
atgcttttgttggttaccagtctcttactctgcgagcttccgcaccccgcgttcctgctgatccctgaaaaaagtgatctaaggacagtagctcccgcatcctccctgaacgtgcgctttgacagccgaaccatgaatctgtcatgggattgccaagaaaacacaacctttagcaagtgcttcctgaccgataagaagaatcgagtcgtggagccaagattgtccaataacgaatgctcctgtacgtttagggaaatttgtttgcacgaaggtgtcacgttcgaggttcacgtaaacaccagccagcgtggcttccaacagaaactgctgtacccaaactcaggacgtgaaggcactgctgctcagaatttctcctgtttcatctataatgccgacctgatgaattgtacatgggccaggggtcccactgctcctagggatgtgcagtacttcctctatattcgaaacagcaagcggcgacgtgaaatacggtgtccctattacatccaggatagtggtacacacgttgggtgtcacttggacaatctgagcggcctaacgagccgcaactacttcctggtcaatggtaccagtagagagatcgggatccagtttttcgacagtctgttggatacaaagaaaattgagcggtttaaccccccgtctaatgtgacagtgaggtgcaatactactcactgcttggtgcggtggaagcagcctagaacctaccagaagctgagttatctggactttcagtaccaactggatgtgcatcgaaaaaatacccagccaggcactgagaatctcttgatcaatgtctcgggcgaccttgagaataggtataatttcccttccagcgaacctcgggctaaacactcagtgaaaatacgcgcagctgacgtgagaatcctgaactggtcctcctggagtgaggctattgaatttgggagccactctgtgacccaggctggcgtgcagtggcacaacctcggctccctccaacctccatcaccccgacttaagcggttttcatgtttgagactccccgggtccgacgacggcaacctcggctcagtatatatctacgttctactcattgtcggcaccctcgtgtgcgggatcgtgctgggcttccttttcaaaaggtttttgagaattcagagattatttcctccagttcctcaaattaaagataagctgaatgataatcacgaagtggaagacgagatcatctgggaggaattcaccccagaggagggaaagggatatcgagaggaagtgttaacagttaaggagatcacctag

SEQ ID NO: 112721 - DNA, 567 bp, synthetic construct
  misc_feature 1..567: note = Description of Artificial Sequence: Synthetic coding sequence
  source 1..567: mol_type = other DNA
atgttgctgctcgtcacgtctctgctcctttgcgaacttcctcatccagccttcttacttatcccagagaagagcgacctgagaacggtcgcccctgccagttccttgaatgtcagatttgatagcaggactatgaacctctcctgggactgccaagagaacaccactttctcaaagtgttttcttacagacaagaaaaaccgagtggtggaaccacgactatcaaataacgaatgttcctgtacattccgagagatctgcctgcacgaaggtgtaacctttgaagttcacgtgaatacatcacaaagggggtttcagcagaagctgctgtacccaaactcgggaagagaggggaccgccgcccagaatttctcctgcttcatatacaatgccgacctgatgaattgtacttgggctcgaggtccaacggcaccaagagatgtccaatacttcctatacatccgcaatagcaaacgaagacgggaaataaggtgtccgtattacatccaggattccgggactcacgttggttgtcaccttgataatttgtctgggctgacctcttag

SEQ ID NO: 112722 - DNA, 1203 bp, synthetic construct
  misc_feature 1..1203: note = Description of Artificial Sequence: Synthetic coding sequence
  source 1..1203: mol_type = other DNA
atgttgctgctggtgacaagcctgctgctctgtgaactgcctcacccggccttcctgctgatcccagaaaagtctgacctccgaaccgtggcacccgctagcagcttgaacgtcagatttgactcccggaccatgaatctctcctgggactgccaggagaacactaccttttctaagtgtttcctgacagacaagaaaaaccgcgtggtcgagccccgcttgagcaataatgagtgttcctgtacttttcgtgaaatttgcctgcacgagggcgttactttcgaggtccacgtcaatacctcacaacgggggttccagcagaagctgctgtatccgaactccggcagggaaggtacggctgctcagaactttagttgctttatctataatgccgacctgatgaactgcacttgggcgcgtgggccgacagcaccccgggatgttcagtatttcctgtacataagaaattcgaaaagaagaagggaaattagatgcccgtactatatacaggacagtggaacccacgtgggctgccaccttgataatcttagcgggttaacatcccggaattatttcctggtgaacggcacctcaagggaaatcggcatccagttctttgacagcttactcgacacaaaaaagattgaaagattcaatcctccttccaacgtgactgtgaggtgcaataccacacactgtttagtacggtggaaacagccaagaacgtaccaaaagctttcatacttagacttccagtatcaattggacgttcatagaaagaatacacagcctggcaccgaaaatctcctcatcaacgtttccggcgaccttgagaataggtacaatttcccatcttccgagcctcgggctaagcacagtgtgaagattcgtgctgccgacgtcagaattttgaactggagcagctggtccgaggccatcgaattcgggagcgacgacggcaacctgggttcggtttacatttatgtgttactgatcgtgggaaccttagtgtgcggcattgtgctaggcttcctgttcaagcggttcctcagaatccagaggctcttcccccccgtcccccagataaaggataagcttaacgacaatcatgaagttgaggacgagattatctgggaggaattcaccccagaagaggggaaagggtatagggaagaggtgttgacagtgaaagagatcacctag

SEQ ID NO: 112723 - DNA, 804 bp, synthetic construct
  misc_feature 1..804: note = Description of Artificial Sequence: Synthetic coding sequence
  source 1..804: mol_type = other DNA
atgaactgcacgtgggcgcgggggcccacggcccctagggatgttcaatattttctgtacattcgtaacagtaaacgaaggagagagatccgttgtccctactatattcaagacagcggcacacatgtaggatgtcatctggataacctgtcgggactcacttcacgaaattactttttggtcaacggaacttctcgcgagatagggattcagttcttcgattcattgctagacaccaaaaagattgaacgctttaatcccccgtcaaacgtgaccgtaagatgtaatacaactcattgcttggtccggtggaaacagccacgaacctatcagaagcttagttacctagacttccagtaccagctggatgttcatagaaagaacacgcaacccggaacagagaacctcctgataaatgtgtccggggacttggaaaatcgatacaacttcccctcttcagagccacgggctaagcactctgttaaaatacgcgccgccgacgtgcggatcctgaattggagttcttggagcgaagccatcgagttcggttctgatgacggaaatctcggtagtgtgtacatttacgttctgttgattgtgggaacactcgtgtgtggtattgtactgggcttcctgtttaagagattcctgagaatacagaggttgtttccacccgttccccagattaaggacaaattaaatgacaatcacgaagtggaggacgaaatcatctgggaggaatttacgcccgaagagggcaaaggctatagagaggaagtcctgaccgtcaaagagattacttag

SEQ ID NO: 112724 - DNA, 2712 bp, synthetic construct
  misc_feature 1..2712: note = Description of Artificial Sequence: Synthetic coding sequence
  source 1..2712: mol_type = other DNA
atggtgctcgcacagggtctgctgtctatggctctcctcgcactttgctgggagagatcgttggcaggggctgaagaaaccatcccattgcagacactgaggtgttacaacgattataccagccatatcacttgtaggtgggcggatacacaggatgcccagcgcctggtgaacgtcacgctgatacgtagggtgaacgaggacctgcttgagccagtctcatgtgacttgtccgatgatatgccttggtccgcctgcccccacccacgctgcgtcccccggcggtgcgtgataccctgccagagcttcgtggtgacagatgtcgactatttctcattccagccagaccgcccccttggcacaaggttgacagtcacactcacacagcatgtccaaccaccggagcctcgagacctgcagattagtacagaccaggaccatttcctcttgacctggtccgtcgctctcggtagtccacaatcccattggttgtcaccgggggatcttgagttcgaagtagtctacaagcggctgcaggactcttgggaagatgctgccatcctgctgtctaacacatcgcaggccactctgggtcccgaacatttgatgccttcttccacatatgtggccagagtgcggacgcggctggcaccaggatcacggttatctggccgccccagcaagtggagccccgaagtttgctgggacagccagccgggagatgaagcccagccccagaatctggagtgttttttcgatggcgcagccgtactttcttgttcttgggaagtccgcaaggaggtggcctcctctgtatctttcggtctcttctacaaaccatccccagatgcgggatctgcagtgctgttacgcgaagaggagtgtagcccggtcctcagagagggcctggggtctctgcacactcggcaccactgtcagattcccgtgcccgacccagccactcatggccaatacatagtttcagttcagccacgaagggccgagaaacatattaagtcatccgtcaatattcaaatggctcctccctccttgaacgttaccaaggatggggatagttactccttgaggtgggaaactatgaaaatgcgctatgagcatattgatcacacatttgaaattcaataccggaaggacaccgctacttggaaggacagcaagacagaaacccttcaaaacgcccacagcatggcacttccagccctggaaccaagtactcgctattgggctagggtgcgggttaggacatccagaaccggatacaacggaatctggtccgagtggtctgaggcacgtagttgggatacagaatcggtcctcccaatgtgggtgcttgcactcattgtcatttttctgacgatcgctgttcttcttgcactgagattttgtggaatttatggttatcgtctaagacggaagtgggaggaaaaaataccaaaccccagtaaaagtcacctttttcagaatggaagtgctgaattatggcccccaggaagcatgtcagcattcactagtggatctccaccccatcaaggaccatggggtagccgttttcctgagctcgagggagtttttcctgtggggttcggggatagcgaagtcagtccactcacaattgaagacccaaaacacgtgtgtgaccctcccagcggcccagatacaacaccagccgcctcagaccttccaacggaacagccaccgtccccccaacctggcccgcctgcggcctctcatacaccggagaaacaggctagttctttcgactttaacggaccatacctcggtcccccgcacagtcgaagcttaccagatatactgggccagccagaacctccgcaggaaggtggtagccagaaatctccgcctcctgggtcccttgagtacctatgtcttccggccggtggccaggtgcaattggttcccctggcacaggctatgggccctgggcaggccgtggaggtggaacgtcgtccgtctcagggcgctgcgggatctcccagtctggagtccggcggaggcccagccccaccagccctgggccccagagtgggaggccaggaccagaaagactctcccgtcgccattcctatgtcctctggtgatacagaagaccctggggtggcatccggctacgtgtccagcgcagatctggtcttcacccctaatagtggggcgtcctcagtttctttggtgcccagcctcggcttgccatccgaccagacgccaagcctgtgtccagggttagcttcagggcctccaggcgcgcccggacccgtgaaatccggttttgaagggtacgtcgaactgcccccaatcgaagggaggagcccaaggtcccctagaaataacccagtccctccggaggcaaaaagccctgttctcaaccctggggagcgaccggccgatgtgtcgccaacaagtcctcaacccgaggggctgttggttctgcaacaagttggagactactgcttcttgcctggtctgggacctgggccactgtcccttcgctccaagccttcgagccccgggcctggtcccgagattaagaatttggaccaggcctttcaggtgaaaaagccaccaggccaggctgtgccgcaggttcccgtgatccagctcttcaaagcacttaagcaacaagactatctcagtcttcctccttgggaggtcaacaagcccggggaggtctgctag

SEQ ID NO: 112725 - DNA, 2694 bp, synthetic construct
  misc_feature 1..2694: note = Description of Artificial Sequence: Synthetic coding sequence
  source 1..2694: mol_type = other DNA
atggtcctggctcagggactcctttccatggccctgctggccctgtgttgggagcgatccctggcgggcgcagaggagactatccctctgcaaacactccggtgctataacgactatacaagtcacatcacgtgcaggtgggctgatacacaggatgcccagagactcgtgaacgtgaccttgatcagacgcgttaacgaggatttgttggaacccgtaagctgcgacttgtccgatgatatgccctggtctgcctgccctcacccacggtgcgtacccagaaggtgtgtgatcccctgtcaatcatttgtggtcacagatgtcgactacttttctttccagcccgatagacccttaggcactcgtcttaccgtcaccctgacacagcacgttcaacctcctgagccgcgagatcttcagatcagtacggatcaagaccactttctgttgacatggtcagtggcattgggctcccctcagagccactggctctctcctggggaccttgaattcgaagtggtgtacaagcgcctccaggattcctgggaagacgctgctattctgctgtcaaatacatctcaagcaacactcggccccgagcatctcatgccctctagcacttacgtggcccgcgtcaggacgcggctggcccccggatcccggttaagcggtcgcccatctaagtggagtccagaggtgtgctgggattctcaacccggggatgaagctcagcctcagaacttggaatgcttcttcgatggggctgccgtccttagctgcagttgggaggtgcggaaggaagtcgcttcatccgtatcttttggcttgttctacaagccctccccggacgccggggaggaagagtgcagccctgtgctgcgggaagggctcggctccctgcacactcgccaccactgccagataccagttcctgaccctgccacgcatggtcagtatattgtgagtgtccagccccggagggcagaaaagcacattaagtcgtctgtgaatattcaaatggcccctccgtcgctgaacgtgacgaaagatggggactcttattccctgcggtgggagacaatgaagatgcgatacgagcatatcgaccacacctttgagatacagtatcggaaggacacagccacatggaaggactcgaagactgagactttacagaatgcgcatagtatggccttgcccgctctggaaccaagcaccaggtattgggcacgcgtccgggtgcggacctcgcgcaccggctataatggcatttggtccgagtggtccgaggccagatcttgggacacggagtccgtcctccctatgtgggtactggcactgattgtgattttcctcacaattgctgttctgcttgcactgcgcttctgtggcatttatgggtatcgactgcgcaggaaatgggaggagaaaattccaaaccccagcaagtcacacttgtttcagaatggctccgccgaactttggccaccggggagcatgagcgcattcacaagcgggtcccctccccaccaaggcccttggggcagcagatttcccgagcttgagggggtatttccagtgggcttcggcgatagcgaagtctcaccgctgaccattgaagatccaaagcacgtctgcgatcccccctcagggcccgataccacgcccgctgcatctgaccttccaacagaacagccccccagcccacagccgggccccccagctgccagccacacaccagagaagcaggcctccagcttcgactttaatggaccatacctcggaccccctcattctagaagtctgcccgatatcctcggccagcccgaacctccgcaagagggcggaagccagaagtctcctccacccggctcactggagtacttgtgcctgccggccggcggccaggtccaactcgtgcctttggcccaggccatggggcccggacaggccgttgaggtagaacgccggccttcccagggagccgcgggcagtccgtcactggaatctggcggcgggccggctccccccgccctcggcccaagagtgggaggacaggaccagaaagacagtccagtggcaattccaatgtccagtggcgatacagaagatcccggcgtcgcctcagggtatgtgtcctctgccgacctcgttttcacccccaattcaggagctagtagcgtgagtttggttccatctctcggactgccatccgatcagactcccagcctttgcccgggccttgcatcagggcccccaggtgctcccggcccggtgaagtccggttttgaaggatatgtcgagctacccccaattgaaggccgctctcctagaagcccaagaaacaaccccgttccccctgaagccaaaagccccgtgctaaatccgggggagcgccccgcggacgtgtctcccacttcccctcaacctgaagggctgctggtgctgcagcaagtaggtgactattgctttttgccagggctaggcccgggtccattatctctcagaagtaaaccatccagtcccggacccggacccgagataaaaaatctggatcaggcctttcaggtgaagaagcccccaggccaggccgtgccccaggtaccagtaattcagctttttaaggccctgaagcagcaggactacctgtccctgccgccttgggaagttaacaagccgggcgaagtgtgttag

SEQ ID NO: 112726 - DNA, 690 bp, synthetic construct
  misc_feature 1..690: note = Description of Artificial Sequence: Synthetic coding sequence
  source 1..690: mol_type = other DNA
atgccctggagcgcatgtccacatcctcggtgcgttccgcgaaggtgcgtaatcccgtgtcagtcttttgtagttacagacgttgattacttctcttttcagccagaccgccccctgggcacccgacttaccgttacattgacacagcacgtccagcccccagaacctcgcgatcttcagatctctacagatcaggatcacttccttctgacctggtctgtagcactggggtctccacagtcccactggctgtccccaggagacttggaattcgaagtggtgtataaaagattacaggacagctgggaagacgctgccattttgctcagcaacacctctcaggctaccttgggacctgagcacctcatgccctcaagcacatacgtcgctcgcgttcgcacccgcctcgcgcctggctcccgattgagtgggcgaccatcaaagtggagccccgaagtgtgttgggattcccagccgggcgacgaagctcagccccagaatctcgaatgttttttcgacggagccgctgttctctcttgcagttgggaggtgagaaaggaggttgcaagctctgtctcattcggtttgttttacaagccatcacctgatgcaggggaagaggagtgctcccccgtgctgagggagggcctgggttctttgcataccaggcaccactgtcagattccttag

SEQ ID NO: 112727 - DNA, 2535 bp, synthetic construct
  misc_feature 1..2535: note = Description of Artificial Sequence: Synthetic coding sequence
  source 1..2535: mol_type = other DNA
atggggaagctcagaccgtggcgtgacctgctggagcctgtctcttgcgatctgagtgacgatatgccgtggagcgcctgcccccatccccggtgcgtccccagaaggtgcgtgattccctgtcaaagctttgtcgtgaccgatgttgattacttcagctttcagcctgaccgtcccctgggcacaaggttgacagtaactctaacacagcatgttcaaccaccagaacctagagacctccaaatttctaccgatcaagaccattttctgctgacctggagcgtggccttgggctctccacagtcccattggctttctccaggagatctggagtttgaggttgtctataagcggctccaggactcttgggaggacgcagccatcctactgagcaatacctcccaagctacgctggggcctgaacacctcatgccctcatctacatatgtcgctagagtgcgaacaagactagcaccaggctcccggctgtcaggcagaccttctaagtggagtccagaggtgtgctgggactctcagcccggcgacgaggctcaaccacagaacctggaatgcttcttcgatggcgccgcggtgctgtcctgttcatgggaggtcaggaaagaagtggcttcttctgtgtcctttggcctcttttacaagccctctcccgatgctggttcagccgtgcttctgagagaggaagaatgctcgcccgtactccgggagggactgggctcattacacacgaggcatcattgtcagattccagtgccggatcccgccactcacggtcagtacatagtatctgtccagccccggcgggctgaaaagcacatcaagagtagtgtgaatattcagatggctcccccctctctcaacgttactaaggacggcgacagttacagtctgaggtgggaaactatgaagatgcgttacgaacacattgatcatacgttcgagatccagtatcgcaaggacacagctacatggaaggattcaaagacggagactttgcagaacgcccatagtatggcactccctgcgctggagccctctacaagatactgggccagggtgcgggtacggacctcccggaccggctacaacggcatctggtcagagtggtctgaggcccgttcttgggacacagagagcgtactccctatgtgggtactggccctcatcgtgatatttttgacaattgccgttctcctggcgcttagattttgcggcatttatggttatcgactgcggaggaaatgggaggagaagatacccaacccttccaaaagtcatctgttccagaacggaagtgccgaactctggccccctggctctatgtccgcattcaccagcggctctccgccccaccagggtccatggggatcacgatttcccgagctggagggcgttttccctgtgggtttcggtgattcagaggtgagtcctctgacgattgaagaccccaagcatgtctgtgatccccctagtggacccgacacgacacctgcagcatcggatctgcctactgagcagccaccaagtccacagccaggccctcctgccgcgtcacacacaccggagaaacaggcctcatctttcgactttaatggcccatacctgggtcctcctcatagtagaagtctgccggatatcctcggccagcccgaaccacctcaagaaggcgggtcccaaaagagtcccccccccgggtccctggaatacctgtgtctgcccgccggtgggcaagtgcaattagttcccctggcacaggccatgggtccaggacaggcagtggaagtcgaacggcgcccaagccagggggcagctggcagccccagtctagagtcaggcggtgggccggccccgcctgctttggggccaagggtgggaggccaggaccaaaaggatagtccggtcgccatacccatgagtagcggtgatacagaggaccccggcgttgcgtctggctatgtatccagtgctgatctggtgttcacaccaaacagcggggctagtagtgtcagcctcgtgcccagtcttggcctgccatccgatcagaccccatccctgtgtcccggcctagctagcggcccccccggcgcccctggaccagtcaagagcggatttgagggctacgtggagctccctcccatcgagggaaggtccccacggtccccccgaaacaaccccgtgcctccagaggcaaagtcccccgtcctgaatcccggagagcgccctgcagacgtttcaccaacatctccacagcccgaggggctccttgtgctgcagcaagtcggggattattgctttttgcccggcctggggccgggacccctcagcctgcgttctaagccatcctcgcccggcccagggcccgaaattaaaaatcttgaccaggcatttcaggtgaagaaaccaccaggccaggctgtccctcaggttcccgtgattcagctttttaaagcactgaagcagcaggattatttatccctgcctccttgggaggtgaacaaaccaggagaagtctgttag

SEQ ID NO: 112728 - DNA, 2670 bp, synthetic construct
  misc_feature 1..2670: note = Description of Artificial Sequence: Synthetic coding sequence
  source 1..2670: mol_type = other DNA
atggtgctcgcacaaggtctcctgagcatggccctgctggctctgtgctgggagcgtagcctggctggggctgaagagacaattcccttacaaacgcttagatgctacaacgactacaccagccatataacatgcagatgggcagatactcaggatgcccaacgtttagtaaatgttacactgatacggcgggtgaacgaggacttactggaacctgtgtcttgcgacctctcagacgatatgccctggtctgcctgccctcacccaagatgtgtccctcgccgctgcgtgatcccctgccaatccttcgttgtcactgacgtcgactacttcagcttccagcctgacaggccattggggacgcggctcacagtgacgctgactcagcacgtccagcccccggaacccagagacttgcaaatctcaaccgaccaagaccactttctgctcacctggtccgtggccctgggatcacctcagtcgcattggctgagtcccggagatctggagttcgaggttgtgtacaaaaggctgcaagatagctgggaggatgccgccatcttattgagcaacactagtcaggcaactttggggccggagcatctcatgccgtctagcacctacgtggcaagggtgaggactcgtctcgctccagggtctcggctatctggtaggcccagcaagtggtccccagaggtttgctgggattcccagcccggcgacgaagcacaacctcagaacctggagtgtttcttcgacggcgccgcggtgctctcgtgcagctgggaagtgcggaaggaggttgcctcatcggtctcatttggcttgttctacaaaccctcaccagacgctggcgaagaggagtgctccccagtcctccgtgagggcctgggttccctgcacactaggcatcattgtcaaatccccgtacctgatccagctacccacggtcagtacatcgtgagcgttcagccgcggcgtgcggagaagcacataaagtctagcgtgaacattcaaatggctccccccagtctgaacgttactaaggatggggactcttatagcctgcggtgggagacaatgaaaatgcgttacgagcacatcgaccatacgttcgagatccaataccgcaaagacacagctacctggaaggactctaaaactgagacccttcagaacgctcacagtatggcgctcccagccttggagccgtccactaggtattgggcaagggtgcgcgttaggacctctagaaccgggtataacgggatctggtcagagtggtccgaggccaggtcctgggacaccgagagcgttctgcccatgtgggtccttgctctgatcgtaattttcctgaccatagccgtgctgctcgcccttcgattctgcgggatctacggctacaggctgcggaggaagtgggaggaaaagatcccgaatcctagcaaatcgcacttgttccaaaacgggagcgccgagttatggccacccggcagcatgagtgccttcacttccggtagtccccctcaccaggggccatggggttctcgtttccctgagctggaaggggttttcccagtcggtttcggtgactctgaggtctctccgctgaccatagaggacccaaagcacgtgtgtgatccgccgtccggacctgatactaccccagcagcttctgacctgcccacagagcaaccaccaagccctcaaccaggcccgccagcagcatcacatactcccgagaagcaggcaagtagcttcgatttcaacgggccctacttaggcccccctcattccagatccctgcctgacattctcggccaaccggagcctccacaagagggtggtagtcagaagtctcccccgccaggaagccttgaatacttatgcctgcccgccggcggccaggttcaactagtgcctcttgcccaggccatgggcccaggccaggcggtggaggttgagcggcgaccctcccagggcgccgctggctctccctccctcgagtcaggaggggggcccgctccgcccgctttggggcccagagtagggggccaagaccagaaggatagcccagtggcgatacccatgagctcaggggacacagaagatcctggggttgcgtcaggttatgtaagcagcgcagatctggtgttcacccctaatagtggggctagctccgtgtcattggtgccatctctaggtttgcctagcgaccagaccccctcgttgtgcccaggtcttgcgtccgggcccccaggtgcccctggtcccgtcaaaagcggattcgagggctacgttgagctgcctcctatcgaaggccggtcgcctcgtagccctcgtaataacccagtcccaccagaagccaagtcacccgttcttaacccgggggagcggccagcagatgtgtcgcccacaagcccccaaccagaagggctcttggtgctccagcaggtgggggattactgcttccttccagggctgggacccggccctctcagcctgagatcaaagccatctagtcctggccccggccctgaaataaaaaacctcgaccaggcattccaggtcaagaaaccacctggtcaggctgtgccacaggtgcccgttattcagctgtttaaagccttggtagtttcggtgatgtctgtcggcccaccagtgccttag

SEQ ID NO: 112729 - DNA, 2352 bp, synthetic construct
  misc_feature 1..2352: note = Description of Artificial Sequence: Synthetic coding sequence
  source 1..2352: mol_type = other DNA
atggccaggctggggaactgcagcctcacatgggctgccctgatcatcctactgctgcccggttcactcgaagagtgtggccacatctccgtaagcgcacctatcgttcacctgggggacccaattactgcttcatgtatcataaaacagaattgctcccatctggatccagagccccaaatattgtggaggctcggggcagagttacagccaggagggaggcagcagaggctgagtgacgggactcaagaatcaatcataaccctgccccaccttaatcacactcaggctttcctttcctgttgcctcaattggggaaattcacttcagatcctagatcaggtcgagctgagagccggatatccgcccgccattccacacaacctttcttgtttaatgaacctgaccacatcctctctgatctgtcagtgggagcccggtccggaaacacacctcccaacatcctttacactcaaatcgttcaagagtcgtggcaactgccagacccagggagacagtattttggattgtgtcccaaaagatggacagagccattgttgtattccccggaagcatttattgctttatcagaacatgggtatctgggtccaagccgagaatgcccttggcacttccatgtccccacagctctgtctggaccccatggacgtagtgaagctggagccacccatgctaagaactatggatcctagccctgaagcagcaccccctcaggcaggctgtttgcagctgtgctgggaaccctggcagcccggtttacatatcaaccagaaatgtgagttgcgacacaagcctcaaagaggggaggcaagttgggcgctggttggccccctgcccctcgaggccctgcaatacgagctgtgcggactgcttcccgcaacagcctacactctccaaattaggtgcattaggtggcccctgcctggacactggtccgattggagtccatcgttggaactcagaactacagagcgggcccccaccgtgcgattagacacctggtggagacaaagacagttggaccctcggaccgtacaattgttctggaaacctgtccccctggaagaggattccggtcgcattcagggatatgtggtctcatggagaccgtcagggcaggctggcgctatacttcccttgtgcaatacaaccgagctttcttgcacattccacctcccaagtgaagcacaggaggtggcactggttgcgtataactccgcagggacttcgcggcctaccccagtggtgttttccgaaagccggggcccagccttgacacgcctacatgctatggctagggacccacacagtctgtgggtggggtgggaaccccctaacccttggcctcagggctatgtcatcgagtggggcctcggcccgccaagcgcgagcaatagcaacaaaacatggcgcatggagcagaacggacgcgcaactggcttcttgctcaaggagaatatccggccattccagctgtacgagatcattgtgaccccactttatcaggataccatgggccccagccagcatgtttacgcctatagtcaggagatggccccatctcacgcaccggagctgcacctgaaacacatcggcaaaacatgggcccagctggagtgggtcccagagcccccagaactgggaaagagtcccctaactcattacactatcttctggaccaatgcacagaatcagtcattcagcgcaatccttaatgcaagctcccgaggtttcgtgttgcacgggttggagcccgcctcactctaccatatccacttgatggcggccagccaggcgggcgcaacgaatagcacggtactcacattaatgacactcacccctgagggctctgagctgcacattattttgggcctgttcgggctcctcctattactcacctgtctttgtgggactgcatggctctgctgttctcccaaccgtaagaatcctctttggccaagcgttccggacccagcgcatagttcactcggatcttgggtgcccactattatggaagaggacgccttccaactgcccgggctggggacgccaccaatcaccaagctgacagtactagaggaggacgagaagaaacctgtcccttgggagagccacaattccagcgagacctgcgggctgcccactttagttcagacctacgtgctgcaaggagatccccgcgccgtcagcacgcagccccaaagccagtcaggtacaagcgaccaggccggccccccgagacggagcgcctattttaaagaccagattatgctgcaccctgcacctcctaacggactgctgtgcctgtttccaattacctccgtactgtag

SEQ ID NO: 112730 - DNA, 2310 bp, synthetic construct
  misc_feature 1..2310: note = Description of Artificial Sequence: Synthetic coding sequence
  source 1..2310: mol_type = other DNA
atggctcgcctgggtaactgttccctgacatgggcagcactgataatactcctgctccccggttccttggaagagtgcggtcatatctccgtatctgccccaattgtgcaccttggagatcctattactgcctcttgtattatcaaacagaactgttcacacctggaccccgaacctcagatactatggcgcttaggggctgagcttcaacctgggggacgacaacagagactgagtgacggcacacaggagtcaatcattacccttcctcacctgaatcacacccaggcttttctttcctgttgcttgaactgggggaattcattgcaaatactggaccaagtggagttaagggctggatatccccctgccatccctcacaacctctcctgcctgatgaacctgaccaccagctctctgatctgccagtgggaacctggccctgaaactcatttaccaacttcttttactctcaagagcttcaaaagccgaggtaactgccaaacccagggggacagtatcttagactgcgtgccaaaggatggtcaatcccactgctgtattccccgtaagcatctgctgctgtaccagaacatgggcatctgggtccaggcggagaacgcgttaggaacctccatgagtccacagctgtgcctggatcccatggatgttgtcaaactcgagccccccatgttacggactatggacccatcacccgaagccgctcccccccaggccggttgtctgcagttgtgttgggagccatggcaaccagggctgcacattaatcaaaaatgtgagctgagacacaagccccagcggggcgaagcttcgtgggccctcgtgggcccacttccactcgaggccttacagtacgaactgtgtggtctgttgccggccaccgcatacaccctacagatccggtgtatccggtggccacttcccggtcactggtctgactggtcccccagcctcgagttaagaactaccgagcgggccccaacggtgcggcttgatacttggtggcggcagaggcaactcgaccctagaaccgtccagctcttttggaaacccgtgcctctggaggaggattcagggcgaatacagggatacgtcgtctcctggagaccttcgggccaagctggtgcaattttgcccctgtgcaatacaactgagctgagctgcacattccaccttcctagcgaggctcaagaggtcgccctagttgcatacaactctgctgggacctcgcgaccgacccctgtggtgtttagcgagagcaggggccctgctctgacccgccttcacgctatggcgcgcgatccacatagcctgtgggtcgggtgggaaccacctaacccatggccccaagggtacgtgattgagtggggtctggggcccccgtccgcctccaatagcaacaagacctggcgcatggagcagaacggccgcgcaaccggattcctcttgaaagagaacattagaccgttccaactgtacgaaatcatagtgaccccgttataccaggatacgatggggccgtcccagcacgtgtacgcttattcgcaagagatggcacccagtcacgccccagaactgcacctgaagcacatcggcaagacttgggctcagttggaatgggtgcctgaaccacccgagctcgggaagtcaccactcacacattacaccatcttttggaccaacgcccagaatcagagctttagcgcaatcctcaatgcatcttcacggggtttcgttcttcatggactggagcctgcgtcactataccacattcatctgatggcagccagtcaagccggcgccactaactccactgtgctcacccttatgactctcacgcccgccgggaggataccatctggccaagtgtcccaaacacaattgaccgccgcttgggcccccggctgcccccagagctggcgtcgtatgcctagctcctgcccggctctcgctcgtcacccgagcccgtccagccaatgttggaggagaatgaaacggtcaagatgccccggctctcccattacagcccagcgacctgtcgcctcacctctttggagtcgccccatgtgtagtaggggcactcaagagcaattcccacctagtcctaatccatctctggccccagccatccggtcattcatggggtcatgctgggcagcaccccaagcccaaggccaggggactatctctgctgtaacaccgctgagtcctagttggagggcgtcgccacccgctcctagtcctatgcgcacatctggctctaggcccgctccgtggggcccttggtag

SEQ ID NO: 112731 - DNA, 2511 bp, synthetic construct
  misc_feature 1..2511: note = Description of Artificial Sequence: Synthetic coding sequence
  source 1..2511: mol_type = other DNA
atggctcgccttggcaactgttctcttacatgggctgcactaattatcttacttctccccgggagtctggaagaatgcgggcacattagtgtctccgcccctatcgtgcatcttggagaccctataactgctagctgtatcattaaacaaaattgcagtcatctggatcctgagccccagatcttgtggagactgggcgctgagcttcagccaggaggaaggcaacaaagactttccgacgggacgcaggaatctataatcaccttaccacacctaaatcacacccaggctttcctgtcctgttgcctgaattggggtaatagcttgcaaattctcgatcaggtggaattgcgggcggggtatcctccggccatcccacacaacctgagttgcctcatgaaccttactacttcgagtctgatctgtcagtgggagcccggacctgagacacacctcccaacgtcttttacactcaaaagcttcaaatcaagaggaaattgtcaaactcagggcgactcaatcctggattgcgtgcctaaggacggtcagagccactgttgtatccctagaaagcacctcctactgtaccagaacatgggcatctgggtccaggcagagaatgctttagggacctccatgagccctcagttgtgtctggatcctatggacgtcgtaaaactggagccccccatgttgcgcacgatggatcccagccccgaagccgctccccctcaggccggctgcctgcagctttgttgggagccttggcaacccggactgcatatcaaccagaaatgcgagctgagacacaagccacagcggggcgaggcttcctgggctctcgttggcccgttacccttggaagcccttcagtacgaactgtgtggcctcctccccgcaacagcctatacccttcaaattcgttgtattcgctggccattgcccgggcattggagtgactggagcccgtcactggagcttaggaccaccgagcgggcccccacagttcgcctggatacgtggtggcgtcagcgacagctagatcccaggacagtccagttattctggaagccagtcccattggaagaagacagcggcaggatccagggatacgtcgtgtcctggagaccaagcggacaggcgggcgccattcttccgctctgcaacaccaccgaacttagttgtacatttcatttaccgtccgaagcccaagaggtggcccttgtagcatataatagcgcagggacatcccgcccgactcctgtggtcttttcggagagcaggggacccgcactgaccaggctccatgctatggctcgggatcctcactcactctgggtgggatgggagcctcctaatccatggcctcaaggctacgtgatcgaatggggactggggccccccagcgcctccaattccaacaaaacttggcgaatggaacagaacggaagagcaactgggtttctgctgaaggagaatattcggccatttcagctgtacgaaatcatcgtgaccccactgtaccaggatacgatgggaccaagtcagcatgtctatgcttacagtcaagagatggcaccttctcatgctcccgaattacacctgaagcacattggtaaaacctgggcccagttggaatgggtgcccgaacctcctgaactcgggaagagcccactgacccattacaccatcttctggacgaacgcacagaaccagagtttttcagcgatacttaatgcctccagtagaggttttgttttgcacggattggagcccgcatctttgtatcacatacacctcatggccgccagccaggccggggccacgaattcgacagtgctgaccctgatgacgctgactcctgagggttcagaactgcatatcattctcggcctatttggtctgctcctactccttacgtgcctatgcggtaccgcatggctctgctgttcacccaatagaaaaaatcccctgtggcccagcgttccagatcctgcgcactcttctctgggctcttgggttcccaccattatggaggaagacgcctttcaattgcccggattgggcaccccgcctatcaccaagctgaccgtcttagaggaggacgagaaaaagccagtgccatgggagtcacacaacagcagcgagacctgcggcttgcctaccctggtccagacctacgtgcttcagggtgatccgagggctgtgtctactcaaccccagtcccaaagcggcactagtgatcaggtcctgtacggtcaactgctgggctcccctacgtccccagggcctgggcactacctgagatgcgactcaacccaacccctgctagcaggcttgacaccaagcccgaagagctacgaaaacctgtggtttcaagcctcacccctcgggacgctggttaccccagccccatcccaggaggacgattgcgtgttcggcccactcctgaactttcccctgctgcagggtatccgagtccacggcatggaagcactggggtccttctag

SEQ ID NO: 112732 - DNA, 2592 bp, synthetic construct
  misc_feature 1..2592: note = Description of Artificial Sequence: Synthetic coding sequence
  source 1..2592: mol_type = other DNA
atggcacggctgggaaattgtagcctgacctgggctgccctgatcatcctgctcctacctgggtctttagaggaatgcggtcatatttcagtctcagcccctatcgtgcacctgggtgaccccataacagcatcctgcattatcaagcagaactgctcacacctggaccccgagccccagatcctgtggcgtctcggggctgagctccagccaggaggccggcagcagaggctgagtgatggtacacaggaatccatcataaccctgccccatttaaatcacacccaggcctttctttcctgctgtttgaattggggtaacagtttgcagattcttgaccaagtcgagcttcgagccgggtaccccccagcaatcccccacaacctatcctgcctgatgaacctcaccacatctagcctgatctgccagtgggaaccgggccccgaaacacatttgcccacttcgtttaccctgaagtcctttaaaagcaggggcaattgtcagacacagggggatagcattctcgattgcgtgccaaaggacggtcaatcgcactgctgtatccccagaaaacatctccttctgtaccagaatatgggcatatgggtacaggccgaaaatgcccttggcacaagcatgtctcctcaactgtgtctggatcctatggatgttgtcaaactcgagccccctatgctgaggactatggaccctagccccgaggccgcaccaccacaggccggctgcctccagctgtgctgggaaccttggcagcctggcctgcacattaatcagaagtgcgaactgaggcataagccgcagcgcggcgaggcttcctgggctcttgtgggtcctctaccactggaggctctgcagtacgaactctgcggcctgttgccggccacggcatacaccttacagattcgctgcattcgctggcccctgcctgggcattggagtgattggtccccaagcctggagcttagaaccactgagcgtgccccgaccgtgcggctggacacttggtggaggcaaaggcagctggatccaagaaccgtgcaactgttttggaagcctgtgccattggaggaggactcaggtcgcatccagggatatgtcgtcagttggcgcccttccggccaggcgggagcaatacttcctctttgcaatacaaccgagctgtcatgcacgttccacctcccaagtgaagcccaagaagtagctctggtggcgtataactctgccggcacatctaggcccacccccgtggtatttagtgaatctagggggccggccctcacccggctgcacgcaatggccagagatccacacagcctgtgggtagggtgggagcctcccaacccgtggcctcaagggtacgtgatcgagtgggggctggggccaccttccgcttccaactcaaacaaaacctggagaatggaacagaacggtcgcgctaccggttttctgttgaaagagaatatccgacccttccagttgtacgagatcattgtgactcccctgtaccaggacactatgggacccagtcaacatgtctacgcatacagccaggaaatggcacccagccacgctccagagcttcacctcaaacatataggcaagacctgggcccagctggaatgggtccccgaaccaccggaactgggtaaatcacctctgactcattatacaatcttttggaccaacgcacagaaccaatccttctccgccattctgaacgcctccagcagagggtttgttctgcacgggctggaacccgctagcttgtatcacatacatttgatggcagcttcccaggccggggcaacaaactcgacagtgctcacactgatgaccttgacccccgagggtagcgaactgcatattattctcggattgtttgggctgttactgctcctgacttgtctgtgcggcacagcgtggttatgttgctcacctaaccggaagaacccactctggccgagtgttcctgatccggctcactcctccctggggagctgggtgccaaccattatggaggagctgcccgggccgcggcagggacagtggctgggacaaacgagtgaaatgtcccgagcactgaccccacacccgtgcgtccaagatgcctttcagctacccgggctaggaacccctcccatcaccaagcttacggtgctggaagaagacgaaaagaagccggttccttgggaaagccataattcaagcgaaacctgtggcctcccaactttggtgcaaacatacgtgctgcagggtgacccaagggctgtgtctacacaaccgcaaagccagagtggcacatccgatcaagtcctgtatggccagctcctcggatcgcctacctctccagggcccggccactacctgcgttgcgacagcacacagccattactagctggcctaaccccatccccaaaatcctatgagaatttgtggtttcaggcttctcccttagggaccttggtcacacctgcaccgtcccaggaagatgattgtgtattcggacctttgctcaacttcccgctgctgcaaggcatccgggttcacgggatggaagccctggggagcttttag

SEQ ID NO: 112733 - DNA, 2352 bp, synthetic construct
  misc_feature 1..2352: note = Description of Artificial Sequence: Synthetic coding sequence
  source 1..2352: mol_type = other DNA
atggctaggttggggaactgttccctcacatgggccgcgctgatcattcttctactgcctggttctttagaagagtgcggccatatttccgtgtctgcccccatcgtgcacctgggtgaccctattaccgctagctgcattattaagcaaaactgcagccacttagatccagagccacagatcctgtggcgacttggcgcagagctccagcctggcggaaggcagcaacggctttcagacggcacccaggaaagcattattacattgccccacctcaatcacacccaggcttttctgtcatgttgtctgaattggggtaatagcctccagattctggatcaggtggaactgagagctggatacccacctgctatcccccacaatctgtcctgtcttatgaacttaacaacgtcgtcactaatctgccagtgggagccaggaccagaaacacatttacccacttcattcacgctgaagtctttcaaaagcaggggcaactgccagacccaaggagatagtattctggattgcgtacctaaagacggtcaatcccattgctgcatacctcgcaaacatctgttgctgtatcaaaatatgggaatctgggtccaggccgaaaatgctctgggcacttcaatgagtccacagctatgcctggatcccatggacgttgttaaacttgagcctcccatgctgcgcaccatggacccctcacccgaagctgccccccctcaggctggctgtcttcaactctgttgggaaccctggcaaccaggtctgcacatcaaccagaagtgcgagcttaggcataagccacaacgcggtgaggcttcgtgggcgctggtgggacctctcccactggaagcattacagtatgagttgtgtggtctgctgccagccacggcttacacactgcagatcagatgcatccgctggcccctgcccgggcactggtcagattggtctccttcattggaacttaggaccaccgagcgggcccctacggtcaggctggacacttggtggcggcaacgccaactcgacccgcgcacggtccaacttttttggaaaccagtgcccttagaggaggactcagggcggattcagggctatgtcgtgtcatggcgaccaagcggacaggcaggtgctatcctgccgctgtgtaacacaactgaactctcatgcacattccatctgccctctgaggcccaggaggtggcactggtcgcttacaatagtgccggcactagtagacctacccccgtagtgttctctgagtctagaggccccgctctgacccggctccatgctatggcaagagacccgcactcattgtgggtcggctgggagccaccaaacccttggccccagggctacgtcattgagtggggactggggccaccaagtgcgagcaactcaaataaaacctggcgcatggagcagaatggcagagccaccggtttcttgttaaaagagaatattcggccattccaattgtacgaaattatcgtgacccccctctaccaagacaccatgggtccctcccaacacgtgtacgcatactcacaggaaatggcgccctcccatgcccctgaactgcacctcaaacacataggaaagacctgggcacagcttgaatgggtacccgaacctcccgagctcggcaaatcacccctgactcactatactatcttttggacgaacgcgcaaaatcagagtttttcagctatcctaaacgcttccagccgcgggtttgtgctccatggcctggagcctgctagtttgtatcacatccacctgatggcagcatcacaggccggagcgaccaattcaaccgttcttacattaatgaccctgactcctgaagggtccgaactgcatatcatactgggactgttcggattgttattactgctaacttgcctctgtggcacagcctggttgtgttgttcgcctaatcgcaaaaacccattgtggccgagtgttcccgatcctgctcatagttctcttgggtcttgggtccccacaataatggaggaagatgcctttcaactccctggactcggcacacctccaataacaaagctgactgtgctggaagaggatgagaagaagccggtaccttgggagtctcacaatagttcagaaacctgtgggttgcctactctggtgcaaacatatgtcctgcagggagatccccgtgcggtctctacacagccgcagtctcagtctggaacttccgaccaggcagggcccccaagaagatccgcgtacttcaaggatcagattatgctgcacccggccccacctaacgggctgttatgtctttttcccatcacctctgttctgtag

SEQ ID NO: 112734 - DNA, 2511 bp, synthetic construct
  misc_feature 1..2511: note = Description of Artificial Sequence: Synthetic coding sequence
  source 1..2511: mol_type = other DNA
atggcaagactgggcaattgttctctgacctgggccgccctgataatcttgctgctgcctggaagcttggaagaatgcggccacatcagcgtgagtgctcctatcgtgcatcttggcgatcctattacggcatcatgcataataaaacagaactgtagtcacctagaccctgagccccagatcttgtggcggcttggggcagaactacaaccgggaggacgccagcagaggcttagtgacggcactcaggaaagcattattacacttcctcatcttaatcatacccaagcgtttctgtcatgttgtctgaattggggtaattctttacagatcctcgaccaggtggagttgcgcgccggttatcccccagccataccacacaatctgagctgcttgatgaacctgaccacctcaagcctgatttgccagtgggagcccgggccagaaacccacctcccaacatcgtttacgctgaaaagcttcaagtcccgcggaaactgtcagacccagggggactccatcctggattgtgtgcctaaagatggccagtcccactgctgcatcccccgaaagcacctcctcctctaccagaacatgggcatctgggtgcaggccgaaaatgcgctgggaacgagtatgtcccctcagttgtgcctggacccaatggatgtggtcaaactggagccacctatgctgcgaacaatggacccaagtcccgaggccgcgcccccccaggctgggtgcttacaactttgctgggagccttggcagccaggcctgcacatcaaccagaagtgtgaactgcgtcataaaccacagagaggcgaagcctcatgggcccttgtagggcccctgcccctggaggcactgcaatatgagctgtgtggcctccttccagctacagcctatacactgcaaatcaggtgcatccgttggcccctacccggacactggtccgattggagcccttccctggaactgaggaccaccgagcgcgcccccaccgtgcggctggatacctggtggcgacagcgccagcttgacccccgaaccgtccagctattctggaagcctgtgccattggaagaggattccggcagaattcaggggtacgttgtgagctggaggccgtcaggccaggcgggcgcaatcctgcctctgtgtaacacaaccgaactctcctgcacttttcacctgccctcagaagcacaagaggtggccctggtcgcatacaactccgcggggacctctagaccaactcccgtggtctttagcgagtcgcggggcccagccctgaccaggctgcatgcaatggctagagaccctcactccctctgggtcggctgggagccccctaacccatggccgcaaggctatgtgatcgaatggggcctgggcccccccagcgcttctaatagcaacaagacatggcgtatggagcagaacggacgcgccaccggttttctcttgaaggaaaacattagacccttccagttgtatgaaatcattgtgacacccctatatcaagacacgatgggcccaagtcagcacgtgtacgcatactcccaggaaatggcaccctcccatgcaccagagctacacttgaagcacatcgggaagacctgggcacagcttgagtgggtcccagaaccacctgagctggggaaaagcccactgacccactatacgatattttggacgaatgctcagaaccagtccttcagcgcgatcttgaacgccagcagccgcggattcgttcttcatggcttggagcccgcttctctgtaccacattcacctgatggccgctagtcaggccggggccaccaattccaccgtgctgacacttatgactctgacacctgaaggtagcgaattgcacataattctcggcttgttcggtctcctgctgctgttgacatgtctctgcggaaccgcctggctatgctgtagtccaaatcggaaaaaccccctttggccatctgtgccggatccagcccactcctctctgggctcctgggtgcctacaataatggaggaggacgctttccagctgccaggactcgggaccccccccataaccaagctgaccgtgctggaagaggacgagaaaaagccagtgccctgggagtctcataactcgtccgaaacctgcgggctccctactttggtccagacctacgtgcttcagggtgacccaagagccgttagcacacagccccagagtcagagtggaactagtgaccaagtcttgtacggccagctgctgggcagcccaaccagtcccggtcccgggcactatctcagatgcgactctacacagccactacttgccggattgactcctagtccaaagagctatgagaatttgtggttccaggcctcaccgctgggaactctagttacaccagcacccagccaggaagacgattgtgtgtttggacccctcctaaactttccccttcttcagggaattcgcgtgcacggaatggaggcccttgggtccttttag

SEQ ID NO: 112735 - DNA, 2511 bp, synthetic construct
  misc_feature 1..2511: note = Description of Artificial Sequence: Synthetic coding sequence
  source 1..2511: mol_type = other DNA
atggcaaggctgggcaactgtagtctgacctgggccgccctgatcattctactcctccctggctctctggaggagtgcggtcacattagcgtgtccgccccaattgtgcacctgggggatcccataacggcctcttgcataatcaaacaaaactgttctcatctcgatcctgagccccagattctctggcggctaggagctgaactgcagccaggcggccgacagcagaggctttctgacggcacacaggagagtataatcacgttgccccacttgaaccacacccaggcctttctgtcatgctgtctgaactggggtaacagcctgcagatcttggaccaagttgaactgcgcgccggataccccccagctatccctcacaatctgagctgcttgatgaatttaacaacatctagccttatctgccagtgggagcctggccctgaaacccatctgcccacatcattcacgctgaagtcttttaaaagccgcggtaactgtcagacacaaggcgattctatactggactgcgttcccaaagatgggcagagccattgttgtataccccggaagcacctgctactttatcagaatatgggaatctgggtgcaggccgagaatgcactcggcactagcatgtccccacagttgtgcctggaccccatggatgtagtcaaacttgagcccccgatgctacgcacaatggacccaagcccggaagctgctcccccacaggccggctgtttgcagctttgttgggagccatggcagccagggctccatattaatcagaaatgtgagctgcgccataagcctcagagaggagaggcatcctgggcgctcgttgggcccttaccactcgaggccctccagtatgaactctgcggcttactgccggcaactgcctacacactgcaaattaggtgtattcgatggcccctacctggccattggagcgattggtccccttccttagagctacgcaccaccgagcgggcccctactgtgagactcgacacatggtggaggcagcgccaactcgatccccgtacagtgcagctcttctggaagccagtgcccttggaggaggattcagggcgcattcagggctatgttgtaagctggaggcccagcggtcaggcgggtgccatcctgcccctgtgtaatacaacagaacttagttgtactttccacctcccgtctgaggcccaggaggtggcactggtggcatataacagcgcaggaacatcccggcccacaccggtggtcttctcagagagccggggacctgccctaacccggctgcacgcgatggcaagggacccccatagtttgtgggtgggctgggagccaccaaacccatggccgcaggggtacgttattgagtggggcttgggacctccttccgcctctaatagtaataagacatggcgcatggaacagaacggccgtgcaactggcttcctcctgaaagagaacattagaccctttcagctctacgagatcatagtaactcccctgtatcaggatacgatgggaccaagtcaacatgtgtacgcctattcacaggagatggccccatctcacgccccggagttacacctgaagcacattggcaagacttgggcccagctggagtgggtaccagagccccctgaactcggaaagtcccccctgacccattacacaatattctggaccaacgcccaaaaccagtcattctctgccatccttaatgcaagctcgagaggctttgtattgcacggcctcgaacccgctagcctgtaccatattcacctcatggctgccagtcaggcaggggcaacaaattccaccgtgctgaccctaatgacactgactccagaggggtccgagctccatatcatcctcgggttgtttgggttgctgctgttgttgacctgcctgtgtggcacagcctggttatgttgcagccccaatcgtaagaacccactgtggccttcggtgcccgaccccgcacacagtagcctgggctcctgggtgcctacaatcatggaggaggacgcctttcagcttcctggcttgggcaccccccctatcactaagctaacagtcttagaagaggatgagaaaaaaccagttccttgggagagccacaattcaagcgagacctgcgggttacccacactggtacagacttacgtgctgcaaggcgaccctcgggcggtttcgacccaaccgcagtcacagagcggcacaagcgaccaggtcttgtatgggcagctcctggggagccccacatctccagggccaggccactacctccgttgtgactctacccaacccttgttagctggactgacgccgagccctaagtcatacgagaacctctggttccaagcatccccactgggaacacttgtgacacctgcgcccagtcaagaagacgattgtgtctttggcccattgctcaattttcctctgctgcagggaatacgtgttcacggtatggaggccctaggctctttttag

SEQ ID NO: 112736 - DNA, 2592 bp, synthetic construct
  misc_feature 1..2592: note = Description of Artificial Sequence: Synthetic coding sequence
  source 1..2592: mol_type = other DNA
atggccaggctaggcaactgctctctgacgtgggctgccctgataatcctcctgctccccggatccctggaggaatgcggccacatctctgtgagcgctcctattgttcacctgggagaccccatcactgcaagctgcataataaaacagaattgctcccacctggaccctgagcctcagatcctctggaggctgggcgcagaattgcagcccggcggcagacagcagagactgagcgatgggacacaagagagcataattaccttgccgcatctcaaccatactcaggcttttctttcctgttgtctaaattggggcaattccctccagatcctggaccaagtcgagttacgggccggctatcctcctgctattccgcataacttgagctgcctgatgaaccttaccacctcctccctgatatgccagtgggagccaggaccagagacgcacttgcccacatcttttacattgaaatcattcaagtcccgcggcaattgtcagacacagggcgacagcatcctggactgcgtgccgaaggacgggcagagtcattgctgcattcctcgaaagcacctgcttttataccagaatatgggaatctgggtacaggccgagaatgctctcggcacatccatgtcaccgcagctgtgtctcgacccaatggacgttgtaaaactggagccgcctatgctgaggactatggatccctcccccgaggcagctcctccccaagctgggtgtttacagctttgctgggagccctggcaacctgggctccacatcaatcaaaagtgcgaattgaggcataaaccccagcggggtgaagcttcctgggcactggtcggccctctgcctctggaagcacttcagtacgagctgtgtgggctgctgccggccacagcttatacactacagatccggtgtattcggtggcctctgcctggacattggtccgattggagtccatctctggaactgaggactacagaacgtgccccaactgtgcggttagacacttggtggagacagcggcagttggacccgaggactgtccagttattttggaaacccgtgcctcttgaggaagactccggtagaatccaggggtatgttgtcagttggaggcctagtggacaggccggggccatcctcccactctgtaacactaccgagctctcttgcactttccacctgccgtctgaagcacaggaggtcgctctcgttgcatacaattctgcaggaacttccaggcccactcccgtggtcttttctgagtccaggggcccagcccttacaaggctgcacgcgatggcccgagatccacactctctctgggtcggctgggagccccctaatccctggccccagggttacgtcatcgagtggggtctgggcccgccctccgcctctaactccaataaaacttggcgaatggaacagaatggaagagccaccggttttcttctcaaggagaatatccgaccatttcaactgtatgaaatcatcgtcacaccgctctatcaagacacgatgggaccatcccagcatgtgtacgcttactctcaggaaatggcccctagccacgccccagaactccacctcaagcacatcgggaaaacctgggcgcagttagagtgggtccccgagcccccagagctcggcaagagtccactgacacattacacaattttttggactaacgctcagaaccaaagcttctctgcgatattaaacgccagcagcaggggatttgtgcttcacgggctggaacccgcatcattataccatatccacctgatggctgcctctcaagccggcgccaccaattctaccgttctcactctaatgactctgacacctgagggtagtgaactccatataatccttggcctgtttgggcttttgctcctgctcacttgtctgtgcggcactgcctggctatgttgctcacctaaccgcaaaaacccgctgtggccctctgtgccagacccagcacacagctccttaggttcttgggtgcctactattatggaagaactgcctggccccagacagggccagtggctgggccagacctccgagatgagccgggccctcacaccccacccatgcgtccaggacgcttttcaactcccgggcctggggactcctcctatcacaaaattgacagtgctggaggaggacgaaaagaaacctgtgccttgggaaagccacaattcatctgagacttgcgggcttcctaccctagtccagacttatgttttgcagggggatccacgggctgtgagcacgcagccgcagtcccagtcggggacatctgaccaggtcctctatggacagctgcttgggagccctacatcgccggggccaggtcactatctgagatgtgatagtactcagccacttctggccggtttgaccccttctcctaaatcctacgagaacttgtggttccaggcctccccactcggcactctcgtgacacctgcccccagccaggaggacgattgtgtgttcggccctttgttgaatttcccacttctacaggggattcgagttcacgggatggaggctctcggctccttctag

SEQ ID NO: 112737 - DNA, 1167 bp, synthetic construct
  misc_feature 1..1167: note = Description of Artificial Sequence: Synthetic coding sequence
  source 1..1167: mol_type = other DNA
taaacctcacgtccaactccagttgtattttccgaatcacgcggcccagcactaacaagattacacgccatggcccgggacccacatagcttgtgggtgggatgggaaccacccaatccttggcctcagggttatgtaattgaatggggcttgggacccccttcagcctccaactcaaataaaacatggcgtatggaacagaatggtcgggccacggggttcctgttaaaggccccatctcacgctccagagctgcatctgaagcacatcggaaaaacttgggctcagctcgaatgggtccccgaaccaccagagctgggcaagtcccccttgacgcactacacgatcttctggacaaatgcgcagaaccagagcttctcagccatactgaacgccagcagtagggggttcgtattacatgggttagagcccgcctctctgtatcacattcacctaatggctgcaagtcaagccggtgcgaccaatagtacagttctgaccttgatgaccttgacacctgaagggtctgaactccacattatcctcgggctgtttggcttgttattattactgacatgcctttgtggtacagcctggctgtgctgttcacctaatcgcaaaaatcccctgtggccatctgtgccagatccagcccatagctccctgggttcctgggtccccacaatcatggaggaggatgcatttcagctcccgggattagggaccccccccatcacaaaattaaccgttctggaggaagacgaaaaaaaacctgtcccttgggagtctcacaactctagtgagacgtgcggattgcctacattggttcagacgtacgtcctgcaaggagacccacgggcagtgagtacgcagccacagtcacaatccggaacaagcgatcaggttttgtatgggcagctactcgggtcacccacaagtcccgggccaggtcattatcttcggtgcgacagtactcagccattactcgccgggttaacaccatcaccaaagtcttacgagaatctctggtttcaggcctcacctctgggtacgctggtcacccccgctccgtcccaggaggacgactgtgtgttcgggcccttgctgaactttccccttttgcagggcatacgcgtgcacgggatggaggcattagggtctttttag

SEQ ID NO: 112738 - DNA, 66 bp, synthetic construct
  misc_feature 1..66: note = Description of Artificial Sequence: Synthetic coding sequence
  source 1..66: mol_type = other DNA
atggcgcgtctgggtaactgcagcttgacatgggcggccctgataatcctgctgctcccagggtag

SEQ ID NO: 112739 - DNA, 675 bp, synthetic construct
  misc_feature 1..675: note = Description of Artificial Sequence: Synthetic coding sequence
  source 1..675: mol_type = other DNA
atgtccgccgtgggagccgctaccccttaccttcaccatcctggggactctcacagcggcagagtttcctttcttggagcccagcttccccctgaggtggcggccatggcccgccttttaggcgatttagatcggtctactttcagaaaactgcttaagttcgttgtgtcatctctgcagggcgaggactgcagggaagccgtgcaacgtctaggagtttccgccaaccttccagaagaacagctcggtgccctccttgcaggcatgcacacactactccagcaagcactgcgcctgccaccaacttcattgaaacccgatacatttcgggatcagctgcaggagctgtgcatcccacaggatctggtaggtgatctggccagcgtagtgtttgggtctcagaggccccttctggactctgtggcccaacagcaaggagcgtggcttcctcacgtggccgacttccggtggagggtggatgtggccatctccaccagcgccctcgcgaggtccctgcagccttctgtcctgatgcagctgaaacttagcgatggatccgcctatcggtttgaagtcccgactgctaagttccaagaactgcgatatagcgtggcactggtactgaaagagatggcggacctcgaaaagagatgtgaacggcgcttgcaggactag

SEQ ID NO: 112740 - DNA, 675 bp, synthetic construct
  misc_feature 1..675: note = Description of Artificial Sequence: Synthetic coding sequence
  source 1..675: mol_type = other DNA
atgtccgcagtaggggcagctacgccttatctccaccaccccggggactcgcactccggaagagttagcttcctgggcgctcaactcccaccagaagttgccgcaatggcccggttgctgggcgatctagacagatccacattcagaaaactgctgaagtttgttgtgtcaagccttcaaggagaggactgccgcgaggcggttcaacgcctcggggtgtctgcaaaccttcctgaggaacaacttggtgccttgttagcaggcatgcatactcttctacagcaagcactgcgcctgccacccacctccctgaaacctgacacatttagggatcaactccaggagctttgcatcccgcaggatctggtgggagacttagcctccgttgtgttcggttctcagcgtccactgctggactccgtggcccagcagcagggcgcatggctgcctcacgtcgctgactttcgttggagggtggacgtggctatcagcacgagtgccctggctcgtagcctgcagccctcagtgcttatgcagcttaagctctctgacgggtccgcctacaggttcgaggtgcctactgcaaagtttcaggaacttcggtacagcgtggcacttgtcctgaaggagatggctgatctcgagaaacgctgcgagcgccgtttacaggactag

SEQ ID NO: 112741 - DNA, 675 bp, synthetic construct
  misc_feature 1..675: note = Description of Artificial Sequence: Synthetic coding sequence
  source 1..675: mol_type = other DNA
atgagcgccgtcggggcagctacaccgtaccttcaccatcctggcgacagccactcagggcgtgtcagcttcctgggcgctcaactgccacccgaggtagctgccatggcccgactgctgggcgacttggataggtctacttttaggaaactgttgaagttcgtagtcagttccctgcagggcgaggactgtcgcgaggcggtccaaaggctcggggtgtcagcaaaccttcccgaagagcagctgggggccctgctggcgggcatgcatacgttgctccagcaggctctccgcctgccacccaccagcctaaaacccgatactttcagagatcagctgcaggagctctgcattccgcaggatctcgtcggagacttggccagcgtggtgttcgggtcccagaggcctttactagacagtgtggcgcagcagcagggcgcgtggctcccgcacgtggcagacttcaggtggcgagtagatgtcgccatctccactagcgcgctggctcggtccctgcagccatccgtgctcatgcagctgaagctttcagatggctccgcatatcggtttgaggttccaacggcaaaatttcaggagttgcgttatagcgttgctttggtgctgaaggagatggccgaccttgagaagaggtgtgagaggcgcctccaagactag

SEQ ID NO: 112742 - DNA, 297 bp, synthetic construct
  misc_feature 1..297: note = Description of Artificial Sequence: Synthetic coding sequence
  source 1..297: mol_type = other DNA
atggaggcttcgtcagagcctcccctggacgcgaagtcagacgtcaccaaccaattggtggacttccaatggaagctgggtatggcagtctcttccgacacctgcagatctcttaagtatccttacgtcgcagtgatgctgaaagttgcagatcacagtggccaggtgaaaactaaatgctttgaaatgactatacctcagttccagcctcaactgctcgctaccagctccctcctttctgcctccaacttctaccgccaattcaaggagatcgccgccgttatagagaccgtgtag

SEQ ID NO: 112743 - DNA, 258 bp, synthetic construct
  misc_feature 1..258: note = Description of Artificial Sequence: Synthetic coding sequence
  source 1..258: mol_type = other DNA
atggaggcttcttccgagccccccttggatgcaaagagcgacgtgaccaaccaactcgttgacttccaatggaagctgggtatggctgtgtctagcgatacatgtcgctccctgaagtacccctacgtcgccgtcatgctcaaagtggctgatcatagcggacaggtgaagaccaaatgctttgagatgaccatcccacagttccaaaacttctacagacagttcaaggagatcgcagccgtgatcgagactgtgtag

SEQ ID NO: 112744 - DNA, 258 bp, synthetic construct
  misc_feature 1..258: note = Description of Artificial Sequence: Synthetic coding sequence
  source 1..258: mol_type = other DNA
atggaggcatccagcgagccaccacttgatgctaagagcgacgtgaccaatcagcttgtggactttcagtggaagctcggaatggcagtaagttctgatacttgcaggagtttgaaatatccatacgtggcggtcatgctcaaggtcgcagaccacagtggacaggtgaaaactaaatgttttgaaatgacgatccctcagtttcagaatttctatcgccaatttaaggagatcgctgccgtgatcgagacagtatag

SEQ ID NO: 112745 - DNA, 7470 bp, synthetic construct
  misc_feature 1..7470: note = Description of Artificial Sequence: Synthetic coding sequence
  source 1..7470: mol_type = other DNA
atgggggccagctctcctcgctccccggagcctgttggtccacctgcccccgggttacccttctgttgtggaggctccttactggccgttgtggtactgctggccctgcccgtggcttggggccagtgcaacgcccccgaatggcttccctttgcacggcctacgaacctgacagatgagttcgagtttcccatcggaacctacctgaattatgaatgtagaccaggttacagcgggcgaccattcagcatcatctgcctaaagaactccgtgtggacgggagccaaggacagatgtcgtagaaaatcttgtcggaatcccccggatcccgttaacggcatggttcacgtgatcaagggcatccagttcggctcgcagatcaaatatagctgcactaaggggtatcgactgatcggatcgtcttccgccacctgcattatcagtggagataccgtcatctgggacaatgagactccgatctgtgacaggatcccctgcgggttgccgcctactatcactaatggagattttatttctaccaacagggaaaattttcactatggctctgtcgtaacttatagatgcaaccccgggagtggtgggaggaaggtattcgaactggtgggggagcccagcatctactgcacatcaaatgatgatcaggtggggatctggtccggaccagcaccccagtgcatcattcccaacaaatgcaccccgccaaacgttgaaaatggcatactcgtcagcgacaaccgctcactgttctcattgaatgaagtggtggagtttcgatgccagccaggattcgtaatgaaggggcctcgcagggtgaaatgccaggccctgaacaaatgggaacccgaactgcccagttgcagtcgcgtgtgccagcctccacctgatgtgctacacgccgagaggacccagcgcgataaagacaacttcagccctggacaggaagtgttttattcttgcgaaccgggctatgacctcaggggagccgcctctatgagatgtactccccagggggactggagccccgccgccccaacttgtgaggtcaagtcctgtgatgactttatgggtcagttactaaatggcagggtactgtttccagtgaacctccagctgggcgccaaggtagacttcgtgtgtgatgaggggttccaactcaagggctcttcagccagctactgcgtgttggctggcatggagtcactgtggaactcgagcgttcccgtctgtgagcagattttttgcccctcaccgccagtgatcccaaatggcagacacacaggcaaacccttagaagtttttcccttcggcaaaactgtaaattatacatgcgacccacaccctgatcggggaacctcatttgacctgattggcgagagcacaatccgttgtacttcagacccacagggcaatggagtttggtcaagccccgcccccagatgcggcatcctggggcactgccaagcaccagaccatttccttttcgctaagctgaaaactcagacgaatgctagcgacttcccgattggcaccagcctcaagtatgaatgccgaccagaatactacggccgaccattcagcataacatgtctggataaccttgtctggtcctccccgaaagacgtgtgcaaacggaaatcatgcaagaccccccccgatccagtcaacggcatggtgcacgtcatcaccgacattcaggtgggctcgaggatcaactactcctgcacgacaggtcaccgcttgataggccactcttctgcagagtgtattctgtctgggaatgccgctcactggtccacaaagccccctatttgtcagcgcataccttgcggcctgccacctaccatcgccaatggtgacttcatctcaactaaccgtgagaactttcattacggatccgtcgtgacttatcgatgcaatcctggaagcggggggaggaaggtgtttgaactggtcggggagccctcaatctactgcacctccaatgatgaccaggtgggcatctggagtggcccagcccctcaatgcatcatcccgaataagtgcacccctccaaatgttgagaacggtatcctggtttccgataacaggtccttattctctctgaacgaagtggtggagtttaggtgtcagccgggcttcgtgatgaaaggaccgagacgagtaaaatgccaggctctcaacaaatgggagccagaacttcctagctgttcacgggtgtgccagcctccgcccgatgttctgcatgccgagagaacccagagagacaaggataacttctcccccggtcaagaagtcttctattcttgtgagccagggtacgatctgcgaggagccgcaagcatgcgctgcaccccccagggcgactggagccccgcagcccccacgtgcgaagtgaaaagctgcgatgacttcatgggccagcttctgaatggcagggttttatttcccgtaaatttacagctgggcgctaaagttgacttcgtgtgtgacgaaggatttcaacttaagggatctagcgcttcctattgcgtcctggccggtatggaatctctttggaattcttctgtcccagtgtgcgaacaaattttctgcccaagtccccccgttattcccaacgggaggcatactggaaagccgctagaggtgttcccattcggaaaaaccgtcaactatacgtgcgatcctcaccctgatagagggacctcctttgacttaatcggcgaatctactataagatgtactagcgaccctcaaggtaatggcgtgtggtcgtctccggcaccgcgctgtggcatcttaggccattgtcaggctccagaccactttctctttgccaaactgaagacccagactaatgcgtcagattttccaatagggacatcccttaagtatgaatgtcggcccgaatactatgggcgacccttttccataacctgcctcgataatctcgtgtggtctagtcccaaagacgtgtgcaagagaaagtcctgtaaaacacccccagatcccgttaatggaatggtgcacgtaatcaccgacatccaggtgggctcgagaatcaactatagttgcacaacgggtcatcggctgattggccattcctctgctgagtgtatattgtctggaaacgcggcgcactggtctactaagccacctatctgtcaaagaatcccttgtggcctccctccaacaatcgcgaacggggattttatttctaccaatagagagaattttcattacggatctgtggtgacatataggtgtaatcctggatctggaggacgaaaagtgtttgagctagtgggagagcctagcatctactgcaccagcaatgatgaccaggtcggaatttggtctggaccagcaccccagtgcatcatcccgaataaatgcacgccccccaatgtcgagaatggaatcctcgtgagcgataacaggtcacttttctcacttaacgaagtcgtggagtttcgctgtcagccaggtttcgtcatgaaaggccctagacgtgttaaatgtcaggctctgaataagtgggaaccagagctgccttcatgttccagggtgtgtcagccaccccccgacgtcctccatgccgagcggactcagagagacaaggacaactttagcccaggtcaggaagtgttctatagttgcgaaccaggctatgatcttcgcggcgcagcatccatgcggtgcactcctcagggggattggtccccagctgcccctacctgcgaggtgaagagctgcgacgatttcatgggtcaactcttgaatggccgggtcctatttccagtcaacctacagctcggcgctaaggtcgattttgtctgtgacgaggggtttcagttgaagggcagtagcgcgagttattgcgttcttgctggaatggaaagtctgtggaatagcagtgtgcccgtctgcgagcagatattctgtccctcgcctcctgtgatcccaaacggccggcatacagggaaaccattggaggtctttccattcggaaaagcagtgaattatacctgcgatcctcaccctgatagaggcacctcctttgatctcataggggagagcacaatcagatgcacatcggatccccaggggaacggggtgtggtctagtcctgcccccagatgcggtattctgggtcattgccaggcgccagaccatttcctgttcgccaagctaaaaactcagacgaacgcatctgactttccaattggaacctccctcaaatacgagtgcagacctgaatactacggccggccattcagtattacttgcctcgataacttggtttggtcatctccaaaggatgtgtgtaagcgcaagagctgtaaaacgccacctgaccccgtcaacggaatggtccacgtgataactgacatccaggtaggaagtcggataaactatagctgcacaaccggccatcgtctgattggacattcatcagccgagtgtattctgtctggaaacacagcacactggtccactaaacctccaatttgtcagcggataccctgtggcctgccccctactattgcaaatggcgactttatctccaccaacagagaaaattttcactatgggagcgtcgtgacatataggtgcaatttaggaagccgcggcaggaaggttttcgagctggttggcgaaccctctatttactgcacctcaaacgatgaccaagttggtatttggtccgggcctgcaccgcagtgtattatccccaacaaatgcacaccacctaatgtggagaacgggattcttgttagtgataatcggtctctcttctctctgaatgaggttgtggaattcaggtgtcagccagggttcgttatgaagggtcccagaagggttaagtgccaggcactcaataaatgggagcctgagctcccctcttgcagtcgggtctgccaaccacctcctgagattctccacggcgagcatactcccagccatcaagacaatttctcacctggacaagaagtgttctattcctgcgaacctggctacgatctccggggggcggcatcacttcactgcactccacagggagactggtcacctgaggctcctaggtgcgccgtgaagtcatgtgatgatttcctggggcagctcccacacgggcgtgtacttttcccgttaaatctgcaactgggggccaaggtgtctttcgtctgcgacgaaggatttagactgaagggaagctccgtctctcattgtgtcctcgtgggaatgaggagcctgtggaacaacagcgtccctgtgtgtgaacatatcttctgccctaatccccctgctatcctgaatggacgccacacagggacgccatccggtgacatcccctacggcaaagagatcagttatacctgcgaccctcatcctgataggggtatgacattcaatctgattggagaaagcactattagatgcaccagtgacccacacggaaacggcgtttggtcgtcccccgccccacgttgtgagctcagtgttagagcgggacattgcaaaacacccgagcagtttccattcgcttcgccaaccatccctattaatgacttcgagtttccagtaggaacttccctgaactatgagtgtcgtcccgggtacttcgggaaaatgtttagtattagttgtctcgagaatctggtctggagctccgtcgaggataattgtagacggaaatcttgtgggcctcctcctgagccatttaatgggatggtccacatcaacacagatacacagttcggatctaccgttaactacagttgcaatgaggggttcagattgatcggatctccgtcgaccacttgtctcgttagcggaaacaatgtcacatgggacaaaaaggcaccaatctgcgagatcataagttgtgaaccacctcctaccatcagtaacggcgacttctattcgaataatcgcacaagcttccacaacggcacagtggtgacctatcagtgtcacacaggcccagacggcgagcagctttttgagctggtgggcgaaaggagtatctactgtaccagcaaggatgatcaggtgggggtgtggagttcaccacctccacggtgcattagcactaacaagtgtaccgctccagaagtggaaaacgccatacgcgtgccaggcaacagatcgttctttaccttaaccgaaattattaggtttcgatgtcagccaggtttcgtcatggtcggaagtcatacggtgcagtgtcagaccaacggtaggtggggccccaaactgccccactgttccagggtctgccagccccccccagaaatcctgcacggcgaacatactttgtctcatcaagataacttttcccctgggcaggaggttttctacagctgcgagcctagttatgatctgcgaggcgcagcaagtctacactgcaccccgcaaggggactggtctcccgaagccccaagatgtactgtgaagtcctgtgatgacttcttgggacaactgccccacggacgtgttttactccctttgaacctgcaactcggagccaaagtctccttcgtgtgtgacgagggatttcggctgaagggccggtctgcttctcactgtgtgctggctgggatgaaggccctctggaatagttcggtgcctgtgtgtgagcagattttctgccccaatcccccggccattttaaatggacggcataccggaaccccctttggagacatcccctacggaaaagagatttcttatgcatgcgacacacaccccgaccggggcatgacttttaacctcataggggaatccagcatcagatgtacatcagatccccaggggaatggcgtgtggagcagcccagctcccagatgtgaactctcagtgcctgctgcatgtccacatcctcccaagattcagaacggacactacattggtgggcatgtgagtctttatcttcccgggatgactatctcatacatctgtgaccctggataccttctggtggggaaagggttcatcttttgcaccgaccaggggatatggtcccagttagatcattattgtaaggaggtcaattgtagcttcccgctgtttatgaatggtatctccaaagagctggagatgaaaaaagtgtaccactacggcgactacgttaccctcaagtgtgaggatggatacacccttgaagggtcgccatggtcacagtgccaggccgacgatagatgggaccctccactggcaaaatgtacctctagaactcacgatgcccttatagtgggcaccctaagtggaaccatcttttttatactgttgatcatcttcttaagctggatcatattgaagcataggaagggcaataacgcacatgaaaaccctaaggaagtggccatccatctgcattcccagggaggtagctcagttcatccccggactctgcagactaacgaagaaaacagtcgggtcctaccctag

SEQ ID NO: 112746 - DNA, 6120 bp, synthetic construct
  misc_feature 1..6120: note = Description of Artificial Sequence: Synthetic coding sequence
  source 1..6120: mol_type = other DNA
atgggcgcgtctagcccacgttctcccgagcccgtcggaccccctgcccctgggttacccttttgttgcggaggttctttattagccgttgtcgtgctcctcgccctgccagtcgcctgggggcaatgtaatgctcccgaatggctgcccttcgctcgacctaccaacctgaccgatgagtttgagtttcctataggcacctacctaaactatgagtgtcgcccagggtattcaggacggccgttcagcataatttgccttaaaaattcggtgtggacgggcgccaaagatcgctgtagaaggaagtcatgtcgaaaccctcccgatccagtcaatggaatggtgcacgttatcaaaggcattcagttcggcagccagatcaagtacagctgtacaaagggataccgtctcattggctcttctagtgctacttgcataatctctggcgataccgtgatctgggataacgaaacacctatttgtgacaggatcccatgcggattgcccccaacaattgctaatggggacttcatcagcacaaatagagaaaactttcactacgggtctgtggtcacttacaggtgcaaccccggtagcggtggccgcaaggtgtttgaactggtgggggaaccatccatttactgcacctccaacgacgatcaagtgggcatttggtcgggccccgcaccacagtgcataatacctaataaatgcacgccgccaaacgtcgaaaacggcattctggtgtccgataatcggtcgctgtttagcctgaatgaggtggtggaatttcggtgtcagccagggttcgtcatgaaaggccctcgtcgcgtcaaatgccaggccctcaataagtgggagcctgagctcccaagctgtagcagggtctgccagccccctcctgatgtgctgcatgcagaaagaacacagagagacaaggataatttctctcccggtcaggaggtgttttactcttgtgagcccggttacgatctaaggggcgccgctagtatgaggtgtactcctcagggtgactggtcccccgccgctcccacttgtgaagtaaagagctgcgacgatttcatggggcaactgctaaacggccgagttctcttcccggtcaatctgcagttaggcgccaaggtggattttgtctgtgatgaggggtttcagctgaagggatcaagtgccagctattgcgtgcttgccggcatggaatccttgtggaattcctccgtgcctgtgtgtgagcagatattttgccccagcccgcctgtaatcccaaatggtcgacacacaggaaagcctctggaggtgttcccgtttgggaaaactgtgaactatacatgtgacccacaccccgatcggggtacttctttcgatctcattggcgagtcgacgatccgctgcacatccgacccccagggcaatggagtctggagcagtcctgctccccgttgcgggatccttggacattgccaggcccccgaccacttcctgtttgctaaactcaaaacccagactaatgcctctgattttccaatcggcacctctctcaaatacgagtgccggccagaatattatggtcgtcccttctctatcacatgcctggataacctagtgtggtctagccctaaagacgtttgcaagcggaaatcatgcaagacaccacctgatcctgtgaatggcatggtacatgtgatcacggacatccaggttggctccagaatcaactactcttgcacaacaggtcaccggctcatcgggcactcttccgccgagtgtatactgagtggtaacgcagctcactggtcaacaaaacctcctatctgccagcgtatcccttgcggactgcctcccaccatcgcaaatggcgactttatcagcacaaatagggagaatttccactatgggagcgtcgtcacctacagatgcaatcctggaagcggcggacgtaaagtcttcgagctcgttggagagccgtcaatctactgcactagcaatgacgatcaggttggcatatggagtggaccagcacctcaatgcataatcccaaacaagtgtacgccacctaacgtcgagaatggaattctggtgtccgataacaggtcgctcttttctctcaacgaggtggttgagttccgctgtcaaccagggttcgttatgaaaggaccccgccgggttaagtgccaggccctcaataaatgggagccagaattgcctagttgctcccgggtctgtcagccgcctccagatgtattacacgctgagcgcacccagagagataaagacaatttcagcccaggccaggaggtattttactcctgcgagcccggctatgacctgaggggcgctgctagtatgcgatgcacgccgcaaggtgattggagcccagctgccccgacgtgtgaggtgaaatcctgtgatgactttatgggtcagttgttaaacggcagagtgctgttcccagtcaacctccagctgggtgctaaagtggactttgtttgcgacgagggatttcaactcaagggatcatcagcttcgtactgtgttctcgccgggatggaatccttatggaattcttcagttcccgtctgcgaacagattttctgcccctccccccccgtcattccaaatgggcgacacacagggaagccactggaagtttttccattcggaaaggccgttaactatacttgtgaccctcacccagaccgaggaacatcttttgacctgattggtgaaagtactatccggtgcactagcgacccccagggcaacggggtttggtcgagccctgctccccgctgcgggatcctcggacattgccaggccccagatcactttctttttgcaaagctgaaaacacaaactaacgcatcagacttccctattgggacgtccctcaaatacgagtgtaggccagaatactatgggagaccttttagcataacatgtttggataacctggtatggtctagtccaaaagacgtatgtaaaaggaagagttgcaagactccacccgatcccgtgaacggcatggtccacgtgatcacagatatccaggttggaagtagaatcaattatagctgtacaaccggccataggttgatcgggcacagctccgcagagtgcatcctctccggcaacactgctcactggagcactaaaccacctatctgtcaaaggattccttgcggactcccaccgacgattgccaatggcgattttatatccacgaatagagagaattttcattacggctccgttgttacatatagatgtaacctcgggtcgagaggcaggaaggtctttgaacttgtcggagaacctagcatctactgcacatctaacgatgaccaggtggggatttggtcaggtcctgccccccagtgcattattcccaataagtgtacccctcctaatgtggaaaatggcatcctggtaagtgataaccgttcattgttctccttgaacgaagttgtagagtttagatgccagcccggattcgttatgaaggggccaagacgggtgaagtgtcaagctcttaacaagtgggaacccgagctcccctcctgctctcgcgtctgccaaccccctcccgagatcctgcatggagagcacactccctctcatcaagataacttctccccagggcaggaagtcttttactcttgtgaacctggatacgacctacggggagccgcttcgttacactgtactccacagggcgactggtctcccgaggcccctaggtgtgcggttaaatcctgtgatgactttctgggacagttacctcacggccgagtgctgtttcccctcaacctgcaactcggcgccaaggtttcatttgtttgcgacgaaggctttcggttgaaaggatcctccgtttcgcactgcgttcttgttgggatgagatcactgtggaacaactccgttccagtttgcgagcacatcttctgtcctaatccaccagcaattctaaatggacgccataccggcacgccctccggcgacattccatatggcaaggagatatcctacacatgcgacccccaccctgacaggggcatgacctttaatctcatcggtgaatctaccattagatgcactagcgacccccatggaaacggagtgtggtcttcccccgccccccgatgtgagctgagtgtgagggcggggcactgtaagacccctgaacaatttccttttgcctctccaacaatccccattaacgactttgaattccccgtggggacttcactgaactatgagtgccgtcctggctactttggaaagatgttttccatctcttgcctggagaacctggtctggtcaagcgtggaagataactgccgccgaaagtcctgtggcccccctccggagccattcaacgggatggtgcacatcaatacagacacccaattcggctccacagtcaactacagctgtaacgaggggttcagactgatcggtagcccaagtaccacttgtcttgttagtgggaacaacgtgacgtgggacaagaaggcgcccatatgtgagattatttcctgcgaaccaccaccgacgatttcaaacggtgacttttactcgaataacagaacgagcttccacaatggtactgtagtcacttaccagtgccatactgggccagatggtgaacagctcttcgagttggtgggagagcgttctatttattgcacaagcaaagatgaccaggtcggtgtgtggtctagtcccccgcctcgctgtatctccaccaataagtgtaccgctcccgaggtcgaaaatgcaatcagggtgccaggaaatagaagtttcttcacacttacggaaataataaggtttcgctgtcaaccagggtttgtcatggtcggttctcacacggttcagtgtcagacaaacggaaggtgggggcccaagttgccccactgttcacgcgtttgtcagcctccaccagagatcctgcacggggagcacacactctcccatcaagataatttttccccaggacaggaggtattctactcctgtgagccatcttacgatttgcgaggagcagcaagcctccattgtacgccccagggcgactggagccccgaagccccacggtgtaccgtgaagagttgcgatgattttctgggacagctaccccatggtagagtgcttctccctctcaatctccagcttggcgccaaagtgagtttcgtatgcgatgaaggattccgcctaaagggccggtctgcatctcactgtgtgttggcaggtatgaaggctctgtggaatagcagcgtccccgtttgcgagcagatattctgcccaaaccctcctgcaatcctcaacggcaggcacactgggacgccattcggcgatataccttatggaaaagagataagttacgcctgcgatacgcatcccgatcgagggatgactttcaatctaatcggcgaaagctcaataaggtgcacaagcgatcctcaaggtaacggggtgtggagctcacctgcccctcggtgtgaattatctgttcctgcagcgtgtccccaccctccgaaaatccaaaatgggcactatattggaggacacgttagtctctaccttcccgggatgactatttcctatatctgcgatccaggctacctgctggtgggaaaggggtttattttttgcacggatcagggaatctggtcccaactggaccactactgtaaagaagttaattgttcttttccactattcatgaatgggatcagcaaggaactggagatgaagaaggtgtaccactacggagattatgttaccctcaaatgcgaagatggatataccctggaggggtcaccctggtctcagtgtcaggcagacgacaggtgggacccaccgctggccaaatgtacgagtcggacgcatgatgccctcattgttggtaccctttctggaaccatatttttcatactgcttattatcttcctgtcttggataattctgaaacatagaaaggggaataacgcccacgagaatcctaaggaggtggccatccacctgcattcacaaggtgggtcatccgtccatcccaggactctccagactaacgaagagaacagtagggtgttgccttag

SEQ ID NO: 112747 - DNA, 6120 bp, synthetic construct
  misc_feature 1..6120: note = Description of Artificial Sequence: Synthetic coding sequence
  source 1..6120: mol_type = other DNA
atgggagcctcatcacccaggtcgccagaacccgtaggtccccccgctccaggactaccattctgttgcgggggcagcctgctggccgtggtggtgctcctggcacttccagtggcatgggggcagtgcaacgctcccgagtggttgcctttcgcaaggcctacaaacctcacagatgagtttgagttcccaataggaacttaccttaattacgagtgtcgcccagggtacagtggccggccgtttagcattatctgcttgaaaaatagcgtttggacaggagccaaagatcgctgtagaagaaaaagctgtagaaatccgcctgacccagtgaacgggatggtccatgtgatcaaggggatacaattcggcagtcaaatcaagtattcttgcacaaaaggttatagactcattgggagttctagcgcaacatgcatcatctcgggtgacaccgtgatctgggacaacgagacacctatttgtgatcgaattccatgcgggctgccacctaccatcaccaatggagactttatatccacaaatcgagaaaacttccattatggtagtgtcgtgacatatagatgcaaccctggttcaggtggcagaaaggttttcgaacttgtgggggaaccttccatctactgtacaagcaacgatgatcaagtgggaatctggtcgggacctgctccacagtgcatcatccccaataagtgcactccccccaacgtggagaacggcatcctcgtgtcagataatcgcagcttgttctcactgaatgaggtcgtggaatttcgatgccagcccggttttgttatgaagggcccaaggagggtgaagtgccaagctttgaataagtgggaacccgaattgcccagctgttccagggtatgccaaccgccccctgacgtcctccacgccgaaagaacccagagggacaaggacaacttcagtccaggacaggaggtcttttacagttgtgaacccggatacgatctgcggggagcagcatcgatgaggtgtacccctcaaggcgactggagcccagcagcacccacatgtgaggtcaagagttgcgatgattttatggggcagcttctgaacggtcgtgtgctgtttccagtgaatctacaattgggtgctaaggtggacttcgtgtgcgatgaaggattccagctgaagggttcttcagcttcatattgcgtgctggccggcatggaatcactctggaactcctctgttcccgtgtgcgagcagattttttgtcctagcccacccgtcatcccgaacggtagacatactgggaagccactggaggtgttccccttcggcaagactgtcaattacacttgtgatccacacccagaccggggaacatccttcgatttaatcggtgagtcaacaattcgttgcacaagtgatcctcaaggtaacggagtatggtcttctcccgccccccgctgcggaattctgggccactgccaggcccctgatcactttctttttgccaagttgaagacccagacaaatgcctctgatttcccaattggaacatcactaaagtacgagtgccgacccgaatactacggccgccccttcagcattacctgtctggacaatctcgtttggtctagccccaaggatgtgtgtaaaaggaagagttgtaagactccccctgacccagtgaacgggatggtccacgtgatcacggacatccaggttggctcaaggattaactattcatgtacaacaggccatcgcctgattggacactcctccgctgaatgtattctgtctgggaacgctgcccattggagcaccaagccccccatttgccagcggattccctgcgggctccctcctacaattgctaacggcgatttcatttctaccaatagggagaacttccattacggatcagtggtgacatatcgatgcaacccaggctctgggggccgaaaagtgtttgaactcgtcggtgaaccatcgatctattgtacttccaatgacgaccaagttgggatctggagcggcccagctccacagtgcattatccctaacaagtgcacccctccaaatgttgaaaatggaatcctggtaagcgataatagatcactgttctcactcaacgaggtggtggagttccggtgccagccagggttcgtgatgaaagggccacgacgtgtcaaatgccaggctctgaacaagtgggaaccagaacttccttcttgcagtcgcgtgtgtcagcctcctcccgatgtacttcacgccgagaggacacaaagggataaagacaattttagccctggtcaagaagtgttctacagctgtgaaccagggtacgatctcagaggggccgcttccatgcgatgtacccctcaaggggattggagccctgccgctccgacttgcgaggttaagtcttgcgacgatttcatggggcagctacttaatgggcgagtactgttccctgtcaatctgcaactgggtgctaaggtggacttcgtgtgtgacgaaggtttccaactgaaggggagtagcgcttcttactgcgtgttggctgggatggagagcttgtggaatagcagcgtgccggtgtgtgaacagatattctgcccctccccgcctgtaattccaaatggcagacatactgggaaacctctcgaggtttttcctttcggtaagaccgtgaactacacctgtgatccccatccggacaggggaacttctttcgatctcatcggagagtcaactattcggtgcactagcgatccccagggaaatggggtgtggagcagccccgccccgcgctgtgggatactggggcattgtcaggcaccggatcatttcctcttcgccaagctgaagacacagaccaatgcatccgattttccaataggcacatcacttaagtatgagtgcagacccgaatattacggccggcccttttccattacttgtctcgataatctagtttggagcagccccaaagacgtgtgtaagagaaagagctgcaagacccctcctgatcccgtgaacgggatggtgcatgttattacggacatccaagtggggagccggataaactacagctgtacaacaggccaccgcttgatcgggcactcctccgccgaatgcatcctgagcggaaatacagcccactggagcactaagccaccaatctgccagcgaatcccctgtggactccccccaaccatcgccaatggggattttatatcaactaatagggaaaatttccattatgggagtgtggtgacttaccggtgcaacctgggaagccgcggaaggaaggtctttgagctggtcggcgagccctcaatatactgtacatctaacgatgaccaagtgggtatttggtccggccccgccccacagtgcataattcccaacaagtgtaccccccctaatgtggaaaatggtatcttggtttccgacaatagatctctgttctccctgaatgaagtggtggaattcagatgtcaacctggattcgttatgaagggacctcggcgcgtcaagtgccaggctcttaataagtgggaacccgaattaccctcttgctcaagagtgtgccagccaccacctgaaatactgcacggcgagcacacccctagccaccaggacaattttagccctggccaggaggtcttctacagttgtgaaccaggctatgatctgcgcggcgcggcatccttacactgtacaccacagggagattggtcccccgaagctcctcgatgcgcggtaaaatcttgcgacgatttcttgggccagctcccacacgggagagtgctcttcccactgaacttgcagcttggcgccaaggtttccttcgtgtgcgacgagggctttagactaaaggggtcatcggtgagccattgtgttctggtggggatgcgcagcttatggaataactccgtgccggtgtgtgaacacatcttctgtccaaatccacctgcgatcttgaatggtcggcatactggtacccctagtggcgatattccctacggcaaagagatttcctacacctgtgacccacatcctgaccgagggatgaccttcaatctgatcggggagagcactatacgctgcaccagcgacccgcacgggaatggtgtctggtcaagcccggcccccagatgtgaactgtcagtgagagcaggacattgcaagacacccgaacagtttccatttgccagtcccactattccaatcaatgattttgaattccctgtgggtacgtccctcaactacgaatgtcgccctggctactttggaaaaatgttcagcatctcctgcctcgagaacctggtgtggagcagcgtagaggataattgtagaaggaagtcatgcgggccgccgcccgaacctttcaatggcatggttcacatcaacacggatactcagtttgggtctaccgttaattactcttgtaacgaggggttccgcctgatcggctctccctctactacatgtctggtatccggaaacaatgtgacctgggataaaaaagcccccatatgtgagatcatctcatgcgagcctcctccaactatctcaaatggcgacttctattcgaacaaccgtacctcttttcataatgggacagtcgtcacataccagtgccatactggcccggacggtgagcaactgtttgagctcgtgggcgagcgttcaatctattgcacaagcaaggatgatcaggttggagtttggtcaagtccacccccccgttgcatcagtacaaataaatgtactgcccctgaagtggagaacgcaatccgggtccccggcaacaggtccttttttactcttactgagatcataagatttaggtgccagccggggtttgtcatggttggcagccatacggtgcagtgtcagactaatgggcgctgggggcctaaactccctcactgctcacgcgtttgtcagccccccccagaaatcttgcacggggaacacaccctctcacaccaggataatttttctccaggccaggaagtgttttactcatgcgaaccaagctatgatcttagaggggccgcctctttacattgcacccctcagggcgattggagtcctgaggcccccagatgtaccgttaagagctgcgatgacttcctcggccagctgccccacggccgtgttctgctaccgctgaatctgcagctgggggccaaggttagcttcgtgtgcgatgaggggttccgtctcaagggaaggtctgcctcccactgcgtgctcgctggcatgaaggcattatggaattcaagcgtgcctgtgtgcgagcagattttttgtcccaatcccccagcaattttaaacgggcgtcacaccggcactcctttcggagatatcccatatgggaaggagattagctacgcctgcgatacccacccggacagggggatgacatttaacctgataggagagagctccatccgctgcacaagcgacccacaaggtaatggtgtctggtcgagtccagctccgcgttgtgagctgtcggtgccagccgcgtgtccacaccccccaaaaatccaaaatggccattacattgggggccacgtaagcctctatctgcccggcatgacgatatcctacatctgtgaccccggctatttgctggtgggcaaggggttcatcttttgcaccgaccaggggatctggtcccaactggatcactattgcaaagaagtgaactgtagctttcccctgtttatgaatggaatctcaaaggagctggaaatgaagaaggtgtaccactacggagattacgttacacttaagtgtgaagatggatacaccctggaaggatcaccatggtcccaatgccaggccgacgaccggtgggaccctcccctggctaaatgtacttcacgcacccatgacgccttaatcgtcggtaccctgtccggcaccatcttctttatcttgttaattattttccttagttggattatcctgaagcaccgtaagggcaataacgcacatgagaaccccaaggaagtggcgatccacctacactctcaggggggctccagtgttcaccctcggacccttcaaacgaacgaagagaacagccgcgttttaccctag

SEQ ID NO: 112748 - DNA, 6120 bp, synthetic construct
  misc_feature 1..6120: note = Description of Artificial Sequence: Synthetic coding sequence
  source 1..6120: mol_type = other DNA
atgggggccagtagtcctcggtctcccgagcccgtgggaccacctgcccccggcctccctttctgttgtgggggcagtctcctggcggtcgtagtgctgctagctctcccggtcgcatggggacagtgtaatgcacctgagtggctcccttttgcccgcccaacaaatctgacagatgagttcgagttcccgatcggcacttacctcaattatgaatgccgccccgggtatagtggtagacctttcagcatcatctgcttgaaaaattctgtctggaccggagcgaaagatcgttgcaggaggaagtcgtgtaggaatccgcctgatcctgtgaatggtatggtgcacgtgatcaagggaatccaatttgggagccaaatcaaatacagctgtacaaagggatacaggttgatagggagctcctccgccacgtgtatcatctcaggggataccgttatctgggataatgaaacaccgatctgcgatcggatcccatgtgggctgccgcctactatcacgaatggcgacttcatttcaactaacagggaaaatttccattatggatcagttgtgacctatcgctgtaatcccggtagtggcggccgtaaggtgttcgagctcgtcggcgaaccctctatatactgcaccagcaatgatgaccaggtcggcatctggtctggtccggccccacaatgtatcataccaaacaaatgcacgccaccaaacgttgaaaacgggatcctggtaagtgacaacagatctctattcagcctcaatgaggttgttgagttccgatgccaacctggcttcgttatgaagggccccagacgagtcaaatgtcaggccttgaacaagtgggagccagaacttccaagttgttcacgggtgtgccagcccccgccagatgtgctgcatgccgaacgtacgcagcgcgacaaggacaacttctcccctggacaggaggttttctatagctgtgaacccggctacgaccttcgtggtgctgcctctatgcgttgtactcctcagggagactggagtcctgcggccccaacctgtgaggttaaatcttgcgatgattttatgggacaactccttaatggcagggtcttgttcccagtaaacctccagcttggagccaaagttgattttgtttgcgacgagggtttccaactgaaagggtcaagcgcatcttattgcgtgttggcagggatggagagcctctggaactctagtgtgcccgtgtgcgaacagattttctgcccttcacccccagttattcctaacggcagacacaccggcaagccacttgaggtgttccccttcgggaaaaccgtcaattatacatgcgacccccaccccgacagaggaaccagtttcgatctaattggggagtcgactattagatgtacctccgacccccaaggcaacggcgtgtggagctcacctgcaccacgatgtggcattttaggccactgccaagctcccgaccattttcttttcgccaagctgaagactcaaacgaacgcatccgactttcctatcgggacaagtttaaagtatgaatgcagacctgaatattacggtcggccctttagcatcacatgcctggacaacttggtctggtcctcccctaaggatgtgtgtaaacgaaaatcatgcaaaacaccgcctgaccctgtgaatggaatggtccacgttattacggatattcaagttggtagcaggataaattactcctgcaccacggggcacagactgatcggccattcatctgctgaatgtattctcagcgggaatgccgcccactggtccacgaaaccccctatatgccagcgcatcccgtgtggcctaccacctacaattgctaatggcgactttatcagcaccaaccgggaaaattttcactatggaagtgtcgttacttacagatgtaatcctggctctggcggacgaaaggtcttcgagctagtgggggagccgagcatttactgcacgtctaatgacgatcaagtggggatctggtccggccccgcacctcaatgtatcattccaaataaatgcactccccccaacgtcgagaacggcattttggtgtctgataatcgcagtctgtttagccttaacgaggtagtggagttccggtgccagccaggatttgtgatgaagggacccagaagggtgaagtgtcaggctttgaacaaatgggagcctgagttaccctcctgttcacgcgtatgtcagccaccaccagacgtgctccatgcagagcgcacacagcgggacaaagataatttctcccccggtcaagaggtgttctattcgtgcgagcctggctacgacttacggggcgcagcatccatgagatgcaccccccagggcgactggtccccagccgcccccacctgtgaagttaagtcctgcgacgatttcatggggcaattattaaacggacgggtgctctttcctgtcaatttacagttaggagcaaaggtggattttgtgtgcgatgaaggttttcagctcaagggcagtagcgcctcgtactgcgttttggccggcatggaatcactgtggaatagcagcgtcccagtctgtgagcaaatcttctgtccctcgccaccagtgattccaaacggcagacatacagggaaaccactcgaagttttcccattcggaaaagcggtaaactacacctgcgatccgcaccctgatcgtggaactagcttcgacttgattggcgagagcacaattaggtgtacctccgacccccaagggaatggagtgtggtcgagccccgctccacggtgtgggattctaggacattgccaggcccctgaccattttctgttcgcgaagttgaaaactcaaaccaatgccagcgacttccccatcggtacaagcttgaagtacgagtgccggccagaatattacgggcgacccttcagtataacttgtctagataacctcgtctggtcttctccgaaggatgtatgtaagcggaagagctgcaagacgcctccagatccagttaacggaatggttcacgtgattacggacattcaggtcggatccagaattaactacagctgtaccactggccacaggctgatcgggcacagctccgccgaatgcatactgtccgggaatacggctcactggtccactaagcctcctatatgtcagaggatcccatgcggcttgcccccaactatagccaatggtgacttcatttctaccaatagggagaactttcattacggctctgtggtgacttacagatgcaatctcggaagccgcgggagaaaagtgttcgagctagttggcgaaccttcaatctattgtacttctaacgacgaccaggtagggatctggagcggcccagccccgcaatgtattattccaaataagtgcacgccaccaaatgttgaaaatggcattctcgtgtccgacaaccgatccctatttagtttaaacgaggttgtggagttcaggtgtcagcccggattcgtcatgaagggacccaggagggtgaagtgccaggctctaaataagtgggagccggagctgccttcttgtagccgggtgtgccaacccccccccgagattctgcacggcgagcacactccttcacaccaggacaatttctcgcccggccaggaagtattttacagctgcgagcccgggtatgatcttcgcggcgcagcgagtctccactgtacccctcagggcgattggtcgccagaagccccccggtgcgccgtgaagtcatgcgatgactttttgggacagcttccacacggcagagtccttttccccctcaatctgcagttaggagctaaggtaagtttcgtttgcgacgagggatttaggctcaagggttctagtgttagccactgcgtgctcgtaggcatgcgatccctttggaataattctgtgcccgtgtgcgagcatattttctgcccaaatccccccgctatactcaacggcagacataccggaactcccagcggagacatcccatacggtaaggaaatcagctatacttgcgatccacatcccgatcggggaatgacctttaacttgattggggaaagcacgatcagatgtacttctgatccgcacgggaacggggtgtggtccagtcctgccccacgctgtgaactgtcggtccgggcaggccattgtaagacccccgagcagtttccgtttgctagcccaaccattccgatcaacgattttgaatttccagtagggactagtcttaactacgaatgtcggcctggatactttggcaagatgttttcaatcagctgtctggaaaaccttgtctggagctctgtagaggacaattgccgtcgcaagtcttgtggccctccaccagagccgttcaatggcatggtgcatatcaataccgatacgcagttcggcagcaccgtgaactattcatgcaacgaaggcttcaggctgattgggtcacctagcaccacttgtttggtcagtggaaataatgtaacttgggacaagaaggcgccaatctgcgagatcatctcttgcgagcccccccctaccattagcaacggcgacttttatagcaacaatcgaacttcctttcacaacggcactgttgtaacctatcagtgccacaccgggccagatggtgagcagctctttgagctggtcggcgagaggtcgatttactgtacaagcaaggacgaccaggtgggcgtgtggtcctcccctccacctagatgcatcagcactaacaagtgtaccgcccctgaggttgaaaacgccatacgggttccagggaacagatcatttttcacactgaccgagatcattcgctttagatgccaaccaggattcgtaatggttggaagccacacagtgcaatgccagactaatggccggtggggtccaaaactgccacattgttcgcgcgtttgtcagccaccccctgagatccttcacggcgagcatacactttcccaccaagacaacttcagtccaggtcaggaggttttttacagctgcgagccctcctacgatctgaggggagcagcttcactgcattgtaccccacagggggactggtcccctgaggctccacgctgcacagttaagagctgcgacgatttcctggggcagttgcctcacgggagggttctcctgccactgaatttgcagctaggtgccaaagtgagcttcgtgtgcgacgaggggtttcgtttgaaggggcgcagtgctagccactgcgttctcgcagggatgaaggcactgtggaattcatctgtgccagtctgtgagcagatcttctgcccgaatcccccggccattctcaacggcagacacacaggcacgccatttggcgatatcccatatgggaaggaaatctcgtacgcgtgtgacactcaccctgatcggggaatgaccttcaacctgatcggagaaagcagcatcaggtgcacatctgatccccagggaaatggtgtgtggtcttcccccgcgcctcgatgcgagttgagtgtgcccgctgcctgtcctcatccccccaagatacagaatgggcactacatcggaggccatgttagcctatatctgcctggcatgactatctcctatatttgcgatcccgggtatcttctggtaggcaagggctttattttttgcactgaccaggggatctggtctcaactagatcattattgtaaggaggtgaactgctcatttcccctgtttatgaacggaatttcaaaagagttggagatgaagaaggtgtatcactacggcgattacgttaccttgaaatgcgaggacgggtacacactcgaggggagtccttggagccagtgccaggcggacgatagatgggatccgcccctggctaaatgtacgtcacgaacccatgatgccttaattgtgggtactttatcaggcactatcttcttcatcttgctgattatttttctgtcctggataattcttaagcacagaaaaggtaacaacgcccacgagaatcctaaggaggtggccattcacttacacagccagggcggcagctctgtgcatccccgcacactccaaacgaatgaagaaaacagtagagtgttaccttag

SEQ ID NO: 112749 - DNA, 6120 bp, synthetic construct
  misc_feature 1..6120: note = Description of Artificial Sequence: Synthetic coding sequence
  source 1..6120: mol_type = other DNA
atgggtgcctcttctccacggtctccagagccagtggggccaccagcaccgggattgccattctgttgtggtggatcactgttggccgttgtggtgctcttggccctccccgtggcctggggtcagtgcaatgctccagaatggctgcccttcgctcgacccaccaatttgacggacgaatttgagttccctatcggaacctatctcaactacgagtgcagaccgggctacagtggtagacctttctccatcatctgcctgaagaactcggtgtggaccggtgcaaaggacaggtgtcgtagaaaatcctgtcgaaaccccccggaccccgtgaacggcatggtgcatgtgatcaagggaattcagtttggcagccagattaaatacagctgtaccaagggatatcgcttaatcggaagttcctccgctacttgcatcattagcggggatacagtgatttgggacaacgagaccccgatctgtgaccggatcccctgcggtcttccacccacaattactaatggagactttatctctacaaatcgtgagaattttcactacggatcggttgtgacatatcggtgtaaccctgggtcggggggacggaaagtttttgaactcgtcggggagccctcaatctactgcacatcgaatgatgatcaggtgggtatttggtcgggacctgcccctcaatgcatcatcccaaataagtgcacaccacccaacgttgaaaatggtatactggtttctgacaacagatctttgttctcgctgaacgaagttgtagagttccgttgtcaacccggctttgtcatgaagggcccccggagggtcaagtgtcaagccctgaataaatgggaacctgagctgccaagttgtagcagagtgtgccagcccccacccgatgtgctgcatgccgaacgcacccagcgcgataaggacaatttttcacctggccaggaggttttttattcctgtgagccgggatatgatctgagaggtgcggcttctatgaggtgcacaccgcagggagattggtcccccgccgctccaacgtgcgaggtgaaatcatgcgatgattttatgggacagctgctcaatgggcgtgtgctatttccagtcaacctccagctgggcgccaaggtagatttcgtgtgtgatgaagggttccagctgaagggctcctcagcatcatactgcgtactcgccggcatggaatcactctggaattcaagcgtgccggtctgcgaacagattttttgcccctcacctccagttatccccaacgggcggcataccggcaagcccttggaggttttcccttttgggaaaactgtgaattacacctgcgaccctcatccagaccggggtacgtccttcgatctcatcggggagtctacaattcgctgtacttctgatccccaggggaatggggtttggtcgagccctgcccctagatgtggaattctcggccattgtcaggcccctgaccactttttgttcgctaagttaaagacacaaaccaatgcgtcagatttcccaattggaacctctcttaagtatgagtgcaggcctgagtactacggaaggcccttttcaattacttgcctggataacttggtgtggtcttctcctaaggatgtgtgcaagcggaagagctgtaagaccccgcctgatcctgttaatgggatggtgcacgttataactgatattcaagtgggttcaagaatcaattactcttgtacaaccggacacaggctgattggacactcctctgcagaatgcatactttcaggcaatgccgctcactggtccaccaagcctccaatttgtcagcggatcccctgcggtctccccccaactatcgccaacggagacttcattagcactaatagagaaaacttccattacggaagtgtggttacttatcgatgcaaccccgggtccggaggtcggaaggtctttgagcttgtgggtgaacccagcatctactgcacatcaaacgatgatcaggttggcatctggtccggaccagcacctcagtgcatcataccaaacaagtgtacccctcctaacgtggagaacgggattttggtttctgataacagaagtctgttttccctgaacgaggtggtggagttccgctgccagccgggatttgttatgaagggtcctcgcagagttaagtgccaagcattgaataaatgggagcccgagttgccaagctgcagtagggtgtgccaacctccacctgacgtgctgcacgcagaacggacccagcgagataaggacaacttctctccagggcaggaggttttctactcctgcgagccgggctacgacctcaggggggccgcctccatgcgctgcaccccgcagggcgattggagcccagctgctcctacttgtgaggtgaagagctgcgacgatttcatgggtcagttgctcaacggcagggtcttatttcctgtcaacctgcagctgggagccaaggtagatttcgtctgcgatgaaggctttcagcttaagggaagctcagcgagttactgcgtgctggctggcatggaaagtctctggaattcatccgtgccagtttgtgagcaaatcttttgcccttctcctccagtcatccccaacggtagacatacaggcaagccgctcgaggtcttccccttcggtaaagctgttaattatacttgcgatcctcatcctgacaggggaacctcattcgatttgattggtgagagtactattaggtgtacttccgatcctcaggggaatggagtgtggagctcgcctgctcccagatgcgggatcctcggacactgtcaggcgccagaccatttcctgtttgccaaattgaaaacccaaacgaatgcttcagactttccaataggaactagcctcaaatatgagtgcaggcctgagtactatggcaggcctttctctatcacctgcctggataacctggtctggtcttctcccaaagacgtctgcaagagaaagtcttgcaagacacccccggaccccgtaaatggaatggttcacgtcatcaccgacatccaggtgggctctcggatcaattatagttgcacgactggccatagattgatcggtcactcctccgctgaatgcatcttgagcggcaacactgcccattggtcaaccaagccacccatttgtcagcgcatcccttgtggccttccccccaccattgccaatggcgattttatcagtaccaacagggaaaacttccattatggctctgtcgtgacctatcgctgtaacttggggtctcgaggcagaaaagtctttgaactggtgggagaaccctcaatttattgcacctctaatgacgatcaggtcggcatctggagcggccccgctcctcaatgcatcatccctaataagtgcaccccaccaaatgtcgagaatggcatattggtttctgataaccgctccctgttcagtctcaatgaggtggtcgaattcagatgccagcccggatttgtgatgaaaggcccaagacgcgttaaatgccaggccctgaataagtgggagccagagctcccttcctgctcgagggtgtgtcagcccccccctgaaatcctccatggggaacataccccttcacatcaggacaatttctctcctggacaggaagtattctactcgtgcgagccaggttatgatttgcgaggagccgcctctctccattgcacgccacaaggcgattggagtcctgaggcacctcggtgcgcagtcaaaagctgcgacgacttcctcggacagctgccccacgggagggtgctatttcctttgaacttacagctgggcgccaaggtatcattcgtgtgcgacgaggggttccgcctgaaaggctcatcagtgtcacattgtgtactggtgggaatgcgcagcctgtggaataactccgtgcccgtttgtgaacatattttttgtcctaacccacctgcaattctgaacggccggcacacagggacgccctccggggatataccctatggcaaggagatcagctacacatgtgacccgcatccagacaggggtatgacctttaatcttattggagaatccactatacgatgcacatcagatcctcacggtaacggcgtctggagttctcctgctcccagatgcgagttgtccgtgagagcaggccactgtaaaacccctgaacagttccccttcgcttcccccactatccccataaacgatttcgaatttccagtcggtacttctctcaactatgagtgcagacccgggtactttggcaagatgttcagtatctcctgcctcgagaacctggtatggagctcagttgaggataactgtaggagaaagtcctgtggtcctcctcccgagcccttcaacggcatggtgcacattaacacagacacccaattcggctctaccgtgaactattcttgcaatgaagggtttcgccttattgggtcacccagcacaacctgcctggtatccggtaacaatgtcacgtgggataagaaggcacccatctgtgagattatcagctgcgagcctccacctactatctccaatggtgatttctatagtaacaacaggacgtcctttcacaatggaacagtagttacgtatcagtgtcatacaggaccagatggtgagcagctgttcgagctggtgggcgagaggtccatctactgtacttccaaagacgaccaagtgggagtgtggagttcccccccacctagatgcatctctacaaacaaatgcactgccccagaggtggagaacgcaatacgcgtaccaggaaacaggtcttttttcaccctgacagagattattcgtttccgttgtcagccaggtttcgtgatggtgggtagtcacaccgtgcagtgccagaccaacgggcgttggggacccaaactgcctcattgtagcagggtgtgtcagcccccccctgagatcctgcacggggagcacaccttgtcgcaccaggacaacttctcgcccgggcaggaggtgttctattcctgtgagccaagttatgacttgcgaggtgcagcgtccctacattgcacgcctcaaggggactggagtccggaagcacctagatgcacagtgaagtcgtgcgacgatttcctggggcagctgccgcacgggcgggtcctgctgcctctgaatctacagctcggagcgaaagtgagctttgtgtgcgatgagggctttaggctcaagggacggagtgcttcacactgtgtgcttgctgggatgaaggctctctggaactctagcgtcccagtctgcgaacaaattttctgcccaaacccacccgctatactcaatggacgccatacagggacccctttcggggacatcccgtatgggaaagaaattagttacgcatgtgatactcatcccgatagaggtatgactttcaaccttatcggggagagtagcattaggtgcacttcggatccccaaggaaacggtgtttggtcctcgcctgctccccggtgcgagctgagcgtacctgccgcctgtccacacccacccaaaatccagaacgggcattacattgggggacatgtctcactctacctccccggcatgactatatcatatatttgcgatccgggctacctcctggtcggcaagggatttatattttgcaccgaccagggtatctggtcacagctcgaccactattgtaaagaggttaactgctcatttcccctgtttatgaacgggatctcaaaggaactggaaatgaagaaggtgtatcattacggcgattatgtaacactcaaatgtgaagatggttacaccctagagggcagcccctggtcacagtgccaggccgatgataggtgggatccgcctctagccaagtgcacatctagaactcatgatgctctgatcgtgggtacactgagcggaacaatattctttatcctgctgattatttttctgtcatggatcatactgaaacacagaaaggggaataatgcccatgagaacccaaaggaagtggcaatccacctacactcccagggaggcagttccgtccaccccagaacactgcagaccaatgaggaaaatagtcgtgtgttaccttag

SEQ ID NO: 112750 - DNA, 1755 bp, synthetic construct
  misc_feature 1..1755: note = Description of Artificial Sequence: Synthetic coding sequence
  source 1..1755: mol_type = other DNA
ggccactgtcaggcaccagatcatttcctcttcgcaaagctcaagacgcagacaaatgccagtgactttcctatcggcacgagtctgaaatatgaatgtaggcctgaatattacgggcgtcccttctccatcacatgcctggacaatttggtgtggtcatcccccaaagacgtttgcaaacgtaaatcttgcaaaacgcctcccgatcctgttaacgggatggtgcacgtgataaccgatattcaggtagggtcaaggatcaactactcctgcacgactgggcatcgactgattggacattctagtgccgaatgtatacttagcgggaacgctgcacactggtcaaccaaaccgccaatttgtcagaggatcccctgtggacttccgcccaccatagccaatggagatttcattagcaccaatcgtgaaaactttcattacggcagtgtggtgacctaccggtgtaaccccgggagcggcggacggaaagtcttcgaacttgtgggggagcccagtatctactgtacctcaaacgatgaccaggtgggcatctggagcggtccagctcctcagtgcatcatcccaaacaaatgtaccccgccaaatgtggaaaatgggatcctggtttctgacaaccgctctttgtttagtctgaacgaggttgtcgagttccgctgtcaaccgggcttcgtaatgaagggcccacgcagagtgaagtgccaagctctgaataagtgggaacccgaactccccagctgcagtagagtatgccaacccccccccgacgtgctgcacgctgagagaacccagcgcgataaagataacttctcacctgggcaggaagtcttctatagctgcgaacccggctatgatttgcgaggtgcagcctccatgcggtgtactccacagggcgactggtcacccgccgctcccacctgtgaggtgaaaagctgtgacgactttatgggacagcttctcaacgggcgtgtgttgttccccgttaatctgcagctgggtgccaaggtcgactttgtttgtgacgaaggctttcagctgaaagggagttctgcatcttattgcgtacttgctggtatggagtccctctggaacagtagcgttcctgtgtgtgaacagatcttctgcccttctccgccagtgattccaaacgggcggcacaccgggaaaccactcgaggtgttccctttcgggaaaactgtgaactacacttgtgacccgcatcccgatagaggcacaagttttgacttgattggtgaaagcaccatccggtgtacaagtgatcctcaaggcaatggagtctggtccagccccgctccgcggtgcggaattctcggtcactgccaggctcccgaccacttcctcttcgccaagctcaagactcaaaccaacgcttctgatttccctataggtacctctctgaaatacgaatgtcgccccgagtattacgggcgtcccttctctattacctgtctggataatctggtgtggagcagccccaaggacgtctgcaagcgcaagagttgcaaaacacccccagaccccgtaaacggcatggtgcacgtcatcacggatatacaggttggctcacgtattaactactcttgcacaacgggacatagattaattgggcacagttcagccgaatgtattctgagcggcaacgccgcgcattggagtacaaaacctccaatctgccaaaggtcatgccacctaccctgtgaactgtttgggaggtag

SEQ ID NO: 112751 - DNA, 1335 bp, synthetic construct
  misc_feature 1..1335: note = Description of Artificial Sequence: Synthetic coding sequence
  source 1..1335: mol_type = other DNA
atggccccgcctgtgaggcttgaaagaccttttccttctaggcgttttcctggactgctgttagcagccctcgtgctactgttgagctcattctccgaccagtgcaatgtccctgagtggctgccctttgcccgtcctaccaatctgaccgacgatttcgaattccctattgggacctatctgaactatgaatgtcgccctggatactccggtagaccctttagcatcatctgcctcaagaatagcgtgtggacttcagccaaagacaagtgtaagagaaagtcgtgcagaaatccacccgatccagttaatggcatggcccatgtcatcaaggatattcagttcagatcccagataaaatacagctgtccaaagggctacaggctgattggatcttcgtccgctacgtgtattatttctggaaataccgttatttgggataacaagactccagtctgcgatagaattatttgcgggctgccccccacaatcgctaatggggacttcaccagtattagtagggaatacttccattacgggagcgtggtgacctatcactgtaacctgggtagcagggggaagaaagtattcgagcttgttggcgaaccttcgatatattgtacaagtaaagacgaccaggtgggcatctggtccggacccgctccccagtgtattattcccaataaatgcacccctcccaacgtcgaaaacggaatattagtgtctgacaatcggtcattgttctcactcaacgaagtcgtggagttccgatgccagccgggatttggcatgaagggcccctctcatgtaaagtgccaagcgcttaataagtgggagcccgagctgccttcatgttcccgcgtctgccagcccccacccgatgtgctccatgccgagcggacccagcgggataaagataacttctccccaggacaggaggttttctattcatgcgaaccgggatacgatctgaggggatccacttatctgcactgtacaccacagggagactggtcgccagcggcccccaggtgtgaggtcaagagttgcgatgatttcttaggccaactgccgaatggccacgtgctttttccactgaatttacagttgggagcaaaggtcgatttcgtgtgcgatgagggtttccagctgaagggttcatctgcatcctactgcgttctggcgggaatggagtccctgtggaactcatccgtccccgtgtgcgaacggaagagctgcgaaacccctcctgtccctgtgaacggcatggtgcatgtcattactgacattcacgtgggcagccggatcaactattcatgtacaacgggtttctag

SEQ ID NO: 112752 - DNA, 1710 bp, synthetic construct
  misc_feature 1..1710: note = Description of Artificial Sequence: Synthetic coding sequence
  source 1..1710: mol_type = other DNA
atggcccctcctgtgaggttggaacgcccctttccttcccgccgctttccagggctgctgctggctgcactggtgttgcttctgtcctctttctccgaccaatgtaacgtaccagagtggctgccctttgcccgaccaactaacctgacagacgactttgaatttccaataggcacatatctcaattatgaatgccggccggggtactcgggccgcccattcagtattatttgcctgaaaaacagcgtctggacttccgccaaggataagtgcaaacgaaagagctgccggaatccccccgatccagtgaacggaatggctcacgtgatcaaagatatacagttccggtcacagatcaaatattcatgtccaaaaggataccgactaataggttcttcaagcgctacatgtatcatcagtggcaatacagtcatttgggataataaaacaccagtgtgtgataggatcatctgtggactgcccccaacaatcgctaatggtgacttcacgtctatttctcgtgagtacttccactatggatcagttgtaacttaccactgtaatttgggttcaagaggcaagaaggtctttgaacttgtcggggagcccagcatctattgtaccagtaaggatgatcaggtgggtatatggtctggacctgcgccacagtgcattatccctaacaaatgtactccgccaaatgtcgaaaacggcatcctggtgagtgacaatcgatcactcttttctttgaatgaggtggtggagtttagatgtcagccaggattcggtatgaaggggccctcgcacgtcaagtgtcaggccctcaacaagtgggaacctgagctcccctcctgtagccgggtctgccagccaccccctgatgtcttgcatgctgaaaggacgcagcgcgataaagataatttttcaccaggacaagaagttttctactcttgcgaacctggatatgacctgcgcggatcaacttacctgcactgtaccccccagggtgattggtccccggctgctccccggtgtgaagtgaagtcatgcgatgactttcttggtcagctaccaaatgggcatgtgttgtttccactcaatttgcagttaggcgccaaggtggacttcgtttgtgatgaaggattccagttgaagggtagttctgcttcgtattgtgttttggcgggaatggaaagtttgtggaacagctcggttcctgtgtgtgagcggaagtcctgcgagaccccacccgtgcctgtgaatggaatggtccatgtgatcaccgatatccatgtgggatccaggattaattattcatgcaccacaggacatcggctgatagggcactcttctgccgagtgcatcctgtcgggaaatactgctcactggtcaatgaagcccccaatatgtcagcagatattttgcccgaatccgccagcaatactcaacggaaggcatacaggaaccccattaggtgacataccttatgggaaagaggtctcttacacatgcgaccctcaccctgaccggggaatgacatttaatctgattggagaatcaacaatccgccgtacttctgagccacatggcaacggagtttggagttcccctgcacccagatgtgagctcccagtgggggctggaagccacgatgccttaattgtcggaaaattctacgaggtgttcgctgaagaattctgtcacctctag

SEQ ID NO: 112753 - DNA, 3279 bp, synthetic construct
  misc_feature 1..3279: note = Description of Artificial Sequence: Synthetic coding sequence
  source 1..3279: mol_type = other DNA
atgggcgcagcggggctcctcggagtgttccttgcattagttgcccctggagtcttgggcatttcatgtggctctcctcctccaatcttgaatgggcgtatctcctactacagcacccccatcgccgtgggtaccgttattcggtattcttgttcaggaacgttccggttgattggggagaagagccttctctgcattaccaaagataaagtcgatgggacctgggataaacccgccccaaagtgtgagtacttcaataagtacagtagctgtcctgaacccatagttcctggcggctacaaaatccgcgggagtacaccatacagacacggcgattcagtgacttttgcatgcaaaacgaatttttccatgaatggaaacaaatcagtgtggtgccaggccaacaacatgtggggtccgacacgtttaccgacctgtgtgagcgtgttccccctggaatgtcctgcgctgccaatgattcacaatggccatcacacaagcgaaaacgtcggctccatcgcccctggactaagcgtaacgtactcatgcgaatccggatacctcctagtgggggaaaaaataattaactgcttgagtagtggaaagtggagcgccgtgcctccaacgtgcgaggaggctagatgtaagtccttaggccgttttcctaacggtaaagtgaaggaacctcctattctgagggttggtgtcaccgcgaatttcttctgtgatgagggatatcgtttacaggggcctccctcaagtcggtgtgtcatcgccggccagggggtggcctggacaaagatgccggtgtgtgaggagattttttgtccatctcccccacccattctgaatggacgtcacatcggcaatagcctcgccaatgtgtcatacggcagcatcgttacatatacatgtgatcccgatcctgaggaaggggtgaacttcatcctcattggggaatccacgctgcgatgcacggtggattcacagaagacaggtacatggagcgggcccgctccaagatgtgaactgagtactagcgctgtgcagtgtccgcacccccagattctgcgaggaagaatggtcagcggacagaaggaccgatacacatataatgacacggtgatcttcgcgtgcatgttcgggttcacacttaaaggatcaaagcaaatccggtgcaatgcccagggcacatgggagccttctgctccagtatgcgagaaggagtgccaggcgccgcctaatattcttaatgggcagaaagaggaccgccatatggttaggttcgatcccggcacctctataaaatacagttgtaacccaggatatgtcctcgtgggcgaggagtctattcagtgcacgtctgagggagtgtggacacccccggtgcctcagtgcaaagtagccgcctgtgaggccacaggacgacagcttctgacaaagccacaacaccaattcgttcgcccagatgtgaacagctcatgtggtgagggatacaagctcagcggatccgtgtatcaggagtgtcagggtacaatcccctggtttatggagattcgtctgtgtaaggagataacatgccctcctcctcctgtgatatataatggcgcccatacaggctcctctctggaggatttcccgtacggcactaccgttacctatacgtgcaaccctggccccgagcggggggtggaatttagcctcattggcgagtcaaccattaggtgcacctccaacgatcaggaaagggggacttggtctggccccgctcccctgtgcaagctctccctcctggccgtgcagtgctcccatgttcatattgccaatgggtataagatcagcggcaaagaggccccctacttttacaatgacacggtgacctttaaatgctactccgggttcacgctaaagggtagttcccagatccggtgcaaagccgataatacatgggatcctgagatccctgtctgtgagaagggctgccagagccctcccggactccaccatggccgccatacaggagggaatactgttttttttgtcagcggcatgaccgtcgactacacatgcgacccaggctaccttttggttgggaataagtctattcattgcatgccgtctggcaactggtctccgtcggcccctcggtgcgaggagacgtgccagcatgtgagacagtccctccaggaactgcccgcaggtagccgagtcgagctagtgaatacttcatgtcaggatggataccagctcacaggccacgcctaccaaatgtgccaggacgcggagaatgggatctggttcaaaaaaattcccctgtgcaaggtgattcactgccatccaccccctgtgatagtgaacggaaagcacacagggatgatggctgaaaatttcctctacggcaatgaagtgtcatacgaatgtgaccagggcttctatctgctgggagaaaagaaactgcagtgcaggtccgattcaaaaggccatggttcctggtccgggccgagtccccagtgccttcggtccccacccgtgaccaggtgtccgaatcctgaagtaaagcacggctacaaactgaataagacacattccgcatactcacataatgatatcgtctatgtcgactgtaacccagggttcatcatgaatggatctcgggtaataaggtgccatactgacaatacatgggtgcctggcgtgcctacctgtatcaagaaggccttcattgggtgcccccctccaccaaagaccccgaatggcaaccacaccggaggaaatatcgcccgttttagccccggcatgagcatcctttactcctgcgatcagggctacttgctggtgggcgaggcccttctactctgcactcatgaggggacatggtcccagcccgctccccactgcaaggaggtgaactgctcatcccccgcagatatggacggtattcaaaaagggcttgagcctagaaagatgtaccagtacggcgcagtggtgacactagagtgtgaagatggatatatgctggagggctctccgcagtcgcagtgtcaaagtgaccaccagtggaacccgcctcttgctgtctgtcgatcgaggtccctagcccccgttttatgcgggattgcagccggactgatactgctgacattccttattgtaataacactctatgtgatatctaagcaccgcgcccgtaattattacaccgatacttcacagaaagaagcatttcacctggaggcccgggaggtgtacagcgtggatccttacaaccccgcctcttag

SEQ ID NO: 112754 - DNA, 3102 bp, synthetic construct
  misc_feature 1..3102: note = Description of Artificial Sequence: Synthetic coding sequence
  source 1..3102: mol_type = other DNA
atgggcgctgcggggctcctgggcgtctttctggcccttgtggccccgggtgttctaggaattagttgtggcagtcctccacctatcctcaatggccgcattagttactattcaactcctattgcagtgggtacagtgatccgctatagctgtagtggaaccttcagactgatcggagagaagtccctgctttgtattacgaaggataaggtggatgggacatgggataagcccgctccaaaatgtgagtactttaacaagtattcctcttgtcctgaacctatcgtgccgggagggtataaaattcgcggttccaccccctatagacatggggattccgtgacctttgcttgcaagacaaacttcagcatgaatgggaacaagtcagtctggtgtcaggccaataacatgtggggaccaacccgcctccccacgtgcgtgagcgtctttcctctggagtgtcccgctcttccaatgattcacaatgggcaccatacttccgagaacgtaggcagtatcgcccctggcctctctgttacttatagctgcgagagcgggtatcttttggttggcgagaagattattaactgtctgtctagcgggaagtggtcagccgttccccctacttgcgaagaagcccgctgcaaatctctcggccggtttccaaatggcaaagtgaaggagccccctattctgcgcgtgggcgtgacagctaactttttctgcgacgagggatacagactgcaggggccaccatccagccgatgcgtgatagcaggacaaggcgtcgcctggacgaaaatgcctgtgtgtgaagagattttctgcccatcccctccgcctattcttaacggccgacacatcggaaacagcctggccaatgtttcctacggtagtatagtgacctacacgtgtgaccccgacccggaggaaggggtaaattttattttgatcggggagtccaccctgcggtgcacagtcgactcacagaaaacaggaacttggtcaggccccgcaccaaggtgcgaacttagcacgagcgcagtccaatgccctcatccccagatactgcgtggtagaatggtgtctggccagaaggacagatacacctacaacgatactgttatctttgcgtgcatgtttggatttacgcttaaggggtccaagcaaatcaggtgcaatgcccaggggacctgggagcctagtgcccccgtttgcgagaaagagtgtcaggcaccgccaaacatcttgaatggccagaaggaggacaggcatatggtcaggtttgatcccggcacttccattaagtactcttgcaatcccggttacgtgcttgtaggggaagagtcaatccaatgtacaagtgagggcgtctggactcccccagtgccccagtgcaaagtggctgcctgtgaagcaactgggcggcagctcttgaccaaaccccagcaccagttcgtaaggccagatgtgaactcctcctgtggcgaagggtacaaactctctggcagcgtgtaccaggaatgccagggcaccataccatggttcatggaaatcaggttgtgcaaggagattacatgtcccccgccacctgtgatctacaatggcgcccacacaggttctagcctggaggacttcccttacggcaccactgtcacctacacatgtaaccccggccccgaaaggggcgtggaattttctctgatcggggagtccacgattaggtgtacctcaaatgaccaagagcgtggcacatggtctggtcccgcacctctgtgcaaattgagtttgctggcagtacagtgttcgcacgtgcatatagcaaacggatacaaaatttccggcaaggaggcaccatacttctacaacgacactgtcacattcaaatgttactccggctttacattgaagggaagctcacagatccgttgtaaggcggacaacacttgggaccccgaaattcctgtgtgcgaaaaagagacatgccaacacgtgcggcagtccctgcaggaacttcccgcaggcagccgggtggagctggtcaataccagctgtcaggatggctaccagctgacaggccatgcttatcagatgtgtcaagatgctgaaaatggtatctggtttaaaaaaatcccactgtgcaaggtcatacactgtcaccctccgcccgtgatcgtgaacgggaaacacaccgggatgatggccgaaaactttctgtacgggaatgaagtgagctatgagtgtgatcagggcttttatctgttaggagagaaaaaactccagtgtcgcagcgacagcaagggccacggcagttggagtggcccaagtccacagtgtctgcggtcgcctcctgttacccgttgtccaaatcccgaggttaaacatggatataagctgaacaaaactcactccgcatacagtcacaatgatattgtgtatgtcgactgtaatcccgggtttatcatgaatggcagtagagttatcagatgtcacacagacaacacatgggttcccggtgtcccgacatgcattaaaaaagccttcatcggttgtcccccccccccaaagaccccaaatgggaatcatacaggaggaaatattgcacgattttccccaggcatgagcatcttgtactcatgcgaccagggttacctgctggtaggggaagcgttgctgctgtgcacccatgagggaacatggtcccaaccggcacctcactgcaaagaagtgaactgttcgagcccggcagatatggatgggatccagaaaggtctggagccacggaagatgtatcagtacggcgccgtagtcactctggagtgcgaggatgggtacatgctcgagggctctcctcagtcccagtgccaatctgaccaccagtggaaccctccgttggcagtatgcaggtcaaggtcactggcccccgtgctgtgcggaatcgctgctgggctgattctgctgacatttctgattgtgatcaccctctatgtcatctcaaagcacagagcaagaaactactataccgacacatcgcagaaagaggctttccatttggaagctagagaggtgtattcagtcgacccctataatcctgcttcatag

SEQ ID NO: 112755 - DNA, 2916 bp, synthetic construct
  misc_feature 1..2916: note = Description of Artificial Sequence: Synthetic coding sequence
  source 1..2916: mol_type = other DNA
atgggcgcagctggccttctaggagtgtttctagctctggtcgctccaggagtactcggtatctcctgcggaagtccgcctccgattttgaatggtaggatctcttattactccactcccattgcggttggaactgtgattaggtattcgtgttccggcacttttcgcttgatcggagaaaaatccttactgtgtataaccaaggataaggtggatggcacctgggacaaaccagcacccaagtgcgagtattttaacaagtactccagctgtcccgagccgatcgtgcctggaggctataaaattcgggggtccacgccgtacaggcatggcgattctgtgacatttgcttgcaagacaaacttctctatgaatggaaacaagagcgtgtggtgtcaggccaacaatatgtgggggccaacccggttgcccacgtgtgtctctgtgttccccctggaatgtccagcgctccctatgatccacaatggacatcacacatctgaaaacgttggttctattgccccagggctgagtgtcacctacagctgtgaaagcgggtacctcctggtcggcgagaaaatcatcaattgtctgtccagcggaaaatggtctgccgtccctcccacctgcgaggaggccaggtgcaagtctctgggtcggtttcccaatggcaaggtgaaggaaccgcccattctcagggtgggggttacagctaactttttctgcgatgaaggctatcgtctccaggggccaccaagctcccgttgtgttattgctgggcagggggtggcctggaccaagatgccggtgtgcgaggaaatattctgcccgtcccctcctccaatattgaatggacgccatatcggcaactcactcgctaatgtctcctacggatcaatcgtcacttatacgtgtgatccggatcctgaggagggagtgaattttattctgattggcgagagtactctgcgctgcaccgtggatagccagaagacgggcacctggtctggaccggctcctcggtgcgagctgtccacctcagctgtgcagtgccctcacccccaaatcttaagagggcgaatggtttcgggtcagaaagataggtatacatacaacgacaccgttatctttgcctgtatgttcgggttcacactgaagggaagcaaacagattaggtgcaacgctcaggggacatgggagccatcagcacccgtctgtgagaaggaatgtcaggcacctccaaacatcctgaacgggcagaaggaagatcgtcatatggtgcgatttgaccctgggacttctatcaagtatagctgtaaccctgggtatgtcttggttggggaagaatcaatacagtgtaccagcgagggagtgtggactcccccagtccctcaatgtaaggtggcagcgtgtgaggctacaggaagacagcttttgactaagccccaacaccagtttgtgaggccagatgtgaatagcagctgtggtgaagggtacaagctctctgggtccgtctaccaggagtgccaggggaccatcccctggtttatggaaattcggctctgtaaagaaatcacatgtcctcctcctcctgtgatttataatggagctcataccgggagttcactggaggactttccttatggtaccactgtgacctatacttgtaaccctggcccagagcggggagtagagttcagccttatcggcgagtctactatccgctgtacctctaatgaccaggagcgcgggacttggtctggaccagctcctctgtgtaaactgagcctgctggctgtgcagtgcagtcacgtgcacatagctaacggttacaaaatttccggaaaagaggcgccatacttctataacgacactgttaccttcaagtgttattcagggttcacactgaagggatcctcccagatacgctgcaaggccgacaatacttgggacccagaaatccctgtttgcgagaaggaaacctgccagcacgtgagacagagcctgcaggaactgccggccggcagtcgggtggagttagtgaacactagctgtcaggacggatatcagctgaccggccacgcctaccagatgtgccaggacgccgagaacggaatctggtttaaaaaaataccactctgtaaagtaatacactgccatcctcccccagtgatcgtgaatggcaagcatacgggtatgatggctgagaatttcctatacgggaatgaggttagctatgagtgtgaccagggattctacctgttaggcgagaaaaagctacagtgtcgctccgactctaaggggcatggctcctggagcggaccttcaccgcagtgtttgagatctcctcctgtgacgagatgtccaaaccccgaagtcaaacacggctacaagcttaacaagacccatagcgcatacagccacaacgatattgtgtacgtagactgtaaccccggctttatcatgaatgggagcagggtcataaggtgtcatacagataacacctgggtgcctggcgtgcccacatgtattaaaaaggaggttaactgcagttccccagccgatatggatggcatacagaagggtcttgagcccaggaaaatgtaccagtatggtgcagtggtgacacttgagtgcgaggatggatacatgctggagggatctccccaatcacagtgccagtccgatcaccaatggaaccctcctttggccgtctgtaggtcgcggtcactggcccctgtcctgtgcggtatcgccgctggcctaatcctgctgactttcctgatagtgatcaccctctacgtgatctctaagcacagagctcgtaattactatacggatacatcacagaaggaggccttccacttggaggcacgggaagtgtacagtgtcgacccttataaccctgcgtcctag

SEQ ID NO: 112756 - DNA, 3021 bp, synthetic construct
  misc_feature 1..3021: note = Description of Artificial Sequence: Synthetic coding sequence
  source 1..3021: mol_type = other DNA
atgggagccgctggactgctgggggtttttctggctctggtcgcccccggcgtccttgggataagttgcggatcgcccccacccattttaaatgggcggatcagctactactccacccccattgctgtcgggaccgtaatcaggtatagttgtagcggaacgtttcgattgatcggagagaagagtctcctctgtattacgaaagataaagtcgatggcacatgggacaagcccgcgccaaagtgtgagtattttaacaagtactcgagttgtcccgagcctattgttcccggcggttataagatcagaggttcaacaccctaccggcacggcgactccgtaacctttgcgtgtaaaactaatttttccatgaatgggaataagtccgtgtggtgtcaggccaataacatgtggggacctaccagactgcccacctgcgttagtgtcttccccctggaatgcccggctctcccaatgatccacaacggacaccatacctcagagaacgtgggatccattgctcccgggctgagtgttacttattcctgtgaaagcggatatctacttgtcggcgagaaaatcataaattgtctctcaagtggcaagtggtccgctgtaccccccacttgcgaagaagcccggtgtaaatctctcgggcggttcccaaatggaaaagttaaggaacctccaattctccgggtcggagtgaccgccaacttcttctgcgatgaaggctatagactgcaggggccaccaagtagccgctgcgttattgccggtcagggcgtggcctggaccaagatgcccgtgtgcgaggagattttttgtccctcacctccccctatcctcaatggacgccacatcggaaatagccttgccaatgttagctacggctccatcgtcacctatacttgcgatcccgatccagaagagggcgtcaatttcatactgattggcgaatcgaccctgcgctgcactgtggactcccagaaaacaggtacatggagcggccctgctccacggtgtgagctgtcaacctctgccgtacagtgtccccatccccaaatcctcagaggaagaatggttagtgggcagaaagatagatatacatacaacgacaccgtcatcttcgcctgtatgtttggatttacactgaaggggtctaagcaaattcggtgtaatgcacagggtacgtgggagcctagtgccccggtctgcgagaaggagtgtcaggctccccctaacatcttaaatggccagaaagaggaccgacatatggtaaggttcgaccccggcacttcgatcaaatattcctgtaatcccggatacgttcttgtgggcgaagagagcattcagtgcacgtcagaaggagtctggacgcctccagtccctcagtgcaaagtggccgcttgtgaggcaactggtagacagcttctgactaagccccaacatcaattcgtaagacccgatgtgaatagctcgtgcggagagggcaatcacctcccaacgaccccctgctatctccagtggggaacacatagagagtttttgaggagattctccatctggaaccacggacatctgcacatgccaggccctgagaggggagtcgagttctctcttatcggcgagtccactatcaggtgcacatcaaatgaccaggagcggggaacctggagtggacccgctcccctgtgcaaactcagtctgcttgcagtccagtgtagtcacgtgcatatcgccaatggctataagatcagcggaaaagaagctccatatttctacaatgacaccgtaactttcaagtgttatagtggctttaccctgaaagggagcagtcagatccggtgcaaggcagataatacttgggatccagaaattccagtctgtgaaaaggaaacctgccagcacgtgcgacagtcgctccaggaattacccgctggatcaagagtagagcttgttaatacttcctgccaggacggatatcagttgacagggcatgcctatcagatgtgtcaagacgctgagaacggtatctggtttaagaagatccctctgtgcaaagttattcattgtcacccaccccctgtgattgttaatgggaaacataccggcatgatggctgagaactttctctacggaaacgaggtatcctatgaatgtgatcaggggttctacctgctcggggagaagaagctgcagtgcaggtcagactccaagggacacggctcatggagcggcccatcaccacagtgtttgcggtcaccccccgttactcgatgtccaaatcccgaagtcaagcatggttacaagcttaacaaaacgcattcagcatatagccacaacgatattgtgtatgtggattgcaatcccgggtttattatgaacgggtctcgtgtcatccgttgccacacggataacacatgggtgccaggggttcctacgtgcatcaagaaagcgtttatcggctgccccccaccaccgaagacacctaatggaaaccacactggtggaaacatcgcacgctttagcccaggcatgtcgatactgtattcctgcgaccaaggttaccttctcgtgggagaggccctactgctgtgcacccacgagggcacttggtctcagcccgccccgcattgtaaggaggtaaactgttcctctcccgcagacatggatggaatccaaaagggactggagcccaggaaaatgtaccaatatggcgctgttgtcactctggagtgcgaggacggctacatgttagagggttccccacagtcacagtgtcagtcagaccatcagtggaacccccccctggccgtgtgtcgtagccgtagcctcgcccccgtgttgtgcgggatagccgctggcttgattctcctgaccttccttatagtgatcacgctgtacgtgatcagcaagcatcgagccaggaattactacacggacacatcacaaaaggaggcattccacctggaagctagagaggtttattccgttgatccctacaaccctgcttcctag

SEQ ID NO: 112757 - DNA, 2226 bp, synthetic construct
  misc_feature 1..2226: note = Description of Artificial Sequence: Synthetic coding sequence
  source 1..2226: mol_type = other DNA
atggccgccgcggaggggcctgtaggagatggagaactgtggcaaacttggctgcccaaccacgtggtgtttttacggctgagggagggcctcaaaaaccaatctccgactgaggctgagaagccagcaagttcgagcctgccttctagtccaccaccacagctcttaacacgcaacgtggtcttcgggctcgggggagagctgttcttatgggatggcgaagactcttcgtttctggttgtgcgtctgaggggcccttctggtggcggcgaagagcctgccctgagccaatatcagcggctgctctgtattaacccccccctgttcgagatctatcaagtccttctctctccaactcaacatcacgtagccctcatcggcatcaaagggcttatggtgctcgaactgcctaaacggtggggcaaaaattccgaattcgaagggggaaaatcaactgtgaactgttcaaccaccccggtggccgaaagattcttcacatcgtccacttctctcaccctgaaacacgctgcatggtatccatctgaaatattagacccccatgtggtgctgctaacatccgataatgtgattcggatctacagcttgcgcgaaccacaaacccccacaaatgttatcatattgagtgaggctgaagaggagtctcttgtgctgaacaagggccgcgcctacacagccagtttgggcgaaacagctgtcgctttcgactttggcccgcttgcagccgtcccgaaaactctcttcgggcaaaacggcaaagatgaagtcgtggcatatccattatatattctctatgagaacggagagacattcctgacttatatttccctgctgcattcccccgggaacatcggcaaactgctcggacctctgcccatgcacccagcggccgaggacaattacggatacgatgcatgcgccgtactctgtctgccttgtgtaccaaacatactggttatcgcaacagaatcagggatgctttaccattgcgtagtgctggagggagaggaggaggatgatcatacttctgaaaagagttgggatagtaggatcgatctgattccgtcactgtacgtttttgagtgcgtggagcttgaactcgctttaaagctggctagtggagaagacgaccccttcgactccgacttctcctgcccggtcaaactgcacagagacccaaaatgtccgtcgagataccactgtactcacgaggccggtgtacacagtgttggcctgacatggattcacaagttgcacaagttcttaggatccgatgaggaggacaaagattcactgcaggagctgtccacagaacaaaaatgtttcgtcgaacacatcttgtgtacaaagcctttaccttgccgacagccggccccaatcagggggttttggattgttccagacattctcgggccaaccatgatttgcattacctccacctatgagtgtcttatttggcccctcctttctaccgtgcacccagcttcccccccactcctatgcactcgcgaggatgtggaggttgccgagagtcctctgagggtcctggcagaaacacctgactcttttgaaaagcacatccgatcgattctacagcggagcgttgcaaaccccgcgtttctaaaggcctcggaaaaggatatagccccacccccagaagagtgcctccaactgctttcccgcgccacacaggtgttccgtgaacaatacattctcaagcaggaccttgcaaaagaggaaatccaaaggagagtgaagttgctgtgtgaccaaaagaagaagcaattggaggatctatcttactgcagggaagaaaggaagtccctgagggagatggcagagcggcttgctgataaatatgaagaagctaaggagaagcaggaagatattatgaatcgaatgaagaaactcctgcactcttttcactccgaattgccagtgctgtccgatagcgaaagggatatgaaaaaggaactccagctcattccagaccaactccgtcacctggggaatgccattaagcaggtgacaatgaaaaaagactatcagcagcagaagatggagaaagtcctttctttgcctaaaccgactatcattctgtccgcataccagagaaaatgtatccagtccatcctgaaggaagaaggtgagcacatcagggagatggttaaacagattaacgacattcgcaaccatgtgaacttttag

SEQ ID NO: 112758 - DNA, 762 bp, synthetic construct
  misc_feature 1..762: note = Description of Artificial Sequence: Synthetic coding sequence
  source 1..762: mol_type = other DNA
atgatgatgaaaatcccatggggatctataccagtcttgatgctgctgctgctgctagggttgatcgacatatcccaagcacagctgtcctgtacaggcccccctgctatccctggaattcctggaatcccaggcacacccgggccagatgggcagcccgggacgccaggcattaagggcgagaagggcctcccaggactggccggcgaccatggagaatttggtgagaagggcgatcctggtattccggggaatcccggcaaggtgggccccaagggtcctatgggcccaaaaggcggacccggcgcacctggtgcgccaggaccgaagggcgagtccggagattacaaggcgacccaaaagatcgccttctctgcgactaggaccatcaatgtgcctcttaggagagatcagactattcgtttcgaccacgtgatcaccaatatgaacaataattacgagcctcgctcaggtaaatttacttgcaaggtccccgggctttactattttacctatcacgcttcctccagaggtaacctctgcgtgaatctgatgaggggaagggaacgggcacaaaaggtggtgactttttgcgactatgcctataacacgttccaggtcacgaccggaggcatggtcctcaaattagagcaaggggaaaacgtgtttctgcaggccactgacaagaactcactcctcgggatggaaggcgctaactcgatcttctcaggtttcctcttgtttccggatatggaggcctag

SEQ ID NO: 112759 - DNA, 690 bp, synthetic construct
  misc_feature 1..690: note = Description of Artificial Sequence: Synthetic coding sequence
  source 1..690: mol_type = other DNA
atgaagatcccatggggaagcatccccgtgctgatgctgctgctccttttgggactgatcgatatcagccaggcccagctgagctgtactggcccacccgcaattccaggcatccctggcattcccggaacccccggaccagatggccagcccggcacccctggaataaagggagagaaggggctcccaggactcgctggagaccacggcgaattcggagaaaagggggaccccggcatacctggaaatcccggaaaagtcgggcctaagggtcccatgggccccaagggtgggcctggggcccccggtgcacctggaccaaaaggcgagagtggagattataaagctacacagaagatagcatttagcgcaacccggactatcaacgtccccctgcggcgggatcagaccatcagatttgaccatgtgattacaaatatgaacaataactatgagccgcgaagcggaaaatttacgtgcaaagtgcctggattgtactacttcacctatcatgcctccagcagagggaatctctgtgtgaaccttatgcgcggacgagagagggcccaaaaagtcgtaactttttgtgattatgcctacaatacctttcaagtcactactggcggcatggtcttgaagcttgagcagggagagaatgtgttcttgcaggcgactgacaagaacagctag

SEQ ID NO: 112760 - DNA, 756 bp, synthetic construct
  misc_feature 1..756: note = Description of Artificial Sequence: Synthetic coding sequence
  source 1..756: mol_type = other DNA
atgaaaattccttggggtagcataccagttctgatgttgctactcctcctagggctcatcgatattagccaggcccaactaagttgcacaggacccccggctatcccagggatccctggcattcctggcacccccggcccggatggacagcctggaacccccggaatcaaaggagaaaagggcctgcctgggctggctggtgaccacggcgagttcggtgaaaagggggaccccgggattcctggaaatcctgggaaggtcggacccaagggccccatggggcccaaaggcggccctggggcccccggagcacccggaccaaaaggagaatcaggggactacaaggccacacaaaaaatcgcattttcggcaactagaacaattaatgtgccactacggcgggaccaaaccattcggtttgaccacgtaatcacaaacatgaacaataactacgagccacgcagtggtaagtttacgtgtaaggtgcccggactctactacttcacgtatcacgcgtcttccagaggcaatttgtgtgtgaatctcatgaggggacgagaacgagctcagaaagtcgttaccttttgcgactatgcctataataccttccaggtcacaaccggcggaatggtacttaaactcgagcagggagagaatgttttcctgcaggccacggacaaaaactctctcctcggaatggagggggcgaacagcattttcagcgggttcctgctgtttccagacatggaggcctag

SEQ ID NO: 112761 - DNA, 462 bp, synthetic construct
  misc_feature 1..462: note = Description of Artificial Sequence: Synthetic coding sequence
  source 1..462: mol_type = other DNA
atgaaaattccgtggggcagcatcccagtgctaatgctgctgcttcttctcgggctgattgatatcagccaggcccaactcagctgcacaggacccccagctataccaggcataccgggaatccctggcacaccagggccagacgggcagccaggcaccccaggtattaagggcgaaaaaggtttgccagggcttgcaggcgaccatggtgaatttggagaaaagggtgaccctggaattcccggcaatccaggaaaggtaggcccaaaggggcccatgggccctaaagggggtcctggggctcccggcgcacctggccccaaaggagagtcgggcgactataaagcaacacagaaaatcgccttttcagcaacgcggacaattaacgtccccctgcgacgggaccagacaattcgcttcgaccatgtcatcacaaatatgaacaataattatgaaccctag

SEQ ID NO: 112762 - DNA, 738 bp, synthetic construct
  misc_feature 1..738: note = Description of Artificial Sequence: Synthetic coding sequence
  source 1..738: mol_type = other DNA
atggatgtgggacctagtagtcttccacacttggggctgaaactcctcctgcttctgctgcttttgccacttcgtggccaggcaaacaccggctgctacggaattccagggatgcccggactgcctggggcacccggaaaggacgggtacgacggcctgccaggcccgaaaggggagccaggcattcccgccatccccgggattcggggccccaagggacaaaaaggagagccggggctgcccggccaccctggcaagaacggcccaatgggaccccctgggatgcccggagtgcccgggcccatgggaatcccaggcgagcctggtgaggagggcaggtacaagcagaagtttcagtcagtgtttaccgtcacaaggcagacccaccaaccgccagcccctaattcactcatccgctttaacgctgttctgaccaacccgcagggcgactatgatacttcaacgggtaaattcacctgtaaggtcccaggcctttattacttcgtctaccacgcctctcacacggctaatctgtgtgttctgctgtaccggagcggggtgaaggtcgtgaccttttgtggccacactagtaagacaaatcaggttaactcaggaggcgtcctcctacgcctgcaggtgggagaggaagtttggctagccgtcaatgattattacgacatggtgggaatccagggatccgattccgtgttttctggctttctgcttttccccgattag

SEQ ID NO: 112763 - DNA, 738 bp, synthetic construct
  misc_feature 1..738: note = Description of Artificial Sequence: Synthetic coding sequence
  source 1..738: mol_type = other DNA
atggacgttgggcccagttccctacctcatcttgggctcaagttgcttctgctgcttctgctcctgcccctgcgcggtcaggccaacactgggtgttatggcatcccagggatgcctggcctgcccggcgctccggggaaagatggctatgacggactgccgggcccgaagggcgaacctggaataccagccatacctggcattaggggaccgaaaggacaaaagggggagcccggcttaccgggacatccaggtaaaaatggacctatgggcccaccaggcatgcccggcgtgcctgggccaatggggatcccgggtgaacctggagaagagggccgctacaagcagaaatttcagagcgtgtttacggtcacaagacagacccaccagccgcccgctcctaatagtctaatccggttcaatgctgtgttgaccaatccacagggcgattacgacacatccactggcaagttcacctgtaaggtgccgggcctgtactatttcgtgtatcacgctagccacaccgccaatctgtgtgtacttctgtatcgaagcggggtgaaagtggtaacgttctgcgggcacacaagtaaaaccaaccaggtgaacagtggaggggtgctgcttagactgcaagtcggtgaggaagtgtggctggcagtcaacgactactatgatatggtgggaatacaaggaagcgacagtgtattttctggattcctcctgtttccggattag

SEQ ID NO: 112764 - DNA, 738 bp, synthetic construct
  misc_feature 1..738: note = Description of Artificial Sequence: Synthetic coding sequence
  source 1..738: mol_type = other DNA
atggacgtgggacccagttccttaccacatttgggactcaaactgctcctcttgctcctgctgctcccccttaggggacaggcaaatacaggctgctacggaattcccgggatgccaggattgcctggtgcacctggcaaggacggttatgatggactgccgggacctaaaggggaacccggcatcccagctattcccggtataagaggtcccaagggacagaaaggagagccaggcctgccaggacatcccggtaagaacggccccatggggccccccggcatgcctggtgtaccaggccctatgggcatacccggggaaccaggtgaggagggccgctacaaacaaaagttccaaagcgtttttacagtcacgcgccagacgcaccagccccctgctccgaactccctgattcggttcaatgccgtgctaacaaatcctcagggcgactacgacactagcactggaaaatttacgtgtaaagttcctgggctgtactacttcgtgtatcatgccagccacacggccaatctgtgcgtgcttctgtaccgtagcggagtgaaggttgtcacgttttgtggccacacctcgaagacgaaccaggtgaactccggtggcgtcctgctgagactgcaagtgggtgaggaggtctggctagccgttaatgattactatgacatggtggggatccaggggtcagacagtgtgttctctgggttccttctcttccctgactag

SEQ ID NO: 112765 - DNA, 777 bp, synthetic construct
  misc_feature 1..777: note = Description of Artificial Sequence: Synthetic coding sequence
  source 1..777: mol_type = other DNA
atgttactggttctggtggtgctaatccctgtcctggtgtcgagtggcggcccagagggacactacgaaatgctcggcacctgtcggatggtgtgtgatccgtatcccgctcgggggcctggagctggagccagaaccgacggaggtgacgccttatctgagcagtctggggctccgcccccctcgacgctggtccaagggccccaaggaaaacctggacgcactggaaagccgggcccccccgggccgcccggcgatcccggtcctccagggccagtcggtccacctggagagaaaggtgaacctgggaagcctggcccacctgggcttcccggtgcagggggctcaggtgccatatctactgccacctatactaccgtgcctcgggtagctttttacgccggccttaagaacccacatgaagggtacgaagtcctgaagttcgatgacgtagttacgaacctcgggaacaactacgacgccgcttccggaaagtttacatgtaacattcctggcacatatttcttcacctaccacgtactgatgcggggaggtgatggcacctcgatgtgggccgatctgtgcaagaatggacaggtgcgcgctagcgccatcgcccaggacgcggatcagaattacgattacgcctccaatagcgtcatattgcaccttgatgccggcgatgaagtatttattaaacttgatggcggcaaagcccacggcggaaattcaaacaaatactctacattctcaggtttcattatttatagcgattag

SEQ ID NO: 112766 - DNA, 864 bp, synthetic construct
  misc_feature 1..864: note = Description of Artificial Sequence: Synthetic coding sequence
  source 1..864: mol_type = other DNA
atggcattgggtctgttaattgcggttcccttgcttctacaggctgcaccaagaggagccgctcactacgagatgatggggacgtgtcgcatgatatgtgacccatacaccgcagccccaggcggcgaaccacccggggccaaagcccagccccccggtccttccacagcagctttagaggtgatgcaggacctgagtgcaaatcccccaccccccttcattcaaggtccaaaaggggaccctggcaggcccggtaagcccgggccgagagggcccccaggagagcctggacccccgggcccgcgtgggcccccaggggaaaaaggtgattccggccgtccgggtttacctgggctgcagctgaccgccggcacagcctcaggagtaggcgtggtgggaggaggtgcaggcgtgggaggggactccgagggtgaagtcacatccgcactatctgccaccttttccggcccaaaaattgccttctacgttgggctgaaatcaccccatgaaggatacgaggtgctaaagttcgatgacgttgtaacaaacctgggaaatcattatgatcccactacagggaagttttcatgtcaggtaagaggtatctacttttttacctaccatattctgatgcgtggtggtgacggtactagcatgtgggcggatctctgtaagaatgggcaggttagagcttcggcaatcgctcaggacgctgaccagaattacgattatgctagcaactctgtcgtgctccacttagattccggtgatgaggtatacgtgaaactcgatggggggaaggcccatgggggtaacaacaacaaatacagtaccttttcagggttcttgctgtacccagactag

SEQ ID NO: 112767 - DNA, 2007 bp, synthetic construct
  misc_feature 1..2007: note = Description of Artificial Sequence: Synthetic coding sequence
  source 1..2007: mol_type = other DNA
atgtccgtcaggtttcgtgtcggtagggaggaaaacgcccaatggtggctactgtacctgttagtgcccgctctcttttgcagggccggtgggtcaatccctataccacaaaagctcttcggtgaggtgacaagcccgctgttcccgaaaccgtatcccaacaactttgagacaactacagttattaccgtcccaaccggctatcgggttaaactagtgtttcagcagtttgacctggagcccagtgagggatgcttctatgattatgtgaaaattagtgccgataaaaagtcgctgggccggttctgtggacagttgggcagtcctctgggaaacccccctggcaaaaaggagttcatgtcccaaggtaataaaatgctgctgactttccacaccgacttttcaaatgaagagaacgggaccattatgttttacaaaggattcttggcctattaccaggccgtggatttagatgaatgcgcttctcggagtaaatcaggggaagaggacccccagcctcagtgtcagcacctgtgccacaattacgtaggaggctacttttgctcctgtaggccaggttacgaactgcaggaggatcgacacagttgtcaagctgaatgcagcagtgaattgtataccgaggcatcaggttacatctcgagcctcgaatacccgcgctcctatccaccggatctccggtgtaactactctataagggtggaacgcggcttgacactgcatctaaagtttttggagccgtttgacatcgacgaccatcagcaggttcactgtccatatgaccagcttcagatttatgctaacgggaagaacattggtgagttctgcggcaagcagcgtcctccggatctggatacatcgtcgaacgccgtggatctcctgttttttaccgatgaatcaggagattcacgcggttggaaactgaggtatacaactgaaataattaagtgtccacagcctaaaactttagacgaattcacaatcatccagaatctgcaaccccagtaccagttccgggattactttattgcaacatgcaaacagggataccagctcattgaagggatccaggtggtggccggagttgtggacgtgagtgcaggtcgggtgagttggagcacctcctctcagacatgctgtacaagagtgtacacatgcactgctcagggcatctggaagaacgagcagaaaggagagaagatcccgaggtgtctgcccgtgtgcgggaaaccagtcaatcctgtggagcaacgacagaggatcattggcggacagaaggcaaagatgggtaacttcccttggcaggtgtttactaatattcacggaaggggcggtggagccctgctgggcgatcgttggattctcactgcagcacatacactctaccccaaagagcacgaagcgcagagtaatgcttccctcgatgtgttcctgggccacaccaacgttgaggagttaatgaagctaggaaaccaccctatccgtcgggtttccgtgcacccagactacagacaggacgaatcctataatttcgagggggatattgcactgctggagcttgaaaatagcgtgactctcgggcccaatctgttgcccatttgcctaccagacaatgatactttctatgatctgggtctgatgggttacgtctctggttttggggtgatggaggaaaaaatcgcacatgacctgaggttcgttcgacttccagtggcaaatccccaagcctgcgaaaattggctgagaggcaagaaccgtatggatgtattttcccaaaacatgttctgtgccgggcatccgtccctgaagcaagatgcttgccagggcgatagcggaggcgtgttcgcagtgcgcgacccaaatactgatcgctgggtagctacaggaattgtcagttgggggattggttgcagcagaggctacggtttctacaccaaagttctgaactatgttgattggataaagaaggaaatggaggaagaggattag

SEQ ID NO: 112768 - DNA, 1131 bp, synthetic construct
  misc_feature 1..1131: note = Description of Artificial Sequence: Synthetic coding sequence
  source 1..1131: mol_type = other DNA
atgtggctactgtacctcctcgttcctgcgctgttttgcagggcagggggttccatcccgataccccaaaagttgtttggtgaagtgacatctccgctgttcccaaagccctacccgaataacttcgagaccacaaccgtgattaccgtgcctacgggttatagggtcaaactcgttttccaacagttcgacctggagccatcggagggctgtttttatgattatgtcaaaatctccgctgacaaaaaatcgctgggcaggttttgtggccaactcggttcaccattgggaaatccgcccggtaagaaagagtttatgtcccagggcaataaaatgctcctcaccttccatacagacttctctaacgaagaaaatggaactataatgttttacaagggcttcctcgcatattatcaggccgtggacttggatgaatgcgcgtcacggtcaaagtccggcgaagaggatccacagccacagtgccagcacctctgccacaactacgttggcggctacttctgtagctgccgtccaggctacgagctgcaggaggatcgtcactcttgtcaggcggagtgctccagcgagctctacaccgaggccagcggttacatctcctctctggagtacccgcggagctaccctccggatctgcggtgtaattactccataagggtggagcggggtctcaccctccatctgaagtttttggaaccttttgatattgatgaccaccaacaagttcactgcccctacgatcagctgcaaatatatgccaatggcaagaacattggggaattctgcggcaagcagcgaccacctgatctggatacatcgagcaatgcagtcgatttactattctttacagacgagtccggcgactctcgtgggtggaagctgagatataccaccgagattatcaagtgcccacagccaaagactcttgacgaattcactattattcagaacttgcagccccagtaccagttccgtgattattttatcgctacatgtaagcagggatatcagctgatagaggggtgtacaccagctcaacatcgagcctttggacggatgaaccgacgggagcgacgtttcttgggagcctgtcaatgcgtagggtccccctag

SEQ ID NO: 112769 - DNA, 1962 bp, synthetic construct
  misc_feature 1..1962: note = Description of Artificial Sequence: Synthetic coding sequence
  source 1..1962: mol_type = other DNA
tggttactgtatctgctcgtccccgctttattctgcagggcgggtgggtctatccctattccccagaagctcttcggtgaggtgacatccccattgtttccaaaaccttaccctaataactttgagaccaccacagtgattacggtgcccaccggctacagggttaaactggtgttccagcagtttgatctagagccatcagagggatgcttttatgactatgtgaagatcagcgctgacaaaaaatctctaggccgcttctgcggtcagctgggttcccccttgggaaatccaccaggaaaaaaagagtttatgtcccagggaaataagatgcttctgacctttcacaccgactttagcaacgaagagaatggaactatcatgttctataagggcttcctggcttattaccaggccgtcgatctcgacgagtgtgcttccaggtcaaagtctggcgaagaggacccccaaccacaatgccaacatctctgccataactatgttggcggatatttctgctcctgccgaccgggctatgagctgcaggaggataggcactcttgtcaagcggaatgttccagtgagctgtatactgaggcgagtggatatatcagcagccttgaatatccacgtagctacccccctgacctcagatgcaattattccattagggtggagcgaggccttactctgcatctaaaatttttggagcctttcgatatcgacgaccatcagcaggtacattgtccgtacgatcaattgcaaatctacgccaatggaaagaacatcggcgagttttgtgggaagcagagaccccccgatttggacaccagtagcaacgctgtggacctgttattttttactgatgaatccggtgattctcgcgggtggaaactgcgatataccacagagataattaagtgccctcaacctaaaacacttgacgagtttactatcattcagaacctgcagccacaataccagtttcgggattacttcatcgccacctgcaagcagggttaccaactcatagaggggatccaagtagttgcgggtgttgtggatgtgtctgccggccgagtgtcctggtcgaccagctctcagacctgctgtacccgtgtgtacacatgcacagcccagggaatctggaaaaacgaacagaagggcgaaaagattcctcgatgcctcccagtttgtgggaagcctgtgaatcccgtcgagcagcgtcagcgtatcattggggggcagaaggcgaaaatggggaactttccctggcaggtttttacaaacatacacggaaggggtggaggtgctctcctgggcgacagatggatcctcacagcagcccatacgttgtatccaaaggaacacgaagcccaatccaacgctagcctggacgtcttcctcggccacactaacgtagaggaactgatgaagctcggcaaccaccccatacgtagggtttccgttcaccctgactaccgacaagatgaaagctacaattttgagggcgacattgccctcctggaactggaaaatagtgtgaccctgggcccaaatttattgccaatatgcttacccgataatgacacgttttacgacctgggacttatggggtacgtttccggctttggagtgatggaagaaaaaatcgctcacgacctgagatttgtccgtttgccggtagcgaatccacaagcctgcgaaaactggcttcggggaaagaacagaatggacgtcttcagtcagaatatgttttgtgccggtcacccatcccttaagcaggacgcctgtcagggggattctggaggcgtgtttgctgttagggatcctaatactgacagatgggtggctaccggcattgtgtcttggggcataggatgttctcgtggatacggcttttatacgaaggttctgaattacgttgattggattaagaaagagatggaagaagaggactag

SEQ ID NO: 112770 - DNA, 1464 bp, synthetic construct
  misc_feature 1..1464: note = Description of Artificial Sequence: Synthetic coding sequence
  source 1..1464: mol_type = other DNA
atgccgggtcctcgagtgtggggcaagtatctctggcgcagcccccactccaaggggtgcccgggtgctatgtggtggttactgttgtggggtgtgctccaagcctgcccaacccgtgggtcagtattgctggcccaagagctgccccagcagctaacctcgcccggctatcccgagccctacggaaagggacaagaatcttccacagatatcaaggctccggagggttttgccgtccggctggtgttccaggactttgatctggaacccagtcaggactgcgcgggagactccgtgacgatctccttcgtcgggtcagatcccagccaattttgtggccagcagggctcgcccttggggaggcctccaggccagcgcgaattcgttagtagtggacgctctctccgcctgacctttcgtacgcaaccatcatctgagaataagaccgctcacctacacaagggctttcttgctctgtaccagactgtagctgttaattatagtcagccaatttccgaggccagccgcggttcagaggctatcaatgctccaggagacaaccctgctaaagtccagaatcactgtcaggaaccatattaccaggctgccgccgctggcgccctgacctgcgctactcccggtacgtggaaagaccggcaggatggggaggaagtcctgcagtgtatgcctgtgtgcggccgccccgtgactcccatcgcacaaaaccagaccacactgggtagcagccgggccaagctcggcaactttccatggcaggctttcactagcatccacggacgcggagggggcgccctgctaggagacaggtggatcctgacagcagcccatacgatttatccaaaagactcagtcagcctgagaaagaatcagtcagtgaatgtgttcttgggccacacggccatcgatgagatgctgaaactcgggaaccaccccgtgcaccgggtggtggttcatccagactataggcagaacgaatcacacaattttagtggggatattgcgctgctggagctgcagcactccattcccttgggcccaaatgtactgccagtgtgtctaccagacaacgaaacactctacaggtccgggctgctaggatacgttagtggcttcggcatggagatgggctggcttaccaccgagctcaagtatagcagactccccgtggctcctagagaagcgtgtaatgcctggcttcagaaaaggcaaagacctgaagtgtttagcgacaacatgttctgcgtgggagacgagacacagcgccattcagtatgccagggtgactcaggatccgtctatgtcgtgtgggacaatcatgcacaccactgggtcgcaacgggaattgtatcatggggcatcggctgcggcgaggggtacgacttttacaccaaagtgctgtcgtacgttgactggattaagggggtaatgaatggtaagaattag

SEQ ID NO: 112771 - DNA, 1317 bp, synthetic construct
  misc_feature 1..1317: note = Description of Artificial Sequence: Synthetic coding sequence
  source 1..1317: mol_type = other DNA
atgcctgggccccgggtatggggcaaatatctatggcggtccccacactcgaaggggtgccccggggctatgtggtggttattactgtggggagtgctacaggcgtgcccaaccagggggtcagtcctcctggcacaggagctccctcagcagctcacgtcccccggttatccagaaccctacgggaaaggtcaggagtcctctaccgatatcaaagcccccgaaggcttcgccgttagactcgtgttccaggatttcgatctggagccgtcccaggactgtgctggggattctgtcaccatttcttttgtaggttccgaccccagccagttttgtggtcagcaggggtccccacttgggaggccccctgggcagagagaattcgtcagttctggtaggtctctgcgtctaacgtttcgtacccagccttcatccgaaaataaaactgcccacctccacaaagggtttctcgcactttatcaaacagttgctgtcaactattcccagccaatttccgaggcttcccgtgggtcagaagctatcaatgcaccaggagacaatccggccaaggtccagaatcattgccaggagccctactaccaggccgcggctgctggagccctaacttgcgcgacacctggtacttggaaagataggcaggacggtgaggaggtactccagtgtatgcctgtctgtggacggcctgttactcccattgcccagaatcagaccactttaggctcaagcagggcaaagctgggcaatttcccatggcaggcctttacttcaatccacggcagggggggcggcgctctccttggggataggtggattctgaccgctgctcatacaatatatcctaaggattctgtgtctctgaggaagaaccaatcagtaaatgttttcctgggccatacagccatcgacgagatgctgaagctaggaaatcatcctgtgcatcgagtggtcgtgcaccccgattacagacagaatgagagccataactttagcggagacatagcgttgctagaacttcagcactcaatccctctgggccccaatgtcctcccagtttgcctccctgataacgagacactttatcggtccgggctattgggatatgtctctgggttcggcatggagatgggatggctgacgacggaattgaagtactccagactcccagtagcaccaagagaggcttgtaatgcttggctgcagaaaaggcaacgccccgaagttttttccgacaacatgttctgcgttggcgatgaagcgggggagagcctggaaccaggtcggaggcgtctacagtag

SEQ ID NO: 112772 - DNA, 2067 bp, synthetic construct
  misc_feature 1..2067: note = Description of Artificial Sequence: Synthetic coding sequence
  source 1..2067: mol_type = other DNA
atgtggtgtattgtgctgttttctcttctggcatgggtttatgctgaacctactatgtacggcgagatcctgagtccgaattatccgcaggcctatccatccgaagtagaaaaatcctgggatatcgaagtgcccgaaggctatggcatccacctttattttactcatctggatatcgagctaagcgaaaactgcgcctacgactctgttcagataattagcggcgataccgaagagggccgattgtgtggccagcgtagtagtaataacccacactcccctattgtggaagaattccaggtgccttacaataagttgcaagtaatcttcaagagcgacttcagcaacgaggagcgctttactggcttcgcggcttactacgtggcaaccgatataaatgagtgtacggatttcgtcgatgtcccttgctcccacttttgcaacaacttcataggaggttacttttgttcgtgtccccccgagtacttcttgcatgacgatatgaaaaattgtggggtcaactgttctggcgacgtgttcactgcactgatcggcgaaattgcctcacctaactaccccaagccttaccctgagaactctcggtgtgaataccagatacgcctcgaaaaggggttccaagtggtggtgaccttgagacgcgaagacttcgacgtcgaagccgctgactcggcggggaactgcttggactcgctggtgttcgtggccggggacaggcagtttggcccatattgtggtcatggcttccccggccccctcaacatcgaaaccaagtctaatgctttggacattatttttcagaccgacctgaccggacagaaaaagggttggaagttgagatatcacggtgatccaatgccctgtccaaaagaggatacccccaactccgtgtgggagccagccaaggccaagtacgtgttccgcgacgtggtgcagattacatgcctggatggcttcgaggttgttgaggggcgggtgggcgcaacaagcttctactcaacgtgccagagcaatgggaagtggtcaaacagcaagcttaagtgccagcccgtggactgcggtattcccgagagtatcgaaaatggcaaagtagaggaccctgaatcgaccctcttcggatcagtcattaggtacacttgtgaggagccgtattactatatggaaaacgggggagggggcgagtatcactgtgctgggaacgggagttgggtgaacgaggttctcggacctgagttgccaaagtgcgtaccagtgtgtggcgtgcccagagagccattcgaggagaagcagaggataattggcggttctgacgccgacatcaagaattttccttggcaagtattctttgacaatccatgggcggggggtgctcttattaacgaatactgggtgttgaccgctgcccatgtagtcgaggggaaccgggagcctaccatgtatgtaggatcaacgagtgtgcagaccagtcggctggccaaaagcaagatgctgaccccggaacatgtcttcattcacccgggatggaagttattggaggtgccagaaggacgcacaaattttgacaatgatattgctctggtccgactgaaggaccctgtgaaaatggggccaaccgtgtcccctatctgcctgccgggcacttcaagtgattataacttaatggatggggatttaggcttgatttctggctggggcagaactgaaaagagggacagagctgtccgcctcaaggcggctcggctcccagtggcaccattgaggaagtgcaaagaggtcaaagtggagaagcctaccgccgatgcagaagcttacgtgttcacacccaacatgatttgcgccggcggagaaaaaggcatggacagctgtaagggcgatagtggcggagccttcgcagtccaggaccccaatgacaagaccaaattctacgccgccggtctggtctcctggggtccacagtgcgggacctacggactatataccagagtgaaaaactacgtggactggattatgaaaaccatgcaggagaactccaccccgagagaggactag

SEQ ID NO: 112773 - DNA, 2067 bp, synthetic construct
  misc_feature 1..2067: note = Description of Artificial Sequence: Synthetic coding sequence
  source 1..2067: mol_type = other DNA
atgtggtgcatagttctgtttagtcttctggcatgggtgtatgcagaaccgaccatgtatggtgaaattttaagtcccaattaccctcaggcatacccatcagaggtggagaaatcatgggacatcgaggtccccgagggatacggcatccacttgtatttcacccacctggatatcgaactcagcgagaactgtgcttacgatagcgtgcagattattagtggggacacagaagagggccgactctgtggccagaggtcttcgaacaatccacactccccaatcgttgaggagtttcaggtcccatacaataaattgcaggtcatctttaagagtgatttcagcaatgaagaacgcttcactggatttgccgcttactatgtcgcgaccgacatcaatgagtgcaccgatttcgttgatgttccatgttcacacttttgtaataacttcatcgggggctacttttgctcttgcccaccagagtactttctgcacgacgatatgaagaattgtggcgttaactgctcaggggacgtatttaccgctcttatcggggagattgcatctcctaattaccccaagccgtatcctgagaattcccggtgcgagtatcagatccgtctcgaaaagggctttcaggtcgttgtgacattacgccgggaggacttcgacgtcgaggccgctgattccgcaggcaactgcctggattctctcgtgtttgttgccggggatcgacagttcggaccgtactgtgggcatggattccccggaccccttaatatcgaaacaaaatccaatgccttagatattattttccagacagatctgaccggtcagaaaaagggctggaaactgaggtatcacggcgacccgatgccttgcccaaaggaggacacaccaaattctgtgtgggaacccgcgaaggccaagtacgtttttagggatgtagtccaaatcacgtgccttgatgggtttgaggtggtggaagggcgcgtgggggcgacctcattttattccacatgtcaatctaatggcaagtggtctaactcaaagctgaagtgccaaccagtggactgcggcatccccgagtcaatcgagaatggcaaggttgaggatccagagtctacattgttcggaagcgtgatccgctacacatgcgaggagccttactattacatggagaacggtggcggcggtgagtaccattgcgcaggcaacggaagctgggtcaatgaggtgttagggcccgaactgccaaaatgtgtgcctgtctgcggcgtgcccagggagccattcgaagaaaagcaacgcatcatcggcggttcggacgccgatatcaagaatttcccttggcaggttttcttcgacaacccatgggccgggggtgccctgatcaacgagtattgggtgttgaccgcggcacacgtagttgaaggaaatagggagcccacaatgtacgtagggagcacttcagttcagacatctagactagccaaatccaagatgttaactcctgaacatgtttttatccacccagggtggaaattgttggaggtgcccgaaggccgtacaaacttcgataatgacatcgccttggtacgtctaaaggatccagtgaaaatgggtcccaccgtcagcccaatctgcctgccaggcacatcttccgactacaaccttatggacggcgatctgggactaatcagcggttgggggcggactgaaaagcgtgatcgggccgtccggctcaaggcggctcgccttcctgtggctccccttaggaagtgcaaggaagtgaaggtggagaagccaacggccgatgccgaagcttatgtattcactcctaatatgatttgcgcaggcggggagaaggggatggatagttgtaagggagacagtgggggtgctttcgcggtgcaggacccaaacgataagactaaattctatgccgcaggattagtatcttggggacctcagtgtggaacatacggactgtacacaagggtgaaaaactatgtggattggatcatgaagactatgcaggaaaatagtaccccccgtgaggactag

SEQ ID NO: 112774 - DNA, 2049 bp, synthetic construct
  misc_feature 1..2049: note = Description of Artificial Sequence: Synthetic coding sequence
  source 1..2049: mol_type = other DNA
atgtacggcgagattctttcccctaactacccacaggcctatccctcagaagtggagaaaagctgggacattgaagtgccagaggggtatggcattcatttatactttacccatttggatatcgaactttctgagaattgtgcctacgatagcgtgcagataattagcggggatactgaagagggacgtctatgcgggcagaggtcttctaacaacccacattcacccatcgttgaggaattccaggtgccctacaataagctccaggtgatcttcaaatccgactttagcaatgaggagagattcaccggcttcgccgcatattatgtcgccaccgataaagatgaatgttctggtagagcccaactatggaatcacatgtctgatgtaccgtgttcccacttctgcaataactttatcgggggatatttctgttcttgccctccggagtactttttacatgacgatatgaaaaactgcggtgtgaattgctctggcgacgtatttaccgctttaattggagaaattgcgtcccccaattaccccaaaccctatcctgaaaactctagatgtgagtatcagatccggcttgaaaagggattccaggtgcacttatctttactcctgaagctggagtgttccggagctatcacagcacactgcagtcttgatctgttaggcagtatcgcaggcgaccggcagtttggcccttactgcggccacgggtttccgggcccccttaatattgagaccaagtccaacgcccttgacatcattttccagacggacttgaccggccagaaaaagggatggaagctaagatatcatggagatccaatgccctgtccaaaggaggacacacccaattccgtgtgggagcctgccaaggctaagtacgtgtttcgcgacgttgttcagattacttgcctggacggctttgaagtggtagagggccgcgttggagccacttcgttctacagcacgtgtcagagcaatggtaaatggagcaatagcaagctgaaatgtcaaccagtagactgcggcataccagaaagtatcgagaacgggaaggtggaggaccccgaatctacactctttgggtctgttatccgatatacctgtgaggaaccttactattatatggagaacgggggcggaggggaagaaagagagagaggagaatatcactgtgccggcaacggcagctgggtcaacgaggtcctgggcccggaacttccaaaatgcgtacccgtgtgtggcgtcccccgtgagcccttcgaggagaagcaacggataattggcggcagtgacgcggacatcaaaaacttcccctggcaggttttttttgacaacccatgggctggaggggcactcattaatgagtattgggtcttgactgccgcccatgttgtggaaggtaacagggaaccgactatgtacgtcggaagcacatccgtccagacctctaggctagccaagtccaagatgttgactcccgagcacgttttcattcacccgggatggaagctgctagaggtgccagagggtcgcacaaattttgataatgacattgctctcgtgaggctcaaggacccagtgaaaatgggacccaccgtgagtcctatttgtctgccgggcacaagctccgattacaacctcatggacggcgatctcggcctaattagtggctgggggcgaactgaaaaacgggatcgggcagtacgcttgaaggccgccaggctccccgtggcccccctgcgcaagtgtaaggaagtgaaggttgaaaaacccaccgccgacgccgaggcctatgtatttacccccaatatgatctgtgctggcggtgaaaaaggtatggattcgtgcaagggagacagtggtggagccttcgccgtgcaggaccctaatgataagactaaattctacgcggctggactggtttcttggggccctcaatgtggtacctacggcctgtacacacgtgtaaagaactatgttgattggataatgaagacaatgcaggagaatagtacaccccgcgaagactag

SEQ ID NO: 112775 - DNA, 507 bp, synthetic construct
  misc_feature 1..507: note = Description of Artificial Sequence: Synthetic coding sequence
  source 1..507: mol_type = other DNA
atgtggtgtatcgtgctgttttcactccttgcttgggtgtacgcagaaccgaccatgtatggcgagatcctgtcccccaattacccacaggcctatccatcagaagtggagaagtcctgggacatagaggtgcccgaggggtatgggatacatctgtacttcacgcatttggatatagagttgagcgaaaactgtgcatacgatagcgtgcagatcatcagtggtgacaccgaggaaggacggctgtgcgggcagcgctcatccaataacccccactccccaattgtggaggagttccaggtgccatacaataaactgcaggtgatctttaagtctgacttttccaatgaggagagatttacaggtttcgctgcgtattacgtcgccaccgacatcaatgaatgcaccgacttcgtcgatgtgccttgttctcacttttgtaacaattttataggaggttacttttgtagttgtccccctgagtattttctgcatgacgatatgtag

SEQ ID NO: 112776 - DNA, 2067 bp, synthetic construct
  misc_feature 1..2067: note = Description of Artificial Sequence: Synthetic coding sequence
  source 1..2067: mol_type = other DNA
atgtggtgtattgtgcttttcagcctgttggcttgggtctatgcggagcccacgatgtacggcgagatcttgtcccccaactacccacaggcctacccgagcgaggtcgaaaaatcatgggacatcgaggtgccagagggatatggtatccatctctactttacccatctggacatcgagctcagtgaaaattgtgcctacgacagcgtgcagataatatcgggagacacggaggaggggcgcctctgcgggcagcgctcctccaataacccccattcccctatcgtcgaggaatttcaggtgccatataacaaactccaggtgatctttaagtcggatttttcaaatgaggaacggtttaccggattcgccgcgtattacgtcgccaccgatataaacgaatgcaccgatttcgtggacgtgccatgctcacatttctgtaacaattttataggaggctatttctgtagctgcccaccagagtattttctgcatgatgacatgaagaattgcggcgtaaactgctcaggggatgtgttcaccgccctcattggagagattgcctctcccaactatcctaaaccttacccagagaactcccgctgcgagtatcagattcggctggagaagggcttccaggttgtggtgacccttcgcagagaagacttcgacgtggaggctgccgatagtgctggtaactgccttgattccctggtttttgtagccggagatagacagttcgggccgtactgtggccatgggttccctgggcccctgaacattgagactaagtctaacgcactggacattattttccagactgatctgacggggcagaaaaaagggtggaaactgaggtaccacggggatcccatgccttgtcctaaagaggacactcccaactctgtgtgggaacccgcgaaggcaaaatacgtgttcagagacgttgttcagattacctgtttggatggctttgaagtggtggaaggccgggtcggagcgacctcgttctactccacctgtcagagcaatggcaaatggtccaactcgaagttaaagtgtcagcccgtcgactgtggcatccctgagtcaatagaaaatggtaaagtcgaggatcccgaatcgacgctatttgggagcgtaattagatatacctgcgaggagccctattattatatggagaacggcggcgggggagagtatcattgcgcaggaaacggcagttgggtcaatgaagtccttggccccgagctccctaagtgcgttccagtctgcggggttccccgtgaacccttcgaagagaagcagcgcattattggcggctccgacgcggatattaagaactttccctggcaggtcttcttcgacaacccttgggctggcggggcactgatcaacgagtattgggtcctgactgcagcgcatgtggtggagggaaatcgggaaccaacgatgtacgttggcagcacatctgttcaaacgtccaggttggccaagtctaagatgctgaccccggaacatgtgttcatccatcccgggtggaaactcctggaggtccccgaaggaagaacaaattttgataacgatattgctctggtgcggttaaaagaccccgtcaagatggggccaacggtttcccccatctgtttgcccggcacctccagcgactataatttaatggacggggatttgggattgatctcaggttggggacggacagagaagcgcgatcgggccgtgagactgaaagccgcccgacttcccgtggcccctctccgcaagtgcaaagaggttaaggtggagaagccgaccgccgacgcagaggcctatgtctttacccccaacatgatttgcgctggaggagagaagggcatggattcatgtaagggggatagcggcggcgcatttgcggtccaggatccgaatgacaagaccaagttctacgctgcaggcttagtgtcttggggcccacaatgtggtacgtatggactctacacgcgggtaaagaactacgtagactggattatgaaaactatgcaggagaactccacacctcgcgaagattag

SEQ ID NO: 112777 - DNA, 312 bp, synthetic construct
  misc_feature 1..312: note = Description of Artificial Sequence: Synthetic coding sequence
  source 1..312: mol_type = other DNA
atgtggtgtatagtcctgttttctctacttgcctgggtgtacgctgagcctaccatgtatggagagatcctttcgcccaattaccctcaagcttatccaagtgaggtggaaaaaagttgggatattgaggtccctgaaggctatggaatacacctgtatttcacccacctggacattgagctctcggaaaactgcgcctacgactctgtgcaaatcatcagtggcgacacagaggagggaagactgtgcggacagaggtctagcaataatcctcactcgccgattgtcgaggaatttcaggtgccatactag

SEQ ID NO: 112778 - DNA, 306 bp, synthetic construct
  misc_feature 1..306: note = Description of Artificial Sequence: Synthetic coding sequence
  source 1..306: mol_type = other DNA
atgtggtgcatcgtcttgttctcactgctcgcgtgggtgtacgccgaacccactatgtatggggagatcctgtctccgaattacccacaggcttatccttccgaggtcgagaaatcttgggatattgaggtgccagaggggtacggaatccatttatactttacccacttggatatcgaactgtctgagaactgtgcctacgacagcgtacagattattagtggagacaccgaggaggggcggctgtgtgggcaacgaagttccaataacccccattcacccatcgtggaagagttccaggtgtag

SEQ ID NO: 112779 - DNA, 2259 bp, synthetic construct
  misc_feature 1..2259: note = Description of Artificial Sequence: Synthetic coding sequence
  source 1..2259: mol_type = other DNA
atgggtcctcttatggtgctgttctgcctccttttcttgtatcctggcctggcggattctgcaccatcatgcccccagaacgtgaatatctcgggaggcaccttcaccctgtcacacggatgggcacctggctcactgctgacgtatagctgtccccagggactgtatccaagcccagcttctagattgtgtaagtcctcaggacagtggcagacccccggagccactagaagtctgagcaaggccgtctgtaagccagtccgctgtccagccccagtgtccttcgaaaatggcatttacactccgcgattaggcagttatcctgtgggggggaacgtcagcttcgagtgtgaggacgggttcatcctgcgcggttcaccagtgcggcagtgccgacccaacggaatgtgggacggggagaccgccgtttgtgacaacggagcagggcactgtccaaatccaggaatatccctaggtgctgtgaggaccgggtttaggttcggacacggagataaggtacggtaccgatgtagttccaacctcgttctgaccggctcaagcgagagagagtgccagggaaatggtgtttggtctgggaccgagcctatctgcagacagccatacagttatgatttcccagaagacgtggcccctgcgttgggaacctctttttcccatatgctcggtgcaacgaacccgacccagaaaactaaggaaagtctaggtcgcaaaatccagattcagagatcaggccaccttaacttatacctgctgctggattgctcacaatctgttagcgaaaacgacttcctaatctttaaggaatcagcaagtctaatggtagacagaatattcagctttgagataaacgtgtcagtcgcaatcatcactttcgcttcagaaccaaaagtactgatgtccgtgctcaacgataacagtcgggatatgaccgaagttattagttcgctcgagaatgccaactataaggaccatgaaaacggcactgggaccaacacatacgcggccctaaatagcgtctatctgatgatgaataaccagatgcggcttctgggcatggagaccatggcttggcaggaaatccgccatgccattatcttgctgaccgacggcaaaagtaacatgggcggctcacccaagaccgcggttgaccacatcagggagattctcaacatcaaccagaagcggaatgattaccttgatatatatgccataggcgtggggaagttagatgtcgattggagggagctcaacgagctcgggtccaaaaaggacggcgaacggcacgcctttatcttacaggataccaaagccctgcatcaagtgtttgaacacatgcttgacgtctctaaactgacagacaccatttgtggagtagggaacatgtccgccaatgcttccgaccaggaacggacaccgtggcacgtaaccatcaagccaaaatctcaggagacctgtcggggcgctctcattagcgaccagtgggtccttacagccgcacactgcttcagggacgggaacgaccacagcctgtggagagtaaatgtcggagatcctaagtcccaatggggaaaggagtttctcatcgaaaaggccgtcattagtccaggcttcgacgtgttcgctaaaaagaaccaagggattttggaattctacggtgatgatatcgccttgttgaagctcgcccagaaggtgaaaatgtctacgcatgcccgaccaatttgcctgccctgcaccatggaagcaaacctggctttgaggcgccctcagggctcgacatgccgcgaccatgaaaatgagttgttaaataaacaatcggtgcccgctcactttgtggctctcaatggttctaaactgaacatcaaccttaagatgggagttgagtggacatcctgtgctgaggtggtgtcacaagagaagacaatgtttcccaatctgacggacgtgagagaggtggttacggaccaatttctttgcagtggcacacaggaggatgagtctccttgcaagggggagagtggcggagccgtgtttctggagcggcgcttccggttctttcaggtgggactggtcagctggggcctttataatccctgtctgggaagtgccgataaaaatagcaggaagagagccccgcgcagcaaggtgcctccccccagggactttcacattaacctgttccgcatgcagccatggctgaggcagcacttgggtgatgtgcttaactttctccccctctag

SEQ ID NO: 112780 - DNA, 1134 bp, synthetic construct
  misc_feature 1..1134: note = Description of Artificial Sequence: Synthetic coding sequence
  source 1..1134: mol_type = other DNA
atgacagaagtgatttcctctctcgaaaacgccaactataaagaccacgaaaatggaaccggcacaaatacttacgccgcactcaatagcgtttacctgatgatgaacaatcagatgcgactgctgggcatggaaactatggcatggcaggagattcgtcacgctatcatcctgctgactgatggaaaatctaacatgggcggatcacccaagacagcagttgatcacatcagagagatccttaatataaatcagaagcgcaatgactacttggacatttacgctatcggggtcggcaaattggacgtggattggcgcgagctgaacgagctgggcagtaaaaaagacggagaaagacatgcgttcattttacaggataccaaagctctccatcaagtgttcgagcacatgctggatgtgagcaaactgacagatacaatatgcggcgtgggcaacatgtcagccaatgcctccgaccaagagcggacaccatggcatgtgacaattaagccgaagtcccaggagacatgcagaggagcactgatttccgaccagtgggttttaaccgctgctcactgctttcgagacggcaacgaccattctctttggcgagttaacgtcggagatccaaaatctcagtgggggaaggagtttttgattgaaaaggcggtcatctcaccagggttcgatgtgtttgctaagaaaaaccagggcatcctggagttctatggggatgacattgctctccttaagcttgcccagaaagtcaaaatgtccacacatgcgcgaccaatttgcttaccatgcaccatggaggctaatctggccctccgtcgacctcagggatcaacctgcagagaccacgagaacgagctgttaaacaaacagtctgtgccagcacactttgtggctctgaatggatcaaagctgaacatcaacctgaagatgggggtggaatggacaagttgtgcagaggtcgtttcccaagagaagactatgttcccaaacctcactgacgttcgagaagtggtaaccgaccagtttttatgctccgggactcaagaagacgaaagtccctgtaagggcggcagtggagagctaggctccctccagccgctcccctggttatgttag

SEQ ID NO: 112781 - DNA, 2259 bp, synthetic construct
  misc_feature 1..2259: note = Description of Artificial Sequence: Synthetic coding sequence
  source 1..2259: mol_type = other DNA
atgggccccctgatggtgctgttctgcctactttttttatatccagggctcgctgattcagctccatcatgtcctcaaaatgtcaatattagcggaggcacttttacactaagtcacggatgggctcctggaagcttgttgacatatagctgtccgcagggcttgtacccttccccagcctctcggctttgcaaaagctctgggcagtggcagaccccaggcgcaacacgtagcttgagcaaggcggtgtgcaagcctgtgaggtgccccgctcccgtgagcttcgagaatggaatctacacaccacgtttgggctcctatcccgtgggaggcaacgtatcttttgagtgcgaagacggattcatcctgcgaggctctcccgtccggcagtgccggcccaatggcatgtgggacggagagaccgccgtgtgtgataatggcgcaggccattgtcctaatcctggcatctcccttggagcagttcgcactggatttcggttcgggcacggggataaagtgcgatataggtgcagctcgaacctggttctgactggctcatcagagcgagagtgtcagggcaatggagtgtggtcgggcactgagcccatttgtcggcagccctacagttatgattttcccgaggatgttgctcccgcactgggcacttcgttctctcacatgttgggcgccacaaacccaacccagaaaacaaaggaatcgctcggccgaaagattcagatccagcggagcggtcatctcaatctgtacctgctgctcgattgtagccaatccgttagcgagaatgattttctgatcttcaaagagtcagcaagcctcatggtggataggattttctcctttgagattaacgtgagcgtggctattattacattcgctagcgagcctaaggtcttaatgtcagtcctgaatgacaacagcagggacatgaccgaggtcataagttctttggaaaacgcgaattacaaggatcacgaaaacggcactggcaccaacacatacgcagctctgaacagtgtgtacctcatgatgaataaccaaatgagattgttaggcatggaaactatggcatggcaagagatcagacatgccatcattctactcactgacggtaaatcaaatatgggggggagtccgaaaaccgcggtggatcatattagggaaattcttaatattaaccaaaagcggaatgattatctggacatctacgcaataggcgtaggcaaactggatgtggactggagggagctgaatgagctggggtccaagaaagatggggagaggcatgcttttatcctgcaggacacgaaagccctgcaccaagttttcgagcacatgttagatgtatcaaagctgacggacaccatctgtggcgttggcaatatgtctgctaacgcttccgaccaggaaaggaccccctggcacgtgacaataaagccaaagagccaggagacttgtagaggggcactgatctctgatcaatgggtgttaacggcagcgcactgttttcgtgatggaaacgaccatagtttatggagggtgaatgtaggggatcctaagagtcagtggggaaaggaattccttatcgagaaggccgtgatttctcccgggttcgatgtgtttgccaagaagaatcaggggattctagagttctacggtgatgatattgcactgctgaagctcgcccagaaagtcaaaatgtctacacacgctcgacccatctgcctaccttgcaccatggaggctaatcttgccctgcgcaggcctcaaggctccacctgccgggatcatgaaaatgagctattaaacaaacagagtgtgcctgcccatttcgtggccttaaatggcagcaagcttaatataaaccttaagatgggtgtggagtggaccagctgtgctgaggtcgtgtcacaggaaaaaacaatgtttccaaacctgacagacgtccgtgaggtggttactgaccagttcctgtgtagcggcactcaagaagatgagtccccatgtaagggcgaatctgggggagccgttttcctggaacgaagatttaggttttttcaggtggggctcgtaagttggggtctctataacccgtgtttaggttctgcagacaagaattcgcgcaaaagggccccccgcagcaaagtaccccctcccagggacttccacattaatctgttcagaatgcagccatggctgaggcagcacctaggcgatgtcctgaactttcttccactatag

SEQ ID NO: 112782 - DNA, 1578 bp, synthetic construct
  misc_feature 1..1578: note = Description of Artificial Sequence: Synthetic coding sequence
  source 1..1578: mol_type = other DNA
atggtgctattttgtctgctctttttgtaccccgccggccactgccctaatccaggtattagtctaggggccgttcgcacaggttttaggtttgggcatggggataaagtcagataccggtgctccagcaacctggttttgacaggtagctctgagcgcgaatgtcagggcaatggcgtttggtccgggaccgaacccatttgtcggcagccctactcgtacgacttccccgaggatgttgcccctgcactggggacctccttctcccatatgcttggagccaccaaccctacacaaaagacaaaagatcatgagaacgggactgggaccaatacttatgctgcgctcaactctgtatacttaatgatgaataaccagatgcggctactggggatggaaaccatggcctggcaggagattagacacgctattattctactgacagatgggaagagcaatatgggtggctcccctaagacggcagtggaccatattagggagatcttgaacatcaaccagaaaaggaacgactatctagacatttacgctattggcgtgggaaaactggatgtcgactggcgagagctcaacgaattagggtccaaaaaggatggagagcgtcacgcatttattctgcaagacacaaaggcgttacaccaggtattcgagcacatgctggacgtcagcaagcttacagatacgatctgtggggtcggaaatatgtcggcgaatgcctccgaccaggagaggacgccttggcacgtgacaattaagcccaagtcacaggagacttgcaggggcgcactgatatcagaccaatgggtgcttaccgcagcccattgcttccgagatggtaacgatcactctctgtggagagtgaatgtcggggacccaaaatcccagtgggggaaagaattcctgattgaaaaagccgtcatttctcctggattcgacgtgttcgccaagaagaaccagggtattcttgagttctatggtgacgatattgctctactcaagctggctcagaaggtgaaaatgtctacgcatgcccgacctatttgtttgccttgcacgatggaagccaaccttgctctgcgaagaccccaggggtctacatgccgcgaccatgagaacgaactcctgaacaagcagtccgtgcccgcccatttcgtggcgttaaacggcagcaagctcaacattaatctcaagatgggcgtggagtggactagctgtgcagaggtggtgtctcaggagaagacgatgttccccaacctgaccgacgtcagggaagtcgttacggatcagttcctctgctcaggtactcaagaggatgagagtccatgtaagggagagagcggcggcgccgtattccttgagcgccggttccgtttctttcaagttggcctcgtcagctgggggttatacaatccttgtctgggaagtgctgataagaactcacgcaaacgagccccccgaagtaaagtgcctcctccacgcgatttccacattaacctgttccggatgcaaccttggctgcggcaacacctgggagatgtcctgaattttcttcccctgtag

SEQ ID NO: 112783 - DNA, 2259 bp, synthetic construct
  misc_feature 1..2259: note = Description of Artificial Sequence: Synthetic coding sequence
  source 1..2259: mol_type = other DNA
atgggccctctaatggtcttgttctgccttctgtttctgtacccagggctcgctgactctgcacccagctgtccccagaacgttaacatctcaggaggcacctttactctatcccacggttgggcacctggatccctcttgacctactcttgcccccaggggctctatccatcccccgctagccggctgtgtaagtctagcggacagtggcagacccctggtgccactaggagtctcagcaaggccgtgtgcaagcctgtgcgctgtcccgcacccgtgtctttcgagaacggcatttatacgcctcgattgggcagttacccagttggaggcaacgtcagctttgaatgcgaggacgggttcatccttcgggggagccccgtccgacagtgcaggcctaacggtatgtgggacggagagacagccgtgtgcgacaacggagctggccattgtccaaaccctggcatttccttaggcgccgtgcggaccggtttccggttcggccacggagataaggtaaggtaccgatgttcttctaatctggtgctgactggaagctctgagagggagtgtcaggggaacggtgtttggagcggtaccgagcccatctgtcggcaaccctactcctacgacttccctgaagatgtcgcccctgccctcggcacatccttctctcatatgttaggagccaccaatcccacacagaagacaaaagagagtctggggcggaagattcaaattcagaggtcaggacatctgaatctttatctgttgttggattgctctcagagtgtctcggagaatgattttttgatctttaaagagagcgcgagcctgatggtggacaggattttctccttcgagattaatgtttcagtggcaattatcacttttgccagtgaacccaaggtcctgatgtctgtccttaacgacaactcccgagatatgacagaggtgatctcctccttagaaaatgctaattacaaggaccatgaaaatggtaccggtaccaacacttacgcagcccttaatagcgtttacctaatgatgaataaccagatgcgattgctcgggatggaaactatggcctggcaagaaatccgccacgccatcattctgctcactgacggaaagagcaatatgggcggctcgcccaaaacggcggtggaccacatccgcgaaatattaaacatcaaccaaaaacgaaatgactacttggatatatacgcgattggggttgggaaactggatgtagactggcgggaactaaacgaattaggctcaaaaaaggatggcgagcggcacgcctttatattgcaggacaccaaggcgctacatcaggtgtttgaacacatgctggacgtttctaagctgaccgatacaatttgtggcgtcggaaacatgtccgcaaatgcttctgaccaggagcgtactccgtggcacgtgaccattaaaccaaaatcccaggagacgtgtaggggtgcgcttatctctgatcaatgggttctaactgccgcacattgttttcgagacgggaacgaccattccctctggcgagtgaatgtaggagatcctaaaagccagtggggtaaagagttcctcatcgaaaaagctgtgatctctccggggttcgatgtgttcgccaagaagaaccaggggatactcgaattctacggggatgacattgctctgcttaagctggcccaaaaagtaaaaatgtctacccacgctaggcctatttgcctgccctgcaccatggaggccaatcttgcattacgtaggccccagggctcaacctgtcgcgaccatgagaacgaactgctaaataagcaaagcgtacctgctcacttcgtggctctgaacggctccaagctcaatataaatttgaagatgggcgtggaatggactagttgcgctgaggtggtatcccaggaaaagacaatgtttccgaacttgacagacgtccgagaggtggtgactgaccagttcctctgctccggaacccaggaggatgagtcaccatgcaaaggagaaagtgggggcgccgttttcctggaaaggcgttttcgtttttttcaagtgggactggttagctggggactttataacccgtgtctcgggagtgccgataaaaattcacggaaacgcgctccacgttccaaggtgcctccgccccgagatttccacatcaacttgtttaggatgcagccttggctgagacagcacctgggggatgtgttgaacttcttacctctgtag

SEQ ID NO: 112784 - DNA, 1578 bp, synthetic construct
  misc_feature 1..1578: note = Description of Artificial Sequence: Synthetic coding sequence
  source 1..1578: mol_type = other DNA
atggtgttattttgcttgctgtttttgtacccagcaggacattgccccaatccgggcatcagcctgggcgcagtcaggactgggttccgcttcggacatggcgacaaggtgaggtataggtgcagctcgaatctagtgctgacaggcagtagtgaaagagaatgccaaggaaatggcgtgtggtccggaaccgagcctatttgccgacaaccctacagttacgatttcccggaggacgtcgccccagctttgggcacctccttcagccacatgctcggtgccaccaaccctacccagaagaccaaagaccacgagaacggtaccggcactaatacctatgcggctctgaattcagtgtacctcatgatgaacaatcagatgcgcctccttgggatggaaactatggcctggcaggagattaggcatgccatcatcctgcttacggatggcaaaagcaatatgggaggttccccaaagacagccgttgaccatatcagagaaattctgaacattaaccagaagcggaacgactatctagacatctatgcgatcggtgtggggaagctggatgtggattggagagaactgaacgaactaggctctaagaaagacggtgagcggcacgcattcatcctgcaggataccaaagccctgcatcaagttttcgagcacatgttagacgtgtccaagctgacagatactatctgcggcgtaggaaatatgtcagctaatgcgtctgaccaggaaagaacaccatggcatgtgacaatcaaaccaaagagtcaggaaacatgtaggggtgccttgatctcggatcagtgggttctgaccgctgcccactgcttcagggacggaaacgaccacagcctatggagggtgaatgtgggagaccctaagtctcaatggggcaaagagtttctgatcgaaaaagccgttatcagccccggattcgacgtgtttgcaaagaaaaaccaaggtatcctggaattctatggggatgacatcgccctgttaaagctggcccagaaagttaaaatgagtacgcatgcccgcccgatttgtctgccctgtaccatggaggctaatctggctcttagaaggccacaggggagcacatgccgggaccacgaaaacgagctcctgaataaacagtctgtgcccgcccattttgtggcactgaatggatcgaaactgaacattaacctgaagatgggcgtggaatggacatcatgtgccgaagtcgtgagtcaagaaaagacaatgtttccaaacttaacagacgtgagagaagttgtgaccgaccagtttctgtgttccggcactcaggaggatgaatcgccatgtaagggcgaaagtggtggcgccgtgtttctcgaaagacggtttagattctttcaagtcggactcgtgtcatggggactgtacaacccttgcctgggatcagcagacaaaaacagtcgaaagcgcgccccacggagcaaggtgccccctcccagggatttccacattaacttgttcagaatgcagccatggctacgtcaacatctcggcgatgtgctaaacttcctgcctctgtag

SEQ ID NO: 112785 - DNA, 2259 bp, synthetic construct
  misc_feature 1..2259: note = Description of Artificial Sequence: Synthetic coding sequence
  source 1..2259: mol_type = other DNA
atgggacctctcatggtgctcttttgtcttctgttcctgtacccaggcttagccgattccgcacctagctgtccacagaacgtcaatattagcgggggtaccttcaccctcagccatggctgggcaccaggatctttgctgacttatagctgcccacaaggtctgtatccctcccccgcttctaggctctgcaagtctagcggtcagtggcagactccgggtgcgactcggagtctttccaaggccgtttgcaaaccagttcggtgtcctgcccccgtgagcttcgagaacggcatttacacccctcggctggggagctatccagtgggcgggaacgtctctttcgaatgtgaggacggtttcatcctgaggggcagccctgtgagacagtgcagacccaacggcatgtgggacggagaaaccgctgtgtgtgataacggggccgggcattgcccaaaccccggtattagtttaggagcagttaggacagggttccgcttcggacacggagacaaggtgcgatatcgatgtagctcgaatctcgtgctgacgggctctagtgagagagagtgccaagggaacggtgtgtggagtggcacggagcctatctgccgccagccatattcctacgattttccagaggatgtggcccccgcactaggcaccagctttagccatatgctgggagccaccaatcctacgcagaaaaccaaggagtctttgggcagaaagattcagatccagagaagtgggcatctcaacctctatttactgctggactgctcacagtcagtgtcagaaaacgacttcctgatcttcaaagagtctgctagcttaatggtggacaggattttttcattcgaaatcaacgtgtctgtggctatcatcaccttcgcatctgagcctaaggtcctcatgtctgtgctcaacgacaacagccgtgatatgaccgaggtaattagttccttagagaatgctaattacaaggatcatgagaatggcacaggtacgaatacctatgccgccctcaattctgtctacctcatgatgaacaatcagatgcggctgttgggcatggaaacaatggcctggcaagagatcagacatgctatcatactgctcactgatggaaagtccaatatggggggtagcccaaagactgccgtagatcacatccgtgaaattctgaatattaaccagaagaggaacgactatctggacatctacgccattggcgtgggaaagctcgacgtagattggagagagctaaatgaactaggatctaagaaagacggagagaggcatgcttttattctgcaggacacgaaggccctgcatcaggtctttgaacacatgctcgacgtgtccaaattaactgacaccatctgcggtgttggcaacatgagtgctaacgctagcgaccaggagcgtacaccctggcacgtgactattaaacccaagagtcaggaaacttgtcgtggtgcactcatttcagaccagtgggttcttaccgcggcccattgttttcgcgatggaaatgatcactctttgtggcgggtcaacgtaggagacccaaaatctcaatggggaaaggaattcctcatagagaaagcagtgatatcccccggtttcgatgtgttcgcaaagaaaaaccaggggatccttgaattttatggtgatgacattgctttactgaaacttgcacagaaggtcaagatgagcacccacgcgagacctatctgcctcccatgtactatggaagcgaatctggcgctgaggcgaccacaaggtagtacttgtagggatcacgaaaacgaacttttaaataagcagtctgtgccagcccacttcgtggctcttaatggctccaagctgaacatcaatcttaaaatgggagtggagtggacctcatgcgcagaggtggtcagccaggaaaagacaatgtttccgaatttaactgatgtgagggaagtggttaccgaccagtttctttgttccggcactcaagaggatgaaagcccttgcaagggggagtccgggggggcagtatttcttgagcggcgcttcagattcttccaggttggcttagtgtcctggggtctctacaatccttgtcttggaagcgccgacaagaactccagaaaacgtgcccccaggtctaaagtaccgcctccgagggattttcatatcaatcttttccgaatgcagccatggctacgacagcatttaggcgatgtacttaacttcctgccactttag

SEQ ID NO: 112786 - DNA, 420 bp, synthetic construct
  misc_feature 1..420: note = Description of Artificial Sequence: Synthetic coding sequence
  source 1..420: mol_type = other DNA
atggggcctctgatggtgctgttctgtttgttattcctgtatcccggtcttgcagatagcgcgccgtcttgcccccaaaacgtgaatatttctggcggaacctttaccctttctcacggttgggcaccaggctcattgttaacgtatagctgtcctcaggggctgtacccttcacccgcatcaaggctttgcaaatcatcgggccagtggcagacccccggcgccacaaggagtttgtcaaaggctgtctgtaaacccgtcagatgcccagccccagtttcattcgagaatggaatctacacacctagattaggaagttaccccgtcgggggtaatgtcagcttcgagtgcgaagacggattcatactccgcggtagcccagtgcggcagtgtaggccgaatggaatgtgggatggttag

SEQ ID NO: 112787 - DNA, 510 bp, synthetic construct
  misc_feature 1..510: note = Description of Artificial Sequence: Synthetic coding sequence
  source 1..510: mol_type = other DNA
atgcgagcactttgtattcgagaaacatgctcatcggagctgggctttagccgcaattggtcacgtagaaaagctggacattgccccaatccagggattagcttgggtgcagtgcgaaccggtttcaggtttgggcatggtgataaggtacgttaccgttgcagtagtaatctcgtcctaacaggcagttctgaacgtgagtgtcaagggaatggggtgtggtcgggaacagagcctatatgtaggcagccatactcttatgattttcctgaggacgtggcacctgctctgggcactagtttcagtcacatgctcggtgctacaaatccgacccagaagaccaaagatcatgagaatggaaccggtacgaatacctatgccgctctgaatagcgtttatctgatgatgaacaatcagatgagattgctcggcatggagaccatggcatggcaggagatacgccacgccattattctcctgaccgacggaaagtcgaacatgggtggctag

SEQ ID NO: 112788 - DNA, 420 bp, synthetic construct
  misc_feature 1..420: note = Description of Artificial Sequence: Synthetic coding sequence
  source 1..420: mol_type = other DNA
atgggtcccctgatggtgctcttttgccttttgtttctttaccccgggcttgccgattccgctccctcctgtccacagaacgtaaatatttctggtggcactttcaccttgtctcacgggtgggcacctggatcgctgcttacatacagctgcccacagggactgtacccgtctcctgcctctagattgtgcaaatcctctggtcagtggcagaccccaggagcaaccagatcattgtcgaaagcggtgtgcaagcctgtcagatgtccagcacctgtatcatttgaaaatggcatttacaccccacggttagggtcctatcccgttggaggcaatgtatccttcgaatgcgaggacggctttattttgagggggagcccagtgagacagtgcagaccgaacgggatgtgggacggttag

SEQ ID NO: 112789 - DNA, 2259 bp, synthetic construct
  misc_feature 1..2259: note = Description of Artificial Sequence: Synthetic coding sequence
  source 1..2259: mol_type = other DNA
atggggcccctgatggtgttgttctgtctcctctttctctatcctgggctggcagattctgcaccttcgtgtccccagaatgtgaacatttccggcggcactttcaccctgagccacggatgggctccaggctccctcctgacctactcatgcccccaaggactgtacccttctccagcttcccgcctgtgcaagtcatccggacaatggcagacgccaggagcaacacgttccttgagcaaggccgtctgtaaacctgtcagatgtccggcccctgtaagcttcgagaatggcatctacacccccaggctggggagttaccctgtggggggtaacgtatcgtttgagtgcgaggatggctttatacttaggggcagcccggtgcggcaatgccgacccaacggaatgtgggacggggaaaccgccgtctgcgataatggcgccggccactgccctaatcctgggatcagcctgggtgccgtgaggacaggcttcaggtttggacacggcgacaaggttcggtatagatgcagttctaacttggtgctgaccggatcaagcgagagagagtgccagggaaatggtgtgtggtctggcactgagccgatatgtcgccagccctattcatacgattttcccgaagatgtagcgcccgctctgggtacctcctttagccatatgctcggggcgaccaatcctacccaaaagaccaaagaaagcctcgggcgcaagattcagatccagagatccggtcacctgaatctttacctgctcctggactgtagccagagtgtctccgaaaacgatttcctgatatttaaggaatccgcgtccctcatggtcgaccgaatcttttccttcgaaatcaatgtgagcgtggccatcattacttttgcatcagaacccaaggttctcatgtccgtgttgaatgacaactcccgggacatgaccgaggtgatttcctccttggagaatgctaactataaagatcacgaaaacgggactggaacaaacacatatgcggccttgaactcagtgtatttaatgatgaacaaccagatgaggttactgggtatggagaccatggcgtggcaggagattcggcatgccattatcctgctgaccgacggaaagtccaacatgggaggctccccaaagactgcagtcgaccatatccgagagattctgaacataaaccagaagagaaacgattacctcgacatctatgctatcggagtagggaagcttgacgttgactggcgtgagctgaatgagctaggctcaaagaaggatggtgagcggcacgcctttattctgcaggatactaaagcgcttcaccaagtgttcgagcacatgctggacgtgagcaagctgacagatactatttgcggagtgggcaatatgtctgcaaatgcatccgaccaggaacgtacaccctggcacgtcaccattaagcctaagagtcaagaaacctgcagaggcgccctcatcagcgatcaatgggtgctgacggccgcacactgctttcgtgacggaaatgaccactctctgtggcgcgtaaacgtgggagaccctaaatcccagtggggaaaggaatttcttattgaaaaagcagtcatctctccaggatttgatgtttttgccaaaaagaatcaggggatcctggagttttacggcgacgatatagctcttctaaaactggctcagaaggtgaagatgagcacgcacgctcgtccgatatgccttccttgtacaatggaggctaatctcgctctgaggaggcctcaaggatctacctgtcgtgaccatgaaaacgaactcctgaataagcagagcgttccagctcacttcgttgccctcaatggctccaagctgaatatcaacttaaagatgggggttgaatggacaagctgcgctgaggtggtttcccaagagaagacaatgttccctaacctcaccgatgtgagggaggttgtgactgaccagttcctctgttctggtacacaagaggatgagagcccttgcaaaggtgagtcaggtggggctgtcttccttgagcgacggtttaggttcttccaggtgggcctagtttcatgggggctatataatccatgccttggatctgctgataagaatagccgaaaacgggccccgcggagtaaagtgcctccacccagggattttcatatcaacctcttcaggatgcagccctggctcaggcagcacctcggagatgtgttgaactttctccctctctag

SEQ ID NO: 112790 - DNA, 378 bp, synthetic construct
  misc_feature 1..378: note = Description of Artificial Sequence: Synthetic coding sequence
  source 1..378: mol_type = other DNA
atgggccctctcatggttctcttctgcctgctgtttttgtatcccggtttagccgattcagccccttcgtgccctcagaacgtgaatatctcaggtgggaccttcactctatctcacggctgggcacctgggtccctacttacgtacagctgtcctcaggggttataccccagtcctgcaagtcgactctgcaagtctagcggtcagtggcagacacctggcgcgaccagatctctttcgaaggccgtctgcaagccagggcattgccctaaccctggtatttcccttggggccgttcgcacaggctttaggttcggccacggagataaagtgcgctaccgctgcagctcaaatctagttttaacgggcagttcttag

SEQ ID NO: 112791 - DNA, 510 bp, synthetic construct
  misc_feature 1..510: note = Description of Artificial Sequence: Synthetic coding sequence
  source 1..510: mol_type = other DNA
atgagagccctgtgtatcagagaaacctgctcttccgaactcggtttctcgcggaactggtcacgcagaaaggctgggcactgccccaatccagggataagcctgggtgctgtacgaactggattcaggttcgggcacggcgacaaagtgcggtacagatgctcctctaatcttgtgctcacaggtagctccgagagggaatgccaaggcaatggagtgtggagcggcactgagcccatctgtcggcaaccgtactcatatgattttcccgaagacgttgcccctgcccttggcacctcctttagccacatgttgggcgcgacaaatccaacccagaagacaaaagaccacgaaaatggcactggcacaaatacgtatgctgccctgaattcggtctacctgatgatgaacaatcagatgcggcttttagggatggaaacaatggcatggcaggagatcagacatgccatcatattgctgacggatggaaagtccaacatgggaggttag

SEQ ID NO: 112792 - DNA, 1062 bp, synthetic construct
  misc_feature 1..1062: note = Description of Artificial Sequence: Synthetic coding sequence
  source 1..1062: mol_type = other DNA
atgggccccttgatggtgctgttttgtttgttgtttctataccccgcgggacactgtcctaacccaggcatttcattaggtgccgtgcgcaccggcttcagatttggccacggggacaaggttagataccggtgctcttcaaatctagttctaacgggaagctctgagcgggagtgccaaggcaatggcgtctggtctggaactgagccgatttgcaggcagccctacagctacgactttcccgaagatgtggcccctgcactcggtactagctttagccatatgcttggagctaccaatcctacccagaagacaaaggagtcactgggaaggaaaattcagatacagcggagcggacacctcaacttatatctgctgctggattgttcccagtcagtgtcagagaacgactttctgattttcaaagagtcggcctctttgatggtcgacagaatctttagcttcgaaatcaatgtgtctgttgcaatcataacattcgcctctgaaccaaaggtgctgatgtccgtgctgaatgataactcgcgcgacatgactgaagtaatttctagcctggagaatgccaattataaagatcacgaaaatggcacggggaccaacacttacgccgccctgaattcggtttacctgatgatgaacaaccaaatgagattgctcggcatggagaccatggcttggcaggaaattaggcatgctatcattctgctgaccgacggcaagtctaacatgggggggtctccaaagactgccgtcgatcatatccgggagatcttgaacattaatcagaagcgaaacgactacctggatatatatgcgatcggggtcggtaagctcgacgtggactggcgggaactgaatgagcttggatctaaaaaggatggagaacgtcatgcattcattctgcaggatactaaagcactacaccaggtcttcgagcacatgttggatgtcagcaaactcactgacacaatttgcggagttggcaatatgtccgcgaatgcaagcgaccaggagaggactccatggcatgtaactattaaatag

SEQ ID NO: 112793 - DNA, 2259 bp, synthetic construct
  misc_feature 1..2259: note = Description of Artificial Sequence: Synthetic coding sequence
  source 1..2259: mol_type = other DNA
atgggcccgcttatggtgctgttctgtttactgttcctgtaccctgggttagctgatagcgcccccagctgcccccagaacgttaatatatccggcggaacttttacactgtcccacgggtgggcacctggctcgctgctgacttattcatgtccgcagggactgtatccttctcctgctagccggttatgcaagtcatccgggcagtggcagacccctggggcaacacgcagtctgtcgaaggccgtatgtaagcctgtgaggtgtcccgcacccgttagttttgaaaatggtatttacactcctagattaggtagctatccagtcggtggcaatgtaagctttgagtgcgaggacgggtttattcttagggggagtcctgtgcggcagtgccgcccgaacggaatgtgggatggcgaaaccgcggtgtgtgacaatggcgccggtcactgtcctaatcccggaattagtctgggtgctgtgcggaccgggtttcgctttgggcacggggataaggtgaggtaccgttgctcatccaatctggttcttaccggcagctctgaacgagagtgccaaggtaacggcgtgtggtccggcacagaaccaatctgccgccagccatacagttatgactttcccgaggacgtggctcctgcattagggaccagtttttcccacatgctgggcgcaacgaatcccactcagaagaccaaagagtccttgggccggaagatccagatacaaagatccgggcacctgaacttatacctcctcttggactgtagtcagagcgtgagtgagaacgactttttaatctttaaggagtccgcttcattgatggtcgatcgtatctttagctttgaaattaatgtgagtgtcgcgataatcacatttgcgtcagaaccaaaagtattgatgtcagtccttaacgataattccagagatatgacagaagtaatatcctctctggagaatgccaactataaggaccacgaaaacgggaccgggaccaacacttatgctgctcttaacagtgtatatctcatgatgaacaaccagatgaggctgctcggtatggaaacaatggcttggcaagaaatcagacacgccattatactcctgacggacggaaaatccaacatggggggctctccgaagacagccgttgaccacattcgcgagattctgaatatcaatcagaagcgcaatgattacttggacatctatgcaattggagtaggcaagctagatgtcgattggcgggaattgaatgagctcggaagcaaaaaagacggtgagaggcacgcttttattcttcaagatactaaggccctgcaccaggtgttcgagcatatgctcgatgtttccaagttaacagacaccatttgcggcgtgggaaatatgtcagccaacgcatccgaccaggagaggaccccatggcacgtgaccatcaaacccaaaagtcaagagacatgtcggggagcactcatctcggaccagtgggtcttgacagccgcgcattgtttcagggacggtaacgaccatagcctctggcgcgtgaatgtgggcgatccgaagtcacagtggggcaaggagtttctgatagaaaaagccgtgatctctcccggatttgacgtttttgccaagaagaatcaaggtattttggagttttatggggacgacatcgctcttttgaaactggcccagaaggttaagatgtccacccacgcacgtccgatctgtttaccctgcacgatggaagctaacttggcccttaggaggccccagggcagcacgtgcagagatcatgaaaatgagctcctcaacaagcagagtgtcccagcacactttgtggccctcaacggatccaaacttaatattaatcttaaaatgggagtcgagtggaccagctgtgctgaggtcgtctcgcaggagaaaactatgttccccaatctgaccgatgttagggaagtggtcacggatcagttcctgtgtagcggaacacaggaggacgagagtccctgcaagggggagtctgggggggcagtcttcctcgagcggaggttccggttctttcaagttgggctagttagctgggggttatataacccatgtctgggaagcgccgacaaaaactcccgcaagagggctccacggtcgaaggtgccgcccccacgtgatttccacatcaacctcttccgcatgcagccatggctcagacagcacctaggagacgtcctcaatttcttgcccctttag

SEQ ID NO: 112794 - DNA, 1062 bp, synthetic construct
  misc_feature 1..1062: note = Description of Artificial Sequence: Synthetic coding sequence
  source 1..1062: mol_type = other DNA
atgggccctctgatggtgcttttttgtttgctcttcctgtatccagccggtcactgtcctaatcctgggatctctctgggggccgtgcgtactggattccgctttggacatggcgacaaagtgcgctatcgctgttccagcaatctcgtgctgaccgggagctctgaaagagaatgtcaagggaacggcgtatggtccggaacagagcctatttgccgccaaccttactcttatgatttcccagaggacgtggcaccagcgctgggaacaagcttcagtcatatgttgggtgccacaaatcccacacagaagaccaaggagtccctggggagaaagatccagatacaaaggtccgggcatctcaatctttacttgctcctagactgctcacagagcgtgtctgaaaatgactttctcatttttaaagagtccgcttctctgatggtcgatcggatttttagtttcgaaatcaatgtgagcgtggcaatcattacattcgccagcgagcctaaagtgttgatgtcagtgttgaatgataactccagggatatgaccgaggttatttcaagcctggagaacgccaactataaagatcacgaaaatgggactggaactaacacttatgccgctctgaattctgtgtatctgatgatgaacaatcagatgcgccttctgggaatggaaacgatggcttggcaggagatccggcatgccataattctgttaaccgacggtaaatcgaatatgggcgggtctcctaagaccgccgtagatcacatcagggaaatcttgaacattaatcagaagaggaacgattaccttgatatatacgccattggtgttggtaagctggatgtagactggagagagttgaacgaactgggtagcaagaaagatggcgaacgtcacgcctttattttgcaagatacaaaagccttgcaccaagtgttcgagcacatgctagacgtctccaaactgacagacacaatttgcggagtagggaacatgtcggccaatgccagcgaccaggagcgtactccctggcatgttaccattaagtag

SEQ ID NO: 112795 - DNA, 1062 bp, synthetic construct
  misc_feature 1..1062: note = Description of Artificial Sequence: Synthetic coding sequence
  source 1..1062: mol_type = other DNA
atgggacccctcatggtgctcttttgcctcctcttcctatatcctgccggccactgccccaatccaggcatatctctcggtgcagtaagaactgggttcaggttcggacacggcgacaaggtgcgttaccgatgttcatccaatctggtgcttaccggatcttcagaacgggaatgccagggcaacggagtgtggagcggcaccgagccaatttgtcggcaaccgtatagttacgacttccctgaagatgttgccccggccctaggcacctcattcagccacatgttgggcgccaccaatccaactcagaagacaaaagaaagtctggggcggaagatccaaattcaaaggtctggacaccttaacctctacctgctcctggactgcagccagtcagtctccgaaaacgattttttgatattcaaggagagcgcctctctcatggttgatcgcattttttcattcgaaataaatgtaagcgtcgccatcattacatttgctagcgaaccaaaggttctaatgagcgtgcttaatgacaatagtagggacatgaccgaggtgattagcagcttggaaaacgcaaactacaaggaccacgaaaacggcacggggacaaacacttacgctgccctaaatagcgtctacctgatgatgaacaatcagatgagactgcttggtatggaaacaatggcctggcaggagattcgccacgctataattctgctcaccgacggcaagagtaacatgggaggaagtcctaagaccgctgtcgaccatattagagaaatattgaatatcaatcagaagagaaacgattacctagacatatatgctattggcgtcgggaaacttgacgtggattggcgcgagctcaacgagctaggctcgaaaaaagacggcgaacggcatgccttcattctgcaggacactaaggccttacatcaggtattcgaacatatgctggatgtctccaagctgacggataccatctgcggcgtgggaaatatgtccgcgaatgccagcgatcaagaacgaaccccttggcatgttactataaagtag

SEQ ID NO: 112796 - DNA, 510 bp, synthetic construct
  misc_feature 1..510: note = Description of Artificial Sequence: Synthetic coding sequence
  source 1..510: mol_type = other DNA
atgcgcgcactctgcatacgggaaacctgttccagtgagttgggcttcagtagaaattggtcaagaagaaaggccggccattgtccgaatccaggaatcagcctgggtgcagtgcggaccggttttcggtttggacatggggacaaggtgcggtacaggtgcagtagcaatctcgtcttaacaggctcctctgaacgggaatgtcagggcaacggtgtgtggagtggcacagaacccatatgccgtcaaccttactcttacgattttccagaagacgtcgctcccgcccttggaacatccttctcccacatgctcggggctaccaatccgacacagaagactaaggaccacgagaatggcactgggaccaatacatatgccgctttaaactccgtctatcttatgatgaacaaccagatgcgccttttaggaatggagactatggcctggcaggaaatccgccatgctatcatactcctaaccgacgggaaaagtaacatgggaggctag

SEQ ID NO: 112797 - DNA, 1578 bp, synthetic construct
  misc_feature 1..1578: note = Description of Artificial Sequence: Synthetic coding sequence
  source 1..1578: mol_type = other DNA
atggtattgttttgtctgcttttcctgtatcccgccggacattgccccaacccaggcatcagtcttggcgccgttagaactggttttagatttggccacggcgacaaggttagatatcgatgttcctccaatctggtgttgactggcagttctgaaagggaatgccaaggcaacggagtatggtctggcactgagcctatttgtcgtcagccatactcctacgactttcccgaggacgtcgctccagctctcgggacatccttttcccacatgctgggcgcaacaaatcccactcagaagaccaaagaccacgaaaatggcacgggaactaacacctacgctgccctgaactccgtgtacctgatgatgaacaatcagatgaggttactgggcatggagacgatggcctggcaggaaatcaggcatgccataatactgttgactgacgggaagtcaaatatgggaggaagcccaaagacagcggtggaccatatccgtgagattctgaacattaaccagaagcgcaacgactatctcgacatctacgctatcggtgtggggaagctcgatgtcgactggagagagcttaacgaacttgggtctaagaaagatggtgagcgccatgcttttatcctccaggacactaaagctttgcatcaggtgtttgagcacatgctcgatgtgtcaaaactgaccgacacgatttgtggggttggcaacatgtctgcaaacgccagcgatcaagagaggactccctggcacgttacaattaagccaaagtcccaagagacatgtaggggcgcattaatcagcgaccagtgggtgttgaccgcagcccactgcttccgcgacggtaatgaccactcactgtggcgagtgaatgtgggggaccctaagtctcaatggggcaaggaatttctgattgaaaaggctgtgataagccctggatttgatgtttttgcaaagaagaaccaaggaattttggagttttacggtgatgatatagcactgctgaaattggcccagaaagtgaagatgtccacgcacgcacggcctatttgtcttccgtgtaccatggaggccaatctcgctctgcggcgaccccagggaagcacatgccgggaccatgaaaatgaattgctgaacaaacaatccgtgccagctcactttgttgcactcaacggcagtaagctgaacatcaacctgaagatgggggttgagtggacatcctgcgccgaagttgtgtcccaggagaaaactatgttccctaatctgaccgatgtgagagaggtggtcaccgaccagtttctatgctcgggaactcaggaggatgaaagtccctgcaaaggcgagagtggcggagctgttttcctggagcgacggtttaggttctttcaggttggtctggtgtcatggggactttacaacccatgtttaggctctgctgacaagaatagccgaaagcgggctccccgcagcaaggttcctcctccgagagactttcacataaacctattccgcatgcagccatggctgagacagcatttgggcgatgtgctcaactttctgcccttgtag

SEQ ID NO: 112798 - DNA, 1062 bp, synthetic construct
  misc_feature 1..1062: note = Description of Artificial Sequence: Synthetic coding sequence
  source 1..1062: mol_type = other DNA
atgggtccattaatggttctgttttgcctgttatttctgtacccagccgggcattgtccaaatcctggcataagtttgggggctgtcaggactggtttccggtttgggcatggcgataaggtgcggtaccgctgttcttcaaatttggttttgaccggcagctcggaaagggaatgccagggtaatggtgtgtggtccgggactgagccaatctgcaggcagccatatagttatgactttccagaggacgtggcccccgcattgggtaccagttttagccatatgctgggtgccacgaacccaacacaaaaaacaaaggagagtttaggcaggaaaattcagatccagaggtcaggacatcttaacctttacctcttactagactgctctcagtctgtctccgagaatgactttctgatttttaaggaatccgccagcttaatggttgatagaatcttttcatttgagatcaacgttagcgtagctatcataacctttgcttctgagccaaaggtcttgatgagtgtgctcaacgacaatagcagagatatgacggaggtgatttcttcgcttgagaatgcaaactacaaggaccacgaaaatgggactggcacaaacacctatgctgctcttaactcagtctacctcatgatgaataaccagatgcgccttctcgggatggagacgatggcatggcaggaaatacgccacgcgataattctgctgacggacggtaagagcaacatgggtggctcccctaaaactgctgttgatcacattagggaaatcctgaacatcaaccagaagaggaatgattacctggacatttatgccattggggtgggaaagctggatgtagactggcgcgaactgaatgagcttggttccaaaaaggacggtgaacgccacgcattcatcctccaggacacaaaagctttgcatcaggtattcgagcacatgctggatgtcagtaagttgactgataccatctgtggagtaggaaatatgagcgctaatgcctcagatcaggagaggaccccctggcatgttactattaaatag

SEQ ID NO: 112799 - DNA, 405 bp, synthetic construct
  misc_feature 1..405: note = Description of Artificial Sequence: Synthetic coding sequence
  source 1..405: mol_type = other DNA
tgaggacactgcccaaacccggggatcagtttgggagctgtgcgaaccggatttcgctttggacacggcgacaaggtacgatacaggtgctcttccaatctagtcctgaccggtagttctgagagagagtgtcagggaaatggcgtgtggtcgggaactgagccaatctgccggcagccatatagctatgacttccctgaagacgtggcgccagctctggggacttctttctctcatatgctaggagcaacaaatcccacgcagaaaacgaaagagagtctcggacggaagattcagattcagagatcagggcatctcaatctctaccttttgctggactgcagtcagtcagtgtcagagaacgacttcctgatctttaaggagtccgcctccctgatggtgtag

SEQ ID NO: 112800 - DNA, 1578 bp, synthetic construct
  misc_feature 1..1578: note = Description of Artificial Sequence: Synthetic coding sequence
  source 1..1578: mol_type = other DNA
atggtgctgttttgtctgctcttcctgtacccagccggtcactgtcctaatccaggcatatcgttgggagcagtgcgaacaggattcagattcggtcacggcgacaaagttcgctatagatgctccagcaacctggtgcttacgggatcaagtgagcgggaatgtcagggcaatggagtctggtctgggaccgagcctatctgccggcaaccttacagctatgatttccctgaggacgtggcccccgcattgggtacctcctttagccacatgttaggcgctactaacccaacacagaagacaaaggatcacgaaaacggaacagggactaacacttatgcagctctcaacagcgtatatttaatgatgaataaccaaatgcgccttctcgggatggagaccatggcatggcaggagatccgccatgctatcattctgctgacagatgggaagtccaatatgggcggaagtcctaagacagcagtcgaccatattcgcgagattctcaacatcaaccagaaacgcaatgactacttagacatctacgcaatcggtgtggggaagttggacgttgactggcgggagctgaatgagctgggctctaagaaagacggggagcggcacgcattcatcctgcaggatacgaaggctctacaccaagtctttgagcacatgctcgatgtgtctaagctcaccgacaccatctgcggcgtcggtaacatgtctgccaacgcctccgatcaggagcgaacgccctggcacgttacgatcaagccaaagtcccaggaaacttgtaggggagccctcatttccgatcagtgggtccttaccgcggcccattgctttcgggatggcaacgatcatagcctgtggagggttaatgtgggtgacccgaagtcccagtggggcaaagaattcctgatcgagaaagcagtcatatccccaggattcgatgttttcgctaagaagaaccagggcatcctggagttctacggcgatgatatcgcccttctcaaacttgcacagaaagtgaagatgtccactcatgccaggcctatatgtctgccatgtactatggaggctaatctggcattacgtaggccgcagggcagcacatgcagagaccacgagaacgagttgctcaataagcagtcagtgccggcgcactttgtcgcactgaacggatcgaaactcaacattaatttaaagatgggcgttgaatggacctcatgtgctgaagtggtgtctcaggagaaaaccatgttcccaaatctcacagatgtgcgggaagtagtcactgaccagttcctgtgttctggaactcaggaggacgaatccccctgcaagggggagagcgggggggcagtgtttctggaaagacgattcagatttttccaggtcgggttggtgtcgtggggactgtataacccatgcctaggatccgctgacaaaaacagtagaaaaagggctcccaggtcaaaggtccctcctcctcgggattttcacattaatttattccggatgcagccctggttgcggcagcacttgggcgacgttttgaacttcctccccctatag

SEQ ID NO: 112801 - DNA, 1578 bp, synthetic construct
  misc_feature 1..1578: note = Description of Artificial Sequence: Synthetic coding sequence
  source 1..1578: mol_type = other DNA
atggtcttattttgtctgctgttcctttaccctgctggccattgccccaacccaggtattagtctcggggcggtgcgaacaggatttagattcggacatggcgacaaggtgagatatcggtgctcaagcaacctggtgcttaccggctcctcggaaagagagtgtcagggaaatggcgtgtggagcggcaccgaaccaatttgccgacagccatacagttatgacttccccgaggatgtcgcacctgccttgggaacctccttctcccacatgctgggcgctacgaatcccacacaaaagacaaaggaccacgaaaatggaactgggacaaacacatatgctgccttgaactcggtgtacttaatgatgaacaatcagatgaggctgctgggaatggaaacgatggcctggcaggaaatccggcacgctattattctcctgaccgatggaaaatcgaatatgggtggaagtcccaaaactgccgtcgaccacatccgggagatactgaacataaaccagaaacgtaacgactatctggacatttatgccatcggcgttggcaaactggacgttgactggagagagctcaacgaactaggctcaaagaaagatggcgaaagacacgcttttatacttcaggacaccaaggcccttcatcaagtctttgaacacatgctggatgtgtctaaactaacagacacgatctgtggggtgggcaacatgtcggcaaacgcctccgatcaggagcggactccctggcacgtgaccattaaacccaaaagccaggaaacttgccgtggtgctctcatcagcgatcagtgggtgctcaccgctgctcactgctttagagacgggaatgatcatagcctctggcgtgtgaacgtgggagacccgaaaagtcagtggggcaaggagtttttaatagagaaagcagttatatcgcccgggtttgacgtgttcgctaagaaaaaccaggggatactggaattctacggagatgacatcgccttactgaaactagcccagaaggttaaaatgagtactcacgccagaccaatatgtttgccatgcaccatggaggccaacctcgccctaaggagacctcagggatctacatgtcgggaccacgaaaacgaactgctcaacaagcagtcagtgcccgcccatttcgtagccctcaacggaagcaagcttaatatcaacctgaagatgggcgtcgaatggacatcgtgtgcagaggtggtctcacaggagaagacaatgttcccaaatctgactgatgtccgagaagtcgtgactgaccagttcttgtgttcaggtacccaggaggatgagtctccatgtaagggcgaaagtggtggggccgtattccttgagagaaggtttagattcttccaagtgggactggtttcgtggggcctgtacaacccctgtctgggtagcgcagacaagaactcacgaaaaagagctccacgatccaaggttcccccgcccagggacttccatataaacttgtttagaatgcagccgtggctgaggcaacatttaggggatgtccttaacttcctgcccttatag

SEQ ID NO: 112802 - DNA, 1062 bp, synthetic construct
  misc_feature 1..1062: note = Description of Artificial Sequence: Synthetic coding sequence
  source 1..1062: mol_type = other DNA
atgggccccctgatggtgctcttttgtctgcttttcctctacccagccgggcattgccccaacccaggaatctctttgggcgccgtgcggactgggtttcgctttggccacggcgataaggtgcgatatcggtgttcaagcaacctcgtcctcacaggcagcagcgaacgggagtgccagggcaacggcgtatggagcggaaccgagccgatctgccggcagccctactcctacgatttcccagaggatgtggcgccggcactgggcacatcattttcacatatgctcggggcaaccaatcccacgcagaagaccaaggaaagtcttggcaggaaaattcagatacagaggtctggccacttgaacctctacctcttgctggactgtagccagagcgtaagtgagaacgattttttgatattcaaggagtccgccagtctcatggttgacaggattttcagttttgaaatcaatgtcagcgttgcgattatcactttcgccagcgaaccaaaagtgctgatgagcgtccttaatgacaattcccgcgatatgacagaggttattagttctcttgaaaacgccaactataaagaccacgagaatggcacagggaccaacacctacgcagctctcaatagcgtctacctgatgatgaacaaccagatgcgcctccttgggatggaaacgatggcctggcaggaaattagacatgctattatcctcttgactgatggaaaatctaacatgggcgggtcacccaagaccgccgttgaccacatcagggagatcctcaatattaaccagaagagaaatgattatttggatatttacgctatcggcgtgggtaaattggatgtggactggcgcgagctgaatgagctgggcagcaagaaggatggtgaaaggcacgcgtttattctccaggacacaaaagccctccaccaggtgttcgagcatatgttagatgtttctaagttaacagacacaatctgtggagtgggcaatatgtcggccaatgcttcagaccaagagcgcacaccctggcacgtcaccatcaagtag

SEQ ID NO: 112803 - DNA, 477 bp, synthetic construct
  misc_feature 1..477: note = Description of Artificial Sequence: Synthetic coding sequence
  source 1..477: mol_type = other DNA
atgagggccttatgcatcagagagacctgttccagcgagctgggctttagcaggaactggtctagaaggaaagccggacactgccctaacccaggcatctccctcggtgccgttaggactggctttagattcggacatggcgataaagtcaggtacagatgctcgagcaatctggtcttaactggtagcagtgagcgtgaatgccaggggaacggggtgtggagcggcacagagcccatttgtaggcaaccctattcctacgacttcccagaggacgtcgcgcctgccctggggacctcattcagccatatgttgggtgccactaacccgacgcagaagacgaaggagagcttggggaggaaaatccagatccagcggagcggtcacttgaacctatacttgctattggattgtagccaaagcgttagcgaaaatgatttcttaatattcaaggaatccgcctcgcttatggtgtag

SEQ ID NO: 112804 - DNA, 477 bp, synthetic construct
  misc_feature 1..477: note = Description of Artificial Sequence: Synthetic coding sequence
  source 1..477: mol_type = other DNA
atgagagctctgtgtatccgagagacctgctcgagtgagctgggcttctccagaaattggagtcggaggaaagccggccactgccctaatcccggtatctccttgggcgccgtcagaaccggctttcgattcgggcatggagacaaagtgaggtaccggtgttcgtcaaatctggtgctgaccggctcttcagaaagagagtgccagggaaatggagtttggagtgggaccgagcctatctgtagacaaccgtactcctacgatttcccagaagatgtcgcccccgcgctggggacatcattttcccatatgttaggggccactaatcctacccagaagacgaaggagtccttaggccgcaagatacagattcagcgtagtggacacctcaacctctaccttctgttggactgttcccaatccgtctccgagaacgacttcctaatcttcaaggaatctgcaagtctaatggtgtag

SEQ ID NO: 112805 - DNA, 978 bp, synthetic construct
  misc_feature 1..978: note = Description of Artificial Sequence: Synthetic coding sequence
  source 1..978: mol_type = other DNA
atggggacccggagcgccattgccgccccacgaatcctgtgtagcagggggctgcggagcggctccgcacgcgctaccggctcaggcgtggagcggtctccatcagccgctaatcctactctgatgaccagtctgagaacctggccccttccatgggctctgcctagtccaacctgtctgggaccaccgataccacccagacgccagagaatatttagcttcgagataaatgtgtccgtggctattatcaccttcgctagtgaaccaaaagtgctgatgtccgtcctaaacgataattctagagacatgaccgaagtcatttctagcctggagaacgccaactataaggatcacgagaatggcactggcactaatacatacgccgctctgaactctgtctatctgatgatgaacaaccagatgcggctgttgggtatggaaaccatggcctggcaggagatcagacacgctattattttactgacagacgggaaatcgaatatgggcggtagccccaaaacggcagtggaccatattcgggagatccttaatataaaccaaaaacggaacgactacctcgacatttatgctattggagtcggtaagctagacgtagactggagagagctcaacgaattgggatctaagaaagacggagagaggcatgctttcatactgcaggatacaaaagcactgcatcaagtatttgagcatatgttggatgtgagcaagctcactgataccatctgtggcgtgggtaatatgtcagctaacgcatcggaccaagaacgtaccccctggcacgtcactattaagcccaaaagccaagaaacctgcaggggagcgctgatctcggaccaatgggtgttaactgccgcccactgtttccgggacggcaatgatcatagtctctggagggttaacgttggggatccaaaatctcaatgggggaaggaattccttatagagaaggcctag

SEQ ID NO: 112806 - DNA, 477 bp, synthetic construct
  misc_feature 1..477: note = Description of Artificial Sequence: Synthetic coding sequence
  source 1..477: mol_type = other DNA
atgcgggcgctgtgtattcgggagacctgctcaagtgagctaggcttctcccgcaactggtcacgtaggaaagccggtcactgccctaacccggggatctccctgggggcagttcgcaccggattccgttttgggcatggcgataaagttaggtaccggtgtagctccaatctagtgcttaccggttcttcagagagagaatgtcagggaaatggtgtctggagtgggaccgaacccatctgcaggcaaccctattcttatgattttccagaggatgtggctcctgcacttgggacatccttcagtcatatgctgggcgcaacaaatcctacccagaaaacaaaggagagtctcgggcgaaagatccagatccagaggagcgggcacttgaacctgtatctcctgcttgactgttcacagagcgtgtctgaaaacgatttcttgatcttcaaagagagtgcctcactgatggtatag

SEQ ID NO: 112807 - DNA, 1062 bp, synthetic construct
  misc_feature 1..1062: note = Description of Artificial Sequence: Synthetic coding sequence
  source 1..1062: mol_type = other DNA
atggggcccctcatggtattgttttgcctcctctttctctacccggcaggacactgtcccaatcctggtatatctttgggtgctgttcgaacggggtttcggttcggtcatggcgacaaggtgaggtacagatgcagcagtaatcttgtattaactgggtctagcgagagggagtgccagggcaatggggtctggagcggtaccgagcccatctgtcgacagccgtacagctatgactttcccgaggatgtggccccggccctgggtaccagtttctctcacatgctgggcgccacaaatccaactcagaagactaaagagagcctggggcgcaaaattcagatccagcggtcaggccatctgaatctctatctcctgctagactgtagtcagtccgtatctgaaaatgattttctaatatttaaggagtccgcaagtttaatggtagaccgtatttttagttttgagataaatgtctctgtcgctattatcacattcgccagtgagcctaaagtgctgatgtcagtgctgaacgataactccagagacatgaccgaagtcatatcaagtctcgaaaatgcaaactataaagaccacgagaatggcacaggaaccaacacctatgccgcattgaattcagtatacctgatgatgaataaccagatgagactcttgggcatggagacaatggcctggcaagagatccgccacgctattatcctactgacagacggaaaaagcaatatgggcggttctcccaagacagctgtggatcacatccgcgaaatcctgaacataaaccagaagcggaatgattaccttgacatctatgcaatcggcgtcgggaagctggatgtggattggagggaacttaacgagttgggttcaaaaaaggatggggagcggcacgctttcattttgcaagacactaaagcacttcaccaggtgttcgagcatatgctcgatgtatccaagctgacggacactatatgcggagtcggaaacatgtctgccaatgcttctgaccaagagcggactccttggcatgtgacaattaagtag

SEQ ID NO: 112808 - DNA, 420 bp, synthetic construct
  misc_feature 1..420: note = Description of Artificial Sequence: Synthetic coding sequence
  source 1..420: mol_type = other DNA
atgggacctctcatggtgctgttctgtcttctgttcctgtatcccggtctggccgacagtgccccctcatgccctcaaaatgtcaacatctccgggggtacttttaccctatcacacggatgggcacccggcagcttactcacatacagttgcccccagggactataccccagccccgccagtcgtttgtgtaagagttccggacagtggcaaactccaggggctacacgttccttatccaaggcagtttgcaaacctgtgcgctgtccagcccctgtgagcttcgagaatggcatctatactccccggctgggaagttatcccgtgggtggaaatgtgtccttcgagtgcgaggacgggtttattctgcgtggctcccccgtgcgccagtgtcgccctaatggaatgtgggatggatag

SEQ ID NO: 112809 - DNA, 438 bp, synthetic construct
  misc_feature 1..438: note = Description of Artificial Sequence: Synthetic coding sequence
  source 1..438: mol_type = other DNA
tagggtcattgtccaaaccctggtattagtctcggggcagtccgtaccggattccgttttggccatggggataaggtccgatatcggtgcagttccaatctggtgcttaccggttcctccgagagagagtgtcaggggaacggcgtgtggagtgggacggagcctatctgtcggcaaccttatagttacgattttcccgaagacgtcgcacctgccttggggacaagcttctcacacatgctgggggccacgaatcctacccagaaaactaaggatcacgagaatggaaccggaaccaatacgtatgccgcactgaatagcgtctacctgatgatgaataatcagatgagactcttggggatggagacaatggcatggcaggaaattcggcatgctatcattctgttaaccgacggtaaatccaatatgggcgggtag

SEQ ID NO: 112810 - DNA, 378 bp, synthetic construct
  misc_feature 1..378: note = Description of Artificial Sequence: Synthetic coding sequence
  source 1..378: mol_type = other DNA
atgggaccactgatggtgctcttttgtctcctcttcctgtatcctggattggctgactctgccccttcctgcccccagaacgtcaacatctcaggggggacttttactctatcccacggctgggctccaggatcactgttaacttattcttgcccccaaggcttgtacccctccccagcgtccagactctgcaagagcagcggacaatggcaaacaccaggagccaccaggtcactgtctaaagcagtgtgcaagcctgggcactgcccaaaccctgggatttccttgggggccgtcaggacaggattcaggttcggacatggtgacaaggtgcgataccgctgctcttcaaatctggtgctgaccggtagctcctag

SEQ ID NO: 112811 - DNA, 420 bp, synthetic construct
  misc_feature 1..420: note = Description of Artificial Sequence: Synthetic coding sequence
  source 1..420: mol_type = other DNA
atggggcctctcatggtcctattctgtctgttgtttctttatccaggactggccgactctgcccctagctgcccgcagaatgttaatatcagcggcgggaccttcacactgtctcacggatgggcccctggaagtctgctaacttatagttgtccacaaggcttgtatccttctccagcgtccagactgtgcaaaagctcgggtcagtggcaaacacctggagcaacccgttctcttagcaaagcagtgtgcaaacctgtgcggtgcccagcccctgtgtctttcgaaaacgggatctatacaccgcgactggggtcctaccccgtgggaggtaacgtaagttttgagtgtgaagatggattcatactgcggggatcaccagtgcgccaatgtaggccaaatggcatgtgggatggttag

SEQ ID NO: 112812 - DNA, 477 bp, synthetic construct
  misc_feature 1..477: note = Description of Artificial Sequence: Synthetic coding sequence
  source 1..477: mol_type = other DNA
atgcgagctctgtgtattagggagacatgttcgagtgaattgggctttagccgcaattggagtagacggaaggcgggtcattgcccaaaccctgggatatctcttggtgccgtgaggacgggtttccggtttggacacggggataaagttcgctaccgctgctcctcaaacttggtccttacggggagctccgagagagaatgtcaggggaacggagtttggtccggcacagagcctatctgccgtcagccatacagttacgattttcctgaggacgtggccccggctcttggtacgagcttctcacacatgcttggggctaccaatccgacccaaaagacaaaagaaagcctgggcagaaagatccagatccaacgaagcggccacttaaacttatacttgctgctggactgctctcagtctgtgagtgaaaatgactttcttatatttaaagagagcgcatccttaatggtttag

SEQ ID NO: 112813 - DNA, 378 bp, synthetic construct
  misc_feature 1..378: note = Description of Artificial Sequence: Synthetic coding sequence
  source 1..378: mol_type = other DNA
atgggccctctcatggtcctcttttgtctgctgttcttgtatcctgggctggcagattcagccccttcctgcccccaaaacgtgaacatcagtggaggaaccttcaccctcagccacgggtgggctccaggtagtttgctgacatactcctgcccccaaggtctgtatccctcgccggctagcagactctgcaagtcctctggacaatggcagaccccaggagccacacgtagtttgtccaaggcggtgtgcaagcctggccactgccccaaccccggcatttccctgggtgcagttaggacaggattccggtttggacacggggacaaggtgagataccgttgcagttccaatctggtcctgactgggtcttcatag

SEQ ID NO: 112814 - DNA, 1863 bp, synthetic construct
  misc_feature 1..1863: note = Description of Artificial Sequence: Synthetic coding sequence
  source 1..1863: mol_type = other DNA
atgggaccattgatggtgcttttctgtcttttatttctgtatccagccggacattgtccaaaccctggtatttctttgggcgctgtgagaacgggtttcagatttgggcacggggacaaggttcgttatcgatgctcaagtaaccttgtgctgaccggcagttctgagcgagaatgtcagggtaatggcgtatggtctggaacagaacccatttgtagacaaccctatagctacgattttccagaggatgtcgccccggctctgggaacttctttctctcatatgctgggcgcgacaaacccaactcaaaagacaaaggagagcctggggcggaagattcaaatccaacgcagcgggcacttgaatttgtatcttctgctggattgttcccagtctgtgagcgaaaacgatttccttatttttaaggagtccgcctccctgatggtggatcgaattttttccttcgagattaacgtatccgtcgctatcattacctttgcttccgaacccaaggtgttaatgagcgtgttaaatgataactcacgggatatgactgaagtaattagctccctggagaacgctaactacaaggaccatgagaatggcaccggaaccaatacatacgctgctcttaatagcgtatatctgatgatgaacaaccagatgcgacttctcggcatggaaactatggcctggcaggaaataagacacgccataatcttgctgactgatggaaaaagcaacatgggaggttcgccaaaaacagcagtagaccatattcgggaaatcctgaacataaaccagaaaagaaacgattacctagatatttacgctattggcgtgggcaagcttgatgtggactggcgtgagcttaatgaactagggtccaagaaagacggtgagaggcatgcctttatcctgcaggataccaaggccctgcaccaggtgttcgagcacatgctggatgtgtccaaactgactgacaccatttgtggcgttggtaatatgtccgcgaatgcgtccgaccaggaacgtacaccatggcatgtgactatcaagcctaagtcacaagaaacctgcaggggggctttgatttctgaccagtgggttttgacagccgcccattgctttcgcgatggtaatgatcatagtctgtggcgcgtgaacgtcggcgatcctaaaagtcagtggggcaaggagtttttaatcgagaaagccgtgataagccctggttttgacgtgtttgcaaaaaagaaccaggggatcctcgaattctacggagacgatatcgctctgctgaagctggcacaaaaggtgaagatgagcacccacgctagacccatctgtcttccctgcacaatggaagccaatctggccctgcggcgaccccagggctcaacatgtcgagatcacgaaaatgagctccttaataaacagagcgttcctgctcacttcgtagcccttaacggctccaaactgaacatcaatttgaagatgggtgtagagtggacctcatgcgcggaggtagtatcgcaggagaaaacaatgttcccaaacctgaccgatgtcagggaagttgtcactgaccagtttctgtgctcagggacacaggaagatgagtccccatgtaaaggagagagcggaggggcagtgtttctggagcgccgcttcaggttttttcaggtgggcctcgtgagttgggggctgtacaacccatgcctcggcagcgccgataagaattcgcgcaagcgggcgcctcgcagcaaagtgccccctccccgtgacttccacatcaatctgtttcgcatgcaaccatggcttcggcaacacctcggggacgtcctgaactttcttccactctag

SEQ ID NO: 112815 - DNA, 378 bp, synthetic construct
  misc_feature 1..378: note = Description of Artificial Sequence: Synthetic coding sequence
  source 1..378: mol_type = other DNA
atgggccctttgatggtattattctgtctactgtttctgtatcccggcttggccgactctgccccatcctgcccccagaatgtcaatatctctgggggaaccttcactctcagccacggctgggcccccggaagcctgttgacatactcatgcccccaagggttatacccgtcaccagcctctagactgtgcaagtccagcgggcagtggcaaacgcctggggcaaccaggagcctgagtaaagcggtgtgcaagcctgggcactgccctaaccccggaatcagtctaggcgctgttcgcacaggatttcgctttggtcacggagacaaggtccgatatcggtgctccagtaatcttgtcctcaccggctcctcctag

SEQ ID NO: 112816 - DNA, 420 bp, synthetic construct
  misc_feature 1..420: note = Description of Artificial Sequence: Synthetic coding sequence
  source 1..420: mol_type = other DNA
atgggacctctcatggttctgttttgcttgttgtttctttatcccggactcgccgactccgcgcctagttgcccacagaacgtcaacatctctggaggcacattcaccctgagccacgggtgggcaccaggctctctgctgacttattcttgcccacaggggctgtacccctcaccagcctcaaggctgtgtaaaagttcaggacagtggcagaccccaggcgcgacccgctctctgtcgaaggcagtgtgtaaacccgtccgctgccctgcaccagtcagtttcgagaacggtatctacacccctcgactgggcagctaccccgttggcggcaatgtctccttcgagtgtgaggacggattcattttgcggggcagcccagtcaggcagtgccgaccaaacgggatgtgggacgggtag

SEQ ID NO: 112817 - DNA, 378 bp, synthetic construct
  misc_feature 1..378: note = Description of Artificial Sequence: Synthetic coding sequence
  source 1..378: mol_type = other DNA
atgggccctctgatggttctgttttgcttactctttctgtaccccggactggcagacagcgcgccaagttgtccccaaaacgtaaatatatctggaggtacgttcactctgtcccacgggtgggcaccgggatcattgttgacatattcatgcccccaagggctctatccgtcccctgctagtcgtctctgcaaaagctctggtcaatggcagactcccggcgccacaaggtccctgagcaaggccgtatgcaaacccggccactgccccaatccaggcatctctctcggcgccgtgagaactggattccgattcgggcatggagacaaagtcagatacaggtgttcatctaatcttgtcctgacggggagctcctag

SEQ ID NO: 112818 - DNA, 2259 bp, synthetic construct
  misc_feature 1..2259: note = Description of Artificial Sequence: Synthetic coding sequence
  source 1..2259: mol_type = other DNA
atgggccccctgatggtcctgttttgtctgctgttcttgtatcctggtcttgccgactccgctcccagctgccctcagaatgtaaacatctcaggtggtactttcactctttcccacgggtgggctcccggcagcctgcttacctattcttgtccccaagggttatatcccagtcctgcaagccgtttgtgcaaatcctcaggccagtggcaaacccctggggccactcgatctctgtccaaggctgtgtgcaagcctgtgaggtgtcccgcacccgtgtcatttgaaaacggcatctataccccgcgactcggctcataccctgtaggcggcaatgtatcctttgagtgtgaagacgggttcatactgcgaggaagcccagtgagacagtgcaggcctaacggtatgtgggacggcgagactgcagtctgtgacaacggagccggccattgcccaaaccctggcattagcttgggagccgtgaggaccggctttcgattcgggcacggtgacaaggtcagatatcgatgtagttctaatctcgtgttaactgggagctcagaaagagagtgccaaggaaacggagtgtggagcgggaccgagcctatctgtcggcagccttatagctacgatttcccagaagacgtggccccagccttaggcacatcattttctcacatgcttggagccactaatcctacccaaaagaccaaggagagccttggtaggaaaattcagatccaacgaagcggccacttgaacttgtatctcttactggattgtagtcaatccgtcagtgaaaacgattttctcatatttaaggagtccgcctccctcatggttgatcgcatctttagttttgagattaatgtctctgttgccattatcacatttgcctctgaaccaaaggttctgatgtccgtgctgaatgataattcaagggacatgacagaagtgatctccagtctggaaaacgctaactataaagatcacgagaacggaactggaacaaatacgtatgccgcattgaatagcgtttacctgatgatgaacaaccagatgcgccttctaggaatggagaccatggcctggcaggaaataaggcacgctattatattgttgaccgacggcaagagtaacatgggcggcagcccgaagactgcagttgaccatatcagagagatcttaaatataaatcagaagagaaacgactacctggacatttacgccattggggtaggcaaactggacgtcgattggcgagagctcaacgaactgggttcaaagaaggacggtgagcgccacgcattcatccttcaggacacaaaagccctccaccaggtctttgaacacatgcttgatgtgagtaaactgacagacactatttgcggtgtgggcaacatgtccgcgaatgccagcgaccaagaacggacgccgtggcatgtcacaattaagcctaaatctcaggagacttgtaggggggctcttattagcgatcaatgggtcctcaccgctgctcactgctttcgcgacgggaacgaccactccttatggagagtgaacgtaggtgatccaaaaagtcagtggggtaaagaattcctgatcgaaaaggccgtgatctcaccaggcttcgacgtgttcgccaagaaaaatcagggtattcttgaattttatggcgatgacattgcacttctgaaactggcccaaaaagtgaaaatgtcgactcatgctcgcccgatctgtctgccttgcactatggaagccaacctggccttacggcgccctcaggggtccacatgccgcgatcacgaaaatgaactgctgaataagcagagcgtccctgcacactttgttgcgctaaacggttcaaaattgaacattaatctcaaaatgggagttgagtggacctcctgtgcagaggtggtgtcccaggagaagactatgttccccaacctcactgatgtcagagaggtagtaacagaccaatttctgtgctcgggcacccaggaagacgagtctccttgcaaaggcgaatcaggaggtgcggtattccttgagaggcgatttcggttttttcaagtaggtctggtcagttggggattgtataatccctgcttaggctctgccgataagaacagccggaaaagagctccccggagcaaagtgccgcctccccgagactttcatataaatttgtttaggatgcagccctggttgaggcagcacctcggagacgtcctcaattttttaccactctag

SEQ ID NO: 112819 - DNA, 378 bp, synthetic construct
  misc_feature 1..378: note = Description of Artificial Sequence: Synthetic coding sequence
  source 1..378: mol_type = other DNA
atggggcctctgatggtcctgttctgccttctatttctttaccccggattggccgactccgccccttcctgcccgcagaatgtgaatattagcggaggaacttttacattgtcccacggttgggcacccggctctctactgacttattcttgcccccaaggcctttacccaagtcctgcctccaggctgtgtaagagctcgggacaatggcagactcctggcgccacacggagcctgagcaaggccgtgtgtaagcccgggcactgccccaacccgggaatctccctgggagctgtcagaaccgggtttcgtttcggacacggggataaagtgcgctatcgatgcagtagcaatctagtgctgaccggctcttcctag

SEQ ID NO: 112820 - DNA, 510 bp, synthetic construct
  misc_feature 1..510: note = Description of Artificial Sequence: Synthetic coding sequence
  source 1..510: mol_type = other DNA
atgcgtgccctgtgtatcagagagacctgctctagcgagctgggtttttcccgcaactggtcgcgtaggaaggccggccactgccccaaccccgggataagcctgggggcagtgcggactgggttcagattcggacatggggacaaggtgcggtaccgttgctcatctaatttagtgcttacagggtccagtgaacgtgagtgccagggcaacggggtgtggtccggtacagagcctatctgtagacaaccctatagttatgactttcctgaagatgtggcccccgcactgggaacttcattctctcatatgctcggagccacaaacccaacacagaaaaccaaagatcacgagaacggcactgggactaacacttacgcagcacttaatagtgtgtatctcatgatgaacaatcagatgagactgctgggaatggagaccatggcctggcaggagatccgtcatgccatcattctcctgaccgatggcaaaagtaacatgggcggttag

SEQ ID NO: 112821 - DNA, 1578 bp, synthetic construct
  misc_feature 1..1578: note = Description of Artificial Sequence: Synthetic coding sequence
  source 1..1578: mol_type = other DNA
atggtacttttttgtctgttattcttgtatccagccgggcactgccctaacccagggattagcctcggcgccgttaggaccggttttcggttcggccacggggacaaagtccggtaccgctgttcctcaaaccttgtgctgacaggttcttcagagagagagtgccaaggcaatggggtctggagcggaaccgagcctatctgccgtcagccctattcttacgactttcctgaagatgtggctcccgcattggggactagcttttcgcacatgctgggtgcaactaatccaacacaaaagacgaaggatcacgagaatggcaccggaacaaatacttatgcggccctgaacagcgtgtatttgatgatgaataatcagatgcgcctgctgggcatggagactatggcttggcaggagatccggcacgccatcattctgctgactgacggaaagtcaaacatgggtggaagcccaaaaactgctgtggatcacatccgagagatcctcaatattaatcagaagagaaatgattacctggacatttacgcgataggcgtagggaagctggacgtggactggagagagcttaacgagctgggttctaaaaaagatggcgagcggcatgcttttatcctccaggataccaaggccctccatcaggtgttcgagcacatgctggacgtaagcaagctcacagacacgatttgcggagtagggaacatgtccgccaacgcttccgatcaggagcgcacaccttggcacgtaacaatcaaaccaaagtctcaagagacatgccggggtgccttgatttcagatcaatgggtgctgacagccgctcactgcttccgggatggcaatgatcattcactttggagggtgaacgtgggggaccctaaatcgcagtggggcaaagaatttttaattgagaaggccgtgatctctccaggcttcgacgttttcgcaaaaaagaaccagggtattctcgaattctatggggacgatatcgccttgctcaaactggcccaaaaggttaagatgagcacccacgcgcgcccaatctgcctcccatgtacaatggaggccaatcttgcactgcgtaggcctcaggggtcgacttgtagggaccatgagaacgagctgctcaataagcaatctgtgccagcacattttgtggctttaaacggatccaaactcaacatcaacctgaaaatgggcgtggaatggacgagttgtgcagaggtcgttagccaggaaaagacaatgtttcccaacctgacagatgtcagggaagtggtgacagaccagtttctgtgttccggtacgcaggaagacgaaagcccatgtaaaggtgaatcgggcggcgccgtattcctggagcgcaggttccggttctttcaggtgggcttggtttcatgggggttgtataatccttgtctgggttctgccgataagaacagtcggaaaagggcacctagatcaaaagtgccacctcccagagactttcacatcaatttgttcagaatgcagccctggctgcgccagcatctgggcgatgttcttaactttctaccgctgtag

SEQ ID NO: 112822 - DNA, 438 bp, synthetic construct
  misc_feature 1..438: note = Description of Artificial Sequence: Synthetic coding sequence
  source 1..438: mol_type = other DNA
tgagggcactgccctaaccctggcatttctctaggagcagtccgcacaggcttcaggtttggtcatggcgacaaggtccgatataggtgcagcagcaacttggttctcacgggtagtagcgaacgagaatgtcaaggcaatggcgtgtggtccggaaccgaaccaatatgtcgacagccttacagctacgacttccctgaggatgtagccccggctctgggaacgtctttttcccatatgttaggggcaacaaatccaacacagaaaactaaggaccacgagaacggcacagggactaacacctacgctgcgctcaactctgtctatctcatgatgaacaaccaaatgcggttattgggtatggaaaccatggcctggcaggagattagacacgcaatcatcttattgacagatggcaagagtaatatgggcgggtag

SEQ ID NO: 112823 - DNA, 405 bp, synthetic construct
  misc_feature 1..405: note = Description of Artificial Sequence: Synthetic coding sequence
  source 1..405: mol_type = other DNA
tgaggacattgtcccaaccctggtatctccctcggggccgttagaaccgggttccgcttcggacacggtgacaaagtccggtaccgttgtagttctaatctcgtactgaccggtagttcagaacgggagtgtcagggaaacggagtttggagcggtactgaacccatctgccggcaaccttatagctacgactttcccgaggatgtggccccagccctgggaacgagcttttcccatatgttgggtgccactaatccaactcagaaaacaaaggagtctctcggccgcaaaattcagatacagagaagtgggcatttgaacctgtacttgctgctggactgcagtcagagtgtgtctgagaatgattttttaatttttaaagaatccgcctctctcatggtgtag

SEQ ID NO: 112824 - DNA, 420 bp, synthetic construct
  misc_feature 1..420: note = Description of Artificial Sequence: Synthetic coding sequence
  source 1..420: mol_type = other DNA
atgggccccctgatggtgcttttctgcctgctgttcttgtatcctgggctggcagactccgcaccctcctgtccgcaaaacgtgaatatatccgggggtacctttactttgagccatggttgggctcctggttccctgctcacctacagctgccctcagggactctacccttctcctgcctcacgactatgtaagagctcagggcagtggcagacacccggtgccaccagaagcttatccaaagctgtctgtaagccagtgagatgtcctgcccccgtctctttcgaaaacggaatctacacaccgaggctcggctcatatcccgttggcgggaatgtgagctttgagtgcgaggacggtttcatcctgcgtggtagtccagtccgccaatgccggcctaacgggatgtgggacggatag

SEQ ID NO: 112825 - DNA, 420 bp, synthetic construct
  misc_feature 1..420: note = Description of Artificial Sequence: Synthetic coding sequence
  source 1..420: mol_type = other DNA
atgggacccctgatggtactgttctgcctgctctttctgtaccctgggctggccgactccgccccgagctgtccacagaatgtgaatatttcagggggcacgtttaccctctcgcacggatgggctcctggaagcttactgacgtactcgtgcccccagggtctgtacccctcacccgcaagtcgattgtgcaagtctagtggccaatggcagaccccgggggccaccaggtcactgtctaaagccgtctgtaaacccgtgcggtgccctgctccagtttctttcgagaatggaatatatacaccgaggcttgggtcttaccctgtcggagggaatgtttctttcgagtgcgaggacggattcattctgcgaggatctcctgtccgccaatgccgccctaacgggatgtgggatggctag

SEQ ID NO: 112826 - DNA, 1617 bp, synthetic construct
  misc_feature 1..1617: note = Description of Artificial Sequence: Synthetic coding sequence
  source 1..1617: mol_type = other DNA
atgagggccctgtgtataagagagacatgttcttctgagctgggcttttccaggaactggagtaggagaaaagccggccactgcccgaaccccggaataagtttgggtgcggtacgaactggatttcggtttggtcatggcgataaagttagatacagatgtagcagcaacctagtgctgactggatctagcgaacgcgaatgtcagggaaacggagtgtggtccggcaccgagcctatctgtaggcagccctactcatacgacttccctgaggatgtggcccccgctctggggacgagtttctctcatatgctgggagcaacgaacccaactcaaaagaccaaagatcatgaaaatggcaccgggacaaacacttacgccgcgctgaactccgtttatcttatgatgaacaatcagatgcgcctgttgggcatggagacaatggcctggcaggagatcaggcatgcaatcatcctcctgaccgatgggaagtctaatatgggtggatcacctaagactgccgtggaccacatccgcgagatattgaatataaatcaaaaacgcaacgattatttggatatctatgcaattggcgtcggtaagcttgatgtggattggagagagctgaacgagctgggcagcaagaaagatggcgaacggcacgcctttatcctccaggatacgaaggcgttacaccaggtttttgagcacatgctggatgtcagcaaactgactgataccatctgcggggtgggtaacatgtccgcgaatgcgtctgaccaggaaaggaccccttggcacgtgaccattaagccaaagtctcaggaaacttgccgaggcgcattaattagcgaccaatgggtgctgactgcggctcactgctttcgcgatggcaacgatcatagcctctggcgggtgaatgtaggagacccaaaatctcaatggggcaaagagtttctgatcgaaaaagcagtcatatcccctggcttcgatgttttcgcaaaaaaaaaccaagggatacttgaattctatggcgacgatattgcactccttaagttagcccagaaagttaagatgagcactcacgcccggcctatttgtctgccgtgtactatggaagcgaacctggcactgaggagacctcaagggtctacgtgccgggatcacgaaaacgaactcttaaataagcagtcagttccggcgcattttgttgccctaaatggcagtaagcttaatattaacctgaaaatgggcgttgagtggacctcttgcgcagaagtggtctctcaggaaaagacaatgtttccaaatcttaccgacgtgcgtgaggtagtcacggaccagtttctgtgtagcggaacccaagaggacgagtctccctgtaagggggagtcaggaggcgccgtgtttctggagaggcgctttcggttttttcaggttggcctggtgtcttggggattgtacaacccatgtctcggcagcgccgataagaactcccggaaaagagcgcctcgctccaaagtgccaccgcccagggactttcacataaatcttttcaggatgcaaccgtggctcagacaacacctcggcgatgtgctcaattttctcccactttag

SEQ ID NO: 112827 - DNA, 1521 bp, synthetic construct
  misc_feature 1..1521: note = Description of Artificial Sequence: Synthetic coding sequence
  source 1..1521: mol_type = other DNA
atggggaccaggtccgccatcgctgctccacgcattctctgcagcagggggttacgttcaggcagcgcacgagcaacaggttccggagtggagcgatctccaagcgctgccatcttttcatttgagatcaacgtctccgttgccataatcaccttcgcatctgagcccaaggtgctcatgtccgttctcaatgacaattctcgcgacatgactgaggtcataagttccctcgaaaacgcgaactataaggaccacgaaaatggcactggaaccaatacatatgctgccctgaacagcgtatatctcatgatgaataatcagatgcgtctgctaggaatggaaacaatggcctggcaggagatcaggcatgccattatattgctgacagacggcaaatcaaacatggggggatctcccaagaccgccgtagaccatattagggaaatactgaacatcaaccagaaacgaaacgattatctggacatctacgctattggcgtaggtaagctggacgtcgactggcgcgagctgaatgagttgggatcaaagaaagacggtgagcggcatgcctttatcctgcaagatactaaggcactgcaccaggtgttcgaacacatgctggacgtgtctaaactcaccgacacaatctgtggtgtgggcaatatgtccgccaacgccagtgaccaggaacggactccttggcacgtgacaatcaagccaaagagccaggagacctgccggggagccctgatctctgaccaatgggtgctcaccgcagcccattgctttcgcgatggcaacgatcactcactctggcgtgtgaacgtaggtgatccaaagtcccagtggggtaaggagtttctcatcgagaaggcagtgatcagtcctggcttcgatgtattcgccaagaagaatcaggggattcttgagttctacggggacgacattgctctgttaaaattagcacagaaagttaaaatgagcacccacgctaggccgatttgtcttccttgcactatggaagcaaacctggcactcagaaggcctcaggggtccacttgtcgcgaccacgaaaacgaactgctgaacaagcagtctgtgcccgcccacttcgtagccctcaatggctctaagctcaatatcaatcttaaaatgggcgtggaatggactagctgcgccgaagtagtgagccaggaaaagacaatgttcccgaatctaactgatgtgagggaggtggtgacagaccagttcctgtgttccggaactcaagaagatgagtcaccttgtaagggggaatccggtggggccgttttcctggagcgtcgttttcgctttttccaggtaggactggtgagctggggcctgtacaacccctgcctcggttcagccgataaaaactcgagaaagcgggctccgcggtccaaagttccacctcccagggattttcatatcaacctctttcgcatgcagccatggttgcggcaacacctgggcgacgtcttaaacttcctgcctctttag

SEQ ID NO: 112828 - DNA, 1521 bp, synthetic construct
  misc_feature 1..1521: note = Description of Artificial Sequence: Synthetic coding sequence
  source 1..1521: mol_type = other DNA
atggggacacgttcagctatcgccgccccaagaattctgtgttccagggggctcagaagtgggtcagcacgggcaaccggaagcggcgtcgaacggtccccatcagccgccattttctcatttgagatcaacgtgtctgtcgcgattattacttttgcatcagaacctaaggtactgatgagcgttttgaatgacaatagcagagatatgactgaagttatcagctccctcgagaatgccaactataaagaccatgagaacggtacagggaccaacacttatgcggcgctcaacagtgtgtacctaatgatgaataatcagatgcggttattgggtatggaaaccatggcatggcaggagatccggcacgcaatcatcctgctgactgatggcaagtccaatatgggcggatcaccgaagaccgcagtggatcatatacgcgagatcttaaacattaatcagaagcgcaatgactatctggatatctacgcaatcggcgtcggcaaactggatgtcgactggcgcgagcttaatgagctggggagcaaaaaggatggggaaagacatgccttcattctccaggataccaaggcgctccatcaggtgtttgaacacatgctggacgtttcaaagctgaccgacaccatatgtggggttgggaatatgtctgccaacgcaagtgaccaggagagaacaccttggcacgttactatcaaaccaaagtcacaagaaacctgtcggggcgcactgattagcgaccagtgggtacttacagccgctcactgcttccgcgatggaaatgaccactctctttggcgggtcaatgttggcgaccccaagtctcaatgggggaaagagttcctgatcgagaaagcagtgatctcccctggcttcgacgtgttcgccaagaagaaccagggcatactggagttctatggagatgatattgccctgctgaagctagcgcagaaagtaaaaatgtccacccacgcccgcccaatctgtctgccctgtacaatggaagcgaatctggccctgcggcggccccaaggcagtacttgtcgggatcatgaaaatgagctcttgaacaaacagagtgtcccggcccacttcgtcgccctgaatggcagcaaactgaacatcaacctgaagatgggggtggagtggaccagttgcgccgaggttgtcagtcaagaaaaaactatgtttcccaacttaactgatgtgagggaagtcgtaaccgatcagttcctgtgctccggcacccaggaggatgagtcaccatgcaagggagagtccggcggagctgtgtttttggaaagacggttccgcttcttccaggttggtctcgtctcttgggggctctacaatccctgtctgggctcggctgacaaaaacagtcgcaagcgggcgccgagatctaaggtccccccgccacgtgattttcatatcaatctgttccgcatgcaaccctggctgcggcagcatctcggggatgtgctgaacttcctgccactgtag

SEQ ID NO: 112829 - DNA, 1521 bp, synthetic construct
  misc_feature 1..1521: note = Description of Artificial Sequence: Synthetic coding sequence
  source 1..1521: mol_type = other DNA
atgggtacccggagtgctatcgcggccccccggattctctgtagtcgaggactccggagtggttctgctagagcgacaggttcaggggtggagcgtagcccctcagccgccattttttcatttgaaatcaatgtttccgtggctattataaccttcgcaagcgagcctaaggtcttgatgtctgtgctgaatgataattctcgagatatgaccgaagtgattagtagccttgagaacgctaactacaaggaccacgagaatggaaccggcaccaacacttacgcagccctcaactccgtttatctgatgatgaacaaccaaatgcggcttcttggtatggaaacgatggcttggcaggagattcgccacgccataatcctgttaactgatggaaagtccaatatggggggaagccccaaaactgccgtggaccatattagggagattttgaacataaaccagaagcggaatgattatctcgacatatatgcaattggcgtgggcaagctggacgttgattggcgggagctgaatgagctcggcagtaaaaaagacggagaaagacatgcttttattcttcaagatactaaggccttgcaccaagtctttgagcatatgcttgacgtgtccaagctgacggacacgatctgcggcgttggaaatatgtccgccaatgcgtccgatcaagagcgcacgccatggcacgtgaccatcaaacccaaatcccaggagacatgccgaggcgccctgattagcgaccagtgggtcctgacggctgcgcattgttttagggatgggaacgaccattctctttggagggttaacgttggggacccaaagagtcaatgggggaaagagttcttaattgagaaggctgtcattagccctggctttgacgtcttcgcgaagaagaatcaagggatcctggaattctatggggatgatattgccttactgaagctggcacagaaggtcaaaatgtctacacacgctagaccgatttgcctgccctgcaccatggaggcaaacctcgccttaaggcgacctcaggggtccacatgccgcgaccacgaaaatgagctcctgaacaaacaatccgtgcccgcgcactttgttgctctcaatggcagtaagctgaatattaacttgaaaatgggggttgaatggacctcctgcgctgaggtagtatctcaggagaagaccatgttccctaatcttacagatgtgcgagaagtggtgactgaccaattcctgtgttctggaacacaggaagacgaatccccgtgtaagggggaatcaggcggtgcggtgttcttagagagacggtttagattcttccaggtcgggctggtgagttgggggttatataacccgtgcctgggttccgccgacaaaaactctcggaagagagcacctagatcaaaggtacccccaccccgtgattttcatatcaacctcttccggatgcagccatggctccggcagcatttgggagatgttcttaacttccttccactgtag

SEQ ID NO: 112830 - DNA, 1134 bp, synthetic construct
  misc_feature 1..1134: note = Description of Artificial Sequence: Synthetic coding sequence
  source 1..1134: mol_type = other DNA
atgacggaggtaattagctcactcgagaacgcaaattataaggatcacgagaacggaacaggtacaaatacttacgctgccctcaactccgtgtacttgatgatgaacaaccagatgcgcttgctcggcatggagacaatggcttggcaagaaattcggcacgctataattctcctaactgacggcaagtcaaacatgggcggaagccccaagaccgccgtcgaccatatcagagagatactaaacataaaccagaagcggaatgattacctggacatttatgccatcggagtcggcaagctggatgtcgattggagggagctgaatgagttaggctctaaaaaggacggcgagaggcacgcctttatccttcaggatactaaggccctgcatcaggtcttcgagcacatgctggatgtatccaagctcacagacactatctgcggcgtgggtaacatgagtgctaacgcttccgatcaggagcgaacaccctggcacgttacaattaaaccaaagagccaggaaacatgcaggggggctctcataagcgaccagtgggttctgacggccgctcactgcttcagggatggcaacgaccactcactgtggagagtgaacgttggcgatcctaaaagccagtgggggaaagaatttcttattgagaaggcagttatttcccccgggtttgacgttttcgccaaaaagaatcaaggcatcctggagttttatggagacgacattgctctcctgaaactggcacagaaggtgaagatgtcgactcacgcaagacctatctgccttccgtgtaccatggaagctaacttagccttgcggcggccacaaggaagcacctgccgcgatcatgaaaatgaactgctgaacaagcaatctgtaccggcccacttcgtggccctgaatggctctaaactgaatattaatctcaaaatgggggtcgaatggacttcctgcgctgaagtggtcagccaggagaagaccatgtttcctaatctgactgacgtcagagaagtggttactgaccagttcctctgcagcggaacccaggaggacgagagcccgtgcaaaggagggagcggcgagctgggatcactccagccgctgccatggctttgttag

SEQ ID NO: 112831 - DNA, 978 bp, synthetic construct
  misc_feature 1..978: note = Description of Artificial Sequence: Synthetic coding sequence
  source 1..978: mol_type = other DNA
atgggaaccaggtctgccatagccgccccacgaatactctgctccagaggactgagatccggcagtgccagggcaaccggatccggagtggaacgttcaccgtccgcggcaaatccgaccctgatgacctccttacgaacgtggccactgccctgggcccttccaagcccaacctgcttgggcccccctatcccccctcggcgccagcggatcttctctttcgagattaacgtgagcgtagccatcatcacctttgcgagcgagcctaaagttctgatgtctgtactaaacgataactcgcgcgatatgacggaggtgatctccagcctggagaatgctaactataaagatcacgagaacgggaccgggaccaacacatacgccgctctgaattccgtttatctgatgatgaataaccagatgaggctactcggcatggagactatggcatggcaggaaattaggcatgccatcatcctcctgaccgacggcaagagcaatatgggtggcagccccaaaaccgcagttgaccatatacgcgaaatcttgaatatcaaccagaaacggaacgactatctggatatatacgcaattggtgtgggtaagttggatgtggactggcgagagctaaacgagctgggtagtaaaaaggatggtgaacggcatgcgttcatcttgcaggatacaaaggctcttcaccaagtgtttgagcacatgctcgatgtatctaaactgacggatactatttgcggtgtggggaatatgagtgcaaatgcaagcgatcaagaaagaactccgtggcacgtaactatcaaacctaagtcccaagagacgtgtcgcggcgcgctcatttccgatcagtgggtgctcactgctgcgcattgcttccgagacggcaatgatcactccctgtggcgggtgaacgttggcgaccccaagagtcagtggggcaaggaattcctgattgaaaaagcttag

SEQ ID NO: 112832 - DNA, 1521 bp, synthetic construct
  misc_feature 1..1521: note = Description of Artificial Sequence: Synthetic coding sequence
  source 1..1521: mol_type = other DNA
atgggaacaagaagcgccatcgcagcccctcgtattctgtgttctcgcgggttgcggtccggttctgctcgcgcgaccgggtctggcgttgaacgcagccccagcgctgcaatcttctcctttgaaattaatgtgtcagttgccatcatcacattcgctagcgagcctaaggtcctaatgtctgtcctgaatgacaatagtagagacatgaccgaggtcattagcagtcttgaaaacgctaattataaagaccacgaaaatgggacaggtactaacacatacgcagcgctgaatagtgtataccttatgatgaacaatcagatgcggcttctgggtatggagaccatggcctggcaggagatccggcatgcgatcatcttgttgaccgatgggaagtccaatatgggggggtccccaaagacagcagtagatcacatccgcgaaattttaaacatcaaccagaagcggaacgactacctggacatttacgcgattggcgtgggcaagctagacgtcgattggcgtgagttaaacgaactcggatctaaaaaggacggcgagcggcatgccttcatcttacaagataccaaggccttacatcaggtgttcgaacatatgttggacgtgtctaaactgacagacacaatctgtggggtgggaaatatgtccgccaacgctagcgaccaggaaagaaccccctggcacgtgactatcaaacctaagtctcaggagacatgccgaggggctctgatatctgaccagtgggttctgacagccgctcactgctttagagatggtaatgaccattctctgtggagagtgaacgtgggagatccaaagagccagtggggaaaagagttcctaatagagaaggcagtgattagcccagggtttgacgttttcgctaagaagaaccagggaatactcgagttttatggagacgatattgctctgcttaagctggcccaaaaggtgaagatgtcgacccacgcccggcctatttgcttaccctgtacaatggaagccaatctcgctctgaggcggccccagggctcaacatgccgcgaccatgagaacgagctgctgaataaacagagcgtccccgcccactttgtcgcgttgaatggctccaagctgaatatcaatttgaagatgggagtggagtggaccagttgcgctgaggtagtatcccaggaaaagacaatgttcccaaatctgaccgatgtgcgcgaggtagttaccgaccaattcctgtgttctggcacccaggaagacgaaagcccatgcaaaggggagagtggtggcgctgtgttcctggagcgccgattcagattctttcaggtggggctggtgagttgggggctgtacaacccttgtctcggctccgcagacaaaaattctcgaaaacgcgccccccgctctaaggtacccccaccccgcgactttcacatcaacctgttccggatgcagccatggctgcggcaacatcttggtgatgtcctaaatttcctaccgttatag

SEQ ID NO: 112833 - DNA, 1521 bp, synthetic construct
  misc_feature 1..1521: note = Description of Artificial Sequence: Synthetic coding sequence
  source 1..1521: mol_type = other DNA
atgggcaccagatctgccattgcggctcctaggattctgtgcagtcggggtctaagatccggcagcgctcgggccaccggttccggagtggagagaagcccctccgctgcaatcttctcctttgagataaacgtgagcgtggcaataattacttttgctagtgaacccaaagtactgatgtcagtcttgaacgataactccagagacatgactgaggtgatcagcagcctggagaacgccaattacaaggatcatgaaaacgggactggcaccaatacctatgcagctctgaattctgtatacctgatgatgaacaatcagatgcgcttgctgggtatggaaacaatggcatggcaggaaatcaggcacgctataatcctcctgacagatgggaaatccaacatgggtgggagccccaagactgctgttgatcacattagagaaatcctgaatataaatcaaaaacggaacgactatttggacatttacgcaattggtgtgggtaagctggacgtcgattggcgcgagttgaacgaactagggagcaaaaaagacggtgaacggcacgcatttatactccaggacacaaaggcacttcaccaggtttttgaacacatgctggacgtgtccaagttgacggataccatttgcggcgtcggaaatatgtctgcaaacgccagcgatcaggaacgaacaccctggcatgtgacgatcaagccgaaaagccaggagacatgcagaggcgccctgattagtgaccagtgggtgctgacagctgcgcactgttttcgggatgggaatgaccatagcctttggagggtgaatgttggcgatcccaagtcccagtggggcaaggaattccttattgaaaaggcggttatctctcccggttttgatgttttcgccaaaaaaaaccagggaatcctggagttctatggagacgacattgccctgctgaaactcgcccagaaggtgaaaatgtccacccacgcccgaccgatttgcctcccgtgcaccatggaagccaatctggctctgcggcgccctcaaggatctacctgtagagaccacgaaaacgaattactgaataaacagtctgtcccagcacattttgtggctcttaacggaagtaaacttaatatcaacctcaagatgggcgtagagtggacctcttgtgcagaggtggtgagtcaggagaaaactatgtttccaaatctgacggacgtgcgcgaagtggtcactgaccagttcctttgttccggaacacaggaggacgagagcccttgtaaaggagagtctggcggagcagtgttcctggaacggagattccgcttcttccaggtgggcctcgtttcctgggggctgtacaatccctgtctcgggtcagcagataagaacagccgtaagagagctccgcgttcaaaggttcctcctcccagggacttccacattaacctctttcggatgcagccctggctgcgacagcatctcggcgatgtcctcaatttcttacccctgtag

SEQ ID NO: 112834 - DNA, 1617 bp, synthetic construct
  misc_feature 1..1617: note = Description of Artificial Sequence: Synthetic coding sequence
  source 1..1617: mol_type = other DNA
atgcgtgctttgtgtatccgggaaacttgcagcagcgagctcggcttcagcagaaactggagtcggcgaaaagccgggcactgtccaaatccagggatctctctgggcgctgttcgtaccggttttcgctttggacatggagataaggtgagatataggtgctcctctaacctcgtgcttaccgggtcgtcagagcgggagtgtcagggaaacggtgtgtggagcggcaccgaaccaatttgccgacaaccgtactcatacgattttccagaggacgttgcccccgcgctgggcacctcattctctcacatgctgggggctacgaatccgacacagaaaaccaaagatcacgaaaatggaaccgggaccaacacatacgccgctctaaactccgtctacctaatgatgaacaaccaaatgcggttactgggtatggaaactatggcttggcaagaaataagacatgctattatcttgcttaccgacggcaaaagtaatatgggggggtcccccaaaaccgcggtggatcacatcagagagatcctgaacatcaatcagaagaggaatgattatctggatatttacgccattggtgtcggcaagctcgacgtggactggagggagctcaacgagctcggttctaagaaagatggcgagaggcatgccttcattcttcaggacaccaaagctctgcaccaagttttcgagcacatgctggatgtgagcaaactgactgacacaatatgcggtgtcggaaacatgagcgctaacgcctctgatcaggagcgaacaccgtggcatgtgaccatcaaaccgaagtcacaggaaacttgtcggggcgcgctaatctccgaccaatgggtactgaccgcggcgcactgcttcagagacggcaacgatcactcactctggagggtgaatgtcggggatccaaaatcacaatggggcaaagagtttttaatcgaaaaagcagtgattagcccagggttcgacgtgttcgcgaaaaagaatcagggaatccttgaattttacggtgatgacattgccctcctcaagctcgctcaaaaggtcaaaatgtcaacccacgcccgtcccatttgtctgccatgcactatggaagctaaccttgccctgaggcggccccaaggatccacctgtagggatcacgaaaatgaattgctcaataagcagtcagtccccgcccacttcgtagctctgaatgggagcaaactgaatatcaacctgaagatgggcgttgaatggactagttgtgctgaggtcgtcagccaggaaaagacgatgtttcctaatctgacagatgttcgcgaggttgtcaccgatcagtttctctgctctggcacgcaggaggacgagtcaccctgtaagggggagtctgggggagcggtcttcttggagcgccggtttcggttcttccaggtggggctggtgtcatggggtctatataacccatgtctgggcagtgctgacaaaaacagccgcaaaagagccccacgctctaaggtccctccaccccgggacttccacatcaatctgttccgcatgcaaccctggctcagacaacacctgggagatgtgcttaattttttgccgttgtag

SEQ ID NO: 112835 - DNA, 1134 bp, synthetic construct
  misc_feature 1..1134: note = Description of Artificial Sequence: Synthetic coding sequence
  source 1..1134: mol_type = other DNA
atgacagaggtgatatcctcactggaaaatgccaactacaaggatcacgaaaatggcactggtaccaatacctatgccgccctgaacagcgtgtatctgatgatgaataatcaaatgcgccttctcggaatggagaccatggcttggcaagagatccggcacgcaatcattctgttgacagacgggaagtcgaatatgggaggatccccgaagaccgctgttgaccatatcagggagatcttgaacattaaccagaagagaaatgattacttggatatttatgccatcggcgttggcaagttggatgtggactggcgcgagctgaacgaactcggaagcaaaaaggacggcgagagacacgcctttattttgcaagacacgaaagccctgcaccaagtgttcgaacatatgctcgatgtgtctaagctgacagatactatctgcggtgttggaaatatgagcgccaacgcgtccgatcaggagcgaaccccgtggcatgtcacaattaagcccaaaagccaagaaacttgtcggggtgccctcattagcgatcagtgggtcctcacagctgcccattgcttccgcgatgggaatgaccattcactttggcgggtcaacgtcggagaccctaagagccagtggggcaaggagttccttatagaaaaagcagtcatttccccgggatttgatgttttcgctaaaaagaatcaggggattctagagttctacggagacgatatcgcactccttaaactggctcagaaggtgaagatgagcactcacgcccgaccaatctgtctgccgtgtacaatggaggccaatctggcactgcgccggccacagggctccacatgtagggatcatgagaatgaactgctcaacaagcagtccgtccccgcacatttcgtcgctctgaacgggtctaagctgaatataaacttgaagatgggagtcgaatggaccagttgcgcagaggtggtcagccaagaaaaaactatgttccccaacctgaccgatgttagagaggtggtgaccgatcaatttctgtgcagtggaactcaagaggatgaatccccctgcaaaggcggatccggagagttgggaagcctgcagccgctcccctggctgtgctag

SEQ ID NO: 112836 - DNA, 1863 bp, synthetic construct
  misc_feature 1..1863: note = Description of Artificial Sequence: Synthetic coding sequence
  source 1..1863: mol_type = other DNA
atggggcccctgatggtgctcttctgtctgctgttcctgtacccagccggacactgtcccaaccccggtatcagcttaggtgcggtgaggactggctttagattcggccatggagataaagtacgctatcgatgcagcagcaacctagtgctgacaggctcttccgaaagagagtgccaggggaacggcgtgtggtcaggaacagaacccatttgccggcagccttatagttacgattttcccgaagacgtggcccctgcgctgggtacctccttttctcatatgctgggcgccaccaaccctacccagaagacaaaagagagcctaggccgaaagatccagatccagaggtctgggcacttaaacttatacctattgcttgattgttcccagagcgtgagcgagaatgacttccttattttcaaggagtcagcctccctcatggtggataggatcttttcctttgagatcaatgtctccgtggctataatcacattcgccagcgagcctaaggttctgatgagcgtcctgaacgacaattctcgggacatgaccgaggttatcagtagtctggagaatgcaaactataaagatcacgaaaacggaaccggcactaatacctacgctgccctcaactccgtgtatctgatgatgaacaaccagatgcgactgctgggaatggagacaatggcttggcaggagatcagacacgccatcattctactaactgacggaaaaagtaacatgggagggtccccaaaaaccgcagttgatcacataagagagatcctcaacatcaatcagaagaggaatgattatctggacatttatgccataggggtggggaagctggatgttgactggagagagcttaacgagttgggatccaagaaggatggtgagagacacgcttttatactccaggacacaaaggcgctgcaccaggtgtttgaacacatgctggatgttagcaaactgaccgataccatttgcggtgtggggaatatgtccgctaatgccagcgatcaagagcgaaccccatggcacgtgactattaaacccaaatcccaagagacgtgtagaggggctcttatctccgatcagtgggtcctgactgcggcccattgcttccgtgacggcaatgaccactctctgtggcgggtgaacgttggggatcctaaatctcagtgggggaaagagtttcttatagaaaaggctgtcattagccctggcttcgatgtgttcgctaaaaagaatcaggggatccttgagttttatggcgatgacattgccctgttaaaactcgctcagaaggtgaaaatgagcacacacgccagaccaatttgtcttccctgcactatggaagcgaacctggcactgcgcagacctcagggatccacctgcagggatcacgagaatgaacttcttaacaagcaatcagttcccgctcacttcgtggccttgaacggtagcaaactcaatatcaatttaaagatgggagttgagtggaccagttgtgctgaggtggtgagtcaggagaaaacaatgttcccaaaccttaccgacgtcagggaggtggtgacggaccagttcctctgttccggaacccaagaggacgagtccccgtgcaagggcgagtccggcggcgccgtatttctcgaacgacgattccggttctttcaggtgggattagtcagctggggcctttataacccctgccttggctccgccgataaaaactccagaaaacgagcacctcggtccaaagtgccgccccctcgggatttccatatcaacctcttccgcatgcagccctggttacggcagcatctgggcgatgtgctgaatttcctccccttgtag

SEQ ID NO: 112837 - DNA, 1863 bp, synthetic construct
  misc_feature 1..1863: note = Description of Artificial Sequence: Synthetic coding sequence
  source 1..1863: mol_type = other DNA
atgggcccccttatggtactgttctgcttactgttcctgtatcccgctggtcactgtcctaaccccggcatttccctgggcgcggtgagaacagggtttaggtttggccatggggacaaggtccggtatcgctgttcatccaatctggtcctaacaggctcatcagaacgggagtgtcaaggcaacggggtctggtcagggaccgagcctatctgtcggcagccttatagctacgactttccagaagatgtggccccagctcttggtaccagcttcagtcacatgcttggggccaccaaccccacccagaagacaaaagaaagtctggggagaaagattcagatccagaggtcagggcacctcaacctttacctcctgctggattgcagccaatccgtgtccgagaatgatttcttgatttttaaggaaagcgcttccctcatggttgaccgtatcttcagttttgaaatcaatgttagcgtagcaatcattacctttgcctctgaaccgaaggtcttgatgagcgtattgaacgacaattcgcgcgacatgacggaggtgatttcatcattagaaaatgcaaactataaagatcacgaaaatgggacagggacaaatacgtatgcagcgttgaattccgtttatctgatgatgaacaaccaaatgcgtctgcttgggatggagacgatggcctggcaggagatccgtcacgccatcatcctgttgacggatggcaagtcaaatatgggcggaagtcctaagacagccgtggatcatatccgggagattcttaacattaaccagaaaaggaacgattatctcgatatttacgcaattggagtgggtaaattagatgtcgattggcgcgaattaaatgagctcggatcaaaaaaagacggtgaacgccatgcgttcatccttcaggatactaaagcgctacaccaggtttttgaacatatgctggacgtttctaaactgacggatacaatttgtggcgtgggcaatatgagtgccaatgcctccgatcaggaacggaccccatggcacgtgaccatcaagcccaaatctcaggaaacctgccgtggagccctaatatccgaccagtgggtcttgaccgctgcccactgcttcagggacgggaacgatcatagcctgtggagggtaaacgtcggggaccccaaatcgcagtggggtaaagagttccttatagagaaagcggtgatttcgccaggctttgacgtatttgcgaaaaagaatcaaggtatcctcgagttttacggcgatgatatcgctttactgaaactggcgcagaaggtgaagatgagcactcacgcgcggccgatatgtttgccgtgcaccatggaagccaacctggcactcaggcggcctcagggctccacctgtcgcgaccacgaaaacgagctgctaaataagcagtccgtacccgcccacttcgtggcactaaatggcagtaaactgaacataaatttgaaaatgggagttgagtggacctcttgcgccgaggtggtcagccaggaaaaaacaatgttccccaaccttaccgatgttagagaggttgtgacagaccagttcttatgctccgggactcaagaagacgagagcccttgtaaaggcgaatccgggggcgccgtattcttggagagaagattcaggttcttccaggtggggttggttagttggggcctttacaacccctgtctcggaagcgctgataaaaactcacgcaagcgcgctccccgttctaaggtaccaccaccaagagattttcacattaatttatttaggatgcagccatggttgcgccaacacctgggggacgttctcaacttcctccctttgtag

SEQ ID NO: 112838 - DNA, 978 bp, synthetic construct
  misc_feature 1..978: note = Description of Artificial Sequence: Synthetic coding sequence
  source 1..978: mol_type = other DNA
atggggactcgcagtgcaattgctgcacctaggattctgtgctccaggggcctgcgctctgggtccgcccgcgccactggctccggtgtcgagcgatctcccagcgcggccaacccgaccttaatgaccagcttgaggacatggcccttaccttgggctctgcccagtcctacctgcctgggaccccccatcccccccagacgccaaagaattttctccttcgaaataaatgtgtcagttgcaattatcacattcgcctcagaacccaaggttctaatgtctgtgctgaatgacaacagtcgcgacatgaccgaagtgatttcctcacttgagaatgcaaactataaggaccatgagaacggcactggtactaacacctatgctgctttgaactcagtttacctgatgatgaataaccagatgcgcctgttaggcatggagaccatggcctggcaagaaatcagacacgcaattattcttctcaccgatggcaagtccaatatgggcggcagtcccaaaacagcggtggaccatattagggagatcctcaacattaaccagaagagaaacgactacttggatatctacgccattggtgtaggcaaactggacgtggattggcgcgaactgaacgagctcggaagcaaaaaagatggcgagcgacacgccttcatcctgcaggacactaaggctctgcatcaggtgtttgagcacatgttagatgtatccaagctgacagacacaatttgtggagtgggcaatatgtccgctaatgcatccgatcaggaacggacaccctggcatgttacaataaagcccaagtcacaggagacatgtcgcggcgcactgattagcgaccaatgggtgttaacggccgctcattgctttagagacggcaatgatcactctctgtggcgggtgaacgttggggaccccaaaagccagtggggaaaggagttcctgatcgagaaagcgtag

SEQ ID NO: 112839 - DNA, 978 bp, synthetic construct
  misc_feature 1..978: note = Description of Artificial Sequence: Synthetic coding sequence
  source 1..978: mol_type = other DNA
atgggcacaaggtccgccatcgccgctccacgcatcctgtgtagccgggggctaagaagcggctccgcccgagctaccgggtccggggtcgagcgaagtcctagcgccgctaaccccaccctcatgacctcactcaggacctggccactgccctgggctctgcctagcccaacttgcctcgggccacctatacctccaagacgccaacggatcttctcttttgagatcaatgtatccgtggcaatcattacattcgccagtgaacccaaagtgttgatgtctgtgctaaacgacaacagccgcgacatgaccgaggtgatctctagtttggaaaacgccaattataaagatcacgaaaacggcacaggaactaatacatatgccgccctgaattctgtgtatctcatgatgaacaatcaaatgcgtctcttaggcatggagacaatggcctggcaggagataagacacgccataattctgctgacagacggaaagtcaaacatgggtgggagcccaaaaacggctgttgatcacatccgggagatcctgaatattaaccagaaaagaaatgattatctggacatttacgctataggcgtaggcaagctcgatgtagactggcgggaactgaatgagctcggatcaaagaaagatggcgaacgacacgctttcatattgcaggatacaaaggccctccaccaggtctttgagcacatgctcgacgtatccaaactcacagatacaatatgcggtgtcggcaatatgtccgcaaatgcttccgaccaggaaaggactccttggcatgtaaccattaagcccaagtctcaggagacttgccgcggcgcacttattagtgaccagtgggtcctcacagccgcacattgtttccgagacgggaatgaccatagcctgtggagggtcaacgtaggtgaccccaagagccagtggggcaaggaattcttgattgaaaaggcttag

SEQ ID NO: 112840 - DNA, 1521 bp, synthetic construct
  misc_feature 1..1521: note = Description of Artificial Sequence: Synthetic coding sequence
  source 1..1521: mol_type = other DNA
atgggaactagatcggccatagctgctcctagaattctgtgcagcagaggactcaggagcgggagcgcacgagccactgggtccggtgttgaacgatccccgtctgccgccatttttagtttcgaaatcaacgtgagcgttgcaatcatcacattcgcctccgagcctaaggtgcttatgagcgtgcttaacgataattcccgcgacatgaccgaagtaattagctccctggaaaatgctaactataaggaccatgaaaacggcacaggaacaaacacttacgcggcgctaaattctgtttatctcatgatgaataatcagatgcgactcctgggcatggagaccatggcatggcaggagattaggcatgcaatcatactactcacagacggtaagtcaaatatggggggcagcccgaagactgcggttgatcatattagggagattctgaatataaatcagaaacgtaatgactatttggacatttatgccatcggcgttggcaagctggacgtcgattggcgagaactgaatgagctcggcagcaaaaaagacggagagcggcatgcattcatcctccaggataccaaggctctgcatcaggtctttgagcacatgctggacgtatctaaactaaccgacactatatgtggagtgggtaacatgtctgctaatgcctcggaccaggaaagaacaccatggcacgtgacaattaagcctaagtcacaggagacatgtcggggtgccctgatcagcgaccagtgggtgttgaccgctgcacattgttttcgggatggaaatgaccattccctgtggcgggtgaatgtcggagatccaaagagtcaatggggtaaagagttcctgatcgaaaaagctgttatttcgcctggtttcgacgtgttcgcgaaaaagaatcagggcattttggaattctacggagatgacatagccctactgaaattagcgcagaaggtgaagatgagtacccatgctcggcccatctgtctgccctgcacaatggaggcgaatctcgccctgaggaggccccaaggctcaacgtgcagggaccatgagaacgaactcctcaataagcagtccgtgcccgcccatttcgtcgcccttaacgggagtaaactgaacattaacttaaagatgggggttgaatggacatcttgtgctgaagtagtgtctcaggagaagactatgttccctaacttgacagatgtccgcgaagtcgtgaccgatcaattcttatgttccgggacacaggaggacgaatcaccctgcaagggcgaatctgggggagccgtattcttggagagaagatttcggttcttccaggtaggcttggtctcctggggcttatacaacccttgcctgggtagtgccgacaagaactcccgtaagagagccccacgctccaaagtcccgccacctcgcgatttccacattaatcttttccggatgcagccatggttgagacagcacctgggagacgtgcttaactttttgcccctgtag

SEQ ID NO: 112841 - DNA, 978 bp, synthetic construct
  misc_feature 1..978: note = Description of Artificial Sequence: Synthetic coding sequence
  source 1..978: mol_type = other DNA
atggggactagaagtgccatcgccgccccccgcattctgtgcagcagagggcttagaagcggctctgccagggctactggcagcggcgtggagcggagcccttccgctgctaacccgacgttaatgacctcattgcggacgtggcctctgccctgggcactccctagtcccacgtgcctgggccctccaattcccccaaggaggcagaggatattttcattcgagatcaatgtctcagttgccataattacgttcgcgtctgagccaaaagtgctcatgtctgtcttgaacgacaacagccgagacatgacagaagtcatttcgagtcttgaaaacgccaactacaaggatcacgaaaacgggactggcacaaatacctacgcggcattgaattcagtctacttaatgatgaacaatcagatgcgattgctgggaatggaaacgatggcatggcaggagatacggcatgctattattctcctgaccgacggcaagagcaacatgggagggagccccaagacagccgtggaccatatcagagagatcctgaacatcaaccagaaaaggaatgattacctagatatctacgccatcggagtgggcaagttggatgtggactggcgggagctgaacgaactggggagtaagaaggacggggaaaggcacgctttcatactgcaagacaccaaagcactacaccaggtgtttgagcacatgctggacgtgagcaagctgactgacacaatttgcggcgtgggcaacatgagcgccaacgctagcgaccaggagcgaacgccttggcatgttaccattaagccaaaatcccaggaaacctgtagaggcgctctgatatctgaccagtgggtgctaacagctgcacactgtttcagggacgggaatgatcacagcctgtggcgcgtaaatgtcggcgacccaaagtcacaatggggcaaggagttcctgatcgagaaagcctag

SEQ ID NO: 112842 - DNA, 1863 bp, synthetic construct
  misc_feature 1..1863: note = Description of Artificial Sequence: Synthetic coding sequence
  source 1..1863: mol_type = other DNA
atggggccactgatggttctcttttgcctgctcttcttgtatccagctggccactgcccgaacccaggcatttctctgggggctgtgcgcaccggctttagattcgggcacggggataaggtgagatatcgttgcagcagcaatcttgtgcttaccggaagttccgagcgggaatgccagggtaatggggtttggtccggcacagagccaatatgcagacaaccatacagctacgattttcccgaagatgtggctcccgcccttggtacatcattcagtcacatgttgggcgccacaaatccgacacagaaaactaaggagtcactcggacggaagatccaaattcaacgatccggccacctgaacttgtacctcctgcttgattgcagccagagcgtctccgaaaacgattttctcatctttaaagagagcgctagtcttatggttgatcgcatcttctcattcgagattaacgtttcagtggcgatcattacatttgcctccgaacctaaagtactgatgtccgtgctcaatgacaactcgagggacatgacagaagttatctctagcctggagaatgcgaattacaaagatcatgaaaatggtactgggaccaatacctacgctgccctgaatagtgtgtacctgatgatgaacaatcagatgcgactgcttggaatggagaccatggcttggcaagagatccggcatgctattatcttgttaactgatggaaagtcaaacatgggtggcagccccaaaaccgccgtagaccacattcgggagatcctcaacatcaaccagaagcgtaacgactacctggacatttacgcaatcggtgtcgggaaactggatgtggattggcgagagttgaatgagcttggctctaagaaagatggcgaacggcatgccttcatcctgcaggacaccaaagcactgcaccaggtttttgagcatatgctcgacgtgtccaagcttaccgacacgatatgcggagtgggtaacatgtctgctaatgcctccgatcaagagcgaaccccttggcatgtcacaattaaaccgaagagccaggagacctgccggggagcactgattagcgatcagtgggtcctaaccgccgctcattgcttccgagacggtaatgaccactcactctggagggtcaacgttggagatccgaagtctcaatggggcaaagaatttctcatagagaaggcggtaatttcccccgggttcgatgtgttcgcgaagaagaatcaggggatcctggagttttacggagacgacattgcccttcttaaacttgcacagaaagtgaaaatgagtacacatgcccggcccatttgcctgccatgcactatggaggcaaatctggctctgagaagacctcagggatctacctgccgcgatcacgaaaatgagctgctgaacaagcagtccgtgcctgcacatttcgtcgcactcaatggcagcaagttgaatattaacctgaagatgggcgtggaatggacttcttgcgcagaagttgtctctcaagaaaagaccatgttccccaatttgacagacgttcgcgaggtggttactgaccagtttttgtgcagcggaactcaggaggacgaatcaccatgtaagggagagtctgggggcgctgtgttcctagagcgcagattccgattttttcaggtcggtttggtatcatggggcctgtataacccctgtctggggagtgctgataagaactctcgcaagcgagctccccgcagtaaggtgcctccaccgcgcgacttccacatcaaccttttcagaatgcagccctggctaagacagcacctaggcgacgtgttgaattttctccccctctag

SEQ ID NO: 112843 - DNA, 1134 bp, synthetic construct
  misc_feature 1..1134: note = Description of Artificial Sequence: Synthetic coding sequence
  source 1..1134: mol_type = other DNA
atgaccgaggtgatctccagcctggagaacgctaactataaggaccacgagaatggaacaggaaccaatacctacgccgcactgaatagcgtgtacctaatgatgaacaatcaaatgcggctcttgggtatggagactatggcgtggcaggaaatccgacacgccatcatcctgctgacagacgggaaaagtaacatgggcggctcacctaagacagccgttgaccacatcagagagatccttaacattaaccagaagaggaacgattatcttgacatctatgccataggcgttggcaagctcgatgttgactggcgggagctgaacgaactcggatcaaaaaaggacggggaacggcacgcgttcatactgcaggatactaaggcgctccaccaggttttcgagcatatgctggacgtgagcaagttaacagacaccatctgtggagtggggaacatgtccgctaatgcgagcgaccaagagcgaaccccctggcacgtgacaatcaaacccaagagccaagagacatgcagaggagctctcattagcgatcagtgggttctgacagcggcacactgtttccgcgacggtaatgaccactccctttggcgggttaatgtgggagatcccaaaagtcagtgggggaaggaatttctcattgaaaaggctgtgattagtcctgggttcgacgtgtttgctaagaagaatcagggtatcttggaattctacggagatgacatcgcactcctgaagctggcccagaaagttaagatgtctacacacgctcgacctatatgcctgccatgtacaatggaagcgaatctggctctcagacgcccacaggggagcacctgccgagatcacgagaatgagctcttaaacaagcaatccgttcctgctcatttcgtggctttaaacgggtccaaactgaacattaatctgaagatgggcgtggaatggactagctgtgctgaggttgtgagccaggagaagaccatgttcccaaatcttacagacgtgagggaagtcgtgacggaccaatttttgtgctccggcacccaggaagatgagtccccttgcaaaggcggtagcggcgagctcggctcgctacagcccctgccctggctatgttag

SEQ ID NO: 112844 - DNA, 1134 bp, synthetic construct
  misc_feature 1..1134: note = Description of Artificial Sequence: Synthetic coding sequence
  source 1..1134: mol_type = other DNA
atgactgaagttatctcctctcttgaaaacgccaattacaaagaccacgaaaacggaacaggcacaaacacctacgccgctctcaactctgtgtacttaatgatgaataatcaaatgagactgcttggtatggagactatggcttggcaagaaataagacacgcaattattctcttgactgacggtaagagcaacatgggtggctcacccaagactgctgtggaccacattcgtgagattctgaacatcaaccagaaaaggaacgattatctggacatttacgccattggcgttggcaaactggatgtggattggagagagctcaatgagcttggatcgaaaaaagacggagagcgacacgccttcatcctccaggataccaaagcgctgcatcaggtgtttgaacatatgctggatgtttccaagctgaccgacacgatctgtggggtcggcaatatgtccgcaaacgccagcgaccaggaaaggacaccctggcatgtgacaattaaaccaaagtctcaagagacctgtagaggcgccctgattagcgaccagtgggtgctcaccgccgctcactgcttccgcgatgggaacgatcatagtctgtggagagtgaatgtcggggaccctaagagccagtggggaaaagagtttcttatcgagaaggctgtgatctcacctgggtttgatgtgttcgcaaaaaagaatcaaggtattctcgaattctacggagacgatatcgctttgctcaagctggcccagaaagttaagatgagtacccatgccagacctatctgtttgccctgcactatggaggcaaacctagctctgagacgcccacagggctctacttgccgcgaccatgaaaatgagttgctaaacaagcagagtgtaccagcccacttcgtggccttgaacggcagcaagttgaatattaatcttaagatgggcgttgagtggacttcttgcgccgaggtcgtgagtcaagaaaagacaatgttcccgaacctgactgatgttcgcgaggtggttaccgaccaattcctgtgctcaggaacacaggaagatgagagcccctgcaagggggggagcggcgagcttggcagcctccagcctcttccatggctgtgttag

SEQ ID NO: 112845 - DNA, 978 bp, synthetic construct
  misc_feature 1..978: note = Description of Artificial Sequence: Synthetic coding sequence
  source 1..978: mol_type = other DNA
atggggactcgaagcgcgatcgctgctcccaggatattatgttctcggggactgagatcgggctctgcaagagcaaccggctcaggagtggagcgcagtccatctgcagctaacccgacgttgatgacaagcctccggacgtggcccctgccatgggccctgccttcccccacctgtctaggcccacccatcccccctaggagacaaaggattttctcattcgagatcaatgtctctgtggccattattacgtttgccagcgagcccaaggtgctaatgtccgtgctcaatgataactccagggacatgaccgaggtgatatcgtctctagagaatgccaactacaaggaccacgaaaacggtaccggcaccaacacttacgcagctctgaactcagtgtacctgatgatgaacaatcagatgagattactgggaatggagaccatggcttggcaggaaatccgacacgcaattattttgctgactgacgggaagtccaacatggggggatcacctaagaccgccgtagaccacatacgggaaattcttaatattaatcaaaaacgaaatgactatctcgacatctacgcaatcggggtcggcaagctggacgtcgattggcgtgagttgaacgaactagggtctaagaaagatggcgagaggcacgccttcatcctgcaggacacgaaagctctacaccaggtgttcgaacacatgttagatgtttcaaagctgactgacacaatttgcggcgtcggaaatatgagtgctaatgcctctgaccaggagcggacaccatggcacgtgacaataaagccaaagtcgcaggagacatgtaggggagctctcattagtgaccaatgggttcttacagctgcacactgcttcagggacggaaatgaccacagcctgtggagggttaacgttggggacccgaagtcacagtggggcaaagagttcctgattgaaaaggcttag

SEQ ID NO: 112846 - DNA, 1134 bp, synthetic construct
  misc_feature 1..1134: note = Description of Artificial Sequence: Synthetic coding sequence
  source 1..1134: mol_type = other DNA
atgaccgaagtgatttcttccctcgaaaatgccaattacaaggaccacgagaacggaactgggacaaatacttatgccgccctgaattccgtttacctgatgatgaacaatcagatgaggctgctggggatggagaccatggcctggcaagaaatcagacatgctatcatcctgctgacagacggaaaatccaacatgggaggaagccccaaaaccgccgtcgatcacattagagagatactgaacatcaaccaaaagaggaacgactacttggacatctacgccatcggcgtggggaaattggatgtcgactggcgcgagctaaatgagctcggctccaaaaaagatggagagaggcatgcctttattcttcaagacaccaaggcactccaccaggtctttgagcacatgctggatgtaagtaaattaacagacactatctgcggggtcggaaacatgagcgccaacgcaagcgatcaagaacgcactccctggcatgtgaccattaagccaaaatctcaagaaacctgtaggggcgctctgatctcagatcaatgggtcctgacagcagctcactgtttccgggacgggaatgatcatagcctttggcgtgtgaatgtcggagaccccaaatctcagtggggtaaggaatttctgattgaaaaggctgtgatcagccccggatttgatgtttttgcaaagaagaatcagggaattcttgaattctacggcgatgacattgccctcctaaagttggcccagaaggtgaagatgagcacccatgcaaggcccatttgccttccctgtaccatggaggcaaacctggccttgcgacggcctcaggggtctacctgtcgggatcacgaaaatgagttactgaacaagcaaagtgtacctgcccactttgtggccctcaatggatccaagttaaatattaacctcaagatgggagtggagtggacatcctgtgcagaggtggtttcgcaggagaagaccatgtttcccaatctgaccgacgtcagggaggtcgttaccgaccagttcctgtgctccgggacacaggaggatgagtcgccctgcaagggcggctccggtgagctcggctccctgcagcctctgccgtggctctgctag

SEQ ID NO: 112847 - DNA, 1617 bp, synthetic construct
  misc_feature 1..1617: note = Description of Artificial Sequence: Synthetic coding sequence
  source 1..1617: mol_type = other DNA
atgagagccctgtgtatccgtgagacttgttcttcggagttggggttttcccggaattggtcccggcgaaaggcgggccattgtccaaaccctggcatctcccttggagcggtacgtacgggatttagattcggccacggcgacaaggtgcgctacagatgttccagtaacctagttctcactggatccagtgagcgcgagtgccagggcaacggcgtctggtcagggaccgaaccgatttgccgccagccatattcgtacgacttcccggaagatgtagcaccggctctaggcacgagtttcagtcacatgttgggagcaacaaatcccacccagaaaaccaaggaccatgagaacgggactggcactaatacctatgccgcattaaacagcgtgtacctcatgatgaataatcagatgcgattactgggaatggagaccatggcttggcaggaaattaggcatgcaatcattctgttgactgatggaaagagcaacatgggcgggtcccctaaaaccgcagtggatcacattcgtgagatcttgaatattaatcagaaaaggaatgactatctggacatatacgctattggcgtgggaaagctcgacgtggattggcgcgagctcaatgagttaggatccaaaaaagacggggagcgacatgcattcatcctgcaggatacgaaagcgctccatcaggtcttcgagcatatgctggacgtcagcaagctcaccgataccatttgtggcgtcggcaatatgtccgcaaatgccagtgaccaggagcggacaccttggcatgtgacgattaagccaaagtcgcaggagacctgtagaggagcccttatctccgaccagtgggtgctcactgctgctcactgtttcagagatggtaacgaccattccctgtggagagtcaatgttggcgatcctaaaagccagtgggggaaagagttcttaattgagaaggctgtgatctcaccaggctttgacgtcttcgccaagaagaatcagggcatattggaattttatggagatgacattgccctactgaagttggctcagaaagtcaagatgtccacgcatgctagacctatttgtttaccctgtacgatggaagcgaaccttgccctcaggcggcctcagggaagcacctgcagggaccatgagaacgagcttctcaataaacagagcgtgcctgcgcacttcgtggctctgaacgggtctaagctgaatataaatttaaagatgggcgtggaatggacgagctgcgccgaagtcgtaagccaggaaaaaacaatgtttcccaatttaacggatgtcagggaagtcgtgactgaccagtttctttgctcaggaacacaggaagatgaatccccatgcaaaggtgagtctggcggggccgtgtttctcgagcgaagatttcgattctttcaagtggggctggtgtcttggggattatacaacccctgcctgggctcggctgataaaaatagtcggaagcgagccccgagaagcaaagtccccccaccccgggactttcacattaatctcttccgaatgcagccgtggctccggcagcacttgggtgacgttctcaactttctacctctgtag

SEQ ID NO: 112848 - DNA, 1863 bp, synthetic construct
  misc_feature 1..1863: note = Description of Artificial Sequence: Synthetic coding sequence
  source 1..1863: mol_type = other DNA
atgggtcccctcatggtgctgttctgcctcttgttcttgtaccctgcgggccactgtcccaaccctggcataagcctcggggctgtgagaacaggttttaggttcggccatggcgacaaggtgaggtaccggtgctcctctaatcttgtgctcaccggaagcagtgaaagggaatgccagggcaacggagtgtggtcaggaactgagcccatctgtcgccagccctattcctacgatttccccgaggatgtagccccagcactgggtacctctttttcacacatgttgggtgccactaatccgacccaaaagaccaaagagagtcttggacggaagatacagatacagcgaagtggtcatctgaacctgtacctgctgttggactgcagccagtcagttagtgaaaacgatttcctgatctttaaagaatcagcatctctaatggtggatcgcatattctcgtttgagattaatgtcagcgtcgctatcatcacttttgcctctgaacccaaggtgctgatgtcagtcctcaatgataattctagggatatgacagaagtgatttcttctcttgaaaacgcaaactacaaggatcacgagaatgggaccggaacaaatacttatgcagcgctcaactcagtgtatttgatgatgaacaaccaaatgaggctgctggggatggaaaccatggcttggcaggagatccgccatgcgatcatactcctcaccgacgggaagtccaatatggggggctcgcccaagacagcagtcgaccacatacgtgagattctgaacatcaatcagaaacgcaatgactatctggatatctatgcaataggtgtgggtaagctggatgtcgactggagggaattgaatgagctgggctctaaaaaggatggtgaacggcatgcttttatcctccaagatactaaagcgctgcatcaagtgttcgaacacatgctggatgtatccaagttgacagataccatatgcggagtgggaaatatgagtgcgaacgcttccgatcaggagcgcaccccgtggcacgtgactataaaacctaaatcccaagagacctgcaggggcgcccttatcagcgatcagtgggtccttactgcggcccactgttttcgagatggcaacgatcattcgctgtggcgagtaaatgtgggtgaccccaaatcccagtgggggaaggaatttctgattgagaaggcggttatcagtccaggctttgatgtttttgctaaaaagaaccaggggatactggaattctatggcgacgatattgctctgctcaaactcgctcaaaaggttaagatgtccactcatgcccgaccaatctgtctgccttgtacaatggaagcgaatctggctcttcgacgccctcagggctctacctgcagagatcacgaaaatgagttactaaataagcagtccgttcctgctcactttgtcgcgctgaatggtagcaagctgaacatcaatttgaaaatgggggtcgagtggacctcttgtgctgaggtggtctcacaggagaagacaatgttcccaaatttgacggacgtgagagaagtggttactgatcagtttctgtgcagcgggacccaggaggatgagagcccttgcaaaggtgagtccggtggagcggtatttctagagaggcgtttcaggttttttcaagtgggcctggtgtcttggggcctgtacaacccttgtttgggcagcgctgacaaaaacagccgcaaaagggcaccacgatccaaggtgccacccccaagggactttcatatcaatctgttccggatgcagccctggcttcgacagcacctgggcgatgtactgaattttctccccctatag

SEQ ID NO: 112849 - DNA, 1863 bp, synthetic construct
  misc_feature 1..1863: note = Description of Artificial Sequence: Synthetic coding sequence
  source 1..1863: mol_type = other DNA
atgggtcccctcatggtgttgttttgcttgttattcctgtatcctgcaggccactgccccaatccggggattagcctgggcgctgttcgaaccggattccgcttcggtcacggcgataaagtaagatatcgatgctcatctaatctagtcttgactggcagttccgagcgagagtgccagggtaacggcgtgtggagtggcacagaacctatttgccgccagccttatagttatgatttccccgaggatgtagctccagcacttggaacttccttcagtcatatgctaggtgctacaaacccgacacagaagaccaaagagagtctcggacgaaaaatccaaattcagagatccgggcatttaaacctttatttactactggactgtagtcagtccgtgtctgagaatgacttcttaatatttaaagagagtgcatccctgatggtagatcgcatcttctcctttgagattaacgtgtccgtagccatcatcacgttcgcctctgagccaaaggtgttgatgtcagttctgaatgacaatagtcgcgacatgactgaagttatttcatccttagagaacgcaaactacaaagaccacgagaacgggaccggaacaaacacctatgcagccctcaacagcgtctacctgatgatgaacaaccagatgagactgttgggcatggagacaatggcctggcaggagatccgacatgctatcatacttctgaccgacggaaagtcaaatatggggggaagtcccaagaccgctgttgatcatattagggaaattctgaacatcaaccagaagcgtaatgattatttagatatttacgcgattggggtgggtaagttggacgtcgactggcgggaattgaacgaattgggttccaagaaggacggtgagaggcatgcgttcatacttcaagatacaaaggctttgcatcaggtgttcgaacatatgttggacgtgtctaagttaacagatacaatctgcggagtcggaaacatgtccgctaacgccagcgatcaggagaggacgccatggcatgtgaccataaagccaaagagtcaggaaacctgtcggggcgcgctaatatccgaccagtgggtactgactgctgctcattgcttccgggatgggaatgatcactccctttggcgggtgaatgtgggagacccaaagtctcagtggggcaaggagttcctcatcgagaaggcggtgatttctccaggcttcgacgtttttgctaaaaaaaatcagggaatcctggagttctatggcgacgatattgcgcttctgaaactcgcccagaaagtcaaaatgtctacccacgctagacccatttgtttaccatgtactatggaggctaatctggctcttcgtcgtccacagggatcgacgtgtcgagaccacgaaaacgaactcttgaacaaacaatcagtgccagcgcacttcgtggccctcaacgggagtaagctgaatatcaatctgaaaatgggcgtggagtggacctcttgtgcagaagtcgtcagccaagagaaaacaatgttccctaacctcacggatgtgcgggaagtggtgactgatcaattcctgtgctcaggcacacaggaggacgagagcccttgtaagggggagagtggcggcgccgtgtttctggagcggaggttcagatttttccaggtagggcttgtatcctgggggctttataatccatgtcttggttccgcagataagaattcccgcaagagggctccacggagcaaggtgcctcctcccagagactttcatattaacctgtttagaatgcaaccctggttgcggcagcacctgggggacgtgctcaacttcctccccctctag

SEQ ID NO: 112850 - DNA, 1863 bp, synthetic construct
  misc_feature 1..1863: note = Description of Artificial Sequence: Synthetic coding sequence
  source 1..1863: mol_type = other DNA
atgggtccattaatggtactgttctgccttcttttcttgtaccctgccggccactgtccaaacccggggatatcccttggggcagttcgcaccggctttagatttggccacggagataaagtaagataccggtgcagctctaatttggtccttaccggatcctctgagagggaatgccagggcaacggcgtttggtccgggacggaacctatctgtaggcagccgtacagctacgacttccctgaggacgtggcaccagcgctcggtacttctttctcccatatgctgggggcaactaaccccacccaaaaaactaaggaatccctgggaagaaaaatacagattcagcggtctggtcacttgaacctttatttactgcttgactgcagtcagagcgtgtcagaaaatgactttttgatttttaaagagagcgcctctctgatggttgaccggatttttagctttgagatcaatgtttctgtggccatcatcactttcgctagcgagcctaaggtgctcatgagcgtgctcaacgacaatagtagagatatgacagaagtgatttcctctctggaaaacgccaattataaagatcatgaaaatgggaccggcactaacacatatgccgctcttaactcagtctatctgatgatgaacaaccagatgcgcttgcttgggatggaaactatggcttggcaggagatccgccatgcaattattctgcttacagatggtaaatccaacatggggggcagtcccaaaaccgccgtagatcacatcagggaaattctgaatattaatcagaagcgtaacgattacttagacatttacgcaatcggggtcggaaaactggatgtggactggagggaactgaacgagctggggtcaaaaaaagacggagaacgacacgctttcattcttcaggataccaaggcacttcatcaagttttcgaacatatgttagatgtgtctaagcttacagatacaatctgcggagtgggtaacatgtccgctaatgcttctgaccaggaaaggacgccgtggcacgtaacaatcaaaccaaagtcacaggagacctgtcggggagctctgattagcgaccagtgggtgctgacagccgcacactgtttcagagacggcaatgaccatagtctttggagggtcaacgttggagatcctaagagtcaatggggcaaagagtttctcatagaaaaggctgtgattagccccgggttcgacgtcttcgcaaaaaaaaaccagggaatcttagaattttatggtgatgatatagccctgctcaagttagcccagaaggttaagatgtccacacacgcccggccaatttgcctgccttgcaccatggaggcaaaccttgccctgcgacgcccacagggcagtacctgtcgcgaccatgaaaatgagttgctgaacaagcagtccgtgccagcccacttcgtagcgcttaacggaagcaagttaaacattaatctcaagatgggcgttgaatggacctcctgtgctgaggtagttagccaagagaaaactatgttccctaatcttactgatgtaagggaggttgttactgatcaatttttgtgttccggaacccaagaggatgaatcaccctgcaagggcgagtcaggaggagccgtttttctggaacgccgttttaggttttttcaggtcgggctcgtatcctggggactgtacaacccatgccttggcagcgccgataaaaactcccggaagagagctccccgcagtaaggtcccacctccccgagactttcacatcaacctgtttagaatgcagccgtggttgcgtcaacacctgggtgacgtgttgaatttcctgcccctctag

SEQ ID NO: 112851 - DNA, 978 bp, synthetic construct
  misc_feature 1..978: note = Description of Artificial Sequence: Synthetic coding sequence
  source 1..978: mol_type = other DNA
atgggcacacggagtgccattgccgctccccgaatactgtgttcacgagggcttagaagcggaagtgcgcgggctacagggtccggggtcgagagatcaccatcggctgccaatccaactttgatgacaagtctccgcacgtggcccctcccatgggcattgccctcacctacctgcctgggacctcccattccgccacgccgccaacgcattttttccttcgaaattaatgttagcgtggctatcatcacctttgccagtgagcccaaggtgctgatgtcagtcttgaatgataactcacgagacatgaccgaggtcattagctctttagaaaacgcaaattacaaagatcatgagaacggcaccggtacaaacacctacgcggcactcaacagcgtctacctcatgatgaacaatcagatgcgcctactgggtatggagactatggcatggcaagaaatacgccacgcaatcattcttctgaccgatggaaagtccaacatggggggctctcctaaaactgccgttgaccacatacgcgagatccttaacattaatcagaaacggaacgactatctcgacatttacgcgatcggtgtgggaaaactggatgtggattggcgggagttgaacgaactcggctcaaagaaggacggtgagaggcacgcatttatactgcaggacaccaaggccctgcaccaggtcttcgaacatatgctcgatgtatccaagctgactgacacgatctgcggcgttggaaatatgtccgctaatgctagtgaccaagagagaacaccgtggcacgttactataaagcctaagagtcaagaaacttgtaggggcgccttaatctcagaccagtgggtcctcaccgctgcacattgttttcgtgacggcaatgaccactctttgtggcgggtgaacgtcggggatcctaagtctcagtggggtaaggaattcctgatagagaaggcttag

SEQ ID NO: 112852 - DNA, 1134 bp, synthetic construct
  misc_feature 1..1134: note = Description of Artificial Sequence: Synthetic coding sequence
  source 1..1134: mol_type = other DNA
atgaccgaagtaatttccagcctggagaacgctaattataaggaccatgaaaacgggacaggaacgaacacctacgccgcacttaactccgtgtatctgatgatgaacaaccaaatgcgattactggggatggagacaatggcttggcaggagatcagacacgcaatcattttgcttaccgacggaaaaagcaacatggggggatcaccaaaaacagccgttgaccacatccgggaaatcctgaacattaaccagaaaagaaacgactacctggacatctacgctattggggtgggcaaactggacgttgattggcgggaacttaacgaactcgggagcaagaaggacggagaaagacacgcatttatcctccaagacaccaaagctctccaccaggtctttgaacatatgctcgacgtgtctaaattaacagataccatctgtggagtgggcaacatgagtgctaatgccagtgaccaagagaggactccctggcacgtaacaatcaaaccaaagtctcaggagacatgtaggggagctctaatatctgaccagtgggtcttgacggcagcacattgtttccgtgatgggaatgaccactcattgtggagagtcaatgttggcgatcccaaatcacagtgggggaaggaattcctcattgagaaagctgtgatcagccccggtttcgacgtgttcgctaagaagaaccagggaatcctggaattttatggtgatgacatcgccttgttgaagctggcccagaaggtaaaaatgagcactcatgcccgtcctatttgtcttccttgtaccatggaggccaatctggcgctgagaagaccccaggggagcacttgtcgtgatcatgaaaatgagttgctgaataaacagagcgtgcctgctcattttgtggctttgaatggctctaagctcaatataaaccttaagatgggagtggaatggacctcttgcgccgaggtggtgagccaagagaagaccatgttccctaatctcacagatgtgagggaggtggtgactgatcagtttttatgttctggaacgcaggaagatgagtcgccatgcaagggtggctccggtgagctggggtcactgcagcctctgccttggctgtgttag

SEQ ID NO: 112853 - DNA, 1617 bp, synthetic construct
  misc_feature 1..1617: note = Description of Artificial Sequence: Synthetic coding sequence
  source 1..1617: mol_type = other DNA
atgagagctctatgcatccgggagacctgctcatccgaactgggtttctctaggaactggtcacggcggaaggctggacactgtcccaacccgggcattagcctgggggcagtccggacaggtttccgattcgggcatggcgacaaggtccgttacaggtgctcgagcaacctggtgctgactggctcttcggagagggagtgccaaggaaacggtgtgtggtctgggactgaaccgatttgcagacaaccgtactcttacgacttcccagaagatgtcgcaccggctcttgggacttcattttcccacatgctgggggcaaccaatccaacccagaagactaaggaccacgagaatggaaccggcaccaatacatatgccgccctcaatagtgtttacttaatgatgaacaaccagatgcggctgctcggcatggagacgatggcatggcaagaaataagacacgctatcattctactaactgacgggaagtcaaacatggggggcagtcccaaaaccgcggtggaccacataagggaaatcttgaatataaatcaaaagaggaatgactatctcgatatctatgctataggagttggaaagctggacgtcgactggagggagctcaacgagttgggatcaaagaaggacggagaaaggcatgcattcatccttcaagacacaaaggcattgcatcaggtctttgaacatatgctggacgtgagcaagctgactgacacgatttgtggcgtgggaaatatgagcgccaatgcgtctgatcaggagcgaactccttggcacgttacaatcaaacctaagtcgcaagaaacatgtcgcggagcactgatatcagaccagtgggtgctgactgcggcccactgcttccgcgatggcaatgaccactccctctggagagttaacgtgggtgacccaaagtcacagtggggcaaagagttcctcatcgaaaaggcagtcataagtcccggctttgatgtgttcgccaagaagaaccaagggatcctggagttttacggagacgacatcgcactcctgaagttggcccagaaggtcaaaatgtcaacgcatgcacggccaatatgtttgccttgcaccatggaggccaaccttgcacttcgtcgcccacagggatccacttgccgggatcacgagaatgagctactgaacaagcaaagcgtgcctgcacatttcgtggccttgaatggctctaagctcaatataaatttgaaaatgggagtggagtggacatcttgtgcagaggtggtaagtcaggaaaaaacgatgtttcccaatcttacagacgtgagggaggtggtgaccgatcaattcctgtgctcagggacgcaggaggatgaaagcccatgtaaaggggaatcaggcggtgcagttttcttggagaggaggttccggttcttccaggttggattagtctcctggggtctctacaacccgtgccttggctcggccgacaaaaattcacgcaagcgggcccctagatcaaaagtgcctccacctagagatttccacataaacctgttccggatgcagccttggctccggcagcatctgggagacgttttgaactttttaccgttgtag

SEQ ID NO: 112854 - DNA, 1617 bp, synthetic construct
  misc_feature 1..1617: note = Description of Artificial Sequence: Synthetic coding sequence
  source 1..1617: mol_type = other DNA
atgagagccctttgcatcagagagacttgctcaagcgagctcggtttttctaggaattggtctcgtcgcaaagctggccactgccctaatccagggatctcattaggcgcagtgcggactggttttaggttcgggcatggagacaaggttaggtataggtgcagttccaacctcgtgctaacaggaagtagcgagagagagtgccagggcaatggagtctggtcaggaactgagcctatctgcaggcagccatattcctatgatttccctgaggacgtggcgcccgccctggggacttcattctctcatatgctaggggctacgaatcccacacaaaagactaaagatcatgagaatggcaccggaacaaatacatacgctgcactgaactcagtgtacctgatgatgaacaatcagatgaggttgctcggcatggaaacaatggcttggcaggaaatccgccacgcgatcatacttctgacggacggtaaatccaatatggggggctcccctaagacggctgtggaccacatccgcgaaatccttaatatcaatcagaagaggaacgattaccttgacatctacgccatcggggttggtaagcttgacgtggattggcgagaactgaatgaattggggtctaagaaggacggagagcgacacgcttttatactacaagatactaaggcacttcatcaagtatttgagcatatgctcgacgtttccaaattgaccgataccatttgcggagttggcaatatgagcgcaaatgcctcagaccaggagcgtacaccatggcatgtgacgattaaacccaagagtcaagagacgtgccgcggcgccctgatctcggatcagtgggtcctaactgcggctcattgcttcagagatggcaatgaccactcattatggcgggttaatgtgggggatcccaagagccagtgggggaaggagtttcttatagagaaagccgttatctcaccaggctttgatgtgttcgccaaaaaaaaccagggaattttagaattttacggagatgatattgccctactgaaactggcacagaaagttaagatgagcacgcacgcgagaccaatctgcttaccatgtaccatggaagccaatctcgctctccggcggcctcagggatccacatgtagagatcatgagaatgaactcttgaacaagcagagtgttccggcccatttcgtggcactaaacgggtccaaactgaacatcaacctgaagatgggagtagagtggacctcctgcgcagaagttgtatcgcaggaaaaaacgatgtttccaaacctgactgatgtgcgagaggttgtgactgatcagtttctctgttcaggcacacaggaggatgagagcccttgcaagggcgagagcggaggcgccgtgtttctagagaggcgctttcgctttttccaggttggcctggtcagttggggactgtacaatccttgtctcggctctgctgataagaatagcaggaaaagggcccctcgctccaaagtgcctcccccaagggattttcacattaatctgttccggatgcagccatggctccgacaacatctgggcgacgtgctgaacttcctgcctttatag

SEQ ID NO: 112855 - DNA, 4992 bp, synthetic construct
  misc_feature 1..4992: note = Description of Artificial Sequence: Synthetic coding sequence
  source 1..4992: mol_type = other DNA
atggggccgacatctggtcccagcctacttctgttattattgacacacctacccttggcacttggatcccctatgtactcaatcataaccccaaacatcttgagactggaatctgaggagactatggtgctggaagcccatgacgctcagggcgacgtacctgttactgtgacagtgcacgatttccctgggaagaaacttgtgctctcatccgaaaagacagtgctaacccccgccacgaatcatatgggtaatgtcacctttaccattccagcaaacagggaatttaagagtgaaaagggcaggaataagtttgtcaccgtgcaggctacatttgggacccaggtggtggaaaaagttgtattggttagtctgcaatccggctatctgttcatccagaccgacaagacgatttatacccccggatccactgtgctgtatcgtatctttacagtaaatcataagctacttcccgtgggccggacagtcatggtcaacatcgaaaatcctgaaggcattccagttaagcaggatagtttgtcctcacagaaccagttgggggtgctgcccctctcatgggacatcccagagctggtgaacatggggcagtggaagatccgcgcctactacgagaatagtccacagcaggttttcagcacagagttcgaggtcaaagagtatgtacttccctcattcgaggtgatcgtggaacccacagaaaaattctactacatctacaacgagaaaggcttagaggtaacaataaccgctcgcttcctgtatggcaaaaaagtggaaggcacagcctttgtgattttcgggatccaggatggcgagcagaggatctccctcccagagagcctgaagaggataccgatcgaagatggctccggggaagtggtactgagtcgtaaagttttactggacggcgtccagaatccacgggcagaggatctagttggcaagtccctttacgtatccgcaacggtgattctgcatagtgggtctgacatggtacaggctgaaaggtccggaattccaatcgtaacctccccctatcagatacacttcaccaaaacgcccaagtacttcaagccaggcatgccattcgacctaatggtgtttgtcaccaatccagatgggagccctgcttaccgcgttccggtggcagtgcaaggagaagacacggttcagagccttactcaaggcgacggagtcgctaagttgtcaatcaacactcacccttcccagaagcccctgagcatcaccgtgagaaccaaaaagcaggaactatctgaagccgaacaggctacacgcacaatgcaggcattgccgtactccacagtcggcaactctaacaactacctgcatctctccgtcctaagaaccgaactgcgccccggtgagactctgaatgtcaattttctccttcgcatggatcgagcccacgaggctaagataaggtattacacttacctaataatgaataagggccggttgcttaaggccggtaggcaagtgagggagcctgggcaggatctggtagttcttccactaagtattactactgacttcattccatcttttaggctggtggcttattatacactcatcggggcatccggccagcgagaggtggtcgcagattctgtatgggtggacgtcaaagatagctgtgtgggaagtctcgtggtgaagtcgggccagtctgaggacaggcaacctgtgcctggtcagcagatgaccctgaaaatcgaaggggatcatggagcgcgggtcgtcctcgtggccgtggacaagggagtctttgtcctgaacaagaagaacaagttgactcaatctaagatctgggatgtcgtcgaaaaggctgatattggatgcacaccaggcagcggaaaggactacgccggggtgttttctgacgcgggtctgacttttacttcgtcctctggtcaacaaactgcccagcgcgcggaactgcagtgtccgcagcctgccgctcggcgccgtagatccgtgcagttgaccgagaaaaggatggataaagtggggaaataccctaaggaacttcgcaagtgctgtgaagacggcatgagggagaaccctatgaggttttcatgccagcgtcgtacccggttcatttccctaggcgaggcatgtaagaaagtatttctggattgctgcaattacattacagagctaaggcggcagcacgcaagagcctctcatctcggcttagccaggagtaacctcgatgaggacatcatagccgaggaaaacatcgtatccaggtccgaattccccgaatcctggctgtggaacgtggaagatctcaaggagccccctaagaatggcattagtaccaagctcatgaatatcttcctgaaagacagcatcacgacatgggagatcctggcagtcagtatgtccgacaaaaaagggatctgcgtcgccgacccattcgaggtgactgtgatgcaggactttttcatagatctccggctgccttactccgtggtgaggaacgagcaggtcgagattcgggccgttctgtataactacaggcagaaccaggaactgaaggtgcgagttgaactactgcacaatcccgccttttgcagtcttgccaccaccaagcggcgccaccaacaaaccgtgaccatccctccaaagagcagtttgtccgtcccatacgtcatcgtgccgctgaagacgggcctgcaggaagtggaggtgaaggccgctgtttaccatcacttcatctcagatggtgtgaggaaaagcctaaaggtcgttcccgaggggattcgaatgaacaaaacagtagctgtcagaacgcttgatcctgagcggctcggacgagaaggggtgcagaaggaggacatcccccccgccgatctcagcgatcaagtgcctgacaccgaatctgagaccagaattctgctccaaggcacacctgtggcccagatgaccgaggatgcagtagacgctgaaaggctcaagcaccttatcgtgacccctagcgggtgcggcgagcagaatatgattggtatgactccaactgttatagcagtgcactatctggatgagacagagcaatgggaaaagttcggcctagaaaagaggcagggcgctttggaactgatcaagaaagggtacacacaacagctggcctttagacagccgtcctccgcctttgccgcatttgtgaagagggctccctcaacttggcttactgcttacgtggtcaaggtgttttcgttggccgtaaatttgatcgctattgactctcaggtgctatgcggcgcagtgaagtggttgatcctggagaagcagaagccagacggggtgtttcaagaggacgctcccgtcattcatcaggagatgatcggggggctccgcaataataatgaaaaggacatggcactgacagcctttgtcctgatatctctccaggaggcaaaagatatctgcgaggaacaggtgaacagcctcccaggctctattacaaaagcaggcgattttctggaggccaactatatgaacttgcaacgcagctacaccgtggccatcgcgggctacgccctcgcccagatgggcagattgaaaggcccgctgctgaacaagttcctgacaaccgctaaggacaaaaaccgatgggaggatcctgggaagcagctatacaatgtggaagccacaagttacgcgctgctggcacttttgcagctgaaggacttcgacttcgtgccccccgttgtccgatggctcaacgagcagcggtactacggcgggggatacggctccacccaggccacctttatggtgtttcaggccctcgctcagtatcaaaaggatgcacctgatcatcaggagctgaacctggacgttagcctgcagttgccttcccgctcctctaagatcacccataggatccactgggaatcggcttctctcctgcggagtgaagagaccaaagagaatgagggttttaccgtgactgccgagggtaaggggcaggggaccttaagcgtggtgaccatgtatcatgcaaaagccaaggaccagctgacatgtaataagtttgacctgaaagtgaccattaaaccggcccccgaaaccgagaaacgccctcaggatgcaaagaatacaatgatcctggaaatatgtacgcggtaccgcggagatcaagacgccacgatgagtatactggacatcagcatgatgacaggcttcgcaccagacactgatgatttaaagcagctagccaacggggtggaccgttacattagcaagtatgagctagataaggcattctcggaccgcaacacactgataatctacctcgacaaagtgagtcatagcgaggatgactgtctggcattcaaagtgcatcagtatttcaacgtcgaacttatacaaccaggggcggtcaaagtctacgcctattataacctggaggagtcatgtactcgtttctatcatccggagaaagaggatggaaaactgaacaaactgtgtcgcgatgagctgtgcagatgtgccgaggaaaactgctttatacaaaaaagcgatgacaaggtaacgctggaagaaaggctggataaggcctgtgagcccggcgtggactatgtgtacaagactagattggtgaaggtgcagctgtctaacgatttcgacgaatatataatggctatagagcaaaccattaaaagcgggtcggatgaagttcaggtggggcaacagcgcacatttatcagtccaataaagtgcagggaggcattaaagctggaggaaaagaagcattatcttatgtggggtctgagctcagatttttggggcgagaaacccaatcttagctacatcataggcaaagatacttgggtcgagcactggcctgaggaagacgagtgccaggatgaagagaatcagaagcagtgccaggacttgggcgcattcaccgagtcaatggtagtgttcggatgccctaattag

SEQ ID NO: 112856 - DNA, 1794 bp, synthetic construct
  misc_feature 1..1794: note = Description of Artificial Sequence: Synthetic coding sequence
  source 1..1794: mol_type = other DNA
atgcacccccctaagaccccctctggagctcttcacagaaaacggaagatggccgcttggccgttttctcgactctggaaggttagtgatccgattctttttcagatgaccctgattgctgcgctacttcccgcggtactagggaactgcggcccacccccgacattaagcttcgctgcacctatggatattaccctaaccgagacacggttcaaaacaggcaccactcttaagtatacttgcctgccgggatacgtgcgaagtcacagcacgcagacacttacctgtaatagcgatggggaatgggtttacaataccttttgtatttacaagaggtgtaggcacccaggcgaattacggaatgggcaggttgaaattaagaccgatctttctttcggttctcagatcgaattcagttgctccgaaggcttcttcctgatcgggtccactaccagcagatgtgaagtgcaagaccgcggagttggatggtctcaccccctccctcagtgcgaaatcgtgaagtgcaaaccgccgcccgatatacgtaatggacgccactccggcgaggaaaatttttatgcttatggctttagcgttacatattcctgcgacccaaggttctccctcctgggtcatgcctcaattagttgtaccgtagagaacgaaactatcggcgtgtggaggccctcacctcctacttgcgagaagataacctgccgaaaacccgacgtgtctcacggtgagatggtgtctggtttcggacctatttataattacaaagatacgatcgtgtttaaatgccagaaagggttcgtgctgcgtggctcttccgttatccactgtgacgctgattccaaatggaacccatcaccaccagcatgtgagcctaacagttgcataaacctcccagacattccacatgcgtcctgggaaacataccccagaccaaccaaggaagatgtttatgtggtgggcactgtcctgcgttatagatgtcaccctggatataagcctacgacggacgaaccgaccactgttatctgtcaaaagaatctcaggtggaccccttatcagggctgcgaggcactgtgttgccctgagcccaaactcaacaacggagagatcacacaacatagaaaatcccggcccgctaaccactgtgtttacttttatggagacgagatttctttcagttgtcacgagacgtcccgtttttccgccatttgccagggagatggtacctggagcccaaggacaccaagttgcggagatatttgcaacttcccccccaagatagcccacggacattacaagcagtcctcatcctactcgtttttcaaggaggagattatttatgaatgtgacaaagggtacattctcgttgggcaagctaaattgtcttgttcttactcgcactggagtgccccggccccccagtgtaaagcgctgtgcagaaaacctgaattggtaaatgggcggcttagcgtggacaaagaccagtatgtggagcctgagaacgttactatccagtgtgactcaggctacggagtggtcggcccgcagagcatcacatgtagtggcaatagaacatggtacccggaggtgccaaagtgcgagtgggaaaccccagaaggctgcgaacaggtactcaccggcaagaggctgatgcaatgtctgcctaatccggaggacgtgaagatggctctggaagtgtacaagttatcactcgagatcgaacagctggagctgcagcgggattctgctcggcagagcacactggataaggaactgtag

SEQ ID NO: 112857 - DNA, 459 bp, synthetic construct
  misc_feature 1..459: note = Description of Artificial Sequence: Synthetic coding sequence
  source 1..459: mol_type = other DNA
atgcaccctccaaagacaccatcaggagcgctccaccgaaaaagaaaaatggctgcttggccattttctcggttgtggaaggtgagcgacccaatactctttcagatgaccctgatcgcagcactgttgccagcagtcttagggaattgtggcccacccccaacactgtcttttgccgcccctatggacataacactgactgagacccgattcaagaccggcaccacccttaaatacacatgtctccctggatacgtacgatcacacagtacacaaacactgacatgcaattcggatggtgagtgggtgtacaataccttttgcatatacaaacgatgtcgccatcccggtgagctgcgaaacggccaagttgaaatcaaaaccgatttgtcattcggttcgcagatagagttctcatgtagtgaaggtttcttcttaatcgggtccactactagttag

SEQ ID NO: 112858 - DNA, 759 bp, synthetic construct
  misc_feature 1..759: note = Description of Artificial Sequence: Synthetic coding sequence
  source 1..759: mol_type = other DNA
atgtttttttggtgtgcatgttgcttgatggtggcctggcgagtgagcgccagcgatgctgaacactgccccgagctccccccggtggacaattctattttcgtagccaaggaagtcgagggtcagattttggggacttacgtgtgtataaaagggtatcatctggtgggtaagaaaacattgttttgtaacgcgagcaaagaatgggacaacaccactaccgaatgtcgactggggcactgtccggacccagtgctcgtgaatggagagttttctagttcaggtcccgtgaatgtgtccgataaaatcacatttatgtgtaatgaccattacatactgaagggaagtaaccggtctcaatgccttgaagatcatacgtgggcccctccttttcctatttgtaaatctagggactgtgatccacctggaaacccagtgcacggctatttcgaaggaaacaactttacactaggaagtaccatctcttactattgtgaagaccggtactacctggtaggggtgcaggagcagcaatgtgtggacggggagtggtccagtgctttgccggtgtgcaaactgatccaggaagcaccgaagcctgagtgcgaaaaagccctgctagcttttcaggaaagtaagaatctgtgcgaggctatggaaaactttatgcagcagctcaaggagagcggcatgactatggaggagcttaaatattccctcgaacttaagaaggcagagctgaaagcaaagctgctgtag

SEQ ID NO: 112859 - DNA, 756 bp, synthetic construct
  misc_feature 1..756: note = Description of Artificial Sequence: Synthetic coding sequence
  source 1..756: mol_type = other DNA
atgttcttctggtgcgcgtgctgcctgatggtagcgtggagagtgtcagcatcagacgagcactgcccagaattgcctcctgttgacaactctattttcgttgcgaaggaggttgagggccagattctgggcacatacgtctgtataaagggctatcatctggtgggcaagaaaacactgttttgcaatgctagcaaagaatgggataacacgactacagagtgcagactgggccactgtccagatcccgttctcgtgaatggcgagttttcatcgagcggacccgtcaatgtgtcagacaaaattacattcatgtgtaatgatcactacatactgaaaggttcaaatcgcagtcaatgccttgaggatcatacatgggcacctccgtttcccatctgtaagagccgggattgcgacccccccggtaaccctgttcacggttacttcgagggcaataattttactctggggtctacgatctcatactactgcgaggatagatactacctggtgggcgtccaagagcagcagtgcgtggacggggaatggagctcagcacttccagtgtgcaagcttatacaggaggctcccaaacctgaatgcgagaaagcgcttcttgctttccaggagagcaaaaacctttgtgaagcgatggagaactttatgcaacagctgaaggaaagcggcatgacaatggaggagctgaagtacagcctggagcttaaaaaggccgagctgaaagctaaacttctctag

SEQ ID NO: 112860 - DNA, 759 bp, synthetic construct
  misc_feature 1..759: note = Description of Artificial Sequence: Synthetic coding sequence
  source 1..759: mol_type = other DNA
atgtttttctggtgcgcttgttgtctaatggtagcctggcgagtgagtgcgtcagacgctgaacattgtcccgaattgccccccgtcgacaatagcatctttgtggcaaaggaggtggaaggacagatcctcggaacttatgtctgtatcaaaggctaccacctggtgggaaaaaaaaccctcttctgtaatgcgagtaaggaatgggacaataccactactgagtgccgattgggacattgtccggaccccgtccttgtgaacggggagtttagctcgtccgggccggtaaacgtaagcgataaaatcacgttcatgtgcaacgatcactatattctgaaggggtcaaatagatctcagtgtctcgaggatcacacttgggcacctcccttccccatctgcaagtcgcgggactgtgatccgcctggaaaccctgtacacggctattttgagggcaataacttcactctgggctctacaatatcatattattgtgaagaccggtactacctcgttggagtgcaggagcagcagtgcgtggatggcgagtggtcctccgcattgcccgtgtgtaagctgatccaggaagcacccaaacctgagtgcgaaaaggcattgcttgcttttcaggagtctaaaaatttatgtgaggcaatggagaattttatgcagcagctgaaggagagcggcatgacgatggaggaattaaagtactctctcgagcttaagaaagcagagctgaaagccaaactgttatag

SEQ ID NO: 112861 - DNA, 759 bp, synthetic construct
  misc_feature 1..759: note = Description of Artificial Sequence: Synthetic coding sequence
  source 1..759: mol_type = other DNA
atgtttttttggtgcgcctgttgtttgatggtggcctggcgcgttagcgcttcagacgccgaacactgtcctgagctcccaccagtggataatagtatcttcgtggctaaggaagtggagggccagattctgggaacgtacgtatgcatcaagggataccatttggttggtaaaaagacgctgttctgcaatgccagcaaggagtgggacaatacaacgactgagtgtagattgggacactgtccagaccctgttctcgtcaatggagagttctcctcttcgggacccgttaacgtgtctgataaaatcacatttatgtgcaatgaccactacatattgaagggctccaatcggagccagtgcctggaggaccacacatgggcccctcctttcccaatctgtaagagcagagattgtgatcctccaggaaatcccgttcacggatacttcgagggcaataactttactctggggagtactatttcttactactgcgaggatcgctactacctggttggagttcaggagcagcagtgcgttgatggagagtggagctccgccctgccagtatgcaagctaatccaggaggcacccaagcccgaatgtgaaaaagctcttctggcctttcaggagtctaagaacttatgtgaggccatggaaaactttatgcagcagctcaaagaaagcggaatgactatggaggagctgaagtactccctcgagctgaaaaaagcagagctgaaggccaaactcttatag

SEQ ID NO: 112862 - DNA, 657 bp, synthetic construct
  misc_feature 1..657: note = Description of Artificial Sequence: Synthetic coding sequence
  source 1..657: mol_type = other DNA
atggtcgcttggcgagtcagtgcgtccgatgaacattgtcctgaactcccgcctgtggataattccatatttgtagccaaagaagtcgagggtcagatcctaggcacatatgtatgcataaaaggataccatctcgttgggaagaagacccttttctgcaatgcatcgaaagaatgggacaacaccacaacggaatgccgccttggtcactgtccagaccccgtgttggtcaatggagagttctctagctccggtcctgtaaacgtgagcgacaaaatcacatttatgtgtaacgaccactacatcctgaagggaagcaacaggtcccaatgtctggaagatcatacatgggccccaccttttccaatatgtaagagcataccacagaccagaccattgcccttccagccctgttcgccccttttcctgttcttattacgccagagcctggctctgttcccccgcctcgagtgttctggtcggatcttggcccattgtaacttgcacttgcccggaagttcaagctctcacgccagtgcatcccaggttgccgggatcactggggcgcacccacggtgggcaaatttttgtatattcagcagggactgggtcagtccttgctggccagggtggagtcagatccccgatctgcggtag

SEQ ID NO: 112863 - DNA, 546 bp, synthetic construct
  misc_feature 1..546: note = Description of Artificial Sequence: Synthetic coding sequence
  source 1..546: mol_type = other DNA
atgttcttttggtgtgcttgctgtctcatggttgcgtggcgtgtgtccgcttctgatgccgaacactgcccagaactccctcccgttgataacagtattttcgtggctaaagaagttgaggggcagatactggggacatatgtatgtataaagggataccatttggtgggcaagaagacattgttttgtaatgccagtaaagagtgggacaacacaacaacagagtgcagactggggcactgcccggaccccgtattagtaaatggagagttcagctcatccgggcccgtgaacgtctcagataagatcacatttatgtgtaatgatcattacatcctaaaggggagcaacagatctcagtgtcttgaagatcacacatgggcaccgcccttcccaatctgcaaatccagggattgcgatcctccgggcaacccagtgcatggctatttcgagggcaacaattttacacttgggtcaacaatcagctactactgtgaggatcggtattatctggtgggcgtacaagagcagcagtgcgtcgattag

SEQ ID NO: 112864 - DNA, 5235 bp, synthetic construct
  misc_feature 1..5235: note = Description of Artificial Sequence: Synthetic coding sequence
  source 1..5235: mol_type = other DNA
atgcgactcttgtggggcctcatttgggctagtagtttctttactcttagcctccagaaaccacgcctgctgctatttagccccagcgtggtgcacctaggagtgccactttctgtgggtgtgcaactgcaggacgtgcccagaggccaggtggtcaaaggctccgtctttttacgtaacccctcccgcaataatgtaccatgtagccccaaggttgattttaccttgagttctgagcgggacttcgcacttctcagtctgcaagtccccctgaaggacgcaaagagctgcggcctgcatcagctgctcagagggccggaggtccaacttgtggcccactccccctggttaaaggattcactgtccaggaccacaaacattcagggcattaacctcttgttttcctcccgcaggggccacctttttcttcagacagaccagcccatctacaatcccggtcagcgcgtaaggtaccgagtattcgcactggatcagaagatgcgtccgtccacagatactatcaccgtcatggtggaaaattcccacggcctcagggttagaaagaaggaggtgtacatgccaagttctattttccaggacgatttcgttatcccagacatcagtgaacctggcacttggaagatcagcgctagattttctgatggattggaatccaacagtagcactcagttcgaggtgaagaaatatgtcctgcctaactttgaagtaaaaataacaccaggcaagccatacattttaaccgttccgggtcacctcgacgagatgcaactggacattcaggccaggtatatttacggaaaacctgtccaaggagtcgcttacgtcaggttcggtttgctcgacgaagacggtaagaaaacatttttcaggggactggagagtcaaactaagctggtgaacgggcaatcccacatctctttgtccaaagccgagtttcaggacgcactggaaaagctgaacatgggtatcacagatctgcagggactgcgcttgtacgtggcagctgccattatcgaatacccaggcggggagatggaggaagcggagctgacttcttggtactttgtgtccagtccgttttcgcttgatttgtcgaagaccaagagacatctcgtgccgggcgctccatttctgttacaagctctggtgagggagatgtctggctctcctgcttcaggcattccggtcaaggtgtccgccaccgtgtcttctccaggttctgtgccagaggttcaggacatccagcagaacacagacggctccggacaggtaagcattccaatcataatccctcagaccatctctgaactgcagctgagtgtgtctgctggctcaccacatcccgcaatagcccgtctgacggtggccgctcccccctccggaggacctggttttctgagcattgagtggcccgactctcgccctccgcgcgttggtgacacacttaacctcaaccttcgcgcggtcggctccggggcaactttttcccactattactatatgatcctgtcccgtggccaaattgtttttatgaacagagagcccaagcggacccttactagcgtatccgtgttcgtagaccaccatcttgccccttctttttacttcgtagctttctattaccacggcgaccaccccgtggctaattcattgcgcgtggatgttcaggccggcgcctgcgagggtaagctcgagctgtcagtggatggcgcgaaacagtaccgaaatggagagagcgtcaagctgcatctagaaactgacagccttgcactggtcgcactgggcgcgctggacactgctctatatgccgcaggatccaagagccacaagcccctgaatatggggaaagtgtttgaagccatgaatagctacgaccttggttgtgggcccggcggaggagactctgctttgcaggtttttcaagctgccggtttggcctttagtgatggcgaccaatggaccctgtcacgcaaaaggctgtcatgcccaaaagagaaaacaactcgtaagaaaagaaatgtaaatttccagaaagccatcaacgagaagctgggccaatacgcttcacccactgctaaacgttgctgtcaagacggcgttacaagactgcctatgatgcgtagctgcgagcagcgcgcagctcgtgtacagcagccagactgtcgcgagccgtttctgagttgttgccaattcgccgagtcccttcgcaaaaagagccgcgataaaggccaagccgggctgcaaagagctctggaaatcctgcaggaagaggacctcatcgatgaggacgacatccccgtcagaagttttttccctgaaaactggttatggagggtggagaccgtggaccggttccagatactgaccctgtggcttccagacagcctcacaacatgggagatccatgggctgtcactgagcaagaccaagggcctttgtgttgccaccccggtacagctgagggtgtttcgcgaatttcatctgcacttacggctgccaatgtcagtgcgccgctttgagcagttagagttaaggccagtgctttataattaccttgataaaaacctcactgtgtctgtccacgtgtcccctgtcgagggactgtgcttagccggcggtggcggcttagctcagcaggtcttagtccccgctggcagcgcaaggcccgtggcattttctgtcgtccccacagccgcagcggccgtttcattaaaagtggtcgcacgaggctccttcgagttccctgtgggggatgccgtatcaaaggtgctccagattgagaaagaaggagcaattcatcgggaggagctggtatatgagcttaaccccttagatcatcggggtcgcacattagagatcccggggaattccgatccaaatatgattcccgacggtgactttaactcatatgtccgggtgaccgcaagtgacccactggatactttaggatccgagggggccctatcccctggtggggtggcatcactgctgcggctcccaagagggtgcggagaacaaaccatgatctatctcgctccaacccttgcagcttcacggtacttagacaaaaccgaacagtggtcaacattaccacctgagactaaggatcacgccgtagatctaattcagaaggggtatatgcgaattcagcagttccggaaagctgatgggtcctacgccgcctggctgagtagggattcatcgacctggctgaccgcttttgtgctgaaagtccttagcctagcacaggagcaagtggggggatcaccagaaaagttgcaggagacgagcaattggctgctgtctcagcagcaggctgacggttccttccaggatccctgtcctgtactggacaggtccatgcagggcggtctcgtcgggaatgatgagaccgtcgctttgaccgcgttcgtaacaattgcactccaccatggactggcagtgttccaagatgagggtgctgaacctttaaagcagagggtggaggcgagcatttcaaaggcaaattctttcctgggggagaaagccagcgccggtttactcggagctcacgccgcagccatcaccgcatacgccctgacgctgaccaaagctcccgtagacctcctgggcgtagcacataacaaccttatggctatggctcaggagactggagacaatctgtattggggttctgtgactgggtcccagtctaacgcggtatctcccaccccggcaccccgcaacccaagcgaccccatgcctcaggctccagccctctggattgagactaccgcgtacgcactgcttcatctgctcctgcacgagggaaaggccgagatggcagatcaggccgccgcctggttaacccgacaaggcagctttcaaggcggatttaggtccacacaggacactgtcattgccctcgatgccctgtccgcctattggatcgcttctcatacaaccgaagaaagaggactgaatgtgaccctgtctagcactggaaggaacgggttcaagtcacacgctttgcagctgaataacaggcagattaggggtttggaggaggaactccagtttagcctcggaagcaaaatcaacgtgaaggtcggaggaaactctaaaggtacacttaaggttctgcggacatacaatgtgttggatatgaagaataccacctgccaggatctccagatcgaggtgaccgtgaagggccatgtggaatacaccatggaggcgaatgaagactatgaagactatgaatatgacgaactccctgccaaagacgacccagacgccccactacaacctgtcactccactccagttattcgaaggccgcaggaacaggcgtcgtcgggaagcaccaaaggtggtcgaagagcaggagtcccgggtacattatactgtgtgcatctggagaaacggcaaggtaggtctgtcaggaatggcgatcgctgacgtgacactcttgtcaggctttcatgctcttcgggccgacctggagaagctcaccagtctgagtgacagatacgtgtcacattttgagactgagggtccacatgtactgctttatttcgattctgtacccacttcccgagaatgcgtgggctttgaagcagtgcaggaggtcccagtgggacttgtccagcccgcatctgccactttatacgactattacaaccctgagagacgttgctccgtgttctacggcgcccctagcaagtccagattgcttgccactctctgttcagctgaagtttgccagtgtgccgagggtaagtgtcctcggcagcgacgggctctggaaaggggacttcaggatgaggacgggtaccggatgaagttcgcatgctattatccgcgggtggagtatggattccaggtgaaggtcttaagagaggacagccgcgctgcatttagactattcgaaaccaaaatcactcaagtactgcacttcaccaaggacgtcaaggcggcagccaatcagatgcgaaatttcctggtgcgggcctcatgtaggctacgactcgagcccggcaaggagtatctgatcatgggcttagacggtgccacctacgatctggaaggccatccccagtacctgctcgattctaactcgtggattgaagagatgccttccgaacggctctgtagatcaaccaggcaacgtgctgcatgtgcccaactcaatgactttctccaagagtatggcactcaaggctgtcaggtgtag

SEQ ID NO: 112865 - DNA, 5235 bp, synthetic construct
  misc_feature 1..5235: note = Description of Artificial Sequence: Synthetic coding sequence
  source 1..5235: mol_type = other DNA
atgaggttgctctggggactgatttgggcctcatctttctttactctttcgctgcaaaaacccaggttattgctgttctcaccatccgtggtccacctgggggtgcctttatccgtgggagttcaactgcaggacgtgcccaggggtcaggtggtgaagggatctgtcttcctgagaaatccatcgcggaataacgtgccatgcagccccaaagtggatttcactcttagctccgaaagggactttgcgctactgtcactgcaagtgcccctgaaagacgctaagtcctgtggccttcatcaactgcttcggggcccagaggtgcagctggtggcccattccccatggctgaaggactcgttgtcccggaccacaaatatacagggcattaatttactgttcagttcgcggcgcggacacctgttcctgcagaccgaccaaccaatttataatccaggtcagagggttcggtaccgggtgtttgctttggaccagaaaatgcgcccctccaccgacacaataacggtgatggtggagaacagccacggcctacgtgtccgtaaaaaggaagtgtacatgccttcaagtatattccaggacgacttcgtgattcccgacatttccgagcctggaacgtggaaaatatccgctcgtttttctgacgggcttgaaagcaactcctcaactcagttcgaggtcaagaaatatgtcctgcccaatttcgaagttaagattactcccggtaagccatatattctgactgtgcctgggcacttagacgagatgcagctcgacatccaggcccggtacatttatgggaagcctgtccaaggggtcgcgtacgttcgcttcggcctcttggatgaggacggaaaaaaaacattcttcaggggattagagagccagacaaagctcgtcaacggccagtcccatattagtttatcgaaagctgaattccaggacgccctggagaaactcaacatggggattactgacctgcaggggctgagactgtacgtcgctgctgctatcatcgaatcacctgggggggaaatggaagaagcagagctaacatcctggtattttgtctctagccccttctcactcgacttatcgaaaacaaaaagacatcttgtaccaggagcacccttcctgctacaggcgctggtgagagaaatgagtgggagtccagcgagcgggataccagttaaggtgagcgccactgtgtccagcccagggtccgtacccgaagtgcaggacatccagcagaataccgatggctctggccaggtgagcattcccatcattattccacagaccatctcagagctgcagctttctgtcagtgccggctcgccccaccctgcaattgcgcgcctgaccgtggcagcaccaccgtcaggcggacctgggttcctgagtattgagagacccgattcacggcctccaagggttggcgacactcttaatctgaacctgcgggccgtgggtagtggggccacatttagccattattactacatgatactgtcacgaggacagattgttttcatgaatcgggagccaaagaggacactgaccagtgtctcagttttcgtagaccaccacctcgccccttctttctacttcgtggccttttactatcacggagatcaccccgtggccaacagcctccgagtggatgtccaggctggggcttgtgagggaaagctggaactgtccgttgacggagccaagcagtaccgaaacggtgaaagcgtgaagttacacctggaaaccgactcattagcgctggtggccctcggagcactcgatactgcactgtacgcagccggatcgaaatctcacaaacctctaaatatgggaaaggtgtttgaggccatgaatagttacgatctggggtgcgggccgggagggggcgattctgccttacaagtctttcaggcagccggcctggcgttttctgacggcgatcagtggacattgtcacggaaacgcctgtcttgtcccaaggagaagacaacccggaaaaaacgaaacgtgaatttccaaaaagcaattaacgagaaactgggtcaatacgcatcacctacggcgaagcggtgctgccaggatggcgtcacgagacttccaatgatgcgaagctgtgagcagcgcgctgccagggttcagcagccggattgcagagagcccttcctgagctgttgccagttcgccgagtcactgaggaaaaagtctcgcgacaaggggcaggcaggcttgcaacgagctctcgaaatcctgcaggaggaggacttgatagatgaggacgacattcctgtcaggagcttcttccccgagaactggctgtggagagtggaaactgtcgaccgcttccagattttaacactgtggcttcccgattcactgacaacatgggaaatccacggattaagcttaagtaaaaccaagggcctgtgcgttgcaactcccgtgcagcttcgggtcttcagagagtttcatctgcacttgcggctccctatgtccgtgcggcgatttgagcagctggagttgcgccctgtgctgtacaattacctggacaaaaacctgactgtctccgtgcacgtgtctcctgttgagggactctgtctcgctggcggtggaggcctggcacagcaagtgctcgtgcccgctggtagtgcaaggcccgtggcattctctgtggtgcctactgctgccgctgccgtgtcactcaaagttgtcgctaggggatctttcgagtttcccgtcggagacgccgtgtccaaagtgctgcagattgagaaagaaggagctatccacagggaagaattggtctacgagttaaatcctctggaccatcgcgggcgaacactcgagatacccggcaatagcgacccaaatatgataccagatggggacttcaactcctacgtgcgcgtaacagctagcgatcctctggatacactgggctctgagggagcattgtcccctgggggagttgcctctctgctacgccttcccagaggctgcggagaacaaactatgatctacctggctcccactcttgccgctagtagatatctggataaaaccgagcagtggtccaccctaccgcctgaaacaaaagaccacgccgtggacctgatccagaagggatatatgcgcatccaacaattcaggaaagccgatggctcttatgctgcatggctttcccgcgactcttcgacatggctcaccgcattcgtgttaaaagtgctgagcctggcgcaggagcaagtcggaggctcccccgagaagctgcaggaaacttctaattggttgttgtcacaacaacaggcagacggaagttttcaggatccttgtcctgtgctcgaccggtccatgcagggcgggctagttggcaatgacgaaaccgtagccctcacagccttcgtcactatagctctccatcacggcctggccgtgtttcaggacgaaggggccgagcctttaaagcagcgcgttgaagcaagcatctccaaggcctcttcctttttaggtgaaaaagcttctgccggactgctgggcgcacatgctgccgcaataaccgcctacgctctcaccctgacgaaggctcccgtcgacctgcttggagtggcccacaacaacctgatggccatggcacaggaaaccggtgacaacctgtactggggctccgtgaccggcagtcaatcaaacgctgtgtccccaacccctgccccaagaaatcctagcgatcctatgccccaggcaccagccctctggattgagacgaccgcctacgcattgttgcacctactgcttcatgagggtaaagccgaaatggcagaccaagcagcagcctggttaactcggcagggaagctttcagggagggtttagaagtacccaggatacagtcatcgccctggacgctctctcggcttattggattgcctctcatactacggaagagcggggcctgaatgtgaccctcagctcaactgggcgcaatggattcaagtcacatgctctgcagctgaataaccgtcaaatacgaggcttggaggaagaattgcagttctcacttggatcaaaaataaatgtgaaggtgggcgggaattccaagggaactctgaaggtgttaagaacttacaatgtcttggatatgaagaacaccacctgtcaggatctgcaaatagaggtgactgtcaagggccacgttgaatatacaatggaggccaatgaagattacgaggattacgagtatgacgagcttccagccaaggatgacccagacgcccccttacagcccgtcacaccactgcaactgttcgaaggacggcggaaccggcgtcgaagagaggctccaaaagtggtggaagagcaggaatcccgtgtacattacaccgtctgtatctggcgtaacggtaaagtgggcctttccggaatggcaattgccgacgtcacactgttgtccggctttcatgccctgcgggccgatctggaaaaacttacctcgctgtcggacaggtatgtgagtcactttgagacggaaggcccccatgtacttctctatttcgattcggtcccaacttctcgtgaatgcgtaggcttcgaggcagtgcaggaggtccctgtcgggttggtgcagccagcatcggccactttgtacgattattataatccagaaaggaggtgcagtgtcttttacggggcccccagtaagtcacgactgctggctactctctgctcggccgaagtctgtcagtgcgccgagggcaaatgcccgaggcagcgcagggccctggagcgtggcttgcaagacgaagatgggtaccgcatgaaattcgcttgttactatccgagagttgagtacgggttccaggtgaaggttctacgggaagactcgcgcgcggcattcaggttattcgagactaaaattacgcaagtgttgcatttcactaaggacgtgaaagccgctgcaaaccagatgcgaaactttcttgtgagggcctcctgccgccttaggttggagcctggtaaggaatatttgataatgggcttggacggtgccacctatgacttagagggccatcctcagtatcttttagattcaaatagctggatcgaggagatgccgtcagagcgcctttgccggagtactcgacagcgggcggcctgcgctcagttgaacgattttctccaggagtacggtacccagggctgccaggtgtag

SEQ ID NO: 112866 - DNA, 5235 bp, synthetic construct
  misc_feature 1..5235: note = Description of Artificial Sequence: Synthetic coding sequence
  source 1..5235: mol_type = other DNA
atgagactgctgtgggggctgatatgggccagtagctttttcaccctttccctccagaaacccaggctgctcttatttagcccatcagttgtccatctcggcgtgccattatcagttggggtccagcttcaggacgtcccacgggggcaggtggtgaaggggagtgtattcctgagaaacccgtctagaaataacgtgccctgctcacctaaggtagacttcacactcagcagtgagagggattttgcccttctttccctgcaggtccccctgaaggatgcgaagtcgtgcgggctgcaccagctcctgcgggggcctgaggtgcagctagtcgcccacagtccatggcttaaagactctctctccaggaccactaacattcagggcattaatctcctctttagctcacgaagaggccacctgtttttgcagaccgatcaaccgatttacaacccgggccaacgggtcagatatcgcgtctttgctctggatcagaagatgcggcccagcactgacacaataacagtgatggttgaaaacagtcacggcctgagagtacgcaagaaagaagtttacatgccttcatctatatttcaagacgatttcgtaatccccgatatatcagaaccgggcacatggaaaatttcagccagatttagcgacggactcgagagtaactcttcgactcagttcgaggttaagaagtatgtgcttcccaacttcgaggttaaaatcacaccagggaagccctatatactgacagttcccggacacttggacgaaatgcagttggatatccaagcccgatacatttatggcaaaccagtgcagggcgtggcatacgtccggtttggtctgttagatgaggacggaaaaaaaactttctttaggggcctagagtcccagacaaaactagtgaatggccaaagccacatttctttgtccaaggccgaattccaggatgccctcgagaagttaaacatgggtatcacggacctgcaggggctccggctgtacgtggccgctgcgatcattgagtacccaggaggtgagatggaagaggcggagctgacctcttggtattttgtctcaagtccatttagcttggacctgtccaagactaagcgccacctggtccccggcgcgccgttcctgctccaggccttagtgagagagatgagcggatcccctgcttcgggaatccctgttaaagtgtccgctaccgtctcgagccctggaagcgtgcctgaggttcaagacattcagcagaacaccgatggctctggacaggtcagcattccaatcattatccctcaaaccatcagcgaattgcaactttctgtctccgcaggatcgcctcatccagctatcgctcgcttgacagtagccgctccgccttctggcgggcccggtttcttgtccatcgaacgccccgacagtcggcctccacgcgtgggtgatactctgaatttgaacctgagagccgttggctccggggccacgttttctcactattattacatgattctctcccgcgggcaaatagtgttcatgaatcgagagccaaagaggactctgactagcgtgagtgtgttcgtggatcaccacctcgccccatccttttatttcgtcgccttctattaccatggagatcacccagtggctaatagcctccgggtcgatgtgcaagccggcgcctgtgagggaaagctggagctgtctgtggatggcgctaagcaataccgcaatggggagagcgtgaaactgcacttggagacagactcccttgcactcgtggcattgggggcgctcgacaccgcgctctacgctgctggttcaaaatcccataagcccctgaatatgggaaaggtcttcgaagctatgaactcgtacgacctgggttgcgggcccggcggaggtgactctgccctgcaggtgttccaagctgccggcttggcattcagtgacggagatcagtggaccctgtcacgtaagcggttatcgtgcccaaaagagaagaccacgcgcaaaaagcgcaacgttaacttccaaaaggctatcaatgagaagctcgggcagtacgccagtccaacagcaaaaagatgttgccaagacggcgttaccaggttaccaatgatgaggagttgtgaacaacgcgcagcccgcgtgcagcagccggactgtcgtgaaccctttctctcctgttgtcagtttgcagagagcctccggaagaaatctcgcgacaagggtcaggctggacttcagcgcgccttggagatcttacaggaggaggatctcatcgacgaggacgacatacccgtaaggagcttcttccctgaaaattggctttggcgtgtagagacagtagacagattccagattctgaccctctggctacccgacagcctcactacttgggaaatccatggcctgagcttgagcaagacaaagggactctgtgtagctactcccgtacagctcagggtgtttagggaatttcatttgcatctaagactgccaatgtccgtccgccgcttcgagcagctcgagcttcgcccagttctatacaattacctagataaaaacctgactgtgtcagtgcatgtttcaccggttgaaggcctgtgcttggctggaggtggcggtttggctcagcaggtcctggtgcccgctggctctgcacgccctgtggcatttagcgtcgttcctactgcggccgccgccgtttccctgaaagtagtggcaagagggtcctttgaatttcctgtgggtgatgcggtctctaaggtgctgcagatcgagaaagagggcgctattcatcgtgaagaactggtgtacgagctgaaccctttggaccatagggggcgcacacttgagatcccaggcaattcagacccaaacatgataccagatggcgactttaattcttacgtgcgcgtgactgcctcagatccgttagacaccttaggaagtgaaggggcactgtcaccagggggcgtggctagtttgctcaggctcccgcgggggtgcggggagcagactatgatctatctcgcgcctaccctcgccgcatcacgctacctagacaagaccgagcagtggagcactttgccccctgagaccaaagaccacgctgtggacctgatccaaaagggttatatgagaattcaacagttccggaaggcagacggctcatacgcggcttggctgtccagggacagtagtacttggctcactgccttcgtcctcaaagtactctcgctcgcccaggaacaggtcggcggcagcccggagaaacttcaggaaactagtaactggctgctttcccaacagcaggctgatggctctttccaggatccttgtccagtattggaccggtctatgcagggtggcttagtgggcaatgacgaaacggttgcattgacggcctttgtgacaattgcactgcaccatgggcttgcagtgttccaagatgaaggagcagagcctctcaagcagagagtcgaagcgagtatcagcaaggcaaactcttttctgggtgaaaaggccagtgctggcctcctgggcgctcatgctgcagcaatcactgcctatgccctgaccctgactaaagcaccagtggatttgcttggcgtggcacacaataacttgatggctatggctcaggaaactggcgataacctgtattggggatccgtgacgggctcacagtccaatgcggtgagccccacacccgctccacgcaatcccagcgaccctatgccgcaggcgcccgcactgtggattgaaaccaccgcatacgccctcctgcatctgctcctgcatgaaggtaaggccgagatggcagatcaggctgccgcctggctgacgcgccaaggcagtttccagggtgggttccgtagtacccaggacactgtgatcgctctcgatgcgctctccgcctactggatcgccagtcacactaccgaggaacggggcctaaatgtgacactgagttctacgggccgaaatggattcaaatcacacgctctccagctgaacaataggcaaattagaggcctcgaagaggagctgcagttttcattgggcagcaagatcaatgtgaaggtgggtggtaactcaaaaggtaccctcaaagtattaagaacctataatgtgctggatatgaaaaataccacctgccaggatttacaaattgaggtgaccgttaagggccatgtggaatatacaatggaagctaacgaagactacgaggactacgaatacgacgaactgcctgccaaggacgatccagacgcccctttgcagcctgtaactcctctgcagctgtttgagggcagacgcaaccggcggcgtcgcgaggccccgaaggttgtagaagagcaggagtccagggtgcactataccgtttgtatatggaggaatgggaaagtgggcctgagcgggatggctattgccgacgtcactctgctgagcgggtttcacgctcttcgcgcggatcttgagaaattgactagcctttcagacagatacgtctcccactttgaaactgagggaccccacgttctgctctacttcgattcagtgcctacctcgagggaatgtgtgggtttcgaagccgttcaggaagttccagtcggtctcgtccaaccagcctcagccacactgtatgactattataaccctgagagaagatgctccgtgttctacggcgctccatccaagagccgtttgctggcaacactttgtagtgctgaagtatgtcaatgtgccgaaggaaagtgcccccggcagagacgtgctctggaaaggggcctgcaagacgaagacggatataggatgaagtttgcttgttattacccacgggtggaatatgggtttcaggtaaaggtgcttcgcgaagactcccgggccgcgttcaggctattcgaaacgaagatcactcaggtgctgcatttcaccaaggatgtcaaggccgctgccaatcagatgcgaaacttcttggtaagggccagttgcaggctgaggttggagcctggcaaggagtacttaattatgggtctggatggagctacgtatgatttagagggacaccctcagtaccttctagatagcaattcttggattgaggaaatgcctagtgagcgcctatgccgcagtactaggcaacgcgcagcctgcgcccaactcaatgatttcctgcaggaatacgggactcaaggatgtcaagtatag

SEQ ID NO: 112867 - DNA, 5235 bp, synthetic construct
  misc_feature 1..5235: note = Description of Artificial Sequence: Synthetic coding sequence
  source 1..5235: mol_type = other DNA
atgcgtctgctttggggtctgatctgggccagctccttcttcacacttagcttgcagaagccgcgcctcctgcttttcagtccctctgtggtccacctgggagtgcctctgtctgtcggcgtccagttgcaagacgtgccaagaggccaggtcgtgaaaggcagcgtattcctgcgcaacccttcccggaataacgtgccttgtagcccaaaagtggactttaccctcagctctgaacgggacttcgccctgctgtccctccaggtacctctgaaagatgctaaaagttgtggactgcatcagctcctgcggggtcccgaggttcagctggttgcccacagcccatggttaaaagacagcttatcaaggacaactaatatacagggcatcaatttactgttctcctctagaaggggacacctcttcctgcagacagatcagcctatctacaaccccgggcaacgcgtgagatacagggtgttcgcacttgaccaaaagatgcggccttccactgatacaattactgtgatggtcgagaactcccatggcctgagagtgcgcaagaaagaggtgtacatgccctcatccatcttccaggacgacttcgttatccctgatataagtgagcccggaacctggaaaatctccgcaagattctccgatggtctggaatccaatagctccacccagttcgaggtgaaaaagtacgtgctcccaaactttgaagtcaaaattacccccggaaaaccctacatcctcaccgtccccggtcacctggacgagatgcaactagacatccaggcccgctatatctatgggaaacctgtccagggtgttgcctatgtccgctttgggctactcgatgaggatggaaaaaaaacctttttcagagggttggagtcccagacgaagctcgtgaacgggcagtcccacatcagcctatcaaaggcagagtttcaggacgctctagagaagctcaatatgggtatcacggacttgcaggggctgcggctctacgttgcagcagccatcatcgagtctcccggaggagagatggaggaggctgaacttacatcctggtactttgtttctagtccatttagcctcgatctcagtaaaactaaacggcacctggtccccggggctcctttcctgctccaagcattggtacgtgagatgtctggctctcctgccagtggcattcctgttaaagttagcgctaccgtgtcgtcacccgggtcagttcccgaagtccaagacatccagcagaatacggacggaagcggccaggtgtcaattccaataatcattccacagaccatcagcgaactgcagctctccgtctctgcgggcagcccccacccagcgatagccagactgactgtcgcggcaccaccatcaggaggccctggtttccttagcatcgagcgcccagacagccgccctccccgtgtgggcgatacgctgaacttaaacctgagggccgtgggttccggtgctactttcagtcactactactatatgatcctttcacgggggcaaatagttttcatgaatagagagcccaaacggacacttacaagtgtgagcgtctttgtcgaccatcacttagcacccagcttctactttgtggctttctactaccacggtgaccacccagtagccaattctctgcgcgttgatgtgcaggcaggggcctgcgaaggaaagctcgagctctctgttgatggggccaaacagtacagaaacggagaaagtgtgaagcttcacctggagacagattcgctcgccctggtggcccttggtgctttggatacggctctgtatgctgccggctccaagagtcacaagccattgaatatgggcaaggtttttgaggcgatgaactcttatgaccttggatgtggcccagggggcggcgattcagccctgcaggtctttcaagccgcaggactcgcctttagtgatggggaccaatggacactgtccaggaagcgtctcagttgtcctaaggaaaagacaactcgcaaaaagaggaacgtgaacttccaaaaggcgatcaatgagaaacttggccagtatgcctcacccaccgctaagcgctgttgccaggacggtgtgacccggctgcctatgatgaggtcctgtgaacaacgtgctgcacgggtgcagcagccagattgtcgggaaccattcctatcctgttgtcagttcgctgaatctctccggaagaaaagcagagataaagggcaggccgggctgcagcgggctcttgagattctccaagaggaagaccttattgacgaggatgacatcccagtgcgatctttttttccagagaactggctatggcgcgtagagacggtagataggttccagattctcacactttggctccccgattcgctgacaacatgggagattcacgggctgagtcttagcaaaacgaaggggttgtgtgtcgcaacccctgttcagctgcgcgtcttccgagaatttcacctgcacctgcggctcccaatgagtgtgcggcggttcgaacagctcgagctgagacctgttctatacaactatctggacaaaaacttgacagttagcgtgcatgtgtcccctgtagaggggctctgcctggccggcggcgggggcttggctcaacaggttctcgtgccagccggttctgcccggcccgtcgcctttagcgtcgtgccgacagccgccgccgccgtgtcacttaaagttgtcgctcgcggatcctttgagttccccgtgggcgatgctgtgagcaaagtacttcaaatcgagaaagagggcgcaatccaccgagaggagcttgtctacgagctgaatcccttagaccaccgcgggcgcaccctggagataccaggtaactccgatcctaacatgatacctgatggcgattttaattcctatgtacgggttactgcctcagatcctctggacactctgggatccgaaggggccctcagtcccggcggcgtggccagtctgctgcggctcccccgaggatgcggcgaacagacaatgatctatctggcccccactctggcggctagtcggtatttggacaagaccgagcaatggtctaccctcccacccgagaccaaggaccatgcagtagacctcatccagaaagggtacatgaggatccagcagtttcggaaggctgatggaagttacgctgcctggctgagccgcgacagtagtacctggctgaccgcctttgtacttaaggtgttatccctggctcaggagcaggtggggggctcccctgagaagctccaagagacatcaaactggttattaagtcagcaacaggcagacggcagcttccaggatccctgtccggtactcgatcgcagtatgcaaggtggcctcgttggcaacgacgagacagtggccctgaccgcctttgtcacaatcgcattacaccatgggctagctgtcttccaagacgaaggtgccgagcctctcaaacagagggtggaagccagtataagtaaggctaactcgtttctgggcgagaaagcctcagctggactgctcggagcccatgccgcggctattacagcctatgcattgactctaacaaaggcaccggtcgacctcctcggtgtggcccataataaccttatggccatggcacaggaaaccggggataacttgtattggggatcggtaactgggtcccagagtaacgcagtctcccctaccccagctccaagaaatccatccgatcccatgccccaggcaccagccctctggattgaaacgacagcttatgcactgttgcacttgctcctccatgaaggcaaagcagagatggccgaccaagcctccgcatggctgactcgccaagggtcctttcagggaggcttccgctcaactcaggatactgtcatcgctcttgacgccctttccgcatattggatagcatcacataccacagaagaacgcggtttaaatgtaacactcagttcgactggccggaacggctttaaatcccacgcactgcagttgaacaatcgccaaatccgcggcttagaagaagagctgcagttttctctcggaagcaagatcaatgttaaggtgggcgggaactcaaagggcacgttgaaggtactgcgaacctataatgtgcttgatatgaagaacaccacttgccaagatctccaaatcgaggtgaccgttaaggggcacgttgaatataccatggaagcaaatgaagactacgaggattacgagtacgacgagcttcccgcgaaggatgatccggacgctcctctccagcccgtgactcctttacagctttttgaggggaggaggaaccgacggcggcgggaggcgccgaaagtggtcgaggagcaggagtcccgggttcactatacagtttgcatatggcgaaacgggaaggtgggcctatccggaatggcaattgccgatgtgactttacttagcgggttccacgccctgcgagccgatctcgagaagctgacctctctgagtgatcgttacgtgtcccactttgaaaccgagggcccccatgtcctgctctactttgatagtgtgcccacctcacgtgaatgcgtcgggttcgaagctgtacaggaggttcctgttggactggttcagccagctagtgccactctctacgattactataacccagaaaggaggtgtagtgtgttttatggagctccatcaaagagccgcctgcttgctacgctttgtagcgccgaggtttgtcaatgcgccgagggcaaatgtccaaggcagcgacgcgcactggaacgcggactacaggacgaggatggatacaggatgaagtttgcctgctactaccctcgtgtcgaatatggcttccaggtgaaggtccttagggaggactcacgcgccgccttcaggctctttgaaactaaaattactcaagtgctgcacttcacgaaagatgtcaaagctgcagctaatcagatgaggaatttcctggtcagagcctcctgtaggctgaggctggagcccggaaaagagtacctgatcatgggccttgacggcgctacttatgatctagaggggcatccgcagtacctactcgactccaatagttggatcgaggagatgccaagtgagcggctgtgtcggagcacacggcagcgggccgcatgtgctcagctgaacgattttctgcaagagtacggcactcaggggtgccaagtctag

SEQ ID NO: 112868 - DNA, 5097 bp, synthetic construct
  misc_feature 1..5097: note = Description of Artificial Sequence: Synthetic coding sequence
  source 1..5097: mol_type = other DNA
atgagattgctctggggccttatctgggctagtagtttttttaccctgagtctgcaaaagccacgcttgctgttgttctctccctcggtagtgcacctcggagttcccctgagcgtgggagtgcagctccaggatgtgcctagggggcaggttgtaaagggttccgtgttcttgcgaaacccctcacgaaacaacgtaccctgcagcccaaaggtggattttaccctgagctccgagcgggatttcgccttgctgtccttacaggtgccactgaaagatgccaagagctgtgggcttcaccagctcttaagggggccagaggtgcagctcgtggcccacagcccatggttgaaggactctctgtcgagaaccacaaacatccagggaattaacctccttttctccagccgccgcggccacctgtttctccaaaccgatcagcccatctacaatcctggacagagggtgagatatcgagtcttcgccctggaccagaaaatgcggccatccacagataccatcactgtcatggtagaaaattcccatggcctgcgggtccggaaaaaagaagtttacatgccctcctcaatcttccaggacgacttcgtcatcccggacatcagcgaacccgggacgtggaagatttccgcccggttctctgatggacttgagtccaattcatctacacagtttgaggtgaaaaagtacgtgttgcccaatttcgaggtgaaaattacccccggtaagccttatattctgaccgtgcccggccacctggacgaaatgcaattggatatccaggcccgttacatctacgggaaaccagtgcagggcgtcgcgtacgtgcggtttgggctgctagatgaggatggtaaaaagacattcttcaggggccttgagagccagacgaaactcgtgaatggacaatcacacatctccctgagcaaggccgaattccaggacgccctcgaaaagttaaacatgggtatcacagacctgcagggtctgcggctctatgttgcagctgccattattgaaagcccaggaggagagatggaagaagccgagctgaccagttggtactttgtgtcctccccattcagtctagacctcagtaagaccaagcggcatctggtgcctggggcgccttttctcttgcaggctctggttcgtgaaatgagtggtagccccgcctcaggtattccagttaaagtgagcgcaaccgtctcctctcctgggtctgtgcccgaggttcaggacatccagcaaaacacggacgggtccggacaagtgtcgatacctatcattataccacagacgatttccgagctgcagctaagtgttagcgctggctctcctcatccagccatcgcccggctgaccgttgccgccccaccctcagggggcccaggattcctgagtatcgaacgacctgacagccgcccacctcgcgttggcgatacacttaaccttaacctgcgagccgtgggctccggagccaccttcagccactattattatatgattctgagccgaggtcaaatagtctttatgaaccgagaacctaagcgtactcttacatccgtgtcagtctttgttgatcaccatctcgcacctagcttttacttcgtagctttttattaccacggtgatcaccccgtcgccaattcccttcgcgtggacgtccaggcaggcgcctgcgagggcaaactggaactctctgttgacggagctaaacagtatcgtaacggggagtctgtcaaattgcatttagagaccgactccctggctctcgtcgccctcggtgcccttgacaccgccctgtatgcagcaggcagtaaatcccataagcctctcaatatggggaaagtttttgaagctatgaactcttacgatctgggttgcggtccaggaggcggagatagcgccttgcaggtgtttcaggccgcaggactggccttcagtgacggtgatcagtggaccctctctagaaagaggctcagctgccccaaagagaagactacccggaaaaagcggaacgtcaattttcagaaggccattaatgaaaagctcggccagtacgcttctcctaccgccaagcggtgttgtcaggatggagttactagactgcctatgatgcgatcatgcgagcaacgtgcggccagagtccagcagccagactgcagagagccatttctaagttgttgtcagtttgcggagtccctacggaaaaaatctagggacaagggacaagctggtctacagagagcgctcgaaatcctccaggaagaggaccttatcgatgaagatgacatcccagtcagatccttctttccagagaattggttatggcgggtagagactgtagatcgattccagatcttaaccctgtggctgccagacagtctcacaacctgggaaattcacggattgtctctgagcaagaccaaaggactgtgtgtggccactcctgttcagctgagggtgttcagggagttccacctccacctccgcctcccgatgagcgtgaggcgatttgagcagcttgagctgcggcctgtgttgtacaactatctggacaagaacttaaccgtgtccgtgcatgtaagtcccgtagagggattgtgcttggcagggggaggggggctagcacaacaggtgctcgttcctgcaggctccgccaggccggtggccttctctgtggttccaaccgctgcggctgccgtgagtctaaaggtggtggctagaggctcctttgagtttcctgttggtgatgctgtctctaaggtgctgcagatagagaaggagggcgctatccatagagaagagctggtctacgagcttaacccactggatcacagagggaggacactggagataccggggaactccgatccgaatatgatccccgatggcgattttaactcttatgtccgggtcaccgcatcagaccccctcgatacactgggaagtgagggtgctctgtcacccggtggagtggcctcattactgagacttccgcgggggtgcggtgaacagaccatgatttatttggcacctactctcgcagctagccgatatctcgataagactgagcagtggtccaccctccccccggagaccaaggatcacgcagtggatttgatccagaaaggatacatgcggatccagcaattccgaaaagccgacggaagctatgccgcttggttgtcccgggactcatcaacttggctgaccgcctttgtcctgaaggtcctctcactggctcaagagcaagtcgggggcagtcctgagaagctccaagagacttccaactggctgctgtctcaacagcaggcggacggcagctttcaggacccctgtcctgttctggacaggtccatgcagggaggcctcgttggcaatgacgagactgtcgccttgaccgcattcgtcacaattgccctccaccacggacttgctgtgttccaggacgaaggtgctgaaccgctcaagcaaagagtcgaagcctccatctccaaggccaattcatttctaggggaaaaggcgtctgctgggctgttgggcgctcatgctgcagctatcaccgcgtacgctctgacgctgactaaggctcctgtggacctgttgggcgtagcacataataaccttatggccatggcacaggaaaccggggacaatttgtattggggtagtgtaactgggagtcagagtaatgccgtctctcccacccccgctcccagaaatccatccgaccccatgccacaagcccccgcgctgtggatcgaaaccaccgcctacgcattgctgcacttacttttacatgagggtaaagccgagatggctgatcaggcctccgcttggctgactcggcaaggatctttccagggcggcttccgctccacccaggatacggtgatcgctctagacgcgctgtcagcgtattggattgcatctcacacgacagaggagcgcggtctaaatgttacactaagctccaccggcaggaatgggttcaagtcacacgcccttcagcttaacaatcggcagatccgcgggctggaagaagaactacaatttagtctggggagcaagataaatgtcaaagttggagggaactctaagggaacacttaaggtgctccgcacctataacgtcctggatatgaagaataccacttgtcaggatttgcagatcgaagttacggtgaaagggcatgttgagtacacgatggaagcgaacgaagactatgaggactatgagtacgatgagctgcctgccaaggatgacccagacgcacccctccagcccgtgactcctcttcagctgttcgagggacgcaggaatcgtcgacggagggaggcacccaagttgaccagcctctctgaccggtacgtcagccacttcgagactgagggaccgcacgtgttgctgtactttgactccgttccaacttcacgcgagtgcgtggggttcgaggctgttcaagaggtccccgtcgggctcgtgcagccggcctccgccacactgtacgactattacaatccagagcggcgctgctccgtgttttacggagcccccagcaaatcacggctcctggcaacactctgctctgcagaggtttgccagtgcgccgaaggcaaatgtccaaggcagcggcgtgctctggaacgtgggttgcaggacgaggacggctatcgaatgaagtttgcctgctactatccccgggtggaatatggtttccaggtgaaagttctgcgtgaagattcaagagcagcattcaggctgttcgagacaaagatcacacaggtgctacactttacaaaagacgtgaaggccgcggccaaccagatgcggaacttcctggtcagggcttcatgccggctcaggctcgagccaggtaaggagtacctgattatgggcctggacggtgccacctacgatctggaagggcacccccagtacctactggattccaactcatggattgaagagatgcccagtgagcgtctgtgtcgaagcactcgccagcgcgccgcctgcgcccagctaaatgactttctccaggagtacggtacacaggggtgtcaagtctag

SEQ ID NO: 112869 - DNA, 813 bp, synthetic construct
  misc_feature 1..813: note = Description of Artificial Sequence: Synthetic coding sequence
  source 1..813: mol_type = other DNA
atgtgtcccgaggactccctgcaagtgccactgaaagacgctaaatcatgcggattgcaccagctgctccgaggccctgaagtccagctcgtcgctcactcaccatggctaaaggatagcctgtcccgcacaaccaacattcaagggataaatctgctgttttcctcccgaagagggcacctgttcctacaaaccgaccaacctatctataatcccgggcaaagagtccgatacagagtgtttgcactggatcagaaaatgaggccttccacggacactatcacagttatggttgagaactctcatggtctgcgggttaggaagaaagaggtgtacatgccttcctcaatctttcaggacgacttcgtcatcccggacatttccgagcccggaacatggaaaatcagtgcacgcttctcagacgggctggagtccaattcctcaacgcagttcgaagtcaagaaatatgtccttcctaatttcgaagtcaagataacaccgggtaagccctatattttgacagtcccaggccacctggacgaaatgcaactggacatacaggcccggtacatctacgggaaacccgtccagggagtagcatatgttaggtttggcttgctggacgaggatggcaaaaagactttctttcgaggccttgaaagtcagactaaattagttaatggccagtcccatatttctctgtctaaggccgagttccaagatgcactcgaaaaattaaatatgggcatcacagatctccagggcttacgcctttacgttgctgccgccattatagaaagtcctgggggatag

SEQ ID NO: 112870 - DNA, 5097 bp, synthetic construct
  misc_feature 1..5097: note = Description of Artificial Sequence: Synthetic coding sequence
  source 1..5097: mol_type = other DNA
atgcggttactgtgggggcttatttgggcatcaagcttcttcacgttgagcctgcaaaagcctcgactgttgttgttttcgccaagtgttgtacacctcggcgtcccactgtcagtgggggtccaacttcaggacgtgcctagaggccaagttgttaagggttctgtgttcttgaggaatcccagtcggaacaacgtgccttgctctccgaaggtcgactttacactgagctccgaacgcgacttcgcattgctgagtctgcaggtccctttaaaggatgccaagtcgtgcggcctgcaccagttgcttagaggccccgaagtgcagctcgtagcccattcaccctggctcaaagattccctcagccgcactactaatatacaaggtatcaatctgctgtttagtagtcggaggggacacctgttcttgcagaccgaccagcccatctataatcccggtcagcgtgtgcggtacagagtattcgcgttagaccaaaagatgcgaccatcaactgatactatcaccgtgatggtagagaactctcacggcctgagagtcaggaaaaaagaggtgtacatgcctagtagcatcttccaggacgactttgttatccccgatatcagcgagcccggcacttggaagatcagcgctcgcttcagcgatgggctggagagcaactcttctacccaatttgaagtcaaaaaatatgtattaccgaatttcgaggtgaagatcactccaggtaaaccctatattttgacggtgcccgggcatctggatgaaatgcagctagatattcaggcaagatacatttacgggaagccggtgcaaggcgttgcctatgtccggttcgggctgcttgacgaagatggcaagaagacatttttcagaggcctcgagtcacaaaccaagttggtgaacggacagagccatatttctttatcaaaagctgaatttcaggacgccctggagaagctcaatatgggcattaccgacctgcagggactgcgactgtacgtggccgccgctatcatcgaatacccaggcggcgagatggaagaggctgagctgacctcatggtacttcgtgtcttctccattctctttggacctatccaagaccaagagacaccttgtacccggggcccccttcctgctgcaagcgctcgttcgggaaatgagcggctctccagcctctggcattccagtgaaggtatccgccaccgtgagctcacccggctccgtgcccgaagtgcaggacatccaacaaaacactgatggatctggacaagtttccatccccattatcatcccacaaacaatctctgaactccaacttagcgtcagtgcaggctctccacacccagctatcgcccggctgacggtggcagcacctccttctggagggccaggctttctgagtatagagtggcccgacagtcgccctccgagggtaggagataccctgaacctgaacttacgcgctgtcggttcaggggcaactttcagccactactattatatgatcctgtcacgcgggcagattgtttttatgaatagggagcccaaacgtacacttacaagcgtctccgtgttcgtcgatcatcatctggcaccttcattttacttcgtggctttctactaccacggcgatcatcctgttgccaatagcctaagggtcgacgtccaagcaggagcatgcgagggaaaactggaactctccgtagatggcgcaaagcagtacagaaacggcgagtcagtgaagctccatcttgagaccgacagcttagccctggtcgccttaggcgccttggacactgctctgtacgctgccggcagcaaatcccacaagccactgaatatgggaaaggtgtttgaggctatgaattcttatgatctgggctgtggcccagggggcggagacagcgccctccaggtgtttcaggctgccgggctagccttttcggacggggatcaatggacactttcacgaaaacggctttcctgccctaaagagaaaacgacgaggaagaagagaaacgtcaacttccagaaggcaattaatgagaagcttggtcagtacgcctccccaacagctaagcgctgctgccaggacggggttacccgtctacctatgatgaggtcatgcgagcagagggccgcacgcgtacagcagcctgactgcagggagccgtttttgagctgctgtcaattcgccgagtcactccgcaaaaagtcccgagataaggggcaggccgggctccagcgggccttggagattctgcaggaggaagacctgatcgatgaagacgacatcccagtgcggtctttttttccagaaaactggctgtggcgtgtcgaaacagtcgatcgattccagatcctcactctttggctaccggactccctcacgacttgggagattcacgggttatccctcagtaaaaccaaaggcctctgcgtggctactcctgtacagctcagagtattccgggaattccacctccatttgcgtctgccaatgagcgtccggaggtttgagcagctggaattgcggcctgttctctacaactacctggacaaaaacctcaccgttagcgtgcacgtgagccctgtagagggtctgtgcttggctggaggaggcggcctagcgcagcaggtgctggtaccggccggaagtgcccggcctgtggcattctcagtcgtccccaccgctgcagccgccgtgtcccttaaagttgtagctcggggaagctttgaattccccgtgggcgatgctgtgtccaaagtattgcagatcgagaaggagggggctatccacagagaggaactggtatacgagctgaacccgcttgaccacagagggaggacacttgagatcccagggaattcagatccgaatatgattcccgacggcgacttcaatagctacgtgcgagtcactgcctccgatcctctggacacgctcggttcagagggggccctgagtcctggtggtgtggctagcctgctcagactgcctaggggctgcggagaacagacaatgatatacctggcccctaccctggcagcctcaaggtacctggataagacagagcagtggagtacactgcctcccgagaccaaagaccacgccgtggatctgatccagaagggatacatgaggatacagcagtttcgtaaagctgacggcagttatgccgcgtggctgtctcgggattctagcacttggctgactgcctttgtcttgaaggtccttagtcttgcgcaggagcaggtgggtggaagtcctgagaaactccaggaaacgagtaactggttactgagtcagcagcaggcggatggatcattccaggatccttgcccggtcctggatcggagtatgcaggggggcttagtgggcaacgatgaaacagtggcacttaccgcctttgtgaccatagcacttcatcacgggctggctgtcttccaggacgagggagccgaacccttgaaacagcgagtggaagcctcaatttctaaggccaactcatttctgggcgaaaaggcatctgctgggctgctgggcgcccacgccgctgccattacagcctatgccctcacactgacaaaggctcccgtcgacctgctgggagtggcacataacaacctgatggcaatggctcaggagaccggcgacaacctttactggggtagcgtgacaggatcacagagtaatgctgtcagccctacaccggctccaaggaaccccagcgacccaatgccccaggctccggccctttggattgagacaactgcatacgcgcttttgcacctgctcctgcacgaaggaaaggctgaaatggctgatcaggccgcggcatggctgactcgacagggatcttttcagggagggtttagatctacccaagacaccgtgatcgctctggatgctttatccgcctattggattgcttcacatacaaccgaggaaaggggcctaaacgtaacgcttagttctaccgggcgaaacggttttaaaagccatgccctgcaactgaacaatcggcagattcgcggactggaggaggagctgcaattttctctggggtctaagatcaacgtcaaggtgggagggaattcaaagggcacattaaaggtcctccggacatataatgtgctcgatatgaaaaatacgacatgtcaggaccttcagattgaagtcaccgtcaagggacatgtggaatacactatggaggctaacgaagattacgaagattacgaatacgacgagctaccagccaaagacgatccagacgctccactgcaacccgtcactccgctgcaattgtttgaggggcggcggaaccgcagacggcgcgaggctccgaaattgacctcactctcagacaggtatgtgtcacacttcgagacggaggggccccatgtgttactgtacttcgattccgtccctacgtctcgggagtgcgttggcttcgaagcagttcaggaagtgcctgtcggcctggtgcaaccagcttctgccactctgtacgactattacaatccggaaaggcggtgctccgtcttttatggggcaccttcaaagagtcgcctcttggccacgctgtgcagtgcggaagtgtgtcaatgtgccgagggaaagtgtccacgccaacggcgggcactggagcgggggctgcaggatgaggacggctaccgcatgaaatttgcgtgctattatcctcgcgtggagtacggctttcaagtgaaggtgctacgggaggattcccgagccgcatttcgactcttcgagaccaagattacccaggttcttcacttcactaaagacgttaaagcagctgctaaccagatgcgcaactttctggttcgggcctcgtgtcgacttagactggagccaggtaaagaatatctcatcatgggtttggacggagcaacatacgatttagaaggtcaccctcagtacctccttgacagcaattcctggatcgaggagatgcctagcgagcgcctgtgtcgcagcacgagacaaagagccgcatgcgcccagttgaacgattttctgcaggaatacgggacacagggatgccaggtgtag

SEQ ID NO: 112871 - DNA, 1536 bp, synthetic construct
  misc_feature 1..1536: note = Description of Artificial Sequence: Synthetic coding sequence
  source 1..1536: mol_type = other DNA
atggctaaggggctgagcgtgcaaaacgacaagcaccccggatatcagcccgcgctcctgctttcccctggggccccactgtttgctgatgggcctgcttatgccttgttacacctactgctgcatgaagggaaagccgagatggccgatcaggcagctgcttggttgactcggcaggggagctttcagggagggttccggtccacacaggatacagtcattgcgcttgacgccctgtccgcctactggattgcgtcacacaccaccgaagagaggggcctcaatgtgactctgtcctccaccggacgcaatgggttcaaatcccatgcactccaacttaacaacaggcaaatacgggggctagaggaagagctgcagtttagcctaggctccaaaatcaatgtgaaggtcggcgggaattctaagggcactctgaaggtactcagaacctacaatgtgcttgacatgaaaaatacgacctgccaggacctccagattgaggtgaccgtgaaaggtcatgtcgaatatacgatggaagctaatgaagactacgaggactacgagtatgacgagcttccggccaaggacgaccctgatgctccactgcaaccagttactcccctccagttgttcgaggggaggcgcaatcgcagacgccgtgaggctcccaaggtggtggaggagcaggaaagtagggttcactacacagtctgcatatggagaaatgggaaggtggggctgagcgggatggctatcgctgacgtgactctgctgtccgggtttcacgcacttagggcggatctggagaagttgacttccctcagcgatcgctacgtaagtcactttgagaccgagggaccccatgtgctattgtacttcgatagcgtcccaacgtcaagggaatgtgtcggcttcgaggccgtccaagaagtgcccgtcgggctagtgcagcctgcatccgcaacactatacgactattacaaccccgaacggagatgttccgtcttctacggcgcccccagtaagtcccggctcctggcaacattgtgctccgccgaagtgtgccagtgcgccgaggggaagtgccctaggcagcgcagagctctcgagcgaggtctccaggacgaggacggctatcggatgaaatttgcgtgttattatccccgggtcgagtacggttttcaggtgaaggtgctgcgagaggatagcagggcagcattcaggctgtttgaaactaagatcacacaggtcctgcattttacaaaagacgtgaaggcagcagcaaaccaaatgcgaaattttctggtccgcgcctcgtgccgcctccggctcgaacctgggaaggaatacctaatcatgggcttggatggcgccacctacgacctcgaggggcatccccaatacctgctggacagtaacagctggatcgaggaaatgccctctgagcggttgtgtcgaagtacacgccagagggccgcctgcgcccaactcaacgacttcctgcaggagtacggcactcaaggctgtcaggtctag

SEQ ID NO: 112872 - DNA, 5097 bp, synthetic construct
  misc_feature 1..5097: note = Description of Artificial Sequence: Synthetic coding sequence
  source 1..5097: mol_type = other DNA
atgcgtcttctatggggactgatatgggctagcagtttcttcaccctgagcctgcagaaacctcgactcctgctcttttctccgtcagtagtgcacctgggggtcccccttagcgtcggtgtgcaattacaggatgttccccggggacaggtggtcaaggggagcgtgttccttcgcaatccgtcacgtaataatgtcccttgtagtccaaaagtggactttacccttagctccgaaagagacttcgctctgctaagcctacaggtacccctaaaggatgccaaatcatgcggccttcatcagctgttaagggggccagaagttcagctcgtcgcgcactcaccctggctcaaagactccctgtccagaaccaccaacattcagggcattaatttgctcttttcctctcggaggggccacctgtttctgcagacagaccagcctatctataacccaggtcagcgcgtacggtacagggtgtttgctctcgaccagaagatgagaccttctaccgacacaattaccgttatggtggaaaatagtcatggtctccgggtgagaaaaaaggaagtctacatgccgtccagtatctttcaagacgatttcgtgatccccgatatctccgaacctggcacatggaagatcagcgctaggttcagcgatggcctggagagcaactccagcacacagttcgaggtcaaaaagtatgtgcttccaaactttgaagtcaagatcacgccaggaaaaccttacatacttacagttccaggccatctggatgaaatgcagctcgacattcaagccagatatatctatgggaagccagtgcagggagtcgcctacgtcagatttggtctgctggacgaagatggtaagaaaacattctttcgggggctggaaagtcagaccaaactggtgaacggccagtcccatattagcctgagtaaggcagagttccaggatgctctggaaaaactgaacatgggcatcacagacttgcaaggcctgagattgtatgtcgccgctgccattatcgagagtcccggcggtgagatggaggaagccgaactcactagctggtactttgtttctagccccttctccttggatctgagtaaaacgaaacgacacctggtgcccggagccccattcttgctgcaagccctggtccgggaaatgtccggatctcccgcttccggcataccggttaaggtgtccgccacggtctcctcccccggatcagtccctgaggttcaggacatccaacaaaacacagatgggtcgggacaggtgtccattcccattataataccgcagaccatcagtgaactgcagctcagcgtgagtgcaggaagcccacacccagctatagcacggctgacggttgctgctcccccctctggagggcctggcttcctctcgatagagcgaccggacagccgaccacctagggtgggcgatactctgaacttgaatttgagggcagtggggtctggcgcgaccttcagccattattattacatgattttaagtagggggcaaatcgtctttatgaacagggagcctaaaaggaccctcacctccgtgagtgtttttgttgaccatcatctggcgcctagtttctacttcgttgcgttctactaccacggcgatcaccccgtggctaactcattgcgggtggatgtgcaggccggtgcctgcgaaggcaagctagagctctcggtagatggtgccaagcagtataggaatggcgaatcggtaaaactgcacttggagaccgactcacttgcactggtcgcactaggagcgctggatacagctctgtacgccgccggtagcaagagccacaagcccctgaatatgggtaaagtgtttgaggcgatgaattcttatgacctggggtgcggcccaggtggaggtgacagcgcgcttcaggtcttccaggccgctgggcttgcgttttctgatggggaccaatggaccctgagcaggaaacgactgagctgtcccaaagaaaaaacaacgaggaagaagagaaacgtgaactttcaaaaggccatcaatgagaagctgggtcaatacgcctcccccacagccaaacggtgctgccaggacggagtgactcgactccccatgatgagatcctgcgaacagagggcggcacgcgtccagcaaccagactgtagggaaccattcctctcttgttgtcaatttgccgaatctttacggaagaaatccagagacaagggccaagctgggcttcagagagcgctggaaatcctgcaggaagaggatctcatagacgaagatgacattcccgtgcggtcattttttcctgaaaactggctctggagagtggaaactgtcgatcggttccagattctcactttgtggctgcccgattcgctcactacctgggaaattcatggcctgtcgttgtctaagacaaaggggctttgtgttgctactccagtgcagcttcgcgtttttcgggagtttcatcttcatctgagactgccgatgagcgtgcgcagatttgagcagttggaattaagacccgtcctgtataactacctggataaaaacctgactgtctcagtgcatgtgagcccagtggaaggcttgtgcctggccgggggtggcggcctggctcagcaggttttggtaccagcggggtccgcacgtcctgtagcgttcagcgtggtgcccaccgccgccgcagcagttagcctgaaagttgttgctaggggatcattcgaatttcccgtgggggacgccgtttccaaggtgctgcagatcgagaaggagggggcgatacacagagaagagctagtgtatgaacttaatccattggaccatcggggacgtactcttgagatcccgggaaattcagatccgaacatgattccggacggcgactttaacagctatgtgagggtgacagcttcagaccctctggataccttgggatctgaaggggcactgtcgcctggaggagttgcctccctcctccgccttcccaggggctgcggagaacaaaccatgatatacctggctcctactttggcagcaagcagatatctggataagaccgagcagtggagcaccctgccccccgagacgaaagaccacgcagtcgacctgatccaaaaaggatacatgaggattcagcagtttcggaaagctgatggatcatatgcagcatggctctcccgggacagctcaacctggctaacagcctttgtcctcaaggtgctaagtctggcacaggagcaggtcggaggctctcctgagaaattgcaggagacgtcaaactggctgttatcccagcagcaagcggacggctccttccaggacccctgccccgtgcttgaccgatctatgcagggtggcttggtgggtaatgacgagactgtggccttgacagctttcgtaacgattgctctacaccatggtttagctgtgttccaggatgaaggcgctgaacctctgaaacagagagtggaggccagtattagcaaagcgtcaagcttccttggcgaaaaagcttccgctgggctcctgggagcccatgctgcggcaattactgcatacgcgctaactttgaccaaagcccctgtggatctgcttggggttgcgcataacaatctgatggcgatggctcaggaaacaggggataatctgtattgggggtccgtaactggctctcagtcaaatgccgtgagtcccacccccgccccccgcaatccctccgaccctatgccccaggcacccgccctctggatcgagaccaccgcctacgccctgctgcatctgctgctacatgaaggcaaggctgaaatggccgaccaagcagctgcatggttgacaagacaggggagcttccaggggggctttaggagtactcaagatacagttattgcccttgacgcattgtctgcatattggatcgcatcacacacgaccgaagaacggggactgaacgtgacgctatctagcaccggcaggaacggattcaaaagtcatgccctccagctgaataaccgtcagattcgtggccttgaggaggaactccagttctctctggggagcaaaattaacgtgaaggtcggcggaaactcaaaggggacactgaaagtgctcaggacttacaacgtgctggacatgaagaacacaacttgccaggacttgcaaatcgaagtcactgtcaaggggcacgtggagtacaccatggaagcgaatgaagactacgaggactatgagtacgacgagctccctgctaaggacgatccagatgccccactgcaaccagttacccccctgcagttgtttgaaggccggcggaataggcgacgacgggaggcgccaaaattaacttccctgtcagatagatatgtcagccatttcgagactgaggggccacatgtgttgctttattttgacagtgtgcccacctcacgggagtgtgtcgggttcgaggccgtgcaggaagtgcctgtgggcctggtccaaccagcctccgcaacactgtacgactactataatccagaacgcaggtgctctgtcttttacggcgctcccagtaagtcacgccttctcgcgacactgtgttctgcagaagtgtgtcagtgcgctgaaggaaagtgccctcgacagcggcgcgctctcgagcgggggcttcaggacgaagacggttacaggatgaagttcgcatgttattatccgagggtagagtatggcttccaggtgaaggtgttaagagaagactctagagccgcattcagactgtttgagaccaagataacacaggttctgcatttcaccaaggatgtgaaagctgccgccaaccagatgaggaatttcctggttcgggcctcatgtcggttgaggctggaacccggcaaagagtatcttataatggggctcgatggtgccacttatgatcttgagggccacccccagtacctattagatagtaactcttggatcgaggagatgccctctgagaggctgtgtcggtcaacacgacaacgggcggcctgcgcccagctcaatgatttcctgcaagagtacggcactcaggggtgccaggtctag

SEQ ID NO: 112873 - DNA, 5097 bp, synthetic construct
  misc_feature 1..5097: note = Description of Artificial Sequence: Synthetic coding sequence
  source 1..5097: mol_type = other DNA
atgaggctgctatggggccttatctgggcctctagcttttttactctgtcattgcagaaaccccgtctcttgctgttttctccatctgtggttcacctgggagttccactctctgtcggcgtgcagctgcaggatgtgcctagagggcaagtggtgaagggctcagtgttcctcagaaatccttcccggaataacgtcccctgctccccaaaagtggatttcaccctgagctccgagagggattttgccttgctgtccctgcaggtccctcttaaagatgcgaagtcttgcggcctgcatcagttactccgcggccccgaggtgcagcttgtggcgcactctccatggcttaaggattcactaagccgaactaccaacatccaagggattaatctgctgttttcgagtcggagggggcacttgtttctgcaaacagatcagccgatctataaccccggccagcgcgtccgttatagagtattcgcattggatcagaagatgaggccgagtacagataccatcacggtgatggtggagaacagccatggattacgcgtccgaaagaaggaagtctatatgcctagctctatctttcaggatgatttcgtcatccccgacattagcgaaccggggacttggaagatcagtgctcggttttcggacggcctagaaagcaacagttccacccagttcgaagtaaagaagtacgtgctgccaaatttcgaagtcaaaatcacaccagggaagccgtacatcttgacagttcctgggcatctggatgaaatgcagctcgacatccaggctaggtatatctacgggaaacctgtccaaggggtggcttatgtgcgcttcggactactggacgaggacggcaaaaagactttctttaggggactcgaaagccagacaaaactggtgaacggccaaagccacatctcgctttccaaggccgaattccaggatgcattggagaaattgaatatggggatcactgatctccagggactgcgactgtacgtcgccgcagcaattattgagtacccaggaggcgagatggaggaggcagagttgactagttggtactttgtgagcagtccctttagcctcgatttgagcaagaccaaaaggcatctggtgccaggggccccctttcttctccaagctctcgtgcgagagatgtctggttctccagcctctggaatcccggtcaaagtcagcgcaaccgtgtccagccctggttctgtgccagaagtgcaggatattcagcagaataccgatgggtcaggccaggtatcaatacccatcattatcccccagaccattagtgaactccaactgagcgtcagtgccggatctccccaccccgctatcgcacgcctcactgtcgccgctcctccaagcggcgggccagggtttctctctattgaaaggccagattcccggcctcccagggttggagatactctcaacctgaatcttagagctgtaggctccggggccactttctctcattactactacatgatcctttcccgaggacagatcgtgttcatgaaccgcgagccgaagaggaccttgacgtcagtgagcgtgtttgtggaccaccatctggcaccttcattttattttgtggcattctattatcatggggatcaccccgtggctaattcactgagggtcgacgtccaggctggcgcttgcgaggggaagctcgagcttagtgtagacggcgccaaacaatacagaaatggcgagagtgtgaaactgcatctggaaactgactccctggccctcgtagctcttggcgccctggatactgctctgtacgcggctgggagcaaatcccataagcccctgaacatgggaaaagtgtttgaggccatgaattcatatgatttgggctgcggaccggggggaggagattccgctctgcaggtgttccaggcagcaggtctcgccttcagtgacggggaccagtggacattaagccggaagaggttgagttgccctaaagaaaaaacaacgcgcaaaaaacgtaatgtgaattttcaaaaagctataaacgaaaagttaggacagtacgcttcgcccacagccaaacgttgctgccaggacggcgtcactcggctgccaatgatgaggtcttgcgagcagagagccgcacgcgtccaacaacccgactgtagagagcccttcctgtcgtgttgccagtttgccgagtcactgaggaagaaaagccgagacaaagggcaggcaggcctgcagagggctctggaaatcctgcaggaagaagacctcatcgacgaggatgacattccggttcgtagtttcttccccgaaaactggttgtggcgcgtcgaaactgttgaccgctttcagattctgaccctgtggctaccagacagtcttaccacttgggaaatccacgggttatccctgtctaagacaaaggggctatgcgtggccaccccggtccaactccgagtttttagagaatttcatcttcatttgcggctgccaatgtcagtgcgaagatttgagcaactcgagctgcggccagtcctgtataactaccttgataaaaacttgactgtatctgtgcacgtgtctcctgtcgaggggttgtgtctggctggaggcggcggtctggcccagcaagtactggtacccgccggcagcgcccggccggtggccttttctgtcgtgcccaccgctgcggcggccgtttcgctaaaggtcgttgcccgtggctcttttgagtttccagttggggatgcggtgagtaaggtcctgcagattgagaaagagggggcaattcatcgtgaggaactcgtgtatgaacttaatccgctcgaccatagaggccggacgttagagatcccaggaaactctgatcccaacatgatcccggatggagatttcaattcatatgtccgggtaaccgcaagtgacccactggacacccttggctccgaaggcgcgctgagccctggaggagtggcgtccctgcttagactaccaagagggtgtggagaacagacaatgatatacctcgctcctacgctggctgcatcgcgctacctcgacaagacggagcagtggagtaccttgccccccgaaactaaggaccatgcagtggatcttatacaaaaaggctatatgcgaatccagcaattcaggaaagctgacggttcttacgccgcctggctcagcagggactcctccacctggctgaccgccttcgtactgaaggtcctgtcactcgcacaggagcaggttggcggcagccccgaaaagctgcaggagaccagcaattggctccttagccaacagcaggccgacggaagtttccaagacccctgtcccgtgctggaccgctcaatgcaaggggggttggtggggaacgacgagaccgtcgcactcactgcctttgtcactattgctctccaccacggactcgcagtcttccaggatgaaggcgcagagccactaaagcagagagtcgaagcgtctatctctaaggctaattccttcctgggggaaaaggccagcgcgggcctgctgggtgctcacgctgcagctataaccgcttatgcattgacccttacaaaggctcccgtggatctactgggagttgcccataataatctgatggccatggctcaggagaccggggacaacctatattggggtagcgtgacagggtcacagtccaacgccgtatcacctacacccgctccgcgcaacccttccgaccccatgccccaggcacctgctctgtggatcgagacgaccgcctacgcattgcttcatcttttgttgcacgaaggtaaagcagaaatggcagaccaagccgcagcctggctgaccaggcaagggtccttccagggaggatttcgatctacccaagatacagtcattgcactggacgcattgtctgcctactggatcgccagccacactacggaagaaagggggctgaatgtgacactttctagtacaggcagaaacgggtttaagagtcatgcattgcaactaaacaacaggcagataagaggcctcgaggaggaactacagtttagtttaggatctaagataaacgtaaaggtaggcggcaactccaagggcacactgaaagttctccggacatacaacgttctggatatgaagaatacaacatgtcaagacctgcaaatagaggtgaccgtcaaaggccacgtggagtacacgatggaggccaatgaagattacgaagactacgagtacgacgaactgcctgcaaaggatgacccagatgctcccctccaaccggtgacacccctgcagctgttcgaggggcgccggaacaggcgtagaagagaggcaccaaagcttacaagcctaagcgaccggtatgtcagccacttcgagaccgaggggcctcatgtcctcctttacttcgacagcgtccccacatcacgcgagtgcgtgggtttcgaagcagttcaggaggtgccagtcggcctggttcagcccgcctctgccactctctacgattactacaatcctgaaaggcgatgctcagtgttctatggtgctccgtccaagagccggcttcttgctactctgtgttcagcagaggtctgtcagtgcgccgaaggaaagtgtcctcgacaacgtcgcgccctggaacggggactgcaggatgaggacggttaccgtatgaagttcgcttgttattaccctcgcgtggagtacggtttccaagtcaaggtcctgcgggaagactcgcgggctgcctttcgtctgttcgaaacgaaaattacgcaggtgctacatttcactaaggatgtgaaagccgctgctaatcaaatgcggaacttccttgtccgcgcctcctgtcgcctgagactggaaccaggaaaagagtatctgatcatgggcctcgacggagccacatatgatctggaagggcacccacagtacctgctcgactccaactcttggatcgaagagatgccaagcgagcgcctctgccgctctactcggcaaagggccgcttgcgcccagctcaacgatttccttcaggaatatggcacccaggggtgtcaggtctag

SEQ ID NO: 112874 - DNA, 1536 bp, synthetic construct
  misc_feature 1..1536: note = Description of Artificial Sequence: Synthetic coding sequence
  source 1..1536: mol_type = other DNA
atggcaaaaggcctgagtgtgcaaaacgataaacaccctggttaccagcctgctctgctgttgtctccaggagcccctctgttcgctgacggaccagcctacgctttgcttcacctgctactgcatgaaggaaaggcggagatggctgatcaggcagccgcttggcttactcgtcagggaagcttccagggtgggttcaggagcacccaggacacggtcatcgctctggacgcactgagcgcttattggatcgcctctcacacaacggaggagcgaggccttaacgtgactcttagtagcaccggtcgcaacggctttaagagccacgcactgcagcttaataatcgccaaatcaggggcctggaggaagaactccagttttccctaggtagtaagatcaatgtcaaggtgggaggaaattccaaaggaacacttaaggtactgaggacctataatgtgctcgacatgaaaaacaccacatgccaggatctgcagatcgaagtgacagttaagggacatgtggaatatactatggaggcaaacgaggattatgaggattatgaatatgacgagctcccagccaaggatgatcccgatgccccccttcaaccagtgaccccactccaacttttcgagggtaggcggaaccgcaggaggagagaggcgcccaaagtcgtcgaggaacaggaaagcagggtgcactacaccgtgtgcatttggagaaacggcaaggtaggattgtccggaatggctattgcagacgttaccttgctcagtggcttccacgcgctacgagctgacctggaaaagctgaccagcctctctgaccggtacgtgagtcacttcgaaacagaaggaccacatgtgctcttatatttcgactcagtccccacctctcgggaatgtgtcggattcgaggcggtgcaagaggtgcccgtcgggctcgtgcagccagctagcgcaacgttgtacgattattacaaccccgagaggcgatgctccgtattctacggcgcgccatctaagtccagattgttggccacactatgtagcgccgaggtgtgccagtgtgccgagggaaagtgtccccggcagagaagggcacttgagcgcggtttgcaggatgaggatgggtaccgcatgaagttcgcatgctactatccgagagttgagtatggcttccaggttaaggtgctgagggaagactcaagagctgccttccgattgtttgaaactaaaattacacaggtgctgcatttcacaaaggacgtaaaggccgcagcaaaccagatgcgaaactttctagtccgagccagctgcaggctgagactggaacccggtaaggaatacctgataatgggcctagatggtgccacgtacgatctggagggccacccacagtatctgttggattcaaattcctggatcgaggaaatgcctagtgaacggttatgcagatctactaggcagagagctgcatgcgcccaactgaatgatttcttgcaagagtacggtactcagggatgccaagtgtag

SEQ ID NO: 112875 - DNA, 813 bp, synthetic construct
  misc_feature 1..813: note = Description of Artificial Sequence: Synthetic coding sequence
  source 1..813: mol_type = other DNA
atgtgtcccgaagacagcctgcaggtgcccctgaaagatgcaaagagttgtggcttgcaccagcttcttcgggggccagaggtgcagctggtggcacacagcccttggttgaaagattcactgtcacgaacaaccaatattcaaggaatcaaccttctgttcagttcccgccgcggccatttgtttctgcaaactgaccagcccatttataatcctggccaaagggttagataccgggtctttgccctagatcagaaaatgcgaccttccaccgacactataaccgtgatggtcgagaactctcacggattacgcgtgcggaagaaggaggtctatatgccctcctctatctttcaggatgactttgtgatcccagatatttccgagcccgggacatggaagatcagcgctcgtttcagcgatggactggagtccaatagctccactcagtttgaggttaagaaatacgttctcccaaacttcgaggtgaagatcacacccggcaagccttacatccttaccgtgcccggacacctcgacgaaatgcagctcgacatccaggccaggtacatctatggtaagcctgttcagggggtggcctacgtacggtttgggctcctcgatgaggatggaaagaaaacgttctttcgcgggctggagtcccagactaagcttgtcaatggacagtcccatatttccctgagcaaagcagagtttcaggacgcgctcgagaagcttaacatgggcatcactgatctccaggggctgcgattatacgtcgccgctgcgattatagagtaccccggggggtag

SEQ ID NO: 112876 - DNA, 5235 bp, synthetic construct
  misc_feature 1..5235: note = Description of Artificial Sequence: Synthetic coding sequence
  source 1..5235: mol_type = other DNA
atgagactcctgtggggtcttatttgggcatcctccttctttactctgagcctgcagaagccccgtctacttctgttctcccctagcgtggtgcatctcggcgtgcctctatccgtgggtgtgcagctccaggacgtacctagaggtcaggtggtaaagggctcagtatttctcaggaacccaagccggaacaatgtgccttgctccccaaaagtggacttcaccttgagtagtgaaagagatttcgctctgctgagcctgcaggtcccgctgaaggacgctaagtcttgtgggctgcatcaactccttcgcggacctgaagtgcagctggtggcccattcgccatggctgaaggacagcctgagcagaaccaccaatattcaggggatcaacttgctcttctcttcgaggcgcggacatctttttctgcagacagaccaacccatctataaccctggccagagagtcaggtacagagtatttgctctcgaccagaagatgaggccgtccacggacactatcaccgtgatggtggagaattctcatgggctacgggtaagaaagaaggaagtttacatgcctagctctattttccaggatgactttgtcatccccgatatttctgagcccggaacttggaagatcagtgcgcggttcagcgacggcctggagagtaattcctccacccagtttgaagtaaagaagtatgtcctgcctaactttgaggtgaagatcacgcccggaaagccgtatattcttactgtcccaggacatttagacgagatgcagctggatatccaagctaggtatatctatggcaagcccgtgcagggtgtcgcttatgtcaggttcggtctgctggatgaggatggcaagaaaacgttttttcgcggtctggagagtcagactaagttggtcaatgggcagtcccacataagtctgagcaaagctgaattccaggatgccctagagaagctgaatatgggtatcactgacttgcaaggattaagactatatgtggccgccgccatcatagaatctcccggcggtgaaatggaggaggccgagctgaccagctggtacttcgtaagttccccattctccttagacctctccaagacgaaacgccatctggtaccaggtgctccattcctcttgcaggcccttgtccgggaaatgagtggaagcccagcctccgggattcccgtgaaggtttcagctacggtgtccagccccggttccgtgcccgaggtccaggatatccaacaaaatacagacggcagtggacaggtgtcaattcccattatcatacctcaaacaatctctgaacttcaattgtccgtgtctgcaggctcacctcaccctgctatcgcgcgcttgacggtggctgcaccaccctccggaggtcctgggttcctcagtatcgagcggcctgatagccgacctccacgcgtgggcgatacacttaatctaaatcttagagctgtgggatcaggcgccacattctctcactactactacatgatcttgtcccgcggccagatcgtattcatgaatagggaaccgaagcggacacttacaagcgtctcggtctttgtcgaccaccatctggctccttctttttactttgtggcattctattatcacggcgaccacccagttgcaaactccttgcgagtggatgtccaggcaggggcctgcgaggggaaactggagctgtccgtggatggggctaaacagtatagaaacggggagagtgtgaagctgcatttagaaacagactctctggccctggtcgccctgggggcactagacacagccttgtacgctgcaggctccaaaagtcacaagcccctcaatatggggaaagtgttcgaagccatgaattcctatgacctcggatgcgggcccggtggtggggattccgccctccaggtgttccaagccgccggccttgctttctcagatggagaccagtggactttgtctcgaaaaaggctttcctgtccaaaagagaagaccacacgcaaaaaacgtaatgttaacttccaaaaggctatcaacgagaagttggggcagtatgcaagccccacagccaaaagatgttgccaagatggcgtaactagactccccatgatgcgcagttgtgagcagcgtgctgccagggtgcagcagcccgattgtcgcgaaccatttttgtcctgttgtcagtttgccgaatcgctgcgaaagaagtcgagggacaaaggacaagcgggcctccagcgtgcactggagatcttgcaagaggaggatttgatagacgaagacgatatccccgtccggtcattctttcccgaaaactggttgtggcgtgtggagaccgtggatcgctttcagatccttactctgtggctgcctgatagcctaacaacctgggaaatccacggcttgagcctttctaagaccaaaggcctgtgcgttgccacccctgtccagctgagagtgttccgtgaattccacctccacttgcgcctaccaatgtccgtgaggaggttcgaacagctggaattgaggccagtactctacaactacctggataagaatctgacggtgtcggtgcacgtctctccagttgagggactctgcctggctggcggcggcggcctggcccagcaggtgctggtgcccgctggatctgcccgccccgtggccttctccgtggtcccaaccgccgcaactgccgtttcattaaaagtggtagcccgcggtagttttgagttccccgtgggggatgccgtctcgaaagtcctgcagattgagaaggagggagcgatccatagggaggagttggtttatgaattaaatccattggaccaccgcggtagaactctggagatcccaggaaactcagaccctaacatgatcccagatggggactttaatagctatgtgcgcgtgacagcttcagaccctctagacacactcggaagcgagggcgcactttctcccggaggcgtggcatctcttctccgactcccacgcgggtgcggcgaacagacgatgatctacctggcacctactctcgcagcctctagatacctggataagactgaacagtggagcacattgccacctgagactaaggatcacgcggtggacctgatccagaaaggttacatgcgcatacaacagttcaggaaagccgatggatcttatgcggcttggctgtcgcggggaagttccacgtggctaaccgctttcgttctcaaagtgctgtccctggcccaggaacaggtaggaggaagtcccgaaaagttgcaggagacaagcaactggctcctctcccagcaacaggccgatggctccttccaggacttatctcccgtgattcaccgatcaatgcagggggggctggttggaaacgatgagaccgtggcactcacagcctttgtcacaatcgctctgcaccacggccttgcagtgtttcaggacgagggggcagagcctctcaaacagcgcgttgaggcctcgatctctaaggcgtccagtttcctgggcgagaaagcatccgccggactgttgggggcccacgcggcagccatcaccgcgtacgctctgacgttgactaaggcacctgccgatctccgcggcgttgcccataacaacttaatggccatggcccaggagaccggcgataatctgtactgggggtcggtcactggctcccagagcaacgccgtttcccccacacccgctcctagaaatccctctgatcctatgcctcaggccccagccttgtggatagagactaccgcttatgcccttctgcacctactgttacacgaaggcaaggctgaaatggctgatcaagcagctgcatggcttacacgacagggtagttttcagggcgggttccgcagtactcaggataccgtcattgccctggatgccctgtccgcatattggatcgccagccatactacagaggaaaggggactcaatgttactttatcaagcaccgggcgcaacggcttcaagagccacgctctgcagctgaacaatcgacagataagaggattggaggaagagttgcagttctctcttgggagcaaaattaacgtgaaagtgggaggcaatagcaaaggcaccttaaaagtgttgcgtacctacaacgttctcgacatgaagaacacaacgtgtcaggatctgcagattgaggttaccgtcaaaggccatgtcgagtatacaatggaggcaaacgaagattacgaagactacgaatatgatgagttgccagcaaaagacgaccccgacgcgcccctgcaacccgttactccactgcaactttttgaaggcaggcggaatcgccgccggagggaagcacctaaggttgtggaggagcaggaatccagggttcactataccgtgtgcatctggaggaacgggaaagtcggactctcaggcatggccatcgcagatgtgaccctgctgagtgggtttcacgcgcttagggccgatttggaaaagttaacatctctgtcagaccgctacgtctcccattttgagaccgaggggcctcacgttctgctgtacttcgacagcgtaccgacatcccgtgagtgtgtcggtttcgaggccgtgcaggaagtacctgtgggcctcgttcaacccgccagcgccaccttgtatgattattacaaccctgagcgccgatgttcagtcttttatggcgctccttctaagtcccgactgttggccacgctttgttcagcagaggtatgccagtgtgcagaggggaagtgtccccgccaaaggagggcccttgaaaggggccttcaggacgaggacggctaccggatgaagttcgcatgctactacccccgagtggagtacggtttccaagtgaaggtgctccgggaagatagcagagcagcgttccggttgtttgagaccaagatcactcaggtgctccactttactaaggatgttaaagccgccgccaatcagatgagaaattttctcgtgcgcgcatcctgtagactgagattagaaccaggaaaggagtacttgatcatgggactcgacggagctacatacgacctagaaggccatcctcagtatcttctggactccaactcatggatcgaggaaatgccttcggagcgcctgtgccggtcaactagacagcgcgccgcatgcgcacaactaaatgactttttgcaagaatacggcacccaaggatgtcaggtttag

SEQ ID NO: 112877 - DNA, 5097 bp, synthetic construct
  misc_feature 1..5097: note = Description of Artificial Sequence: Synthetic coding sequence
  source 1..5097: mol_type = other DNA
atgcgtctactgtggggcctgatctgggcgagcagcttctttaccctgtcgctgcagaagcctcggctgctattgttttccccttcggtggtccatctcggagtaccactgtccgtcggggtgcagctacaggacgtgccacgcggccaagtagtgaagggatccgtgtttctgagaaaccctagtcgcaataatgtgccttgctcaccaaaagtagattttactctttcctcagaacgcgacttcgcgctgctttccctccaagtgcctttgaaggatgcgaagagttgcggtttacatcagttgttaaggggcccagaggtgcagctcgtggcccactctccatggttgaaggactcactgtctaggaccaccaacatccagggcatcaacttattgttttcgtctagacgcggacacctgttcctgcagaccgaccagcctatttacaaccccggccagcgcgtgcgatatcgagtcttcgctctggatcaaaagatgcgcccttcaacagacacaatcaccgtcatggtggagaatagtcacgggcttagagtgaggaaaaaggaagtctacatgccctcatccatctttcaagacgactttgttattccagatatctcagaacctggcacctggaagatttccgctagattctctgatggactcgaatcaaatagttcgacacagttcgaggtaaagaagtacgtgttgccaaactttgaagttaagatcacgccaggcaaaccttacatccttacagttccaggacacctggatgaaatgcagttagatatacaggctagatatatttacgggaaaccggtgcagggagttgcatacgttaggttcggccttcttgacgaagacggcaaaaaaaccttctttaggggcctggagtcacagaccaagctagtgaatgggcagtcccacatcagtctgagcaaagcggagtttcaggacgctttggagaaattaaacatgggtatcactgacctgcagggcttacgcttgtacgtagccgccgctattatcgagagcccagggggcgagatggaagaggccgagctgacaagttggtattttgtctcctcccctttttcacttgacctgtctaagaccaagcggcacctggtcccaggggctccttttctgctccaagcactggtaagggagatgtctgggtccccagcatcaggtattcctgtaaaggtttccgccacagtgtcatcaccgggctcagtgcctgaggttcaggatatccagcagaacacggatggaagcggtcaggtgagcatcccgatcataattccccagacaataagcgagctgcagctgtctgtcagcgcagggtctcctcatcccgccatagcccgtctgacggttgccgcaccaccctcaggaggtcctggcttcctatccattgaaagacccgattccagaccacctcgggtgggggatacgctgaatttgaaccttcgagccgtgggaagtggggcaacgtttagtcactactattacatgattctcagcagagggcagatagtgtttatgaaccgcgagccgaagcgaacactgacatccgtgtcagttttcgtggatcaccatctggctccctccttctactttgtggcgttttattaccacggggaccacccggtcgcgaattcactaagggtggacgtgcaggctggagcatgtgaagggaaactcgagctgtccgtcgatggtgcgaagcaataccgcaatggagaaagcgtcaagctacacctcgaaacagactctttagccctagtcgccctcggggccctggatacagctctatatgctgcaggaagcaagtcacataagccacttaatatgggaaaagtgttcgaagcaatgaacagttatgatcttggctgtgggccaggtggcggcgactcggccttacaggtatttcaagctgccggtctggcttttagcgacggcgaccagtggacattgagcagaaagagattgtcctgtcctaaagagaaaacaacgcgcaagaaaagaaacgtgaacttccagaaagccattaatgagaaactaggccaatacgcgtcccccaccgccaagcggtgttgtcaggacggggtcacacgtcttccaatgatgcgcagctgtgaacaacgggcagcacgagtgcagcagcctgattgccgagagccgtttctctcctgctgtcaatttgcggagagcctacgtaaaaagagccgagataagggacaggccggcctccagagggcgcttgagattctgcaggaggaagacttgatcgacgaagatgacatccctgtgcgcagcttttttcctgagaactggctgtggagagtggagaccgtcgatagattccagatactcactttatggctgcctgacagcctcacaacatgggaaattcatggcctcagcctttcgaagaccaagggcctgtgcgtggccacaccagtgcagctgagagtgttccgcgagtttcatcttcatcttcgactgccgatgagtgtccgcagattcgaacagctggagctcaggcccgtgttatataattatctggataagaatctgacggtctccgtccacgtcagcccggtcgaaggtctgtgtctcgctggaggggggggtctagcccagcaggtgctagtgccggcaggctctgcgagacccgtagcctttagtgtcgtacctacggccgccaccgctgtgagcctgaaagtggtggcgcgcggcagctttgagtttcccgttggggatgctgttagtaaggtgctgcagattgagaaggagggagcaatacatcgtgaggagctggtgtacgaactgaaccctctggatcaccgggggaggacattggagattccaggaaactccgatccaaacatgatccccgacggggatttcaactcgtatgtccgggtcacagcttctgatcctcttgatactctgggtagcgaaggcgcactgtcacccggtggtgtagctagcttgctgaggttgccccgcggatgtggcgagcagactatgatttatctggcgcctacactcgctgccagcagatatctggataagacggaacagtggtcaaccttgccgcccgagaccaaggatcacgctgtggacctgatccagaagggatatatgcgcatacagcagtttcgcaaagcggacggaagctacgcggcgtggctatccagaggctcttccacttggctgactgcatttgtgctgaaggtgctgtctctcgcccaggagcaggtaggcggtagtcctgaaaagctgcaggagactagcaactggctcctgtcacagcagcaggctgacggtagctttcaggatttgtcaccagtgatccacagaagtatgcagggagggcttgttggaaacgacgaaacagtagctcttaccgcattcgttaccattgccttgcaccatggtttggccgtttttcaggacgaaggggcggagccgctgaaacagcgtgttgaagcaagtatcagtaaggcatctagttttcttggggagaaggcctcagccggattactgggcgcccacgcagctgctataactgcctacgctcttacactgactaaagctcccgccgatctcaggggcgttgcccacaacaacctcatggccatggcacaagaaactggcgacaacctgtattggggctcagtcaccggctcacagagtaatgcagtttcccctacccccgcccccaggaatccctcagacccaatgccgcaggcccccgctttgtggatagagacaacagcctatgccctcctccacctgctgcttcacgaggggaaggccgagatggcagatcaggctgctgcttggcttactcgacaaggatcatttcagggaggctttcgctcaacccaggatacagttatcgccctggatgctttgtcagcctattggatagcatctcacaccactgaggaaaggggcctcaacgttaccttgtcttctactggtagaaatggctttaaatctcacgcccttcagttaaacaacaggcagataagggggttggaagaggaattgcagttttctctgggcagtaaaattaacgttaaggtaggtggaaatagtaagggcacgctgaaggtgctgcgtacctataacgtcctcgatatgaaaaacactacatgtcaggatctacaaatcgaggtcaccgtaaagggccatgttgaatacactatggaggcaaacgaagactatgaagactacgagtatgacgagctgccggcaaaggatgaccccgacgcacccctccaaccagtgacccctctgcagctcttcgaggggagaagaaatcggcgccggcgcgaggcccctaagttaactagcctctccgacaggtacgtttctcacttcgaaaccgagggcccacacgtgttattgtactttgattccgtgccaactagtagagaatgcgtgggatttgaggcagtgcaagaagtcccagttggtcttgtgcagcccgcgagcgcaacgctttatgactactataacccagagcggagatgttcagtattttacggcgccccctccaagtctaggctcctggcaactctctgcagtgccgaggtctgccaatgtgctgaagggaaatgtcctagacaaagaagggcattagagcgcggactgcaggacgaggacgggtaccgtatgaaattcgcctgctactacccgagggtcgagtatggatttcaggtaaaggtgttaagagaggatagtagagcggccttccgtctgtttgagactaaaataactcaggtgctgcacttcactaaagacgttaaagccgcagccaaccaaatgcgcaacttccttgttcgggcttcctgtaggctgcggctggagcccggcaaggagtacttaatcatgggtctggacggcgcaacctatgacctggaagggcacccacaatacctcctagactccaattcatggattgaagagatgccctctgagaggctctgcagatctactaggcagcgcgcagcttgcgcacaattaaacgatttcctgcaggaatacgggactcaggggtgtcaagtgtag

SEQ ID NO: 112878 - DNA, 5235 bp, synthetic construct
  misc_feature 1..5235: note = Description of Artificial Sequence: Synthetic coding sequence
  source 1..5235: mol_type = other DNA
atgcggctattatggggcctgatttgggccagttcatttttcacactgagcttacagaagccgaggctgcttttgttctctccatctgtggtgcatctgggggtgccactgagcgtaggggtccagctgcaggatgtaccaagaggccaggtggttaaggggagcgtattcctgaggaacccttctcggaataatgtgccctgcagtcccaaggtggacttcacactgagcagtgaaagggacttcgcgcttctgtcgctgcaggtgcctttaaaagatgccaagagctgcggcctccaccagctcctacgcggtcctgaagttcagctggtggctcacagcccgtggctaaaagatagcctctccaggactaccaacattcagggcatcaacctcttgttcagttctcggagagggcacctctttctgcagaccgatcagcctatatacaaccctggtcagagagtgcgctacagagtgtttgcccttgaccaaaaaatgcgccccagcaccgacacaattaccgtgatggtggaaaacagccacggcctgcgggtgaggaagaaggaagtctacatgcctagttccattttccaagacgactttgtcatccctgatataagcgaaccgggcacttggaagatctcagctcggttctcagatgggctggagagtaactcctcgacccaatttgaagttaagaaatatgtgcttcccaactttgaggtaaagatcactcctggaaagccatacattcttacagtgccgggccatctcgacgaaatgcagctggacatccaagctcgctatatctatggaaaacccgtccagggcgtcgcttatgtgaggtttggattactcgatgaagacggcaaaaaaaccttcttcaggggcctcgagtcgcagacgaaactggtgaatggacagagccacatatccctgtccaaggctgaattccaggatgctttagagaagttgaatatgggtattactgatctccagggtctgaggctttacgtggccgcggctataatcgagtctccaggcggtgaaatggaagaggccgaacttacaagttggtatttcgtcagcagcccttttagcctggacttatccaaaaccaagagacacctggtgcctggtgcaccttttcttctacaggccctcgtgagagagatgtccggttcccccgcttcggggattccagttaaggtgtccgcaactgtaagctcgcccggatctgttcctgaagtgcaggacatacagcagaataccgacgggtcagggcaggtaagtatccccatcatcatcccgcagactatctccgagcttcaactatcagtgtcagcaggcagcccccaccctgctattgcccgccttaccgtggccgcacccccaagtggtggaccaggcttcctgtcaatcgagaggcctgatagcagaccaccccgcgtcggggatacgttaaatctcaacctccgagccgttggatccggggccactttctcccattactactatatgattctatcccggggccagattgtattcatgaaccgggagccaaagagaacacttacgtctgtatcagtgttcgtggaccaccacttagctccttcattctactttgtggcattttactatcatggagatcacccagtagcgaattccttaagggtcgacgtgcaagcaggagcctgtgaagggaagctggagttatctgttgatggagccaagcaataccgtaatggagaatcagtgaagctccacctcgagactgatagcctggctctcgttgctctgggggccctggacaccgccctgtacgccgccggctcaaaatcacacaagcctttgaatatgggaaaggttttcgaagcaatgaatagctacgatctcggctgcggcccaggaggaggtgactcggctcttcaggtgtttcaggccgccggactcgctttcagcgacggagatcagtggaccttgtcccgaaagagattgtcatgtcctaaagagaaaacaaccagaaaaaagaggaacgtgaacttccagaaggcaatcaatgaaaaactgggccagtacgcatcacctaccgctaagcgttgttgccaggacggagttaccagacttccgatgatgaggtcctgtgaacaaagagcagctcgtgtgcagcagcccgattgccgcgagccctttttaagttgctgccagttcgccgagagccttcgaaagaaaagccgagacaagggtcaagctggtttgcagcgggctctggagatcctgcaggaggaggatctaatcgatgaagatgatataccagttcgaagctttttcccagagaattggctgtggcgggtagaaacagttgatcggttccagattctgaccctgtggctgccagattccttgaccacctgggagattcatggactgtccctaagcaagaccaaaggcttgtgcgtggcaacaccggtgcaactgagggtgttccgggaattccatctgcacctgcgactgccaatgagcgtgcggcgattcgagcagctcgaactccgccctgtgctgtataattacctggacaagaatttgactgtcagcgtccatgtatccccagtggaggggttgtgcttggcgggcggaggcgggctggcgcagcaggtcttagtgccagccgggtctgcacgcccagttgctttcagcgtcgtgcctaccgctgctacggcagttagtctgaaggttgtcgctagaggcagctttgaatttcctgtgggtgatgcggttagtaaagtactgcaaattgaaaaggagggagcaatacatagagaggagctcgtttacgagctcaacccactagaccacagggggcgcaccttggagatccccgggaatagcgatcctaatatgatccctgatggagatttcaactcttacgtcagggtgacagcatccgatcctcttgacacactgggatctgaaggcgctctaagccctgggggagttgcttccttactcagactccccaggggctgtggcgaacagacaatgatatacctggccccaaccctggctgcctcccggtacttggataagaccgaacagtggtccacactcccccccgagaccaaggaccatgccgtagatctgatccaaaaaggctatatgaggatacagcagttccgcaaggccgacggctcttatgcagcttggctaagtagaggttcctcaacttggctgacagcttttgtcttgaaagtccttagcctggcccaagagcaagtcgggggctctccagagaagcttcaagaaactagcaactggctgctgtcccagcaacaggccgatggttcttttcaggaccttagccccgtcattcaccggtccatgcaaggcggccttgtcggcaatgacgagacagtcgcgcttacagccttcgtgactattgcgttgcatcatgggctggccgtcttccaggacgagggggccgagccattaaaacaacgcgtcgaagcctcaatcagtaaggcgtcaagtttccttggagagaaagcctcggctggcctgctcggcgctcatgcagcagcgatcactgcctatgccctgaccctgactaaagctcctgcagacttgcgtggggtcgcccacaataatctgatggctatggcccaggagacgggtgacaacctatattggggatcagtgacaggaagtcagtcaaacgcggtgtctccgacgcccgccccgaggaatcccagtgatcccatgccccaagcccccgccctctggatagagaccaccgcatacgccttgcttcacctcctgctccacgaagggaaagccgaaatggcagaccaggccgcggcctggctaacgagacagggaagctttcagggcgggttcagaagcactcaggacaccgtcatcgcgttagatgccctgagcgcctactggatcgccagccacacaactgaagaacgaggcctgaacgttacacttagttcaactggccgtaacggctttaagagccacgctctgcagctcaataaccgacagatccgaggactggaggaagaactgcagttctcactggggtctaagattaacgtgaaggtgggagggaactctaaagggacccttaaagtgcttagaacatacaatgtgcttgacatgaagaacacaacgtgtcaggacctgcagatagaagtaaccgtcaaaggccacgtggaatacacaatggaggctaacgaggattacgaggattacgaatacgatgagttgcccgcgaaggatgaccccgacgcacccctccagcctgtgacacctctgcagctcttcgaaggcagacgcaacaggagaagaagagaagcccccaaggttgtggaagaacaagaatcccgagtacactatacagtgtgcatttggcgcaatggcaaagttggcctctcagggatggccatcgcagacgttacccttctgtccggatttcacgccctcagggccgacctggagaaattaaccagcctcagtgaccggtatgtatcccacttcgaaaccgaaggaccccacgtgttattatactttgactccgtcccgacctctagggaatgcgtaggtttcgaggccgtgcaagaggtacccgtgggcttggtacaaccggctagcgccaccctatatgattattataatcctgagaggcgatgctccgtgttttatggcgctccttccaagtctcggcttctcgctacactgtgctcggctgaagtttgccagtgtgctgagggcaagtgtccgagacagcgcagggccctcgaacgcggactgcaggacgaggatggataccgtatgaagtttgcctgttattatcctagggtggaatacgggtttcaggttaaggtgctgcgggaagactcccgagctgcattccgattgttcgagaccaagatcacacaggtgctccacttcaccaaggacgtgaaagccgctgcgaatcagatgaggaatttcctcgtgcgggcctcctgtaggctccggcttgaaccaggtaaggaatacttgattatgggtcttgacggagctacctatgacctggaagggcacccacagtacctcctcgatagtaacagttggatcgaggagatgccttccgagagactgtgcaggtcaacacgtcagagggccgcctgtgctcagctgaatgattttctccaggagtatggcacccagggctgccaggtgtag

SEQ ID NO: 112879 - DNA, 5235 bp, synthetic construct
  misc_feature 1..5235: note = Description of Artificial Sequence: Synthetic coding sequence
  source 1..5235: mol_type = other DNA
atgaggttgctgtggggactcatctgggcttcatcatttttcactctgtctcttcagaagcccaggctcttgctcttcagcccatccgtggtgcacctgggcgtccctttgtctgtaggagtacagctgcaggatgtgcccagggggcaggtcgtcaaggggtctgtgtttctgcgcaacccgagccgaaataatgtgccttgctccccaaaggttgattttacgctcagttccgagcgggatttcgctctcctgagcttgcaggtgcccctgaaagacgcaaagtcttgcggtttacaccagctgctgagaggcccggaggtccaactagttgctcattcaccatggttgaaagactcccttagccgcacgacaaacatccaggggatcaatctgctgttcagttcccgcaggggccatctgtttctccagacagatcagcctatctacaacccaggacagagggtgcggtacagggtgttcgctctggaccagaaaatgagaccttccaccgataccataaccgtgatggtggagaattctcatggtctgagagtccgcaaaaaggaagtgtacatgcctagcagcatctttcaagacgacttcgtgatccctgatatatcggaacccgggacatggaaaatatccgccaggttctctgacgggctggagtcaaattcatctacacagtttgaggtcaaaaaatacgttttgcccaattttgaagtgaagatcacgccggggaaaccttacatacttactgtgcctggccatctcgatgagatgcaactggacatacaggcacggtacatctatggtaagccagtgcagggcgttgcctatgtgcgctttggtctacttgatgaagatggtaaaaaaactttcttcaggggcctcgaatcgcagaccaagttggttaacggacagtcccatataagtctgagtaaggccgagttccaggacgcattggagaagctgaacatgggcattacggacttgcagggccttagattgtacgtggcagcagccattatcgagagcccaggcggggagatggaagaggcggaactcacgagttggtactttgtgtcaagtcctttcagcctggatttaagtaagactaagaggcacctggttccaggcgcgcctttcctgctacaagcattggtacgggaaatgagtggatcacctgccagtggcatccccgtcaaagtctccgctacagtctcctcaccaggctctgttcccgaggtccaagacatccaacagaatacggatgggagtgggcaggtgtccattcccattatcatccctcagactatatccgaactgcagctgtcggtgagcgcagggagcccacaccccgcaatagctagactgacagtcgctgcccctccatccggaggacccggcttcctgtccatagaacgacccgattccagaccccccagggtgggcgatactctgaatcttaaccttagggctgtgggctccggagccaccttcagccactattattatatgatcttgagccggggtcagattgtatttatgaatcgtgagccgaagcgaaccctcacctccgtctccgttttcgtcgatcaccacctggccccatctttctatttcgttgctttctattaccatggtgatcaccctgtcgctaatagtttgcgagtggacgtgcaggcaggggcctgtgaaggaaagctggagctctccgtcgatggagctaaacaataccgcaatggcgagtccgtcaaactgcatctagagaccgattctcttgccctcgtcgctcttggggcactggacacagcactgtatgccgctggctctaaaagccacaagcccctcaatatgggtaaggttttcgaagccatgaatagctatgatctaggctgtgggccgggcggcggagactcagctctgcaagtctttcaggcagctggcctggctttcagtgacggggatcagtggacgctgtcaaggaaacgcctgtcgtgtccaaaggagaagacaacccgcaagaagcgaaatgtcaattttcaaaaagccattaatgagaagctaggccagtacgcctcaccaacggcaaagcgctgctgccaggacggggtcacacgattacctatgatgcggtcgtgcgagcaacgagccgctagagttcagcagcccgattgtcgagagcctttcctgtcctgttgccagtttgccgagagcctacgtaaaaagtcgagggataagggacaggccggcctgcagagggctctagagattctccaggaagaagacctgatcgatgaggatgatattccggtacggagctttttcccggaaaattggctgtggcgagtggagacagtggatcgcttccagatcctcaccttatggcttccggacagcctgaccacttgggagatccacgggctgtcactcagcaagaccaaaggcctatgcgtggctacgcccgtgcaactgagagtattcagagagttccatctgcacctaagactaccgatgtccgtcagaaggttcgagcagcttgagttaagaccagtgttgtacaattatctcgacaaaaacctgacagtcagcgtgcacgtgtctcccgtggagggtctgtgtcttgccggaggcggcggtctggcccagcaggtgctggtgcccgctgggtccgctcggccagtggcttttagcgttgtgccaacagctgccgctgccgttagcctgaaggtcgtagcccgtggcagcttcgagttccctgtgggggatgccgtgtccaaggtgctccagattgagaaggagggagcaattcatagagaggagttggtatatgaactgaaccccctggatcacagggggagaactctggagatccccggaaacagtgaccccaacatgattcccgacggcgatttcaattcctacgtgcgggtcacggcatccgatcccctggacactctaggatcagagggcgcgctgtcccccggaggcgtggccagtctgctccgactgcccaggggttgcggcgaacaaaccatgatttatttggctcccacgcttgccgcttcacgctatttggacaagactgagcagtggtccaccctgcctcctgaaaccaaggatcatgctgtggatctgatccagaaggggtacatgcgcattcagcagttccgcaaagctgacgggtcttacgccgcatggctgtcgcgtgggagctcaacttggcttaccgccttcgtgctgaaggtgctatcattggcccaagagcaggtgggtggctcacctgagaagctccaggaaaccagcaactggttattgtctcagcagcaggctgatggatcatttcaagatctctcacctgtcatccacaggagtatgcagggggggctggtgggcaacgacgaaaccgtggcgttgactgccttcgtgactatcgcactgcaccacggcctggctgtgtttcaggatgaaggcgctgagccattgaaacagcgcgttgaggcatccatcagcaaggctaactcattcctgggagaaaaggcttcagccggtctgctcggcgctcacgctgctgctatcaccgcatatgctctgacactcacgaaggcccccgcagatctacggggggtagcccataacaatctgatggctatggcccaggagaccggtgacaatctttactggggatccgtgactgggtcccagagcaatgcggtcagccctactcctgcccctaggaatccgtcggacccaatgccgcaagcccctgcactttggatcgagaccaccgcctatgccctgctccacttattactgcatgaagggaaggccgaaatggcggatcaggccgctgcctggcttaccaggcaggggtcgtttcagggtggatttagatccacgcaggatacagtgatagcactggatgctctgagcgcctattggattgccagccacactacggaggaaagaggcctcaatgtgactctatcttctaccggaaggaacggctttaagagtcacgcactccagctcaacaataggcagatcagaggcttagaagaagagctccagttctcgttaggctcaaagattaatgtaaaagtcggcggtaattccaagggcaccctgaaggtattgagaacctataatgtgttggatatgaagaacacaacgtgccaggaccttcagatcgaggttacagtgaagggccacgtggaatataccatggaggcaaacgaagactatgaggactacgagtacgatgaactccctgccaaagatgacccagacgcccccctacagccggttactccactgcagctgtttgaaggaaggcgaaacaggcgaaggcgggaggctcctaaggtggtggaggagcaagaatctcgcgtccactacactgtgtgcatctggcggaatggtaaggtggggctgagtgggatggcgatcgccgatgttacccttctgagcggtttccacgccctcagagcggaccttgaaaagttgacctctctgagcgaccgctatgtgtcccactttgaaactgaggggccacatgtcttgctctatttcgactctgtccctacatcccgcgagtgtgtcggctttgaggctgttcaggaggtgccggtggggttggtgcagcctgccagcgcaacactgtatgactactacaaccctgagcgccgctgctcggtcttttacggcgcgccttccaagtctagattgctggcaaccctgtgttctgcagaagtttgccaatgcgctgaaggcaaatgtccacgccagcggagggctctcgaaaggggcctgcaagatgaagacggataccgcatgaaattcgcgtgttactacccgcgggtagaatatggtttccaagtcaaagtgctgagagaggattctcgggctgccttccgactctttgagactaagattactcaagttctgcatttcacaaaagacgtgaaagccgccgcgaaccaaatgaggaactttctcgttcgggccagttgccgcctcagactcgaacccggaaaggagtacctcattatgggactggacggcgctacctacgacttggaaggtcatccgcagtacctcttggatagcaactcgtggattgaggaaatgccatcagaacgactatgccggtctacacggcagcgtgcagcatgtgcgcagctgaacgattttctgcaggagtatggcacccaggggtgtcaggtgtag

SEQ ID NO: 112880 - DNA, 807 bp, synthetic construct
  misc_feature 1..807: note = Description of Artificial Sequence: Synthetic coding sequence
  source 1..807: mol_type = other DNA
atgtgccccgaggactcccttcaggtgcccttaaaagatgccaagtcgtgcgggttgcatcagttactcaggggcccagaggtacaactcgtggctcacagcccttggcttaaagactcacttagccgtaccacgaacatccagggcataaatctcctgttttcttctagaagggggcacctcttcctgcagactgatcagcctatatacaatcctggacaaagagtgaggtatcgagtctttgcattggatcagaagatgaggccctctaccgataccattaccgttatggttgagaacagtcacggactgagggtcaggaagaaggaagtatacatgccatcttccattttccaggatgatttcgtcatccctgatatttctgaacctggcacttggaaaatttcagccagattttcagacggcctggaatctaattcctctactcaattcgaggtgaaaaagtatgtacttccaaacttcgaggttaaaattacccctgggaaaccctatattctcacagtgcccggacacctcgatgaaatgcagcttgatatccaggccagatacatatatggcaagcctgtgcagggcgttgcctacgtgaggtttggtctgttagatgaagacggcaaaaagaccttcttcagggggcttgagtcccagactaaattagtgaacgggcagtctcatatttcgctgtcgaaagcagagttccaggacgcactggagaaactgaatatggggattacagacctacaggggctcaggttatatgttgctgccgccattatcgagtcaccttag

SEQ ID NO: 112881 - DNA, 5097 bp, synthetic construct
  misc_feature 1..5097: note = Description of Artificial Sequence: Synthetic coding sequence
  source 1..5097: mol_type = other DNA
atgagattactgtggggcctaatctgggcatcctccttctttaccctgtccctgcaaaagcctcggctgctgctttttagccctagcgtagtgcaccttggtgttcccctgtctgtgggggtccagctccaagatgtgcctagaggacaagttgtgaagggctcagtctttctgagaaatccgagccgcaataacgtgccatgctcgccaaaggtcgacttcactctttcctctgagcgcgatttcgccctgctgtctctgcaagtgccgctaaaagatgctaagtcctgtggactccaccagcttctgaggggacccgaggtgcagttggtggcccattctccgtggctcaaggattctctgagcaggactaccaacatccagggaatcaacctcctattttcgtctcggcgaggtcaccttttcctgcaaactgaccagccaatctacaatccggggcagcgagtcaggtacagagtttttgcattagaccaaaagatgcggcctagcactgacacaatcaccgtcatggtcgaaaattcccacggcctccgcgttcgaaaaaaagaagtctacatgcctagttcaatttttcaagacgacttcgtgatccccgacattagcgagccgggaacctggaaaatttccgcccgattcagtgacgggctcgaatctaactctagtacacagttcgaggtgaagaaatatgtacttcctaatttcgaggtgaaaatcacaccgggtaagccttacattctgactgttcccgggcacctcgacgagatgcagctggacatacaggcacggtatatttacggcaaaccggttcagggcgtagcctatgtgcgcttcggtttactggatgaggatggaaaaaagacgttctttcgagggctggaatcccagacaaagctagtgaatgggcagagtcatatttctttgagtaaagcagagtttcaggatgcgctcgagaaattgaatatgggaattactgacctgcagggcctccgcttatacgtggccgcagccattatcgaatctccaggtggcgagatggaggaagctgagctcacatcttggtactttgtctctagcccgttttctctggacctcagcaagacaaagcggcatctggttcctggcgcgccctttctgcttcaggccttggtccgggaaatgtctggctctcctgcttccggaatcccggttaaagtgagcgccaccgtctcttccccaggttccgtacctgaggtccaggatatccagcagaatacagatggaagcggccaggtgagcatccccatcatcattccgcaaaccattagcgagttgcagctttccgttagtgctggctcgccccatcccgctattgcccgcctgaccgtcgcagcaccccccagcggcggaccagggttcctgtccattgaacgtcccgacagcaggcctccgagggtgggagataccttaaacctgaaccttagagccgtaggatcaggcgccacattttcacattattattacatgatcttatctcgcggccagatcgtattcatgaatcgtgagcctaaacggactctcacgtctgtgtctgtcttcgtggaccaccaccttgccccctctttctactttgtggccttttactatcatggtgaccacccagtggcaaattctctgcgcgtagatgtccaagcgggggcatgcgagggcaaactggagcttagcgtggacggggcaaagcagtaccggaacggtgagtccgtgaagctccatctggagaccgacagcctggccctagttgccctcggagcccttgacacagcactgtacgcagccgggagcaagagtcacaagccactcaatatgggtaaagtcttcgaggctatgaattcatatgatctaggatgcggaccagggggcggtgactccgccctgcaggtttttcaggccgccggactggctttcagcgatggcgatcagtggaccctttcccggaagcgccttagctgtcctaaagagaaaaccacccgcaaaaaacgtaatgtcaatttccagaaggcaattaacgaaaagctgggacagtatgcgagtcctaccgccaagcgatgttgtcaggacggagtgacccggcttccaatgatgaggagttgcgagcaacgtgcggcaagggtccagcagcctgattgccgagaaccgttcttgtcctgttgccagtttgcagagagcttgcggaaaaaaagccgagataaggggcaagccggcctccagcgagcactggaaattctgcaggaggaagatctgatagacgaagatgacataccagtgcgcagtttctttccagaaaattggctgtggagggttgaaacagtagacaggttccagatacttacattgtggctgcctgacagcctgaccacttgggaaattcacgggcttagtctctctaagactaaggggctatgtgttgcaaccccagtgcagctgcgggtgtttcgagaattccacctccacttgcgactgcctatgtccgtgaggcgttttgaacagttggaactcagacccgttttgtacaactacctggataaaaatttaactgtttccgtacatgtgtcaccggtagaaggactgtgccttgccggcggcggaggattggcacaacaggtcctcgttccagctggcagtgccagacccgttgcttttagcgtagttccaacagccgccgctgcagtgtcactgaaggtggtcgcccgcggcagttttgaatttcctgtcggagacgccgtgtccaaagtgctccagatcgaaaaggaaggcgcaattcaccgggaggagctcgtgtacgagctgaacccgctcgaccatcggggtcggacactcgaaattcctggcaacagtgaccctaatatgattcctgacggagatttcaactcctatgtgagggtcactgcttccgaccctttggataccctgggcagtgaaggggctttatcacccggcggagtggccagtttactgagactcccgaggggctgtggggaacagacaatgatttatctagcccccacattggcggcatcacgctatttggacaagactgagcagtggtcaactctgccgcctgagacaaaagaccatgcagttgacctcatccagaaaggatacatgcgcatccaacagtttagaaaggcggacgggtcttacgccgcatggctgtcccgcggatcaagtacctggctcactgctttcgttctaaaagttttgagtttggcccaggagcaggtggggggaagccctgagaagcttcaggagaccagcaattggctgctgagccagcaacaggcagatggaagtttccaggacttgagccctgtcatacaccggtcgatgcagggtggcttagtggggaatgatgagaccgtggctctcaccgctttcgtgacaatcgcacttcaccatgggctagctgtgttccaggatgaaggcgctgagccgttgaaacaacgcgtggaggctagcatctctaaggcaaacagcttccttggagaaaaggcttctgccgggcttctgggcgcacacgccgctgcaattaccgcctacgccttgaccctcaccaaggcgcctgctgatcttaggggggtggcccataacaatctgatggctatggcgcaggaaactggggacaacctgtactggggctctgttactgggtcccagagtaatgcagtgagccccactcccgccccccgcaacccctccgaccccatgcctcaggctccagctctctggatcgaaaccaccgcatatgcactgctgcacctgctcctgcatgaggggaaggcagagatggccgatcaggctgcagcgtggctgacacggcaggggtcctttcaggggggtttcagaagcacgcaggatacagttatagccctagatgccctgagcgcatactggatcgcctcccacacgactgaggaaagaggcctcaatgtaactctcagtagcacggggagaaatgggtttaagtcacacgccctgcagctgaataaccgccaaattagggggctggaggaggagttgcagttctcactgggcagtaagatcaacgtgaaggtcggcgggaactcaaagggcacattaaaggttctgcgcacctacaacgtgctcgacatgaagaatactacctgccaggatctgcagatcgaagttacagttaaggggcatgtcgagtatactatggaagctaatgaagactacgaggattacgagtatgatgaattaccagcaaaagacgatccggatgcccccctccagcccgtcaccccattgcagctattcgagggccgcaggaacagacgtcggcgggaggcccctaaactgacctcactaagcgatcggtatgtatctcactttgagaccgaaggaccacacgtactgttatactttgactctgttcctacgagccgcgagtgtgtgggcttcgaagcagtgcaggaggttccagtagggcttgtgcaacctgcgagcgccacgctgtacgactactataatccggaaagacgctgcagcgttttttatggagcccccagcaagtcgcgcctgttagcaaccctgtgttctgcggaagtatgtcagtgtgctgagggaaaatgtcccaggcagcgacgagccctcgaaaggggactgcaggatgaggatggctatagaatgaagttcgcttgctactatccacgcgtggaatatggctttcaggtgaaggttctccgcgaggactctagagcggcctttcgcctgtttgagacgaagattacacaggttcttcatttcactaaggacgtgaaggccgcagccaaccagatgaggaatttcctcgtgcgagcctcctgccggctccgtttagaacccggcaaggaatatctcattatggggctggatggtgccacatatgatttggaggggcacccccaatatttgctcgacagcaattcttggatcgaggaaatgccaagtgaacggctttgcaggtccacaaggcaacgcgctgcctgtgcccaactgaatgatttcctccaggagtacgggactcagggatgtcaggtgtag

SEQ ID NO: 112882 - DNA, 813 bp, synthetic construct
  misc_feature 1..813: note = Description of Artificial Sequence: Synthetic coding sequence
  source 1..813: mol_type = other DNA
atgtgccccgaggattccctgcaggtacctctgaaagacgccaagagttgcggcctgcatcagctgttgcgtggccccgaggtccagctggttgctcatagcccttggcttaaagattcccttagtaggacaacaaacatccagggaattaacctacttttctcgtcccggagaggacacctcttcctccaaacagaccagccaatttataatcctggccagagagtgcgatatcgcgttttcgcccttgaccagaagatgagaccttccacagatacaatcacagtgatggttgaaaattcccacggccttcgcgtgagaaagaaagaagtatatatgccaagttccatttttcaggatgattttgttatcccggatatttccgagcccggcacttggaagatctctgcccggttctctgatggtttagagtccaatagctctacacagttcgaagttaagaaatacgtactgcctaactttgaggtgaaaattactcctggcaagccatatatactaacggtgccagggcacctggatgagatgcagctggatatacaagcacggtatatctacggcaaacctgtgcagggtgtggcgtacgtgagatttggactgctcgatgaagatgggaaaaagacttttttccgaggcctcgagagccagacaaagctggtaaacgggcagtcacacattagtctgagcaaagccgagttccaggacgccctggaaaaactcaatatggggataacagatctgcagggcctgaggctttatgtcgcagcagcaatcattgagtctccggggggctag

SEQ ID NO: 112883 - DNA, 5097 bp, synthetic construct
  misc_feature 1..5097: note = Description of Artificial Sequence: Synthetic coding sequence
  source 1..5097: mol_type = other DNA
atgcgccttttgtggggactgatttgggcatcaagcttcttcacactaagcctccagaaaccgcgcctgctcctcttttcaccaagcgtagttcacctgggggttccgctctccgtgggggtgcagcttcaggacgtccctagagggcaggtggtcaagggaagtgtctttctacgaaacccttcgcgaaataatgtaccatgctctcctaaagtggacttcaccctgagttccgaaagggacttcgctttgctctctctgcaggttccactgaaggatgccaagtcttgcgggctgcaccaacttctgagaggtcctgaagttcagttagtcgcacattcaccctggctgaaggattcgctgtcacgtaccacaaacatccagggaattaacttactcttttcttccagacgaggacaccttttcctacagaccgatcagcctatctacaaccccggtcagagagtcagataccgcgtcttcgctctcgatcagaagatgcggcctagcactgatacgataaccgtgatggtggaaaacagccatggactgagggtgcggaaaaaggaggtttatatgccatcctcaatcttccaagacgatttcgtgatacccgacatctctgagcctgggacttggaaaatctcagcccggtttagtgatggcctggagtccaacagttcaacccagtttgaggtgaagaaatacgtgctgccaaattttgaagtgaagatcacccccggtaagccctacattttgactgtacccggacatttggacgagatgcagctcgacattcaagcacgatatatttacggcaaacctgtccaaggggtggcgtatgttaggttcgggcttctcgacgaagacggcaaaaaaacattcttccggggacttgagtcccagacgaaactagttaacggccagagccacatttctctgagcaaagccgaatttcaagatgcactggaaaagcttaacatgggaataactgatctgcagggactccgcctctatgtagctgctgctatcatagagtcccccggaggtgagatggaggaggctgaactgacatcttggtacttcgttagttcccccttttctctagatctttctaagactaagagacacctggtacctggcgcgccctttctcctgcaagccctggtgagagagatgtctgggtcccccgcttctgggatacccgtcaaggtgtcagctaccgtgtccagtccgggatccgtgcccgaggtccaggatattcaacagaatactgacggcagtgggcaggtgtccattcccatcataattcctcaaaccatctctgaactgcagctttcagtctctgccgggagccctcacccggccatcgcgcgtcttactgtggctgcccccccttctggcggtccgggctttctgagcatagagcggcccgactctcggcccccccgggtcggagacactctcaatctcaatctgcgggctgtgggtagcggggcaacattttcgcactattactacatgatattaagtaggggccagattgtttttatgaatcgagaaccgaagaggacgctcaccagcgtgagtgtgttcgtcgaccatcatctcgcccccagtttttattttgtcgcattctattaccacggtgaccatccggttgcaaactctctccgcgtcgatgtgcaggccggcgcatgtgaaggcaaactggaactttccgtggatggcgccaagcagtacaggaatggcgagagcgtgaaactccacctggagaccgactcccttgctctcgtggcactaggcgctctggatactgcgctgtatgcagcaggttctaaatcgcataaacctctcaatatgggaaaagtgtttgaggctatgaatagctatgatctgggatgtggccctggaggaggtgatagcgctctccaggtgtttcaagctgccggtctggcgttctctgacggagaccagtggacgctgtcacgcaagcggctctcctgtccgaaagagaaaacgacccgcaagaaacgaaatgtcaacttccaaaaggccatcaatgaaaagctgggccagtacgcttcccccaccgcaaagcggtgctgtcaggatggggtgacccggctcccaatgatgcgctcctgtgagcagagggcagcccgggtgcagcagcctgactgccgagagcctttcctgtcttgttgccaattcgcagaaagcctgcgcaagaaatcccgagataaggggcaggctggtctgcagagagccctcgaaatcttgcaggaagaagacctgattgacgaggatgacattcctgtcagatcttttttccctgaaaattggctgtggagggtggagacagtggatcgtttccagatcttaacactgtggctgcctgacagcctgacaacttgggaaattcacggtctgagcctgagcaagactaaaggcctgtgcgttgccacgccggtgcagctaagggtgtttcgtgaatttcacctgcacctgagactgccaatgtccgtcaggaggtttgaacagctggagctgagacccgtgctgtacaactacctcgataagaacctgacagtgtccgtccatgtctcgcctgtggagggactatgcctcgccggcgggggaggtctggcccagcaggtgctggtcccagcagggtcagcgcgtcctgtggcatttagcgttgttcccaccgctgcaacagccgtatctctgaaggtcgtagctcggggaagtttcgagttcccagtgggggacgccgtttccaaggtgctgcagatcgagaaagaaggggctatccatcgcgaagaactcgtgtatgaactgaaccctctggaccaccgggggaggactcttgaaattccgggcaattctgaccccaatatgatccctgatggagatttcaactcttacgtgcgcgttaccgcctctgaccctcttgacaccctgggttccgagggagccttaagcccaggcggagttgcttctcttctgcggctgcctcgcggctgcggcgagcagacaatgatctatctggcgcccacacttgccgcatccaggtacctggataaaaccgaacaatggtccactctgcccccagagaccaaggaccacgctgtggatcttatacagaaggggtatatgagaattcaacaatttcgcaaagctgatggtagctacgccgcttggttgagcagggggagtagcacttggctgactgcatttgtgctgaaagtgctgtccctggcccaagaacaggtgggtggaagccctgagaagctgcaggagactagcaactggttgctctcccagcaacaggccgatggctcgttccaggacctgtcccccgttattcaccgtagcatgcagggagggttggtcggcaacgatgaaaccgttgccctcacagcatttgtgaccattgcgctccatcacggactggctgtgttccaagacgagggagccgaacctctcaaacaaagagttgaagcctcgatctctaaggcgtcttcgttcctgggggaaaaagccagtgccggcctgctgggagcacatgccgcagctattacggcgtatgctctaacgctcaccaaagcaccagccgatcttcgaggcgttgcacataacaacctgatggcaatggcccaagagactggcgataacttatattggggttcagtaaccggctcccaatccaatgccgtatctccaaccccagcaccacggaacccttccgacccgatgccccaggctccagcgctgtggattgaaaccaccgcctacgccctgctgcatctgctcctacacgagggcaaggccgaaatggcagatcaagcagccgcctggctgacaagacagggatcgttccagggtggcttcagatcaacccaggacactgtcatcgctcttgatgctctgagtgcttactggatcgcaagccacaccactgaggagcggggcctcaacgttactctgagttcaacaggacgcaatggcttcaagtcacacgctctacagctgaataacaggcagatccgcggtctggaggaggaactccagttcagccttggctcgaaaataaacgtaaaggtaggcggtaactctaagggaactctgaaggtgcttcgcacctacaatgtcctcgatatgaagaacactacctgtcaggatctacaaattgaggttaccgtgaaggggcatgtggaatacacaatggaggctaacgaggattacgaggactatgagtacgacgaactccctgcaaaagacgatcctgacgctccactgcaaccagtcacccctctgcagttattcgagggcaggagaaacagacggaggcgcgaagcacctaaactcacaagcctgtccgacagatacgtcagccacttcgagaccgaggggccccacgtgttgctgtattttgattccgttcctacctcgcgagaatgcgtcggatttgaggccgtccaggaggttccagtggggctggtgcagcctgcaagtgccacactctatgactactataaccctgaaaggaggtgctctgttttttacggagctccgagtaaaagtagactcctggcgaccctctgttccgcagaagtatgccagtgtgccgagggaaaatgtccaaggcaaaggcgcgctctcgagcggggacttcaggatgaggatggttacagaatgaagttcgcctgctactaccctagggtcgagtatgggttccaggtgaaggtacttcgtgaagattctagagcagcgttccgcctgtttgaaacaaaaatcacccaagttctgcacttcacaaaggacgtgaaagcagctgcaaaccagatgaggaattttctcgtgcgcgcatcctgtagactgcgactcgagcctggaaaggaatatctgattatgggactcgatggggcaacctacgacctggaaggacacccccagtacctcctggattccaattcgtggattgaagagatgccttctgagcggctttgccggagcacacgacagagagccgcgtgtgcacagctaaatgactttctgcaggaatatggaacccagggttgccaggtgtag

SEQ ID NO: 112884 - DNA, 1536 bp, synthetic construct
  misc_feature 1..1536: note = Description of Artificial Sequence: Synthetic coding sequence
  source 1..1536: mol_type = other DNA
atggccaaagggctctcagtgcaaaacgataagcatccaggctatcaacctgcacttttgctttcgcccggagctcctctctttgctgatggccctgcctacgccctgttacatctgctgctgcacgaaggaaaagccgaaatggccgatcaagctgccgcctggttgaccaggcagggatcattccagggaggcttccgctcaacacaggataccgtcattgcactggacgctctctccgcttactggatcgcaagtcacaccaccgaggaacgtggcctaaacgtgacactgagctctaccggtcgaaatgggttcaagtcccacgcactgcaacttaataataggcagatccggggactcgaggaggagcttcagttctctctgggctcaaaaataaatgtgaaggtcggcggaaattctaaagggaccctgaaagtcttacggacctataatgttctggatatgaaaaatacaacatgtcaggacctgcaaattgaagttaccgtgaagggccatgtggagtatacaatggaggccaacgaggattacgaagattatgagtacgacgagttgccagctaaggatgaccccgatgctccccttcaacccgttacgcccttacaattattcgaagggaggcggaatcgccgtaggcgcgaagcccctaaggtggtggaggagcaggagagtcgagttcattacacagtctgcatctggcggaacggcaaggtagggttgtctgggatggccattgcagacgtgacattgctgtcaggttttcacgccctgcgggccgatctcgagaagctgacttctttatccgacagatacgtgagccacttcgaaaccgagggacctcatgtgctcttatattttgattctgtccctacttctagggagtgtgtaggtttcgaggcggtgcaggaagttcctgttggcctggtccagccggcaagcgcaaccctttatgattattataaccctgaaagaagatgtagtgtcttttatggtgcaccaagtaaaagccggctcctcgcaacgttatgcagtgctgaagtgtgccaatgcgctgagggtaaatgtccgcgacaaagaagagcacttgaaagagggctgcaagacgaggacggctacagaatgaagtttgcatgctactaccctagggtcgagtacgggttccaggttaaagtgctgcgcgaagattctcgcgccgcgttcagactgtttgaaactaagattacacaggttcttcactttaccaaagatgtgaaggccgcagccaaccagatgcgcaatttcctagtccgagcctcctgcaggctgcggttggaacccggcaaggaatatttaattatggggctggatggcgccacatatgatctggaaggtcacccccaatatcttctcgattccaacagttggatcgaagaaatgccatcggaaaggctgtgccgcagtactagacaaagagccgcctgtgcccagctgaacgactttttgcaggagtatgggacacaaggatgtcaagtgtag

SEQ ID NO: 112885 - DNA, 1953 bp, synthetic construct
  misc_feature 1..1953: note = Description of Artificial Sequence: Synthetic coding sequence
  source 1..1953: mol_type = other DNA
atggggagccaatgcagaggttggcacatgtgtgcccttggaagtcagcaacaggccgatggcagctttcaggacctcagccccgtgatacatagaagcatgcagggcgggttagttggcaatgacgaaacagtggccttgacagcctttgtgaccattgcacttcatcatggcctggctgtgttccaggacgaaggagcagagcctttgaaacagagagttgaggcttcgatctctaaagccagttccttcctgggtgaaaaagcctctgccggtctgcttggggcacacgccgcagcaatcaccgcgtacgctttaaccctgaccaaagctcctgctgatctaaggggagtggctcataacaacttgatggcgatggcacaagagaccggagacaacctttactggggctcagttaccgggtctcagagcaacgctgtgagccctacccccgctcctcgcaatccatccgatcctatgccacaagcgccagctctgtggatcgagacaaccgcctacgcactcttgcatctgttactgcatgagggaaaggcagagatggcagaccaggccgctgcatggctcacccggcagggaagtttccagggaggtttccgctcaacacaagataccgttatcgccttagacgctcttagcgcctactggattgcatctcacacaaccgaagagcgcgggctgaacgtgaccctgtccagcacaggacgtaacggtttcaagtctcacgccttacagttgaacaacagacagatccgtggccttgaggaggagctccaattctcacttggcagcaagattaacgtgaaagtgggaggcaactcaaaaggcaccctgaaggttcttagaacctacaatgttctagacatgaaaaacacgacatgtcaggatctgcagattgaggtgaccgttaaagggcatgtggagtacactatggaggccaacgaggactatgaagactacgaatatgatgagcttcctgctaaagacgaccctgacgccccattgcaaccggtcacaccactgcagctgtttgagggccggaggaaccgtaggcgccgcgaggccccaaaggttgtggaggaacaggagagtcgggtgcattacaccgtgtgtatttggcgaaacggtaaagtgggtctgtctggaatggctatcgcagatgtgactttgttgagtgggtttcatgccctgcgcgcagacctggagaagctgacctccctcagcgatcgatacgtgtctcactttgagaccgagggcccgcatgtgcttctgtattttgacagcgtgccaaccagtcgggagtgtgtggggttcgaagctgttcaggaagtgccggtgggcctggtacaaccagcctccgctactctttacgattactacaaccccgagcgacgctgctccgttttctacggagctccgagcaagtccaggctgctcgcgactctttgttccgctgaagtgtgccaatgtgctgagggtaagtgtcctcggcagagaagagcactggagcgcggactgcaagatgaagatggctaccgtatgaagttcgcatgctattatcccagagtggaatacggattccaggtcaaagtgctaagagaagacagtagggcagcgttcaggttatttgaaacaaaaattacccaggtgttgcactttaccaaggatgtcaaggccgcggcaaaccagatgcgtaatttcctcgtgcgcgcttcctgccgtttgagactagaacctggcaaagagtacctcattatgggtctggacggcgctacatacgatttggaaggtcatcctcagtatctgctagattcaaacagttggatcgaggagatgccatctgaacgattgtgtcgaagtacacggcaacgggcagcatgtgctcaactcaacgatttcttgcaagagtatgggacgcaggggtgtcaggtatag

SEQ ID NO: 112886 - DNA, 291 bp, synthetic construct
  misc_feature 1..291: note = Description of Artificial Sequence: Synthetic coding sequence
  source 1..291: mol_type = other DNA
atgcctgggccaacgccaagtgggactaatgtaggtagctctggccggagcccatcgaaagctgtcgctgccagagcagccggctctacagtgagacagaggaaaaacgcctcgtgtgggacccgcagtgcaggaaggactacctcagcggggaccggaggaatgtggcgtttttacacagaagactcacccggcttgaaagtggggccagtgcctgtgctggtgatgtctcttctattcatcgcatcagtcttcatgcttcacatttggggaaagtacacacggagctag

SEQ ID NO: 112887 - DNA, 3318 bp, synthetic construct
  misc_feature 1..3318: note = Description of Artificial Sequence: Synthetic coding sequence
  source 1..3318: mol_type = other DNA
gggagagccggggaagtccgggctctgtcttctggggcacagagacggggatcccactttgtggtgctgtgtcggctccctcgtggacgggccagggtcgttggtgcaagtctgtctcatgcgcccctgcccctgcgctactgctggaaaggaagggggggagtgtctagactcttctgttcccagcgagccaggatgccgggatccctagggcgagaagcgtctggccgagccggacctacaggatgtggagcattcgcttttggactcaggtgccgctatgttattagcgctcccaaaatctttagggttggggctagcgagaacatcgtgatacaggtctacggttacaccgaggctttcgatgccaccatctccatcaaatcctaccccgacaaaaaattttcgtatagcagcggtcacgtgcacctgtcctcggagaacaaattccagaatagcgcaatattgaccattcaaccaaaacagttacccggtggacagaaccctgtttcctatgtgtatttggaggtcgtgtccaagcacttttccaagagtaagcggatgcccatcacgtacgataatggattcctgttcatccataccgataagcccgtgtataccccagaccaatccgtgaaagtccgagtttattccctcaatgacgatctcaagccagccaaacgtgagaccgtgctgacttttatcgaccctgagggatcagaggtcgacatggtagaggagatagatcacatcggaatcatatccttccccgactttaagatccctagcaacccccggtatggcatgtggaccatcaaagccaagtacaaggaggatttcagcactacagggacagcttatttcgaagtgaaggagtatgttctgccacatttctctgtcagcatcgagcctgagtataatttcatcggatacaaaaacttcaagaactttgagatcaccattaaggcaaggtacttttataataaggttgtgacagaagcagacgtctacatcaccttcggtatccgggaagatttgaaggacgaccagaaggagatgatgcagaccgctatgcagaacactatgctgattaatggcatcgcccaggtgacttttgacagcgagaccgccgtgaaagagctgtcgtattacagtcttgaggaccttaacaacaaatatctttacatcgccgtcacagtgatagagtcgactggaggcttcagcgaggaggctgagattccaggtatcaagtacgtcctgtccccttacaaactcaacctggtggccacccccctattcctcaagcccggcattccatacccaattaaagtccaggttaaagacagcctagaccaactggtcggaggagtacctgtcacactgaacgcacagacaattgatgtgaaccaagaaacgtcagacctcgacccgtctaaatcagttacccgcgtggacgacggcgtggcatcttttgtcctgaatctgccctcaggcgtcactgtactggagttcaacgtaaaaaccgacgccccagacctgcccgaggagaaccaggctcgtgagggataccgggcaattgcttactcgtccctgagtcagagttatctctatatcgattggactgacaaccacaaggctctgctggtaggcgaacatctcaacatcattgtcacaccaaagagtccttacatcgacaaaattactcattataactatttaatcctgtctaagggaaagatcatccactttggaacgcgtgagaaattcagcgatgcatcctaccagagcattaacatccccgttacgcagaatatggtgccatccagccgcctgctcgtctattacattgttacaggtgagcagaccgctgaactcgtttcggacagcgtgtggcttaatatcgaggagaagtgcggcaaccaactccaagtgcacctctcccctgacgccgacgcctattcccctggccagaccgtaagtctgaatatggctaccggcatggacagttgggtggctctcgctgcggtcgactctgccgtctatggcgttcagcgcggggccaagaagcccctcgagagggtatttcagttcctcgaaaagtcagatctcggatgcggtgccggtggaggcctcaacaatgctaacgtatttcacctggctggcctcacatttctcaccaatgcgaacgcagatgatagtcaagagaatgatgaaccatgtaaagaaattctgcgtccaagacgaaccttgcagaagaagatcgaggaaatagccgccaaatacaagcactccgtagtgaaaaagtgttgttacgatggcgcttgcgtcaataacgacgagacgtgcgaacagcgtgccgctaggatttcactgggtcccagatgtatcaaggcattcacggagtgctgcgttgtggcatcccagttaagggctaacatctcccacaaagacatgcagcttggtcgactgcacatgaagactctcctgccagtctccaagcctgagattcgctcttacttcccggagtcatggttgtgggaggtgcacctagttccccgccgaaaacagctgcagttcgctcttcctgactcactgactacatgggaaatccagggggtcgggatctctaacaccggcatctgcgtggctgacaccgtgaaggccaaagtgttcaaggacgtgtttctggaaatgaatattccatactccgtggttcggggcgagcagatccagttgaaaggcacggtgtacaactaccgcacatcagggatgcagttctgcgtgaagatgtcagccgtcgaaggtatatgtacatccgagtcccctgtgatcgatcaccaggggacgaaaagttcgaagtgcgtccgccagaaagtcgaagggagttccagccatctcgttacatttaccgtacttcccctcgagattggtctccataatatcaacttttcactcgaaacctggttcggaaaagagattttggttaaaacattgagggtggttcctgagggcgttaagagggagagttattcaggcgtcacccttgatcctcggggtatttatggtaccataagtaggcgtaaggagttcccataccgcatccctctggacctagtgcccaaaaccgagatcaaacgcattctgtctgtaaaaggcttgcttgttggagaaatcttgtccgctgttctctcccaagaaggcatcaatattttgacccatctgcctaagggctctgctgaggccgagctgatgagcgtagtccccgtattctatgtctttcccggcaaccgaaaatcgctcgagcacttttctttttag

SEQ ID NO: 112888 - DNA, 2805 bp, synthetic construct
  misc_feature 1..2805: note = Description of Artificial Sequence: Synthetic coding sequence
  source 1..2805: mol_type = other DNA
atggcccgccgcagtgtgctctactttatcctgctgaatgccttaattaataaaggccaggcgtgcttttgtgatcactacgcctggactcagtggacttcctgctccaaaacttgtaactctgggacgcaatctcggcataggcagatcgtggtggataaatactatcaggaaaatttctgcgaacagatctgcagtaaacaggagacgagagagtgcaattggcaacgctgccccatcaattgtctgctcggcgatttcggcccgtggagtgattgtgatccctgtattgagaagcagagtaaagttcggtccgtacttcggccctcacagttcgggggacagccatgtactgcccctctggtcgctttccagccatgcattccatcgaaactgtgcaaaatcgaagaggctgactgcaagaacaaattcaggtgcgactctgggagatgtatcgccaggaaactagagtgcaacggcgaaaatgactgcggcgacaactcggatgaacgagactgcggacgcacaaaggcagtgtgtaccagaaaatataatccaattcccagcgttcaattgatgggcaatggattccattttctcgcaggagagcctagaggcgaggtgctggacaattcatttactgggggcatatgtaagacagtaaagagttcaagaacatcgaatccatatcgggtcccagctaatctcgagaacgtgggctttgaggtacagactgccgaggatgatctgaagaccgacttttataaagacctgacgagtctcggtcacaacgagaaccagcagggcagcttttcctctcaaggtggatctagtttctctgtccctatcttctactccagcaaacggagcgagaacatcaatcacaattcagcatttaagcaggccatccaggcctcccataaaaaggactcttccttcattagaatacataaggtaatgaaggtgctgaacttcacgactaaggctaaagatttgcacctgagcgacgtctttcttaaggccctaaatcacctcccgttagagtacaacagcgccctttacagtcggatcttcgacgatttcggaacccactactttacatccggttcccttggaggggtttatgacctgctgtatcagtttagctcagaggagctgaagaacagtggtctgaccgaggaagaagccaagcactgtgtgcgaattgaaacgaagaagagagtgctttttgccaagaagacgaaagtcgagcatcgctgcactactaacaaactctctgagaagcatgaaggctccttcatccagggtgccgaaaagtcaatttctctgatccgtggagggcgctccgagtatggtgcggccctagcttgggagaaaggctcctccggattagaagagaagacgttttctgagtggttggagagcgtgaaggagaaccctgcagtgatcgactttgaattggcacccatcgtggacttggtgcggaacatcccctgtgcagtgacaaaaagaaataatctccgtaaagccttgcaggagtacgccgcaaagtttgacccatgccagtgcgctccctgtcccaataatgggcgtcccactttaagcggaacagaatgtctgtgcgtttgccaaagcggcacatacggcgaaaattgtgaaaagcagtctcccgactataagtccaacgcagtcgacggtcaatggggatgctggtcatcttggtcaacatgtgacgccacctataagaggtcgaggacacgggaatgtaataaccccgcgcctcagcggggtggaaagcgctgtgaaggagaaaagcgccaggaggaggattgcactttctccatcatggaaaataacggccagccatgtatcaatgatgacgaagaaatgaaggaggtagatctgcctgagatcgaggcggactcgggttgtccacagcctgttccacccgagaatggatttataaggaatgagaaacagctgtatctagtcggggaagatgtggaaatcagctgccttactggttttgagacggtgggctatcaatacttccggtgtctgcccgacggcacctggcggcagggcgatgtggaatgccagcgtaccgagtgcattaaacccgtcgtgcaggaggtccttacaattactcctttccagcgcctctaccgaatcggggagtctattgaattgacctgtcctaagggtttcgtggtggccggtcccagcagatatacctgtcaaggtaattcctggaccccccccatctccaactccctcacctgcgagaaggacaccctgactaaacttaagggccattgccaactggggcagaaacagtcagggagcgagtgtatttgcatgtcacctgaagaggattgctcccaccactccgaggatctttgtgtgtttgacacagactcaaatgattacttcacgtctccagcctgcaagtttcttgccgaaaagtgtctgaacaaccaacagctacactttctgcatatcggcagctgccaggacgggcgtcagctcgaatggggcctggaaagaacacggctgtcgagcaacagcaccaagaaggagagttgcggatatgacacatgttacgactgggagaagtgttccgcttcaacatcgaagtgcgtgtgtttactgcctcctcaatgttttaaaggtggaaatcagctttattgcgttaaaatgggctcgagcacttcagagaagacattgaacatatgcgaggtgggaaccatcagatgtgccaacaggaagatggagatattgcaccctggcaagtgcctggcctag

SEQ ID NO: 112889 - DNA, 2805 bp, synthetic construct
  misc_feature 1..2805: note = Description of Artificial Sequence: Synthetic coding sequence
  source 1..2805: mol_type = other DNA
atggcacggcgatccgtactatactttatcctgttaaacgccctgatcaacaaaggccaggcttgcttttgcgaccactatgcctggactcagtggacttcatgtagcaagacatgtaatagtgggacacagagtaggcacagacaaatcgtggttgacaaatattatcaggagaatttctgtgaacaaatttgtagcaagcaggaaacccgcgagtgcaattggcagcgatgccccatcaattgcctgctgggtgactttggcccgtggtctgattgcgatccctgtattgagaagcaatctaaggtgagatccgtgcttcgaccttcccagtttggcgggcagccatgtacagcaccactggtagctttccaaccctgtatcccttcaaagttgtgcaaaatcgaagaagctgactgtaagaacaaatttcgttgtgatagcggacgttgcatagcccggaaactggagtgtaacggagagaacgactgtggtgataacagcgacgagcgcgactgtggtcgcactaaggccgtgtgcacgcgcaagtataatccgataccgtccgtacaactgatgggcaacggctttcatttcttggcgggcgagcccagaggggaggtgctcgacaatagcttcaccgggggtatttgtaagactgtcaagtccagccgtacctctaacccctatcgtgttcccgccaacctggagaacgtggggtttgaagttcagaccgctgaagatgacctgaagaccgacttctacaaggaccttacatctctcggccataatgagaaccagcaaggttccttttcctcccagggggggtcttcatttagcgtgcctattttttatagctctaagcgtagcgaaaatatcaatcataacagcgcttttaaacaagccatccaagcgtctcataagaaggacagctccttcattcggattcataaggtgatgaaagtcctcaactttacaacgaaggccaaagatttgcacctaagcgacgtctttcttaaagcccttaatcaccttccactggaatacaacagcgcactgtacagccgcatctttgatgattttggaacccactactttacatcgggcagtctgggcggcgtctatgatttattgtaccagttctcatccgaggagctgaagaacagtgggctcaccgaggaggaagcaaagcactgtgtgaggatagaaacaaagaaaagggttttgtttgctaagaagaccaaggtggaacatcgatgtactactaataaactgagtgaaaaacatgaaggcagttttattcagggagccgaaaagagcatatcactgatccgaggtgggcggtcagaatatggcgctgcattggcctgggagaaaggctcttccggcctggaggaaaagacattttccgaatggctggagtccgtgaaagagaatccagcagtcatcgactttgaactcgcccctatcgtggatcttgttcgaaatataccatgcgctgtcacaaaacggaacaatctacgtaaagcattgcaggagtatgccgccaaattcgacccctgtcaatgtgctccttgtcccaataacggtagaccgacactgtccggaaccgagtgcctgtgcgtttgtcagtcgggcacctatggggaaaactgcgagaagcagtctcctgactacaagagcaatgccgttgatggccagtggggctgttggtctagctggtcaacgtgtgatgccacctacaagcggtcaagaactcgcgagtgcaataatccagccccccagcgcggtgggaagcgctgtgagggagagaaacggcaggaagaagactgtactttcagcatcatggaaaacaacgggcagccctgcataaacgacgatgaggagatgaaagaggttgacttgccggagattgaagccgactctgggtgtccacagcctgtacctcctgaaaatggcttcatcagaaatgagaaacagctctatctagttggggaagacgttgaaatatcatgcctgacagggttcgagacagtgggataccaatattttagatgccttccagatgggacgtggagacaaggcgatgtcgagtgtcagcgcaccgagtgcattaagcctgtggtgcaagaggtcctcacaataacacctttccagaggctgtacagaatcggcgagtctattgagttgacctgtcctaagggcttcgtcgtggccgggccgtcacggtacacatgtcaaggtaattcttggactcccccgatatctaattcattgacgtgtgaaaaggataccctcacaaaattgaaaggccactgtcaactcgggcagaaacaatccggatcagaatgtatatgcatgtcaccagaggaggattgttcacatcattctgaggatctttgcgtcttcgatacagatagcaacgactatttcaccagcccagcctgtaagtttcttgccgagaaatgtctgaacaatcagcagctgcacttcctacacatcgggtcatgtcaggatggaagacagctcgagtggggactggagcgtacccgcctgtcgagtaatagtactaagaaggagagttgtggatacgatacctgttatgattgggaaaagtgtagcgcttctacttcaaagtgcgtgtgcctcctgccaccccagtgcttcaagggtggaaatcaactgtattgtgtaaagatgggcagtagcacctccgaaaagactctgaatatttgcgaagtgggaacaatccgctgtgcaaatcgtaaaatggaaattctgcatcccggaaagtgcttggcatag

SEQ ID NO: 112890 - DNA, 2532 bp, synthetic construct
  misc_feature 1..2532: note = Description of Artificial Sequence: Synthetic coding sequence
  source 1..2532: mol_type = other DNA
atgaaggtcattagcctctttattcttgtaggatttattggagagttccagagtttttctagcgcctcctcgcctgtcaattgccaatgggatttttacgccccttggagcgagtgtaatggatgtaccaagacccaaactagacggcgttcggtcgccgtttacggtcagtatggtggccaaccatgtgttgggaatgcctttgagactcagagctgtgaaccaacgagagggtgccccactgaggagggctgtggcgaacggttcaggtgcttttcagggcagtgcattagcaaaagcttggtgtgtaacggcgatagtgactgtgacgaagactcagccgacgaagatcgttgtgaagactctgaacgaaggccaagctgcgatattgacaagccccctcccaatattgaactgaccggcaatgggtataatgagctaaccggccaattccgcaaccgggtcatcaacactaagtcctttggaggccagtgcagaaaggtgttttctggcgacggcaaggacttctatcgcctgtcgggcaatgtgctgagctacactttccaagtgaaaatcaacaatgatttcaactatgaattttataactcgacatggtcgtacgttaagcatacctccacagaacatactagtagtagccgtaagcgctcattctttaggtcttcctcgtcctccagtcggagctacacctcgcacactaacgagattcataaagggaagtcttatcaattgctcgttgttgagaacactgttgaggttgctcagttcattaacaataatcccgagtttctccagctggctgaaccgttttggaaagagctcagtcacttgccgtcactctacgactattccgcataccggcgcctcatagatcagtatggaacacactacctgcaatccggaagtttaggtggtgagtaccgggttttgttttacgtggactcagaaaagttgaagcagaatgacttcaattccgtggaggaaaaaaaatgtaagtcttccgggtggcatttcgttgtcaaattctcaagccatggatgcaaagaactagagaacgcccttaaagctgcatctggaactcagaacaacgttctgaggggggagccatttattcgcggagggggggcgggatttatcagcgggttatcctatctggagctagacaatcctgctggcaacaaaaggcgttacagcgcctgggccgaatccgtcacaaacctgccacaagtgataaagcagaaattaacacctctctatgaactcgtcaaagaggtgccatgcgcatctgtgaaaaaactgtacctcaagtgggccctggaagaatacctggatgagttcgatccatgccattgtcgaccatgccaaaacgggggtctcgctacagtggaggggacgcattgcctttgccactgcaaaccctatacatttggcgccgcatgcgaacagggggttttggtcggcaaccaggccgggggagtggacggaggatggtcctgctggagctcatggtccccatgtgtgcagggcaaaaagacgcggtcacgtgagtgcaacaatccacctccttcagggggcggccggagttgcgtaggggagaccaccgaatcaactcagtgcgaagacgaggagctggaacacctgagacttctggagcctcactgtttcccgttaagcctagtgcccactgaattctgtccttctcctccagctctcaaggatggctttgtgcaggatgaaggaacaatgtttcctgtcgggaaaaacgtcgtctacacctgcaatgagggatactcactcataggtaatccggtggcaaggtgtggggaggacctacggtggctagtgggagagatgcattgtcagaaaatagcctgtgtgctgccagtgctgatggacgggattcagtctcatccacagaagcccttctacaccgtgggcgaaaaagtgacagtttcctgttccggaggcatgagcttggaagggccaagcgcattcctgtgcggcagttccttaaaatggagtcccgaaatgaagaacgctcgttgtgtccagaaagaaaaccccctcactcaggcagtgccaaagtgtcagaggtgggagaaactgcagaactcccggtgcgtgtgcaaaatgccctacgagtgtggaccatctctcgatgtgtgtgcccaagacgagaggtccaagagaattctccccttaaccgtgtgcaagatgcatgtcctacactgtcagggccgcaattatacgttaaccggacgcgattcttgtaccctgcctgcctccgcagaaaaggcttgcggagcctgtccactgtggggaaaatgtgacgccgagagcagcaaatgcgtgtgtagggaagcctccgaatgtgaggaggaggggttctcgatctgcgtcgaagtgaacgggaaagaacagactatgtctgagtgcgaggccggagctctccgctgtaggggtcagagtataagcgtcacttccatccgcccctgcgctgccgagacccagtag

SEQ ID NO: 112891 - DNA, 1461 bp, synthetic construct
  misc_feature 1..1461: note = Description of Artificial Sequence: Synthetic coding sequence
  source 1..1461: mol_type = other DNA
atgaaggtgatctcgctcttcatcctggttggatttatcggggaatttcaatccttctcttctgcctcttcccccgtgaattgccagtgggacttttacgccccttggtctgaatgcaacgggtgtaccaaaacccaaacacgcaggcgcagtgtggctgtgtatggacagtacggcggtcagccctgtgtgggcaacgcctttgagacccagagttgcgagccaactagaggatgccctacagaggaaggctgcggcgagagatttcgctgcttcagcggacagtgtatctccaaatccctggtgtgtaacggcgactccgactgcgatgaggatagcgccgacgaggataggtgcgaggattctgagaggcgaccctcttgcgacattgataagccaccacccaacatcgagctcaccggcaatggatataacgagctgactgggcaattcagaaacagggtactcttttacgtggatagcgaaaaacttaagcaaaacgactttaactcagtagaggaaaagaagtgcaagtcttccgggtggcattttgtcgtgaagtttagcagtcacgggtgtaaagagcttgaaaatgccctgaaggccgcttcaggcacacagaataatgtgctcagaggtgagccttttattcgcggtgggggtgcaggattcatctccggcctctcttatctcgaactggacaatcccgccggcaataagcggagatattccgcgtgggcagaatcagtcacgaatctgccgcaggtgatcaaacagaagctcacccccctttacgagctcgttaaggaagtaccctgcgcctcggtgaagaaactgtatctgaagtgggcactagaagaatatctggacgagtttgatccatgccattgcaggccatgccagaacggcgggctggccaccgtcgaggggacccactgtctctgccactgtaagccttacaccttcggtgccgcatgcgaacagggagtgttggttggcaatcaagcaggcggtgtagacgggggctggtcttgctggagtagttggagtccctgtgtccaaggcaaaaagactcgcagcagagaatgcaataacccgccacctagcgggggcgggaggtcctgtgtgggcgaaacaactgaatccacccagtgcgaagacgaggaactcgagcatttgagattactcgagccacattgctttccacttagcctggttccaactgaattctgcccctccccaccagctcttaaagatgggttcgtgcaggatgagggaacaatgttccctgtaggcaagaacgtcgtatatacttgtaacgagggttattccctgatcggcaaccccgtggccagatgtggcgaggacctgagatggttagtcggtgaaatgcattgccagaacggcaagataagtaactggatgaaggtgaacgagactctcttggtggaacaccactag

SEQ ID NO: 112892 - DNA, 1032 bp, synthetic construct
  misc_feature 1..1032: note = Description of Artificial Sequence: Synthetic coding sequence
  source 1..1032: mol_type = other DNA
atgaaagttataagcctgttcatccttgtcggcttcatcggggagttccagagtttttctagtgcatctagcccagtgaactgtcagtgggacttttacgctccttggtcagagtgtaacggttgcactaagactcagacacgcagacggagcgtggcagtgtatggccagtatggtggccaaccctgcgtgggaaatgcttttgagacccagtcgtgtgagccaacccggggctgccccaccgaagaggggtgtggggaacgttttagatgtttcagcggacaatgtatatcaaaaagcctggtgtgtaacggtgattcggattgcgacgaagatagtgcagatgaggataggtgcgaggattcagagaggagaccaagctgcgatatagacaaaccccctccaaatattgagctgaccgggaatggatataatgagctgactggccaattccgaaaccgagtgatcaacaccaaatctttcggaggacagtgccgcaaagtgttttccggcgacgggaaggacttttatcggctgagcgggaatgtgctgtcttacacgtttcaagtgaagatcaacaacgacttcaattatgagttctacaactccacttggagctacgtgaaacatacgtctacagaacacacctcctcgtctcgcaaaaggtctttcttccgaagtagtagctcatcttctagatcgtacacctctcataccaatgagattcataagggcaagagctatcaactgctggtcgttgagaacaccgtagaagtggcacaattcatcaacaataatcctgagtttttgcaactcgccgaaccattttggaaagaactttcccacttgcccagcctttacgactatagtgcttatagaaggcttatcgaccagtacggaacgcattacttgcagagcgggtctctgggaggcgagtaccgagtactgttttacgtagactctgaaaagctgaaacagaatgacttcaactccgtggagaaaaaaaaaaagaaaaagaagaaaaaaaagtag

SEQ ID NO: 112893 - DNA, 1755 bp, synthetic construct
  misc_feature 1..1755: note = Description of Artificial Sequence: Synthetic coding sequence
  source 1..1755: mol_type = other DNA
atgtttgccgttgtcttcttcatcctcagtctgatgacttgccagccgggcgtcactgcacaggagaaggtcaaccagcgggtgcgccgtgccgccactcccgcagctgtcacatgccaactttccaactggagtgaatggaccgattgttttccctgtcaggacaagaaatacagacatcgatccttgttgcagccaaacaaattcggaggtacaatttgtagcggcgacatctgggatcaagcttcctgttctagttcaacgacgtgtgtccggcaagctcagtgtgggcaggattttcagtgcaaggaaactggcaggtgtctgaagcgccacctggtgtgtaacggcgaccaagactgtctcgacggctctgacgaggacgattgcgaggatgtgcgcgcaattgatgaagattgtagccagtatgagcctattcccggtagccaaaaagctgctttagggtacaacattctcacacaggaggatgcccagtctgtgtacgacgcaagttattacggcggtcaatgtgaaaccgtttacaacggggaatggcgcgagctgaggtacgattctacgtgcgagaggctgtattatggagatgatgaaaaatacttccgcaagccatacaatttcctaaagtatcattttgaggcgctggctgatacgggcatctcctctgagttctatgataatgccaacgacttgctctcaaaagtcaaaaaagataagagtgattcctttggtgtaaccatcggtatcggaccagcaggtagccccctgctagtgggcgtgggtgtgtcccattcccaggacacaagctttctgaacgagttgaataagtacaatgaaaagaagttcatctttacaagaattttcactaaagttcaaacagcgcatttcaaaatgcgaaaagacgacatcatgctcgatgaagggatgttacagtctctcatggagcttccagaccagtataattatggcatgtatgcaaagttcataaatgattacggaactcactatattactagcgggagcatgggcggaatttatgagtacattttggtaatagataaggctaaaatggagtcgcttggtatcacttcccgggatattaccacctgttttggggggagcctaggcatacagtacgaagacaagatcaacgtgggtggagggcttagtggcgaccactgtaagaaattcggcggcggcaagacagagcgagcgaggaaagccatggccgtcgaggacattatttcccgagtgaggggcggcagcagcggctggagtgggggacttgcccagaacagaagtactattacataccgctcctggggccgatccctgaagtacaaccctgtggtaatcgattttgagatgcaaccgatccacgaggtgctcaggcacactagcctgggcccactagaggcaaagagacagaacctgcggcgggccttggaccagtacctcatggagttcaatgcctgccgttgtgggccttgttttaacaacggagtgccaatcctagaggggacctcctgcaggtgccagtgccgcctgggtagtcttggagccgcctgtgaacagacacagactgaaggtgcaaaagccgacggctcttggagttgttggagctcttggtccgtctgtcgcgcggggattcaggagcgccgccgggaatgtgacaatcccgctccccagaatgggggtgcgtcttgtcctggccgcaaagtccaaactcaagcctgttag

SEQ ID NO: 112894 - DNA, 1776 bp, synthetic construct
  misc_feature 1..1776: note = Description of Artificial Sequence: Synthetic coding sequence
  source 1..1776: mol_type = other DNA
atgaagaatagccgcacttgggcatggagggccccagtggaattgtttttactttgcgctgccctcggttgtcttagcctgcccgggtctagaggtgaaaggccccatagcttcggcagtaacgcagtgaataaatcgtttgccaaatcacggcagatgcgctccgttgatgtgaccctgatgccaatcgactgcgaactctcttcatggagctcctggactacttgtgatccctgccagaaaaagagatatcgctacgcctacttactgcagcctagccagtttcatggggaaccctgtaatttttctgacaaagaagttgaagactgcgtcacaaaccgcccgtgtggcagccaggtaagatgtgaaggtttcgtctgcgctcagaccggcaggtgcgtgaatcgaaggctattgtgcaacggagacaatgattgcggtgatcaaagtgatgaggccaattgtcgccgaatttataaaaaatgtcagcatgagatggatcagtactggggtatcggttccctcgcctccggcatcaatctgtttacaaatagtttcgaaggccccgtgctcgaccatcgatactacgcaggcgggtgttccccacattacattttgaataccagatttcggaagccttataacgtggaatcatacactcctcagacacaggggaaatatgaattcatccttaaagaatatgagtcttactccgactttgagagaaatgtgaccgaaaaaatggcctccaaatccgggttcagctttggattcaagatccctggaattttcgagcttggaatttctagtcagagcgaccgcggcaaacactacattagacggaccaagaggtttagccataccaagtctgtgtttttgcatgcacggtctgacctcgaagttgcccattacaagcttaaacctcgaagcctgatgctgcattacgaatttctccagagggtgaagcggctgcccttggagtactcctacggcgagtatcgggatttattcagagactttgggacccactacatcactgaggctgttctagggggaatttacgagtacaccttggtgatgaacaaggaggccatggaaagaggagattatactctcaataatgtccatgcttgtgccaaaaacgatttcaaaataggaggggctattgaagaggtgtacgtttccctgggggtgtccgtgggaaagtgtcgcggcatactcaatgagataaaggataggaataagcgagatacaatggtggaggaccttgtggtccttgtgaggggtggcgcttcagaacatatcacaaccttggcttatcaagaattgcccaccgctgatctgatgcaggaatggggcgatgccgtacaatacaacccagctatcataaaggtcaaagtggaaccgctctacgagttagttacagccacagactttgcctactcctccaccgtcagacagaacatgaaacaagcactggaggagttccagaaagaagtttcctcttgtcactgcgcaccttgtcagggaaacggcgtgcccgtgctgaagggcagcaggtgtgactgcatctgtccagtcggcagccaggggctcgcatgtgaagtgtcatatagaaaaaacacacccatagacggcaagtggaactgttggtccaactggtcctcttgctctgggaggcgaaaaactagacagcgccagtgcaataaccctcctccgcagaacggcggcagcccatgttccggccccgcgagcgagacactggactgtagttag

SEQ ID NO: 112895 - DNA, 1590 bp, synthetic construct
  misc_feature 1..1590: note = Description of Artificial Sequence: Synthetic coding sequence
  source 1..1590: mol_type = other DNA
atggacacctgcatgaccctggccttcaccttatcgggcagattttttatgctcctgtcacagtacagatacgcttacttgttacagcctagccagttccacggtgaaccatgcaacttttcagacaaagaagtggaagactgtgttacgaaccgcccctgcggcagccaggtgcggtgtgagggattcgtttgcgcccagacaggccggtgcgttaaccgacggctattgtgcaatggggataacgactgcggggaccagagcgatgaggctaactgcagacgaatttataagaagtgtcagcatgagatggaccagtactggggaattgggtcactagcaagcgggataaacttgttcaccaactctttcgaaggcccagtcttagaccaccgctactacgctgggggctgtagcccacattacatactaaacacgagatttcgaaaaccctataacgttgaatcatatacccctcagacacagggtaagtatgagttcattttgaaggagtacgaatcttactcggatttcgaacggaacgttacagaaaagatggcctctaaatcgggatttagctttggctttaagattcctggaatctttgagctgggtatcagttcgcagagcgaccgtggtaagcactatattaggcgaactaaacgattcagtcatactaagtccgtgtttttgcatgcccgcagcgatctggaggtggcgcactacaaattgaagccaagatcgctgatgctgcactatgagtttttgcaacgagtgaagcgtctaccgcttgagtactcatacggcgagtaccgcgatttgtttcgggattttggaacccattacataaccgaggcggtgctggggggaatttatgaatacacactggtgatgaataaagaggccatggagcgaggcgactacacactcaataatgtccacgcttgtgccaagaacgacttcaagattggcggtgctatcgaagaggtgtacgtatccctgggcgtctccgtggggaagtgccgcgggattctgaacgaaataaaagacaggaataaacgcgatactatggtggaggatctggttgtcctggttcggggtggtgcctctgagcacattacaactcttgcctatcaggaactccccaccgcggacctgatgcaagagtggggcgacgctgtacagtacaaccccgctattattaaggtcaaagttgagcccctctatgagttagtcacggccactgactttgcctacagctccactgttcgacagaacatgaaacaggccctggaagaatttcagaaagaagtttcgagttgtcattgtgccccatgtcagggaaatggggtgcctgtcctgaagggaagtcgctgtgactgcatttgccctgtcggatctcagggtctcgcctgtgaggtgtcctaccgaaaaaataccccgatcgatggaaagtggaactgttggtccaactggagttcatgctctggacgaaggaagacccgtcagagacagtgcaataatccacctcctcagaatggcggaagcccatgtagtgggccagcctctgaaacgctggactgcagctag

SEQ ID NO: 112896 - DNA, 1620 bp, synthetic construct
  misc_feature 1..1620: note = Description of Artificial Sequence: Synthetic coding sequence
  source 1..1620: mol_type = other DNA
atgaggagcgtggacgtaactctgatgcccatcgactgtgagcttagctcctggtctagctggactacgtgtgatccgtgccaaaaaaaacgctaccgttacgcatacttgctgcagccttcacaattccacggtgagccttgcaacttttctgacaaggaggtagaagattgcgtgaccaacagaccctgcggaagccaggtgcggtgtgagggttttgtgtgtgctcagaccgggagatgtgtgaacagacggctgctgtgtaatggagacaacgactgtggagaccagtcggacgaggccaactgtcgcaggatctacaagaagtgccagcacgagatggaccagtattggggtatcggctccctggcctctggcatcaacctgtttaccaactcctttgagggacctgtacttgatcaccgatattatgccggcggctgctctccccattatatccttaacacccgattcaggaagccgtacaacgttgaaagctatacgccccagacacaaggcaagtatgagttcattctcaaggaatacgaaagctactcagacttcgagcgcaatgtgactgaaaagatggcgtccaagtcaggtttctccttcggctttaagattcctggcatcttcgagttaggcatctccagccagtccgatcgcggaaagcactacattagacgtaccaagcgtttctcccatacaaagtctgtgttcctccacgcaaggtccgacttggaggttgcacactataagctcaagcccaggtcactgatgcttcactatgagtttcttcaaagggtgaaacgcctgccactcgagtattcctatggagagtaccgggatctgttcagggactttggcacgcactatatcaccgaagctgtcctcggcggtatttacgaatacaccttggtgatgaacaaggaggccatggagagaggggattacactctgaacaatgtgcacgcctgcgctaaaaatgattttaagataggcggggcaattgaggaagtgtacgtgtcactgggtgtctcagtgggcaagtgtcggggaatcctcaacgaaattaaagacaggaataagcgggacaccatggtggaagacttggttgttctcgtgagaggcggcgctagcgagcatattacgactctggcttatcaggagcttcccacagccgacctaatgcaggagtggggggatgcggttcagtacaatccagccatcatcaaggtgaaagttgaaccgttgtatgaactggtcacagcgaccgactttgcatatagctccactgtgcgacaaaacatgaaacaagcactcgaagagtttcagaaagaagtgagctcctgccattgcgccccttgtcagggaaatggcgtccctgtcttgaagggctcccgctgcgattgcatttgccccgttggtagccagggactggcctgcgaagtgagttaccggaagaatacacccattgacggcaagtggaattgctggagcaattggtcttcatgctcaggccgccgcaaaaccagacagagacaatgcaataacccaccaccccaaaatggtggcagcccgtgcagtgggccagcttctgaaacgctggactgcagttag

SEQ ID NO: 112897 - DNA, 675 bp, synthetic construct
  misc_feature 1..675: note = Description of Artificial Sequence: Synthetic coding sequence
  source 1..675: mol_type = other DNA
atggcaactcatcatacactctggatgggtctcgctttgctgggcgtgctgggagacctccaagccgcccctgaagctcaggtttcagtccagcctaattttcagcaggacaaatttctggggcgctggttctcagctgggttggcctctaattccagctggttaagagagaagaaggctgcactgtcaatgtgtaaaagcgtggtagctcctgcaactgacggagggcttaatttgacttccacattccttagaaagaaccagtgcgaaacacggaccatgcttcttcagcctgctggctccttgggctcttattcctatcggagcccaagggagtggggtctgcacagacctcccggcccaagcttgggagccactctcgcaggcacgaccctaggacagccgcccgcagccgaaattcacggggtgggcgactgggggtcgacttactcagtttccgtggttgaaacggactatgaccagtacgccctgctgtactcacagggtagcaaggggccaggcgaggacttccggatggcgacgctctacagcaggacccagaccccccgagctgaactgaaagagaaattcaccgccttctgcaaagctcaaggctttacagaagatacaatcgtgttcctgccacagaccgataagtgcatgactgagcagtag

SEQ ID NO: 112898 - DNA, 495 bp, synthetic construct
  misc_feature 1..495: note = Description of Artificial Sequence: Synthetic coding sequence
  source 1..495: mol_type = other DNA
atgctgccacctggaaccgcaacgctcctcacactcttgctcgctgccggctccctcggacaaaagccccagcgccctagacggcctgcgagccccatttccaccatacagccaaaggccaatttcgacgcccagcagttcgctggaacatggttgctagtggctgtcggctccgcctgtcgcttcctgcaggagcaagggcatcgcgctgaggcgacgaccttgcacgtggcaccccagggtactgccatggcagtgtccacatttcggaaattggacggaatctgttggcaggtgaggcaactctatggcgacaccggcgttctgggacgcttcttacttcaggcgagggacgcacggggtgcagttcacgtggtagtggcggaaaccgattatcaatctttcgctgtgctctacttagaacgcgctgggcagctctccgttaagctttatggtgcacagggcgtcgttacggaccgccccggtgtaggttag

SEQ ID NO: 112899 - DNA, 1680 bp, synthetic construct
  misc_feature 1..1680: note = Description of Artificial Sequence: Synthetic coding sequence
  source 1..1680: mol_type = other DNA
atgagcgcttgtcgttcgtttgccgtcgccatctgcatactggagatttcgatattaactgcgcagtatactacaagctacgatcccgaactgacagagagctcaggaagcgcatcccacatcgactgcaggatgtctccctggtcagagtggtcccagtgcgatccatgcctgcgccagatgttccggtcgagatctatcgaagtgtttgggcagtttaacggtaaaaggtgtaccgacgcggtgggagaccgaaggcagtgcgttcccactgagccctgcgaagacgctgaagacgattgcgggaatgacttccagtgctctacgggtcggtgtattaagatgagactccgatgtaacggggataatgattgcggcgatttttcagatgaggacgattgcgagtccgaaccacggccaccctgcagggatagggtcgtggaggagtcagagctagctcggaccgcaggctacggcattaatattctgggcatggaccccctgagcactcctttcgataatgaattttacaatggactttgtaaccgtgaccgggatggcaacactcttacctactacaggcgaccttggaacgtggcatctctgatctacgaaaccaaaggagaaaaaaactttcgtactgaacattatgaggagcagattgaagccttcaagagtattattcaggaaaagacctccaattttaacgctgccatatccctgaaatttacccctacggaaaccaataaagctgagcagtgctgtgaagaaacggccagcagtatttctcttcatgggaagggcagttttaggttcagctactcaaaaaatgagacatatcagctctttctctcctacagctccaaaaaagaaaagatgtttctccatgtaaaaggtgagatccacctcgggcgatttgtcatgaggaatcgcgacgttgtgttgacgacaacctttgtcgatgacataaaggccttaccaaccacctacgagaaaggagaatacttcgcgtttcttgagacttacggaactcactattcttcatccggaagtttgggtgggttatacgaactgatctatgtactggacaaggccagcatgaaacgcaagggagtcgaattgaaagatattaaacggtgcttggggtaccacctggacgtgagcttggcatttagcgagatctctgtgggagctgagttcaacaaggacgactgtgtgaagcgaggcgaggggcgcgccgtcaatatcacttctgaaaatttgatcgacgatgtggtgtctctcatccgcggaggtactagaaagtatgcctttgaattaaaggagaagctactgcggggcaccgtgatcgatgtcaccgactttgttaattgggccagctccatcaatgatgcccctgtgctgatttcacagaaactatcgcccatatacaacttagtacctgtcaagatgaagaatgcccacctgaagaaacagaatctggaacgcgccatcgaggattatatcaatgagtttagtgtgcgtaagtgccatacctgccagaatggcggcacagtgatactgatggacgggaaatgtctttgtgcctgtccgttcaagtttgaggggatcgcatgtgagatatcaaagcagaaaatcagcgagggcttgcccgcccttgagttccctaacgaaaagtag

SEQ ID NO: 112900 - DNA, 1770 bp, synthetic construct
  misc_feature 1..1770: note = Description of Artificial Sequence: Synthetic coding sequence
  source 1..1770: mol_type = other DNA
atggggagcaatttgagtcctcaactgtgtctgatgccttttattctagggctgttgagcggcggggtgaccacaactccatggagtcttgcccagcctcaaggaagctgtagtctcgagggcgtggaaatcaaaggtgggagttttcggttgctgcaggagggacaggccctggaatatgtgtgccccagcgggttctacccataccctgtccagactcgcacatgtcgctcaacgggatcctggagtaccctcaagacacaggatcagaagacagttcgaaaggccgagtgtcgcgctatccattgccctcgacctcacgattttgagaacggagaatactggcccagatcaccatattacaatgtatctgatgagataagttttcattgttacgacggttacaccctgagaggcagcgcaaacagaacatgtcaggtgaacggccggtggtccggccagaccgccatctgcgacaatggagctggctactgttcgaacccaggcataccaatcgggaccagaaaggtgggttcccaatatagattagaggattctgtcacttaccattgctcgcgagggttgacactgcgcggtagccagagaaggacctgtcaggaaggggggtcttggagtggtaccgaaccctcctgccaggatagctttatgtacgatacccctcaggaggtggccgaggcattcctcagttccctaactgagactattgaaggcgtcgatgccgaagacgggcacggacctggcgaacaacagaaacgaaagattgtgctggacccctccggtagcatgaatatctacctagttttagacggctccgacagcatcggagcgtccaattttacaggcgccaaaaaatgcctcgtgaacctgatcgagaaggtggccagctatggggtgaaacccaggtacgggttggtgacgtacgctacttacccgaagatctgggtgaaggttagcgaggccgacagctcaaatgccgattgggtgacgaaacagctcaacgagattaactatgaggaccacaagctcaagagtggtaccaacacaaagaaagcgttacaggccgtgtactctatgatgtcatggcccgacgacgtcccacctgagggctggaacagaacccgccatgttattattctaatgaccgacggactgcataatatgggaggggaccctattacagtgatcgatgagattcgggacctattgtatataggaaaggaccggaaaaatccaagggaggattacttggacgtctatgtttttggcgtagggccgctagtgaatcaagtaaatatcaatgcactggcaagtaagaaggataatgagcagcacgtgtttaaagttaaagacatggaaaacctggaggatgtcttctaccaaatgattgatgagtcccaaagtctgtcattatgcggcatggtttgggagcatcggaagggtaccgactatcacaaacaaccatggcaggctaagatctccgtgatcaggcccagcaagggccatgagtcttgtatgggtgcggtggtctccgagtactttgtgctgacggctgcccattgctttacagtggacgacaaggagcattcaataaaagtcagcgtcggtggggaaaagcgtgacctcgagatcgaagtggtgctgtttcatccaaactacaacatcaacggaaaaaaagaagctggcataccagagttctacgactatgatgtggctctgattaagctgaaaaataagcttaaatacggttag

SEQ ID NO: 112901 - DNA, 1770 bp, synthetic construct
  misc_feature 1..1770: note = Description of Artificial Sequence: Synthetic coding sequence
  source 1..1770: mol_type = other DNA
atgggtagtaatctgagtccacaactgtgtttgatgccctttattctgggcctgcttagcgggggcgttacaacgacgccgtggtctctagcccagccacagggcagctgttcccttgagggtgtagagatcaagggcgggagcttccgcttactacaagagggacaggctttagagtacgtttgtcctagtggattttacccataccccgtgcaaacaagaacatgccgctctacgggatcctggagcaccctgaagacccaggaccaaaagaccgtacgcaaagctgagtgtcgagcaatccactgtccaagaccccacgattttgaaaacggggaatactggccaagaagtccttattataatgtgtccgacgagatctcattccattgctatgacggctacacattgagaggctcagccaaccggacttgccaagttaatggtaggtggagcggccagactgctatttgtgataatggggctggatactgctccaatcctggcattcctatcggcacccgtaaggtgggaagtcagtatcgcctggaggattctgttacataccattgtagtcgagggctgaccctgcgaggaagtcagcggcggacatgccaagagggaggttcttggtcaggcacagagccctcttgccaggattccttcatgtatgatactccccaggaagttgccgaagctttcctgtcaagtctcacagagacaatagagggcgtagacgccgaggatggtcatggccccggcgagcaacagaagcgcaaaatcgttctggatccatctggctctatgaacatttacctggtgctggacggatccgattcaatcggggcttcaaatttcaccggcgctaagaagtgtttggtaaacctgatcgaaaaagtggcttcgtatggagtcaagcctcgctatgggctggtaacttatgccacatatccaaagatttgggtaaaagttagcgaggcggactcttcgaatgctgattgggtaaccaaacagctgaacgaaatcaactacgaagatcacaaactgaaaagtggaaccaacaccaaaaaggccctacaggccgtgtactctatgatgagttggccggatgacgtgccccccgaggggtggaataggacacgccacgtcatcattttgatgacagatggactccacaatatggggggagaccctatcaccgtgattgatgagatccgggatctgctgtacatagggaaggaccggaagaaccctcgagaagactacctggatgtgtacgtcttcggcgtcgggcccctggttaatcaagtgaatattaatgcactagcctccaagaaggacaacgagcagcacgtgttcaaggtgaaggacatggagaacctggaggacgtattttatcagatgattgatgagagccagtccctcagtctgtgcggtatggtctgggagcaccgtaaaggcaccgactaccacaaacaaccatggcaggcaaaaatatctgtcattcgtccttctaaaggacacgaatcttgtatgggggccgtagtatcagagtacttcgtgctgacggcagcccactgcttcactgtggatgataaggagcactcgataaaggtctcggtaggcggcgagaagagagacctcgagattgaagtggtgttattccatccaaactacaacattaacggcaagaaggaggctgggattcctgagttctatgactacgacgtcgctctgattaaactcaaaaacaagttgaagtacggctag

SEQ ID NO: 112902 - DNA, 2295 bp, synthetic construct
  misc_feature 1..2295: note = Description of Artificial Sequence: Synthetic coding sequence
  source 1..2295: mol_type = other DNA
atggggtccaacttatctccacaactgtgcctgatgccgtttatcctgggactattgtcgggaggtgtaacaaccacaccatggagtttggctcgccctcagggctcctgctccctcgagggtgtggaaatcaaggggggcagtttcaggctacttcaggaaggccaggcccttgagtacgtctgcccttccggattctacccataccctgtgcaaaccaggacttgcagaagtacaggctcttggtctacactcaagacacaggatcagaagacagtcaggaaggcagagtgtagagcgatccactgccccagacctcacgattttgagaacggagaatattggcccagaagcccctactataatgtgagcgatgaaatctcatttcattgctacgacggttataccctgagaggaagtgctaataggacatgtcaggtgaatggtaggtggagtggtcagacagctatctgtgacaatggcgcaggatactgttccaaccctggaattcctataggtaccaggaaagttggttcgcagtaccggctcgaagattcagtcacatatcattgttccagagggctgaccctccggggctcccaaaggaggacctgtcaggaaggtgggtcttggagtggtacagagcccagctgtcaagattcctttatgtacgacactcctcaggaggtagccgaagcctttctgtcgtctctcaccgaaaccattgagggggtcgacgccgaggacggccacgggccaggagaacagcagaagcgtaagatcgtgctcgatccctctggatcaatgaatatatatcttgtgcttgacgggagcgacagcattggcgcatcaaatttcactggcgcaaagaagtgtttagtcaatctaattgagaaagtggcttcgtacggcgtcaaaccaagatatggcctcgttacttatgctacctatccgaaaatatgggtgaaagtctctgaggctgactcatctaatgctgactgggtcactaaacaactgaacgaaatcaactacgaagatcacaagcttaagagtggcacaaatacgaagaaggcccttcaggcagtatacagcatgatgagctggccagatgatgttccaccagagggctggaatcgaactcggcatgtcattattctgatgaccgatggcctccataacatggggggggatcctataacagtcatcgatgagatcagagacttactttacatcggcaaagaccggaaaaacccccgcgaagactaccttgacgtgtatgtgtttggcgtgggcccgcttgttaaccaggtcaacattaatgccctggcttctaaaaaagacaacgaacaacatgtttttaaggttaaggacatggaaaatcttgaggacgtgttctatcagatgatcgacgagtcccaaagcctatctctgtgtggcatggtctgggagcaccggaaagggactgactaccacaagcagccatggcaggccaaaatctcagtgatccgcccttcaaaaggtcacgagtcatgtatgggagccgtggtgtctgaatacttcgtgttaactgctgcacattgttttaccgtggacgataaggaacacagcatcaaggtctccgtgggcggggaaaagagagatctggagatagaggtggtgctctttcatcccaactacaatattaatgggaaagaggaggccggaatccctgagttttatgactacgacgttgccctgattaagctcaaaaataagttaaagtacggacagactatcaggccaatctgcctgccatgcaccgaaggcacaacgagagctctcagactgccacctacgacaacgtgtcaacagcagaaagaggagctgctgcccgcacaagacataaaagccctgtttgtgtcggaggaggagaaaaagcttaccaggaaggaagtctacatcaagaatggagacaaaaaaggctcctgcgagcgggatgcccagtatgctcctggatacgacaaggttaaggatatatccgaagtggtgaccccccgcttcctgtgcacaggtggcgttagtccatacgccgatccgaatacatgccggggcgactcaggagggccccttattgttcacaaacggtcccggtttatccaagtcggcgtgatttcgtggggggtggtcgatgtttgtaagaatcagaagcgacaaaagcaagttccagcccacgcccgtgactttcacatcaacctcttccaagtcctcccttggttgaaagaaaagctgcaggacgaagatctgggctttctttag

SEQ ID NO: 112903 - DNA, 2295 bp, synthetic construct
  misc_feature 1..2295: note = Description of Artificial Sequence: Synthetic coding sequence
  source 1..2295: mol_type = other DNA
atgggtagcaatctgtccccgcaactttgcctgatgccgtttatcctaggattgctttctggtggagtgacaaccaccccctggtcactcgctcgaccacaaggatcatgttcacttgagggcgtcgaaatcaagggcgggagcttccgtctgctacaggagggccaggctctcgaatatgtctgtccgagcggcttttacccttaccctgttcagacccggacatgtagatcaactggatcctggtctacactgaaaactcaggaccaaaagaccgtgcgaaaggctgagtgtagggccattcactgcccgcgaccacacgacttcgaaaacggagagtattggccgcggtccccttattataatgtgtctgacgagatcagctttcattgctatgatggctatactctgcgcggctctgccaataggacttgtcaggtgaacggaaggtggtctgggcagacggccatctgcgataacggcgctggatactgttccaaccctggcattccaatcggcacccgaaaggtgggaagccagtatagacttgaggacagtgtgacataccattgctcccggggactgaccttgaggggctcgcagaggagaacttgccaggagggtggatcatggtcgggcactgagccgtcatgccaagactcgtttatgtatgacaccccccaggaagtggcggaagcttttctgagttcccttactgagacaatcgaaggggttgacgccgaggatgggcatgggcccggggagcagcaaaagcgaaaaattgtcctagatccttcagggtccatgaacatctacctggtgctcgatggtagcgactccatcggcgcgagcaacttcacaggcgccaaaaagtgtctggtgaacctgatcgaaaaagttgcttcttatggggttaagccaaggtatgggctggtgacatatgctacctatccaaaaatctgggtaaaggtcagcgaggcagacagtagtaatgctgactgggtgaccaaacaactgaatgaaattaattacgaagatcataagttaaagagtggcaccaacaccaagaaggcgctgcaggctgtgtactccatgatgtcctggccagacgacgtgccacccgagggatggaaccgaacaaggcacgtgatcatacttatgaccgacggcttgcataatatgggcggcgatcctatcactgttatcgacgagatcagagatttgctgtatatcggcaaggatcgaaagaaccctcgcgaggactacctcgatgtgtacgtgtttggagttggcccgctagtcaaccaagtcaatatcaatgctttggccagcaaaaaagataacgagcagcacgtgttcaaggtcaaggatatggagaatctagaagatgtattttaccaaatgatcgatgaaagccagagcctttccttatgcgggatggtctgggaacacaggaaaggtaccgactaccacaagcagccttggcaggccaaaatcagtgttataaggccctccaaggggcacgagagctgtatgggtgccgttgtcagtgaatatttcgtgctcacggcagcccactgttttaccgtggatgacaaggaacatagtattaaagtgtcggtcgggggcgagaaacgggacctcgagatcgaagtggtattgtttcatcccaattacaatatcaacggcaaaaaagaagccggcatcccagaattctatgactatgacgtagccctcataaagctgaagaataaactcaagtacggacagactatacgtccaatttgcctgccttgtaccgaaggtactactagagctctgaggctgccacccacaacaacttgtcagcagcagaaagaagagctcttgcccgctcaggatatcaaagccctttttgtgtctgaggaggaaaagaagctgactcgcaaagaagtgtacattaagaatggggacaagaagggatcatgcgagagagatgcccagtacgcaccaggatacgataaagtcaaggacattagtgaagtggtgacccctcgattcctctgcacagggggcgtttccccatacgcagatcctaacacctgtagaggcgacagcggagggccattgatcgtgcataaacgctctcgttttatccaggtcggggtcatatcgtggggggttgtcgatgtgtgtaaaaatcaaaagcgtcaaaaacaagtccctgcccatgctcgggatttccacatcaacctcttccaagtcctaccttggttgaaggagaagctccaggatgaagatctggggttcctgtag

SEQ ID NO: 112904 - DNA, 2295 bp, synthetic construct
  misc_feature 1..2295: note = Description of Artificial Sequence: Synthetic coding sequence
  source 1..2295: mol_type = other DNA
atggggtcaaatctttcaccccagttgtgtctgatgccattcattcttggattactgagcgggggcgtcacaaccaccccatggagtctggcgcgcccccaaggatcttgtagtctcgaaggcgttgagatcaaaggggggagctttagactcctgcaggagggtcaagcgctggaatacgtttgccctagcgggttctacccttacccggtgcagacaaggacttgcaggtccactgggtcctggtccacactgaagacacaggatcagaagactgtgagaaaggcagaatgtcgggccatccactgcccccgtccccatgactttgagaatggcgaatactggccacgaagcccatattataatgtatctgatgagatcagcttccactgttacgacggctatacactgaggggcagtgccaaccggacatgtcaggtgaacggacggtggagtggccaaacggcgatatgcgacaacggggccgggtactgtagcaaccctggcatccccattggcactagaaaagtaggcagtcagtataggttagaggactccgtgacataccattgctccaggggcctcactttgagaggctcccaacgacggacttgccaggagggcggatcttggagcggaactgagcccagctgtcaggactccttcatgtacgatacaccacaggaggtagcggaagccttcctgtcatccctgacagagactattgaaggagtggacgcagaggacggccacggcccaggtgagcagcagaagaggaagatcgttttggatcctagcggctctatgaacatatacctcgtactcgacggctctgatagcattggagcatccaattttacaggggccaagaaatgcctggttaatttaatcgaaaaggtggcctcctatggagtcaaacccaggtacggactggtgacatacgctacataccccaagatctgggtgaaagtatctgaggcagattcttctaacgctgactgggttaccaaacaattgaatgagatcaactacgaagatcacaagctgaagtcaggaactaatacaaaaaaggctctacaggccgtatattccatgatgtcttggcctgatgacgtcccacccgaaggatggaatcggactaggcacgtcatcatcctcatgaccgatggtttgcacaacatggggggcgaccctattacggtgatagacgagatccgggatctactttacattggtaaggatagaaagaaccctagagaggactatctcgatgtgtatgtcttcggagtggggcctttggtgaaccaggtgaatatcaacgctctggctagcaaaaaggacaacgaacagcacgtgtttaaggtgaaggatatggaaaatctggaagacgtgttttatcagatgatagacgagtctcagtctctcagcttatgcggtatggtttgggaacacagaaaaggaacagactaccataaacagccatggcaagccaagattagtgtgatacgcccgtctaagggccacgagtcctgtatgggggctgtggtctctgagtatttcgtactgacagctgctcactgtttcactgtggatgacaaagaacattctatcaaggtctctgtgggaggcgagaaacgtgacttagaaatcgaagtcgtactgttccacccaaattacaatattaacggcaagaaagaggccggaatcccagagttctacgactacgacgtggctctgatcaagctgaaaaacaaattgaaatatggccagactatacgaccaatttgcctgccttgcacagagggcacaactcgggcattgaggctgcctcccaccacaacctgccaacagcaaaaagaggaactccttccagcccaggacatcaaggccctctttgttagcgaagaggagaaaaaactaactaggaaagaggtatacatcaagaatggcgataagaaagggagctgcgaacgggacgcacagtatgctccagggtatgacaaggtgaaagacatctctgaagttgtgacccctagattcttatgtacagggggagtgtccccctatgctgaccctaatacatgccgtggagattccggcggccccctgatcgtgcacaaacggtcccggttcatccaggtcggtgtcatctcctggggggtagtcgatgtgtgtaagaatcagaagcgacagaaacaggtccctgcccacgctagggactttcacataaacctgttccaagtgctgccctggttgaaggagaagctgcaggacgaagatcttggttttctttag

SEQ ID NO: 112905 - DNA, 2295 bp, synthetic construct
  misc_feature 1..2295: note = Description of Artificial Sequence: Synthetic coding sequence
  source 1..2295: mol_type = other DNA
atgggctcaaatctgtcacctcagctttgtctgatgccatttattctcggactgctttctggaggcgtaacaaccacaccatggtcgcttgcaaggcctcagggtagttgctccttggagggtgtggagattaagggtgggagtttccgccttctgcaagaggggcaggcactcgagtatgtatgtccctccggtttttatccttacccagtgcagaccagaacttgcagatcaacaggcagttggagcacattaaaaacccaggatcagaagaccgtaaggaaggcagaatgcagagcaattcattgtcccaggccccacgatttcgaaaacggagagtactggcctaggagtccttattataacgtttctgatgaaatctcatttcattgctatgacggatataccctcagagggtctgcgaaccgaacctgtcaggttaatggaaggtggtcaggtcagactgctatctgtgacaacggcgcagggtactgtagcaatccaggaatccctattggcactcggaaagtcggaagccagtaccggttggaagacagtgtgacttaccattgctctagagggttgacgctgcgggggagccaacggcgaacctgtcaggagggcggaagctggagcgggaccgagccttcatgccaggatagcttcatgtacgacaccccacaggaggtggctgaagcgttcctgagttcactgacagaaaccatagagggcgtggacgccgaagacggtcacggccctggtgaacagcagaaaaggaagattgtgcttgatccaagcgggtctatgaacatttacctggtgcttgacgggtccgatagtattggagctagcaactttacaggcgccaaaaagtgtctcgtgaatctaatcgagaaagtcgcttcttacggtgtcaaaccgcgctacggcctggtgacctatgcaacatatcccaaaatctgggtgaaggtgagtgaagccgattctagtaacgccgattgggtgactaagcagctgaatgaaatcaactacgaggaccacaagttgaaatccggcaccaacacgaagaaagcactccaagccgtttactctatgatgagttggcctgacgacgtgccccctgagggctggaatcgcacaagacatgtcataatactcatgactgatggactgcacaatatgggcggagacccgattacagtgattgatgagattcgggacctgctgtacatcggtaaagaccgcaaaaacccacgcgaagactatttggacgtctacgtgttcggcgtgggtcctcttgtgaatcaggtcaacatcaatgctctggccagtaagaaagacaacgaacaacatgtgttcaaggttaaggatatggagaacctagaggatgtgttctaccagatgatagatgaatctcaaagcctgtctctttgtggcatggtttgggagcacagaaaaggcaccgactatcacaaacagccttggcaagccaagatatcagtcatccggccctccaagggtcacgagtcctgcatgggcgcagtcgtatctgaatatttcgtgttgactgccgcccattgtttcacagtggacgacaaggagcactccatcaaagtatccgttgggggcgaaaagagagaccttgagatcgaggttgttcttttccaccccaactacaatatcaatggcaaagaggaagcgggaattcccgagttttacgattacgatgtcgctttgattaagttgaaaaacaagcttaagtatgggcagaccattcggccaatctgtcttccctgcaccgaaggaacaacccgggcgctccggctccctccaacaaccacttgtcaacagcagaaagaagaacttctgcctgctcaggacatcaaggctttatttgtgtctgaagaggagaagaagctgactcgaaaggaagtttacataaagaacggggataagaagggctcctgtgagcgtgacgcacagtatgctccagggtacgataaagtgaaggacatctcagaggtcgtcaccccgaggttcctgtgcaccggtggggtctcaccttacgcggaccccaacacgtgtcgtggcgacagcgggggacccttaatcgtgcacaagcgcagtagatttatccaagtcggcgtgatctcttggggtgtcgtcgatgtgtgcaagaaccagaagcgccagaagcaggtcccggcccacgcacgggattttcatataaacctgtttcaggtattgccctggctgaaggagaagttgcaggacgaggacttgggctttctgtag

SEQ ID NO: 112906 - DNA, 2295 bp, synthetic construct
  misc_feature 1..2295: note = Description of Artificial Sequence: Synthetic coding sequence
  source 1..2295: mol_type = other DNA
atgggctccaacttgagtcctcagctctgcctcatgccctttatcctgggcctgctgagcgggggagttactacgactccatggtctttggctcggccacaaggctcctgctctctggaaggggttgagattaaaggcggcagtttccgactgctgcaggaaggacaggcactcgagtacgtttgtccttcaggtttctatccataccccgttcagaccaggacctgccgcagcactggcagctggtccactctgaagactcaggaccagaagaccgttagaaaagctgagtgcagagctatacactgtcctaggccacacgactttgagaacggagaatactggcccagatctccttactacaatgtgagcgatgaaatcagttttcactgttacgacggttacaccctgcgggggagtgccaatcggacatgtcaagttaacggccgttggtccggacagaccgcgatttgtgacaatggggccggttactgcagtaatcctggaattccaatcggaacccgtaaggtaggctcccagtaccgcctggaggacagcgtcacgtaccactgctcaagaggactgaccctgcgcggctcgcaacgcagaacgtgccaggagggcggaagttggtcaggcacagaacccagctgccaggattccttcatgtacgatacccctcaggaggtggctgaggctttcctgagtagcctcacagagacaattgagggcgtggacgcagaagatgggcacggacccggagagcagcagaaaaggaaaattgtcctggatccgtcaggcagcatgaacatatacttagtgttggacggatccgacagcattggagcttccaattttacaggcgccaaaaaatgtctcgtaaacctcattgagaaggtggcttcatatggggtgaagcctcgctacggacttgtcacctatgccacgtatcccaagatttgggtcaaggtcagcgaggccgactccagcaacgctgattgggtgacgaaacagttgaacgagattaattatgaagatcacaagctcaagagtggaacgaacactaagaaagctcttcaggcggtgtacagcatgatgtcctggcctgacgatgtgccaccggagggctggaataggacgaggcacgtaatcatcctgatgacagatggactgcacaatatggggggggatccaatcaccgttatcgatgagatccgagatctgctatatatcggaaaagataggaagaatccccgtgaagactatctcgatgtgtacgttttcggtgtgggaccactggttaatcaggtgaacataaacgcactggccagcaaaaaagacaatgagcaacacgtcttcaaagttaaggacatggaaaatctggaggacgtcttctaccagatgatcgacgaatcacaaagcctgagcctgtgtgggatggtatgggagcaccggaagggcactgattaccataaacagccatggcaggcgaaaatttcagtcatccggccgtccaaaggccatgaaagctgtatgggcgcagttgtttcagagtactttgtgttgactgccgcccattgttttacagttgacgataaagaacattccatcaaggtctccgtgggaggcgaaaagcgagatcttgagatcgaggtggttctcttccacccaaactacaatatcaatgggaaaaaggaagccggaatccccgagttctatgactatgatgtggccctgattaagcttaagaataagctaaagtacggccagactatccgacctatctgtttgccctgcacagaggggactacacgcgccctccggctaccccctacgactacatgtcagcaacaaaaagaggagctgctgcccgctcaggacatcaaggccctctttgtgtcagaagaggaaaaaaagctgacccgcaaggaagtgtacataaagaatggcgacaagaaaggaagctgcgagagggacgcacagtacgcccctggatacgacaaggttaaagacatttccgaggtcgtgacgccccggtttctctgtactggcggcgtgtccccctatgccgatccgaacacctgtagaggcgatagtggggggcccctgatcgtacacaaacggagcaggtttatacaagttggggtgatttcttggggcgtggtagatgtgtgtaaaaaccagaagagacagaagcaggtgcccgctcacgctagggactttcatataaacctctttcaggtccttccttggcttaaggaaaagctacaggacgaagatctaggtttcctctag

SEQ ID NO: 112907 - DNA, 2295 bp, synthetic construct
  misc_feature 1..2295: note = Description of Artificial Sequence: Synthetic coding sequence
  source 1..2295: mol_type = other DNA
atggggtcaaaccttagcccccagctatgtcttatgccttttattttaggcctcctttctggcggtgtgaccacaaccccgtggtcactagccagacctcaaggttcctgctcgctcgaaggcgtcgagatcaaaggggggagcttccggctgttgcaagagggtcaggcattagaatacgtgtgtccctccggcttttatccatatccagttcagacacggacctgccgcagcactgggtcctggagtaccctaaagacgcaggaccaaaaaacagtgaggaaggccgagtgccgagccatccactgccccagacctcatgattttgagaatggagaatattggcctcgcagcccatattataacgtgagtgacgagatctccttccattgttacgacggctatacactacggggctcagcgaaccgtacatgtcaggtgaacggcaggtggagcggtcagactgccatttgcgataatggggccggctactgcagcaacccaggtatccccatcggaacaaggaaggtaggatcccagtacaggttggaggactcagtgacctaccactgttcccgaggcctgaccctgcgggggtcacagcggcggacctgtcaggaaggtggctcttggtcaggaaccgaaccatcatgccaagattcgttcatgtacgatactccccaggaggtcgccgaagcctttctgtcaagcctgaccgagaccattgaaggagttgatgctgaggatggtcacgggcccggggaacagcagaaaagaaaaatcgttcttgatcctagcgggagtatgaacatctacttggtcttggacgggagtgatagcataggcgcctctaattttaccggagccaaaaagtgcttagttaaccttatcgagaaagtggcatcttatggggttaaaccacggtatggcctggttacatacgcaacgtatcctaagatttgggttaaagtgtctgaggccgatagctccaatgccgactgggtgacgaagcaacttaatgaaattaactacgaagatcacaagctgaaatctggaaccaacaccaagaaggccctgcaggcagtatattccatgatgtcatggcccgatgatgttccacctgagggatggaatcgcactcgacatgttattattctaatgaccgatggcctgcataacatgggtggagatccgattacggttatcgacgaaatccgggacctgttgtacatcgggaaagatcggaaaaatcctagggaagactatttggacgtttacgtgtttggggttggccctttggttaatcaggtgaacattaacgccctggccagcaaaaaagataacgagcagcatgtcttcaaagtgaaggatatggagaatctggaggacgtcttctatcaaatgatcgacgaatcccaatctctgtcattatgtgggatggtgtgggagcaccgtaagggaacagactaccacaagcagccatggcaggcaaagatctccgtgatccgccctagcaagggccatgagagctgcatgggcgctgtcgtatccgagtattttgttctgactgcagcgcattgctttactgtagatgataaagaacatagcatcaaggtgtccgtcggtggggaaaagagggatttggagatcgaagtggttttatttcatcccaactataacatcaacggcaaaaaggaagcagggattccagagttctacgattatgatgttgctcttattaagttgaaaaacaagcttaagtatgggcagaccatccggcccatctgcctgccatgcacagaggggacaacacgagctctgaggctgccgcccacaaccacatgtcaacagcagaaggaggagctgctgcctgcccaggatatcaaggctctgttcgtctctgaggaggagaaaaaattgacgaggaaggaagtctatatcaagaacggggacaagaaaggtagctgtgagcgggatgcccaatatgcaccaggatatgataaagtaaaggacatttccgaagtcgttacacctcggttcctatgcacagggggcgtctctccttacgctgacccaaatacatgtcgcggagacagcggtggaccccttatcgttcacaagcgcagcagattcatccaggtgggagtgattagttggggtgtcgtggatgtgtgtaagaaccaaaaaaggcagaagcaggttcccgcccacgcaagagattttcacatcaatctgtttcaagtgttgccatggttaaaagaaaaactccaggatgaggatcttggctttctgtag

SEQ ID NO: 112908 - DNA, 2295 bp, synthetic construct
  misc_feature 1..2295: note = Description of Artificial Sequence: Synthetic coding sequence
  source 1..2295: mol_type = other DNA
atgggttctaacttaagcccccagctgtgtctcatgccattcatcctgggcttgctgtccggcggagtgacaacaactccttggtctttagctagaccgcagggctcgtgctctctggagggcgtggagatcaagggagggtcctttagacttttacaagaaggacaggcacttgagtatgtatgtccttccggcttttatccctaccctgtacaaacaaggacgtgtcggagcactggcagttggtccactctcaagactcaggatcagaagacagttcgcaaagctgaatgtcgggccatacattgcccaaggcctcatgactttgaaaacggcgaatactggccacgatccccctattataacgttagcgacgagattagctttcattgttacgacggctatacactgcgggggtctgccaataggacttgtcaagtgaatggaaggtggtccggccaaaccgcgatctgtgataatggagcaggatactgctctaacccaggaatcccgataggaactaggaaagtcggctcccagtacagactggaagacagcgtaacttatcactgttcaagaggtctaactctcaggggaagtcaaaggcgaacttgtcaggagggcggcagctggagcggcactgagccaagctgccaggacagcttcatgtacgatacgccacaagaggtggccgaggcattcctgagcagcctcacggaaacaattgagggggttgatgctgaagacggacacggaccaggcgaacagcagaagaggaaaatcgtcctggatccctccggatcaatgaacatatatctggtactcgacgggagcgactccataggagcaagcaactttacaggagccaaaaaatgcctcgtcaatctcatcgagaaggtcgccagctatggcgtgaaacccagatatggacttgtgacttacgccacatatccaaaaatctgggttaaggtatccgaggccgacagctctaatgccgactgggtaaccaagcagcttaacgagatcaattacgaggaccacaaacttaaatccggcacaaataccaagaaagctctccaggccgtgtactcaatgatgtcatggccggacgatgtgcctccagaagggtggaacagaaccagacatgtgattatccttatgactgacggccttcacaatatgggcggagatcccattacagtgatagacgaaatccgcgatctgctgtatataggaaaagacagaaagaacccccgtgaggactatttggacgtgtacgtgttcggagtcggtcctttggtcaatcaagtcaacatcaacgccctggcgtcaaagaaggacaacgagcagcatgtgtttaaagtgaaagacatggagaacctggaggatgtcttttaccagatgattgatgaatcacagtccttatccctttgcggaatggtttgggaacacagaaagggaaccgactatcacaagcagccgtggcaggcgaaaatttctgtgataagaccctcaaagggccatgaaagttgcatgggtgccgtggttagtgaatatttcgtgctcactgctgcacactgcttcaccgtagacgacaaggagcactctatcaaggtgagtgtgggtggcgagaaaagagacctggaaatcgaggtcgttcttttccatcctaactacaatatcaatggaaagaaggaggccggcatccctgagttctatgattacgacgtggctcttatcaagctcaaaaataaactcaagtatggccagaccatcagaccaatttgccttccttgcacggaggggactaccagagccctgcgcctgccacctacaactacttgccaacagcaaaaggaggaattgctaccggcacaggatatcaaggcattgtttgtgagcgaagaagagaaaaagttaacccgtaaagaggtgtacatcaaaaatggcgacaaaaaaggctcgtgcgagcgagacgctcagtatgctccgggctatgacaaggttaaggatataagcgaagtcgtcaccccccgcttcttgtgtaccggaggcgtatctccctatgccgatcccaatacctgtagaggtgacagcggtggacctcttatcgttcataaaaggagcagatttattcaggtgggcgtcatttcttggggcgtggtggacgtatgtaagaaccagaaacgtcagaaacaggttcctgcccacgccagagactttcatatcaatctctttcaggtcctcccctggctgaaggaaaaacttcaggatgaggacctgggctttctgtag

SEQ ID NO: 112909 - DNA, 2295 bp, synthetic construct
  misc_feature 1..2295: note = Description of Artificial Sequence: Synthetic coding sequence
  source 1..2295: mol_type = other DNA
atgggatccaatctgagcccccaactgtgcttgatgccgtttatccttggactgctgtccggcggcgtgacgacaaccccctggtcactggccagaccacagggaagttgcagcctggagggcgtggaaatcaaaggaggttcgtttagacttctgcaagagggccaggcattggagtatgtgtgccctagcggcttttatccctacccagtacagaccagaacctgtcgctctacgggatcttggagtaccctgaaaacacaggatcagaaaaccgtgagaaaagccgagtgtcgggccatccactgtcctcggccccacgacttcgagaacggggaatattggccaaggagcccttactacaatgttagtgacgagatatcattccattgttatgacgggtatactctgcgcggatctgccaaccgaacctgtcaggtcaacggacgctggtccgggcagaccgccatttgcgacaacggcgctggctactgctctaatcccggaataccgatcgggacaagaaaggtgggcagtcagtaccggttggaagactctgtgacatatcactgctctaggggcctcactctgcgtgggtcccagcggcggacatgtcaggagggagggtcttggtcaggaaccgaacccagctgtcaagactccttcatgtacgacacgccccaggaggtcgcggaggccttcctgtcatctcttacggagacaattgagggggtcgacgctgaggatggtcacggacctggagagcagcagaagcgcaaaatcgttctcgatccctccggaagcatgaacatttacctggtattggatggaagcgactcaattggggccagtaactttaccggcgccaagaagtgcctcgtcaacttaatagagaaggttgcgtcatatggtgttaagccaaggtacggcttggtgacgtacgcaacatatccaaaaatttgggtgaaagtgtccgaggctgattcgtccaacgcagactgggtgaccaagcagctcaatgaaataaactatgaggatcacaaattgaagtcaggcaccaacactaagaaggcccttcaagccgtatactcaatgatgagctggccggacgacgtcccacccgagggctggaatcgcacccgtcatgtgatcatcctgatgaccgatgggcttcataatatgggaggcgatcccataactgtcattgacgaaatccgggatctgctttatatcggcaaggataggaagaaccccagagaggactatctcgacgtatacgttttcggggtcggccctctcgttaatcaggtgaacataaacgctttagcctcaaaaaaggacaacgagcagcacgtgtttaaggttaaggacatggaaaacctggaagatgtattctatcagatgatcgacgaaagtcagagcttgtcactttgtggtatggtttgggagcaccgtaagggaactgattaccataagcaaccttggcaagccaaaatctcggtgattcgccccagtaagggacatgagtcctgcatgggggccgtggttagcgagtattttgttctgacagccgcccactgtttcaccgtagacgataaagagcacagcatcaaggtgagtgtcgggggcgaaaaaagagatcttgagatagaggtggtgctattccaccccaattacaacatcaatgggaaaaaagaggcagggatccccgagttttacgattatgacgttgcgcttataaaattgaaaaacaaactcaagtatggccagaccatccgaccaatctgtctgccttgtactgagggcaccacacgcgcgctgcggctccccccaaccactacatgccagcagcagaaagaggaattgctccctgcacaggatataaaggctctgttcgtgtccgaagaggagaaaaagctaacgagaaaggaggtgtatatcaaaaacggggacaaaaagggttcttgcgagagagatgcgcaatacgctccaggatacgataaggtgaaagacatttccgaggtggtgactcctcggttcctctgcacaggcggggtctcaccatacgctgatccaaatacttgtcgaggggactctgggggccccctgatcgtacataagcgaagtagattcatccaggtgggcgtgatctcctggggggtggttgatgtctgcaaaaatcagaagcgacagaaacaggtccccgcacatgcccgagattttcacatcaatctgttccaggttctgccctggctgaaggagaagctgcaggacgaggaccttggattcttatag

SEQ ID NO: 112910 - DNA, 2295 bp, synthetic construct
  misc_feature 1..2295: note = Description of Artificial Sequence: Synthetic coding sequence
  source 1..2295: mol_type = other DNA
atgggctctaatctctctcctcagctgtgcttaatgccctttattctcggcctgctgtccggaggagtcacaacaacaccgtggtctctggcacggccgcagggaagttgttccttggagggggtggagataaaagggggctctttcagactgctgcaggaggggcaggcattagagtacgtctgtccttccgggttttatccctacccggtccagacacggacttgcaggtctaccggtagttggagcacccttaagacacaggatcagaagaccgtacggaaagctgagtgtagagccattcattgcccgcgtccacatgactttgaaaacggcgagtactggcctagaagcccttactacaacgtgagcgatgagatttctttccactgctacgacggatacacactccgtggatctgccaacaggacatgccaggttaacgggcgctggtccggtcagacggctatttgtgacaacggcgcaggttattgcagcaacccagggattccgatcgggacacgaaaggtgggatcccagtatagattggaggattccgtcacataccattgctcacgcggcctcaccctcaggggctcgcagcggaggacatgccaagagggggggagctggtctgggaccgaaccttcctgccaggatagctttatgtatgacactcctcaagaagtcgctgaggcgtttctgtctagtttgaccgagacaattgaaggcgttgacgccgaagatgggcacggccccggagaacaacagaagagaaaaatagtgctggatcccagcggatctatgaacatctatttagtcctggacgggtccgacagcattggtgccagcaacttcaccggggccaaaaagtgcctcgtgaacttgatagaaaaggttgcatcctatggggtgaagcctcgttacgggctcgttacatacgccacttacccaaagatctgggtcaaggtatcagaagccgattcctccaacgcagattgggtgactaagcagctgaacgaaatcaattatgaagatcacaagttgaagtcaggcaccaacaccaagaaagccctacaggccgtatatagtatgatgagctggcccgacgacgtccctccagagggttggaatcgcaccaggcacgtgatcattcttatgacagatggtttgcacaatatggggggtgatcccattactgttatcgatgagatccgcgacctcctttatatcggcaaagatcggaagaatccccgagaggattaccttgacgtctatgtcttcggcgtggggccgctcgtgaatcaagtgaacataaatgccttggccagtaaaaaagacaacgagcaacatgtgtttaaagtgaaggacatggaaaacctcgaggatgtcttttatcagatgatcgacgagtcccaatccctgtcactttgcggaatggtgtgggaacacaggaagggtaccgactatcacaaacagccctggcaagccaagatcagtgtcatacggccaagcaaagggcacgagtcgtgcatgggcgcggtggtctcggaatattttgtcctgaccgccgcgcactgcttcacagtagacgataaagagcattccattaaagtctcagtcggtggcgaaaagagagatttggagatagaggttgtcctgttccaccccaactacaacatcaacggaaagaaagaggctgggatcccagagttctatgattacgacgtcgcattgatcaaactgaagaacaagctcaagtatggccagacaatcagacctatctgcctgccgtgcaccgagggcacaaccagggcccttaggctgccgccgaccaccacctgccagcagcagaaggaagagctgcttcccgcacaggacataaaggctctatttgtgagtgaagaggaaaagaagctcacacgaaaagaagtatacatcaagaacggcgacaagaaagggtcctgcgagcgggacgcgcagtatgcccccggttatgataaggttaaagacatttcagaagtggtgaccccccgttttttgtgtaccgggggtgtctccccttacgcagatcccaatacatgccggggggactcaggcggcccattgatcgtacacaaacgctctcgatttatccaggtgggggtcatatcctggggcgtggtcgacgtctgtaagaaccagaagcgccagaagcaagtgcccgcccacgctagggattttcacatcaatctgtttcaggttctcccctggctgaaggaaaaactccaagatgaggatctcgggtttctgtag

SEQ ID NO: 112911 - DNA, 2295 bp, synthetic construct
  misc_feature 1..2295: note = Description of Artificial Sequence: Synthetic coding sequence
  source 1..2295: mol_type = other DNA
atggggtctaatctcagtccccagctgtgcctgatgccgttcatccttggccttttatccggaggtgtcacaactactccatggtcactcgctcgcccgcaggggtcgtgttcattggagggtgtggaaatcaagggtggatcttttcgcctgttacaggaagggcaagccctggaatatgtttgcccgagcggattttatccctacccagtacagacacgcacttgtcgctcaacaggaagctggtcaacattaaaaacacaagaccaaaaaaccgtgagaaaggcagagtgcagagccatccactgccctagacctcatgacttcgagaatggggaatactggccccggtccccgtactacaatgtgtctgacgagattagcttccactgctatgacggttacacgcttcggggttctgccaaccgcacgtgccaggtcaacggccggtggagcggacagacagcgatctgcgataacggggcgggctattgttctaatccagggattccgatcgggacgcggaaggtgggcagtcaatacagattggaggatagtgttacataccactgctcacgggggttgaccctgagggggagccagcgtaggacctgtcaggagggaggttcatggtccggaacggagccttcgtgccaagatagcttcatgtatgacactcctcaagaagtggccgaggcatttctctcatcactgacagaaacaatcgagggggtcgatgccgaagatggccatggaccaggagagcaacagaagaggaagatcgtgctcgacccaagtggaagcatgaacatatatctggtgctcgatggctccgacagcattggggcctctaacttcacaggggcgaagaagtgtctggttaaccttatcgagaaggtggcaagctatggtgttaagcccaggtatggacttgtgacatatgccacctaccccaaaatctgggtcaaggtttcggaggccgatagttcaaatgccgactgggtcacaaaacagctgaacgaaatcaattatgaagatcacaagctgaagtctggtacaaacacaaaaaaggctctgcaggcagtttattcaatgatgagctggcctgacgacgtgccgccagagggatggaataggacacgccacgtgattatcttgatgacagatgggctgcataacatgggcggcgacccaatcaccgtcatagacgaaattcgggacttactgtatataggtaaagacaggaagaatccacgcgaggattacctcgatgtgtacgtattcggggtgggcccactggtgaatcaggtgaacatcaacgcgctggcctccaaaaaggacaacgagcagcacgtgttcaaggtcaaagacatggaaaacttagaggatgttttctaccagatgattgacgagagtcagtccttgtcattatgtggaatggtctgggagcatagaaaagggacggactaccataagcagccttggcaagccaaaatatccgtcatccggccatcaaagggccatgaaagctgcatgggtgcagtggtctcagagtacttcgtgttgacagctgctcactgctttactgtggatgacaaagagcattctattaaggtatccgtgggtggcgagaaaagagaccttgaaatagaggtcgtgttgtttcaccccaattacaatatcaacgggaagaaagaggctgggatacccgaattctacgattacgatgtggccttgattaaactcaagaacaagctgaagtacggccaaaccatacggcctatttgcttgccatgcacagagggtaccacccgagccctccggctgcctcccacaactacgtgtcagcagcaaaaggaagagctcttaccggcacaagacatcaaggccttgttcgtcagcgaagaggagaagaagttaacacggaaggaagtgtatataaaaaatggtgataagaagggttcctgtgagagggacgctcagtatgcacccgggtatgataaagtcaaagacatatccgaggtcgtaacccccagatttctctgtactggaggagtaagtccatatgcggatcctaatacatgccggggagatagcggcgggcccctcattgtacacaaacgctcccgtttcatccaggtgggcgtgattagttggggggttgtggatgtgtgtaagaatcagaaacgccagaagcaggttcccgcccacgcacgagatttccatatcaaccttttccaagtcttgccatggttgaaagagaaactgcaggatgaggatttaggcttcctctag

SEQ ID NO: 112912 - DNA, 2295 bp, synthetic construct
  misc_feature 1..2295: note = Description of Artificial Sequence: Synthetic coding sequence
  source 1..2295: mol_type = other DNA
atgggctcgaatcttagtcctcaactgtgcctaatgccattcatcctgggtctgctgtcaggcggggtgaccacaaccccttggtcactggcgagacctcagggtagctgcagcttggagggcgtagaaattaaaggcgggtcctttcgcctgctgcaggagggccaagcactggagtatgtatgcccgtcaggcttctatccatacccagtgcagaccaggacctgtcggagtaccggctcctggagcacgcttaaaacccaggaccagaagacggtccggaaggcagaatgcagggctatccactgtcccagaccacacgacttcgagaacggtgagtactggcctcgttctccatattataatgtgtccgacgagatttctttccactgttacgatggttacacccttaggggatctgcaaatagaacctgtcaagtgaacggcagatggtccggccaaacagcaatctgtgataacggtgccgggtattgttccaatcccggcatccctattggcaccagaaaggtggggtcccagtacaggctcgaggattccgtaacctaccactgttctagaggacttaccttgcgcggcagccagaggcgaacttgccaggaaggcgggtcatggagcggaacagaaccatcttgtcaggactcatttatgtacgacactccccaggaggtcgctgaggcgttcctaagttcattgacagaaaccatcgaaggagtggatgctgaggatggtcacggccctggcgagcagcaaaagagaaaaatcgtgttagacccgtctggctcaatgaacatctatctggttctggacggatctgactcgatcggagcctccaattttacaggggcgaagaagtgcctggtcaacctgatcgagaaggtggcttcttatggcgtgaagcccagatacgggcttgtgacttacgctacataccctaaaatttgggtaaaagtgtctgaggccgacagtagcaacgctgactgggtgacaaaacagctgaacgagattaattacgaggaccacaaactcaaatccggaaccaataccaagaaagctctccaggctgtctattccatgatgtcgtggccggatgacgttccacctgaaggatggaaccggactcgccatgtgattatcctgatgactgacggtctgcacaacatggggggcgacccgattaccgtgatagacgagattcgtgacttgctatacatagggaaagaccggaagaaccctagagaagattacttggacgtctacgtcttcggcgtagggcccctcgttaaccaggttaatatcaatgcgctggcgtccaagaaggacaacgaacagcacgtttttaaagtcaaggatatggagaatttagaagatgtcttctaccagatgatcgacgagtcccaaagtctgagcctgtgtggcatggtgtgggagcatagaaaaggcacagattatcacaagcagccatggcaagcaaagatatcagttatacgacccagcaaagggcatgagagctgcatgggcgccgtagtgtctgaatattttgtgctaactgccgcacactgcttcacagtggacgacaaagagcactctatcaaggtcagtgtaggaggagaaaagcgggatcttgagattgaggtcgtgctttttcacccaaattataacataaacggtaagaaggaagcagggatcccagagttctatgattacgatgtggcactgatcaaactgaagaacaaacttaagtacgggcagacaattcggcctatttgtctaccctgtacagaaggaaccacccgtgcactgaggctccctcctacgactacatgtcaacagcagaaagaggaactgctgccagcccaggacattaaggcactctttgttagtgaagaagaaaagaagttgacccgtaaagaggtttatattaaaaacggcgataagaaggggtcctgtgagcgggacgcccaatatgcacccggctatgataaagttaaagacatctcagaagtcgtgacacctaggtttctgtgtactggcggtgtgagtccctacgccgatcccaacacttgccggggtgactcgggcggccccctgattgttcacaaaaggagtcgatttatccaggtgggagttatatcttggggagtggtggacgtttgtaaaaaccagaaacggcagaagcaggttcctgcccacgctcgggatttccacattaacttgtttcaggtgctcccctggttgaaggaaaagcttcaggatgaggacctcggatttttatag

SEQ ID NO: 112913 - DNA, 435 bp, synthetic construct
  misc_feature 1..435: note = Description of Artificial Sequence: Synthetic coding sequence
  source 1..435: mol_type = other DNA
atggggtcaaatctgagtccccagctatgcttgatgccgttcattctcgggctgttgtctggaggagttactacgacaccatggtccctcgcaaggccgcagggaagctgttcactagaaggtgtggaaatcaagggcggtagtttccgtctgcttcaagaaggccaggcattggagtacgtgtgcccatcaggtttctatccatacccagtccagaccagaacttgccgatctaccggcagttggagtacacttaaaacccaggaccagaaaacggttaggaaagcagagtgtcgtgcaattcactgtccccgcccacatgatttcgagaacggggaatactggcctcgctctccttactacaacgttagcgatgaaatcagttttcactgctatgacgggtacactttacgcggcagcgccaataggacatag

SEQ ID NO: 112914 - DNA, 3801 bp, synthetic construct
  misc_feature 1..3801: note = Description of Artificial Sequence: Synthetic coding sequence
  source 1..3801: mol_type = other DNA
atgggaccactgatggtgctattctgcttactatttctctatcctgggcttgcagacagcgctccaagctgtcctcagaacgtcaacatttccggcgggacgtttacactcagccacggctgggctcccggaagcctgttgacttactcttgtccacagggactgtatccttcccctgcgtcaaggttgtgcaagtcaagcggtcaatggcagactccgggggcaaccagatcactctctaaagctgtttgtaagcctggtcactgcccaaaccccggcatcagcctgggcgcagtgaggaccggattccgatttggccatggtgataaggtacgctataggtgtagctctaacctggtcctcactggcagcagcgagcgtgagtgccagggaaacggcgtatggtccggtactgagcccatctgcaggcaaccatattcctatgatttccccgaggacgtggcaccagcgctgggaacctctttttcccacatgctcggagctacgaaccctacacagaaaacaaaggatcatgagaacggtacgggaactaacacttacgctgctctgaattctgtgtaccttatgatgaataatcagatgagactcttgggcatggagacaatggcttggcaggagatccggcacgccattattctcttaacagacggcaagtcgaacatggggggcagccccaagactgctgtagatcacatccgtgagatcctgaatatcaaccaaaaaaggaatgactacctggatatttacgctattggcgtcggaaagctagacgtggactggagagaacttaacgaactggggtcgaagaaagatggtgaaagacatgcatttattctccaagacaccaaggctttgcaccaggttttcgaacatatgcttgacgtaagcaagttgacggataccatctgcggggtgggaaatatgtccgctaatgctagtgatcaagagcgcacaccctggcatgtgactatcaagccaaaatcgcaagaaacttgccgaggcgcgttaatctctgaccagtgggtgctgaccgctgcccattgctttagagatggtaatgaccactcattgtggagggttaacgtgggcgaccccaagagtcagtggggaaaagagttcctgatcgaaaaggccgtgatttctccaggttttgacgtcttcgcaaagaaaaatcagggcattctcgaattctacggagatgacatcgctcttttgaagcttgctcaaaaggttaagatgtccactcacgctcggccaatctgtcttccatgtacgatggaggcaaatctggccctgcgaaggcctcagggaagcacctgccgagatcacgagaatgagctgctgaataagcaatctgtacccgcccacttcgtcgcactcaatggtagcaagctgaatatcaatctcaaaatgggtgttgagtggacctcctgtgctgaggtggttagtcaggagaagacaatgttccctaacctgacagacgttagagaagtagttacagatcagtttctttgctccgggacacaggaggatgagtccccttgcaaaggcgtgacaaccactccgtggtcgctggctcgtccccagggttcctgcagtctcgagggtgtggagataaagggcggctcgttccgcttgctgcaggaaggccaagccttagagtatgtgtgtcctagcgggttctatccataccccgttcaaactagaacctgcagaagtaccggatcctggagtacactcaagacccaggatcagaaaacagttcggaaagccgaatgtcgggctatccactgcccccgacctcacgactttgaaaacggagagtactggccccgctcaccttattacaacgtctctgatgaaatttcttttcactgttatgatggatatacgctacgaggcagtgcaaatcgaacatgtcaggtcaacgggagatggagtggccagacagcaatctgcgacaatggtgccggctactgttcaaatcccggaatcccaattggaacccgcaaagtgggatcacagtataggctcgaagactcagtcacgtatcactgtagcagaggcttgaccctgagaggctcccaaaggcgcacttgtcaggaaggaggctcatggtcaggaacggagccatcatgtcaagattcctttatgtacgatacgccgcaggaagtcgccgaggcttttttatcaagcctgactgagacgatcgagggagtggatgctgaggatgggcacggaccaggcgagcaacaaaagaggaaaatagtgcttgacccgtcagggtccatgaatatttacctggtgctggacggcagtgacagcattggcgccagtaatttcaccggcgcgaagaagtgtcttgttaacttaatcgaaaaagtagcatcctacggcgttaaacctcgttacggtttagtaacttatgccacctatccgaagatatgggttaaagttagcgaagccgacagcagcaacgcagactgggtcaccaaacagctgaacgagattaactatgaagatcataagcttaaaagcggtacgaacactaaaaaagctctacaggcagtgtattccatgatgtcctggccagacgacgtgcccccagaagggtggaaccggacccgccacgtgatcatccttatgacagatggattgcacaacatgggtggcgaccccatcaccgtgatcgacgaaatccgggacttgttatacattggtaaagaccgaaaaaacccccgggaggactacctggacgtttatgtgtttggggtcggacctctggttaaccaggttaatatcaacgccctcgcaagcaaaaaagacaacgagcagcatgtcttcaaggtaaaggatatggaaaacctggaggatgttttttaccagatgattgacgagtcccagtcgctgtctctttgcggaatggtgtgggagcatcgaaaggggacggattatcacaaacaaccgtggcaggcaaagatttctgtaattcggccgtcaaaaggccacgaatcttgtatgggggctgtcgtttcagagtactttgtcttgactgccgctcattgcttcacagtcgatgacaaagaacacagtattaaggtgagcgttggcggtgagaagagggacctcgaaattgaagtggtcctgtttcaccccaactataacattaatggcaaaaaggaagctggcattcctgagttctatgattacgatgtggctctgattaaactcaagaataagcttaagtatggccaaaccataaggcccatttgcctgccatgcacagaaggtactacacgcgccttgagactcccaccaaccaccacttgccagcagcagaaagaggaactgctcccagcccaggacatcaaggctctgttcgtctctgaggaagagaagaagttaacacgtaaagaggtttacataaaaaatggggacaaaaaaggctcctgcgaacgggacgcacaatatgcccccggatacgacaaggtgaaagatatcagcgaagtagtgacaccaagatttctatgtacgggcggtgtgtccccatacgctgatcctaacacgtgcagaggcgactccggtgggcccttaatcgttcacaaacgcagtaggtttattcaggtgggcgttatcagctggggcgtggtggacgtgtgtaagaaccaaaagagacagaaacaggtacctgcgcatgcaagggatttccatatcaatctgttccaggtgcttccgtggcttaaagagaagttgcaggacgaggatctgggctttttgtag

SEQ ID NO: 112915 - DNA, 3801 bp, synthetic construct
  misc_feature 1..3801: note = Description of Artificial Sequence: Synthetic coding sequence
  source 1..3801: mol_type = other DNA
atgggaccactgatggtacttttttgcctgctgttcttgtaccccggcctcgcagattctgcccccagttgtcctcagaatgttaacatttctggaggtaccttcacactgtcccatggttgggcacctggtagcctgctcacctactcttgtcctcagggcttgtacccgtccccggcgtcccgtctctgcaagtcctcagggcaatggcaaacacccggagctacccgctccctcagtaaggccgtatgcaagcctggacactgtcccaacccgggtatatcattaggggccgttagaaccggattccggtttggtcacggggataaggtcagatacagatgcagttcaaacctcgtgttaacgggctcttctgagcgagagtgtcagggcaacggcgtttggtctggcacagagccaatctgtagacagccttattcttatgatttccctgaggacgtggcccccgcactggggacctcattctcccacatgctaggggccaccaaccccactcagaaaacaaaagaccacgaaaatggcaccggtacaaatacatatgctgctttaaattcagtttacttaatgatgaacaaccaaatgcgcctgcttgggatggaaacaatggcctggcaagagatccgacacgccatcatcctgctcacggatggcaagtcaaatatgggcggttctccaaagactgctgtggaccacattcgcgagatcctcaatatcaaccagaaaaggaatgactatcttgatatttacgccatcggcgtcggtaagttggacgttgactggagggagctcaatgaactcggatctaagaaggacggagaacggcacgctttcattctgcaggataccaaagctctgcaccaggtgtttgagcacatgcttgatgtgtcaaagctgaccgacactatatgtggggtggggaatatgagtgctaacgcctccgaccaagaacgcacaccttggcacgtgacgatcaagccgaaatcccaggaaacttgtagaggcgcactgatcagtgatcagtgggttttgaccgcagcacactgctttagagacggcaacgaccattctttgtggcgggttaatgtgggcgaccctaaaagccagtggggcaaggagttcttaatcgaaaaggcggtgatatcccctgggtttgacgtgtttgcaaaaaaaaatcagggcattctcgaattttatggagacgatatcgcgctgctgaagctcgcccaaaaggtcaagatgtccacccacgcgcggccaatatgtttaccatgtacgatggaggctaatctggccctgcggcgtcctcaggggagcacgtgcagagaccatgaaaacgagttgctgaacaagcagagtgtcccagcccactttgtggcattaaacgggagcaaactgaacattaaccttaagatgggtgtggagtggacgagctgcgccgaagtcgtatcccaagaaaagacgatgtttccaaatttgacagatgtgagggaggtggtaaccgatcagtttctgtgtagcggcacccaggaggacgaatccccctgtaagggggtgacaacaaccccttggagcctcgccaggccacagggctcttgtagtttggagggggtcgaaattaaggggggttcttttcggctcctgcaagagggccaggcgctcgaatacgtttgcccatcaggtttctacccgtaccccgtgcagacccgtacctgcagaagtacagggagctggagcactctcaagacacaggaccaaaagaccgtccggaaagccgaatgcagggcaatccactgcccacggccacacgactttgaaaacggcgaatattggccccgcagcccttactataacgtttccgacgagatctcctttcactgctacgatgggtataccctgaggggcagcgccaaccggacctgtcaggtgaatggtcggtggtctggtcagacggctatatgcgataacggcgccgggtattgcagtaacccaggcattcccatcggcactcggaaagttggttcccagtaccgtctggaggattccgtgacttaccattgcagtaggggcctgacacttcgtggatcccagcgacggacgtgccaagaaggaggatcatggtcaggaaccgagccctcttgtcaggattccttcatgtacgacacaccccaggaggtagcggaagcgttcttatccagtttaaccgaaacaattgagggagtggatgctgaagacggacacggccccggagaacaacagaaaagaaaaatcgtgctggacccctccggcagcatgaatatctacttggttttggacggttctgactccattggcgctagcaacttcaccggggcaaagaagtgtctagttaatctgattgagaaggtcgcaagttatggcgttaagccaagatacggcctcgtgacatacgccacgtatcccaagatttgggtgaaagttagcgaagctgattcatctaatgcagattgggtgaccaagcaacttaacgagatcaactacgaggaccacaaactgaaatcaggaaccaatactaagaaagcacttcaggccgtttattcaatgatgtcttggccggatgatgttccaccggaagggtggaaccgcacaaggcatgtgatcattctgatgacagacggactgcacaacatgggaggagatccaatcactgtcatcgatgaaatcagagatctcctgtacataggcaaagaccgcaaaaaccccagggaagactatttggatgtatacgtgttcggggtaggaccgctggtgaatcaagtgaatattaacgccctggcttcgaagaaggacaacgagcaacatgtgttcaaagtcaaagacatggagaatttagaggatgtgttttaccagatgattgatgagagccagagtcttagcttatgcggcatggtgtgggagcaccgcaagggaaccgattatcataagcagccctggcaggcaaaaatctccgtgattaggccaagtaagggccatgagtcctgcatgggcgctgtggtttccgaatactttgtccttaccgccgcccactgttttaccgtcgatgacaaagaacacagcatcaaagtatccgttggtggtgaaaaacgcgatctggagatagaagtggtgctattccaccccaattacaatattaatggaaaagaggaagctgggattcccgagttttacgactatgacgtagccttgattaaactcaagaacaaactcaagtatggacagaccatcagacctatatgtctgccctgcacggagggaactacaagggccttaaggctgccccctactactacatgtcagcagcagaaggaggaactccttccagcacaggatataaaggccctatttgtgagcgaggaggaaaagaaactaacaaggaaagaagtgtacataaaaaacggcgacaagaaaggatcctgtgagcgtgatgcacagtacgcgccaggttacgacaaggtgaaggacatctccgaggtggtcacgccaaggttcctgtgtaccggcggggtctccccttacgccgatccaaacacatgcaggggggattccgggggacccctcatcgttcataaacgcagccgcttcatccaggttggagtgatatcttggggcgtagtcgacgtgtgtaaaaatcagaagcggcagaaacaggttcctgcacacgcccgcgacttccacattaacctcttccaggtgctaccttggctgaaagagaaactccaggatgaggacctcggctttctgtag

SEQ ID NO: 112916 - DNA, 3801 bp, synthetic construct
  misc_feature 1..3801: note = Description of Artificial Sequence: Synthetic coding sequence
  source 1..3801: mol_type = other DNA
atgggacctctcatggtgttgttttgtctgctgtttctttatcctggtctcgctgactccgcgccatcctgtccacagaatgtcaatattagcggaggaactttcacactgtctcatggatgggctccgggtagtttgctgacatacagttgtccacagggcttgtacccctcacccgcatcgaggctgtgcaagtcctccgggcagtggcagaccccgggggctacaaggtccctctccaaagccgtttgtaaacctgggcactgccccaaccccggaatcagtcttggcgcggtgcggacgggattcaggttcggacatggtgataaggtgcggtaccgttgttcctcaaaccttgtgttaactggatccagtgaacgtgagtgtcagggcaatggcgtgtggtctggtactgagccaatttgccggcaaccttactcatatgatttcccagaggacgtggctcctgctctcggcacctcattctcccacatgctaggcgcgacaaatccgacacagaagaccaaggaccacgagaacggaacaggtaccaatacatacgcagccctcaactctgtatatttaatgatgaacaatcagatgcgtcttctagggatggagacgatggcctggcaggagattcgacatgctatcatcctgctgacggacggaaagagcaacatgggcggttctcccaagacagcagtggaccacattcgcgaaattctcaatataaatcagaagcgcaatgattacctagatatatatgcgattggcgtcggaaaactggatgtagattggagggagctgaacgaactggggagcaagaaggatggggagagacacgcattcattctgcaggatactaaagctttgcatcaggtctttgagcatatgctggatgtgtccaaattgactgacactatatgcggagtaggcaacatgtcggccaacgcaagcgatcaagagcgaaccccctggcacgtgactatcaagccaaagagtcaggagacgtgccgcggggcattgatctcggatcagtgggtgctaacggccgcgcattgctttcgggatggtaacgatcattctctgtggagggtgaatgtcggcgacccaaagagtcagtgggggaaggaatttctcatcgagaaggccgtgatctctcctgggttcgacgtattcgcaaaaaagaaccaagggattcttgagttctatggagatgatatcgccctacttaagctagctcaaaaagtcaaaatgtccacccatgcccggcctatctgccttccttgtacaatggaggctaacctcgcactgcggcgcccccaggggtccacctgtagggaccacgagaacgagctcctcaacaagcagtccgtgcctgcacactttgttgctctgaatgggtcaaagctgaatatcaatctgaagatgggcgtagaatggacctcatgtgctgaggtcgtgagtcaagaaaagaccatgttccccaacttgaccgatgtgagagaagtcgttaccgatcaatttttatgcagtggcacacaggaggatgagagcccctgtaaaggagtgacaactaccccttggtccctggctaggccgcaggggtcctgttccctggagggagtggaaataaaaggaggctccttccggctcctgcaagagggccaggcactggaatacgtgtgtcccagcggcttctatccgtacccagtgcagactaggacttgcagatctactggctcctggtctaccttaaagactcaggaccagaagactgtgcgcaaagcggagtgccgagcaatacattgccctcgtcctcacgacttcgaaaacggcgaatactggccacggagcccctattacaatgtgagcgacgagatatcattccactgctacgacggctacaccctccgggggagcgctaatcgtacctgccaggtcaacggccggtggtctgggcagacagctatatgtgacaacggtgcagggtattgttccaatcccggaatccctataggaacaaggaaagtgggatctcagtatagattggaggattctgtgacctaccattgttccaggggactgactctgaggggttcacagcgcagaacttgccaggagggaggctcttggtctgggacggaaccttcgtgtcaagattcgtttatgtacgacaccccacaggaggtggctgaggctttcctctctagtcttacagaaaccatcgagggagtagacgccgaggatggccatggaccaggggaacagcagaagcggaaaatagtgctggacccttccggtagcatgaacatatatctcgtgcttgatggcagtgactctatcggcgcatcaaattttaccggagccaagaagtgcttggtgaatcttattgagaaagtggctagctacggagttaagcctcggtacgggctcgtgacctacgccacttaccccaaaatttgggtcaaagtatctgaagccgactctagcaatgcagattgggtcactaaacagctcaatgaaattaactatgaggaccacaagctgaagagcgggacaaatacgaagaaggccctgcaggctgtctactccatgatgtcatggccggacgatgtaccacctgagggctggaatagaacaagacatgtcatcatcctgatgacagacggtttgcataacatgggaggcgaccccataactgtaattgacgaaattcgtgacttgttatacatcggtaaggaccgcaaaaacccgcgcgaggactaccttgacgtttatgtctttggagtgggacccctcgtgaaccaggttaacattaacgccctcgcgtccaaaaaagacaatgagcaacatgtctttaaagtcaaagacatggaaaatcttgaagacgttttttaccagatgattgacgaatctcagagtctctccctgtgcggaatggtgtgggagcatagaaaaggaacggactaccacaaacagccctggcaggccaaaatatctgttataaggccatctaaaggtcacgaaagctgcatgggcgcagtggtatctgaatacttcgtgctaacagctgcccactgttttaccgttgacgataaagagcacagcataaaagtatctgtggggggcgaaaagcgcgacctggaaatcgaggttgttctctttcacccgaactacaacataaatggtaagaaagaagcagggattcctgaattctatgactatgacgtagcactgatcaagttgaagaacaagttgaagtacggccaaacaattcgaccaatttgccttccgtgcacggaagggacaacaagggctcttcggctgcccccaactactacttgtcagcagcagaaggaagagttgttgccagcccaggatatcaaggccctttttgtttcagaggaggagaagaaactgacccggaaagaggtttacattaaaaatggagacaaaaaaggtagttgtgagagggacgcccagtatgcccccggctacgacaaggtaaaagacatttcggaggtggttacaccccggttcctttgtaccgggggtgtgagcccatatgccgatccaaacacctgtcgcggcgactccgggggtccattgattgtgcataaaaggtctcgcttcatccaggtaggagtaatatcttggggtgtcgtggatgtgtgcaaaaaccagaaacgtcagaaacaggtgcctgcccacgctcgggatttccacattaatctgtttcaggtgttgccatggctgaaagagaaattacaggatgaggatctgggctttctctag

SEQ ID NO: 112917 - DNA, 3801 bp, synthetic construct
  misc_feature 1..3801: note = Description of Artificial Sequence: Synthetic coding sequence
  source 1..3801: mol_type = other DNA
atggggcctttaatggttctcttctgcctgctttttctgtaccctggtctggctgactctgcaccctcctgccctcaaaatgtcaatattagtggaggaacattcaccctgagccacggttgggccccgggcagcctcctgacctattcctgcccccagggcctgtatccaagccccgccagtcgtctgtgcaagagctctgggcagtggcaaactccgggagccacccgatccctgtcaaaagccgtgtgcaagcccggtcattgcccaaatcccggtatcagcctgggcgccgtccgcacgggctttcgctttggccacggagacaaagttaggtaccgctgctcttccaatttggtgctgaccggaagcagcgagcgagagtgtcagggcaatggcgtgtggagcggtactgagcccatctgcagacagccttactcatacgactttcctgaagacgtcgccccagcacttggaacgtctttctctcatatgcttggggcgaccaatccaacgcaaaagaccaaggaccatgagaatggcacaggaacaaacacatatgctgcactaaacagcgtgtacttgatgatgaataaccagatgaggctactgggaatggagactatggcgtggcaagagattcggcacgccattatcttgcttaccgacggcaagtctaatatggggggctcccccaagacagccgtggatcacatcagggaaattctcaatatcaaccagaagagaaatgattacttagatatctacgcgatcggagtcgggaagcttgacgttgattggagagagctcaacgaattggggtcaaaaaaggacggggaaagacacgcgttcattttacaagatacaaaagcgctacaccaagtcttcgaacacatgttagacgtttctaagcttacggatactatttgtggagtgggaaacatgtctgctaatgcttctgaccaagagcgaactccatggcacgtgactatcaaacctaaatcccaagagacgtgcaggggagccctgatttcagaccagtgggtattaacagccgctcactgtttccgggatgggaatgaccacagcctttggcgcgtgaatgtgggagatccgaaatctcagtgggggaaggagttcttaatagaaaaggcggtgatcagtcccggcttcgatgtatttgcgaaaaaaaatcaaggaatcctcgagttctacggcgatgatatcgctctcctcaaactcgctcaaaaggtaaagatgagcacccacgcccgccccatatgtctgccttgtacaatggaagccaatctcgccctacggcgtccacagggtagcacttgccgagatcacgaaaatgaactgctgaacaagcagtctgtccccgcgcatttcgtcgccctgaacgggagcaaactaaacataaacctgaaaatgggagtcgagtggactagctgtgcggaagtggtaagccaggaaaagaccatgttcccaaacctaactgatgttagagaggtggtgacggaccagtttctgtgctctgggacacaagaggacgaaagcccttgtaagggcgtaaccaccaccccttggagcctggcccgcccacaggggtcctgtagcctggagggcgtagagatcaaaggcggaagtttccgcctgttgcaggagggacaggctctggagtacgtctgcccaagcggcttttatccctatccagttcagactcgcacatgcagaagcaccgggagctggtcaacccttaaaactcaggatcagaagaccgttcggaaggccgaatgtcgcgccatccactgcccacggcctcacgactttgaaaacggggagtactggccccgcagcccttattataacgtgagtgacgaaatttctttccactgctacgatgggtataccttgcgaggaagtgcaaaccgcacatgccaggtcaacggtaggtggagtggccagactgccatctgtgacaatggggcaggatattgtagtaaccctggcatccccattggaacgcggaaggtggggtctcagtaccggctggaggattcggtaacctatcactgctccaggggcttaaccctgagggggtctcagcgtagaacatgtcaagagggaggtagctggtcaggcactgagccatcatgccaggatagtttcatgtatgatactccacaggaggtggcagaagcttttttgagctctctgacagaaactatcgagggcgtggacgccgaggatggccatggccccggggaacagcagaaaagaaaaatcgtcctagatccgtcggggtccatgaatatttacctggttctcgatgggagcgattccataggcgcctcgaacttcactggcgctaagaagtgccttgtgaacctgattgagaaggtcgcttcctacggggtgaagcctaggtacggactggtaacctacgccacttatcccaagatctgggtcaaagtatccgaagcagactcctccaatgccgattgggttaccaaacagctcaacgagataaattatgaagaccataagctaaaatccgggactaatacgaaaaaggccttgcaggctgtgtactccatgatgtcatggccggacgatgtgcccccagagggctggaacagaacacgccacgtgatcattctgatgacagatggtctgcacaatatgggcggcgaccctatcactgttatcgatgaaatcagagaccttttgtatatcggcaaggatagaaaaaacccgagggaggactacctcgacgtttacgtgttcggcgtgggtcccctggtgaaccaagtgaacatcaacgcccttgctagcaagaaagacaacgaacagcacgtttttaaagtgaaagacatggagaatctggaggatgttttctaccagatgatcgacgagagccagagtctgtccctgtgtgggatggtctgggaacacaggaagggaacagactatcataagcaaccctggcaggctaagatcagcgtgattcgtccaagtaagggtcacgaatcgtgcatgggagcagtcgtcagcgaatacttcgtactaaccgcagcccactgcttcacggttgacgacaaagagcacagcatcaaagtgagcgtcggcggggagaaacgcgacttagagatcgaggtcgtgcttttccacccaaactacaacatcaacggaaaaaaggaggcagggattcccgagttctacgactacgatgtcgctctgattaagcttaaaaacaaactgaaatacgggcaaacaatcagacccatctgcctaccttgtaccgaaggtacaacaagggccctccgcctgccaccaaccaccacctgtcaacagcagaaagaggagttgctcccagcccaggatatcaaagcgttattcgtctcagaagaggagaagaaacttacccgtaaggaggtctatataaaaaacggggacaaaaaaggcagttgcgagagggatgcccagtacgcaccagggtatgataaggtaaaggatatttctgaggttgttacaccacgattcctctgcaccggtggggtgtccccctatgccgaccccaatacttgcagaggcgactctgggggacctctaatagtgcataagagaagtagattcattcaggtgggggtcatcagctggggggtcgtggatgtgtgtaagaaccagaagcggcagaaacaggtgccggcacacgcgagagactttcacatcaatcttttccaggtcctgccatggctgaaagaaaagttacaggatgaggacctggggttcttatag

SEQ ID NO: 112918 - DNA, 3801 bp, synthetic construct
  misc_feature 1..3801: note = Description of Artificial Sequence: Synthetic coding sequence
  source 1..3801: mol_type = other DNA
atgggacccctgatggtcctcttttgtttgctgtttctctatccaggcctcgccgattcagccccaagttgcccccagaacgtcaacatttctggtggcaccttcacccttagccacggctgggcacctggttctctgctaacctactcttgccctcaggggttatacccctcgccggcctctagactctgtaagtcaagcgggcaatggcagacgcctggcgccacaaggtccctatcaaaggcggtttgcaaacccgggcattgccccaaccctggaattagccttggtgccgtgcggaccggctttcgatttggacatggcgataaagtgcgctacagatgttcctcaaatctcgtgctgactggctcaagcgagagagagtgccagggcaacggggtctggtctggaaccgagcccatctgcagacagccctatagctacgactttccggaggatgtcgcccccgccctgggtacctcattctctcacatgttaggagccactaatccaactcagaagacaaaggaccatgagaatggcactggaactaacacatacgccgcccttaactctgtttatctgatgatgaacaatcagatgcggctgctggggatggagacaatggcttggcaggaaatcagacacgctattattcttctgaccgatggtaaaagcaacatgggtgggagtcccaagaccgcagtagatcacatccgcgagatcctgaatatcaatcagaaacggaacgactacctagatatatatgccattggggttgggaagctggatgtggattggagagaactcaacgagctcggaagcaaaaaggacggggagaggcatgccttcatccttcaggacaccaaagctctgcaccaggtgtttgaacacatgctcgacgtctccaaactcactgataccatctgcggcgtgggaaacatgagtgccaacgccagcgaccaggagcggaccccctggcacgttaccataaagccaaagagtcaagagacctgtaggggcgccctgatctccgatcagtgggtgctaactgctgctcattgcttccgggatggcaatgaccatagcctttggagggttaacgtcggcgaccctaagagtcaatggggtaaggagtttctcatcgagaaagccgtcatttctccagggttcgacgtgttcgctaagaagaaccagggcattctggaattttacggggacgacattgccctcctgaaactggcacaaaaagttaagatgtctacccacgcaagaccaatttgccttccctgcacaatggaggccaatctggctctccggcgcccgcaaggaagcacctgcagagaccacgagaatgagctgctgaataaacaatcagtgcctgcgcattttgttgccttgaatggtagcaagctcaacatcaacctgaagatgggtgtggagtggacatcatgtgccgaggtcgtttctcaggagaaaacaatgttccccaacttaaccgatgtacgggaggtcgtgaccgaccagttcctttgctcggggactcaagaggacgagtcaccttgtaaaggggtcactaccaccccatggtccctggctaggccacagggctcctgttccctggaaggcgtggagattaagggcggcagctttagactcctgcaggagggccaagcccttgagtatgtatgcccatctggcttttacccatatccagtgcaaaccagaacatgtagatccacagggagttggtctactctgaaaacgcaagaccaaaagactgttagaaaagctgaatgccgcgctatacactgcccccgcccccatgatttcgaaaatggggagtattggcctcgatcgccctattataatgtcagcgatgaaatcagcttccactgttacgatggttacaccttgagaggctcagcgaatcgcacctgtcaggtgaacgggcggtggagtggacagaccgctatctgcgacaacggggccggctactgtagcaatcccggaattcctatcgggacccggaaggtgggcagtcaataccggctggaagattctgttacttatcactgttccagaggtctgaccttaagaggtagccagagacgcacctgtcaggaggggggcagctggtctggaacggagccctcgtgtcaggactcctttatgtatgataccccccaggaggtggctgaagcttttctgagtagccttacagaaacaattgaaggcgtggacgccgaagatgggcacggccctggggaacagcagaagaggaagattgtcttggatccctccgggagcatgaacatctacctggtactcgacgggagcgactccattggcgcgagtaacttcaccggtgctaagaagtgtctcgttaacctcattgagaaggttgcatcctatggcgtaaaacccaggtatggactggtgacttatgccacgtatccaaagatctgggtcaaggttagtgaagctgatagctctaatgccgactgggtgacaaaacaacttaacgagataaactatgaggaccacaagttgaagtctggtaccaataccaagaaggccttacaagctgtatacagcatgatgtcttggccagacgacgttccaccagagggatggaacagaacaagacatgtgatcatattgatgactgacggattacacaatatgggcggggatcccattaccgtcattgatgaaatccgggatctcctctacatcgggaaagacaggaagaacccacgagaggattacttggatgtatacgtattcggagtcggccccctggtgaaccaggtgaatattaacgccctggcgtccaaaaaggataatgagcagcacgtcttcaaggttaaagacatggaaaatctcgaagacgtcttttaccagatgattgacgagtcccagagcctgtccctgtgcggcatggtttgggaacacaggaagggcacagattaccacaagcaaccatggcaggcaaagatctctgttatcagaccatcaaagggacacgagtcctgtatgggagcagtagtgagcgagtattttgttctgactgccgcccactgctttacggtggacgacaaggagcatagtattaaagtcagtgttggaggagagaaaagggatctggagatagaggtcgtgctgttccaccctaactataatatcaacggcaagaaagaggcgggcattccagaattttacgactacgacgtggccctcatcaagctgaaaaacaagttgaagtacggccagaccattcggcctatctgcctgccatgtactgagggaactacccgggccttgagactccctccgactactacttgtcaacagcagaaggaggaactcctgccagcgcaggacatcaaggccttgtttgtgtccgaggaagaaaagaagcttactaggaaggaagtctacatcaagaatggcgacaagaagggcagctgcgaacgggacgcccagtacgccccaggctatgataaggtgaaggacatttctgaggtcgtaacccccagattcctttgcaccggtggagtgtctccatatgctgatccgaatacttgtcggggcgatagcggaggtcccttgatcgtacacaaaaggagcaggtttatccaggtgggagtcatttcctggggagttgtcgacgtgtgcaaaaaccaaaagaggcagaaacaggtcccagcccatgctcgggattttcatatcaacctgtttcaagtattaccctggctcaaggagaaattacaggatgaagacctgggttttctctag

SEQ ID NO: 112919 - DNA, 3801 bp, synthetic construct
  misc_feature 1..3801: note = Description of Artificial Sequence: Synthetic coding sequence
  source 1..3801: mol_type = other DNA
atgggacctctaatggtcctcttctgtctgctgtttctctatcccggcctcgcagattctgccccctcctgtcctcagaacgttaatattagtgggggcacttttacactgtcccacggctgggccccaggctcactcctgacttatagttgtcctcaaggactgtatccttcccccgcctctaggttgtgcaaatcaagtggtcagtggcagactccaggggccactagaagcctgtcgaaagcagtctgtaaaccaggacattgccccaaccctgggatctcgctgggagcggtccgcacaggattccgattcggacatggagacaaggtccggtataggtgtagcagcaatctggtgttaacaggatcgtctgagagggaatgtcaaggaaatggtgtctggagtggcacggagccgatttgccgacaaccttactcgtatgatttcccagaggacgtggcgccagccctgggcacatccttctcacacatgctaggcgctacgaatccaacccagaaaaccaaagaccacgaaaatggcacaggtaccaatacgtatgcggctttgaattccgtgtatttaatgatgaacaaccagatgaggttgttaggcatggagaccatggcatggcaggagatccgccatgctataatcctgcttacagatggcaagtcgaatatgggcggctctccaaagaccgccgtggatcatatcagagaaattctgaacataaatcagaagcgaaacgactacctcgatatatacgcaataggcgtggggaaactcgatgtggactggcgcgagctgaacgaattgggctcaaagaaggacggcgagcgccacgcctttatactgcaagacacaaaagctctgcaccaggtgtttgaacacatgcttgatgtttccaagctgacagatactatctgcggggtgggcaacatgtctgccaacgcgagcgaccaggagaggaccccgtggcatgtgacgataaaacctaaatcacaggaaacctgccggggagcactcatctcagatcagtgggtgctaactgctgcacactgcttcagggacggaaacgaccattcattatggcgcgtcaacgtcggggatcccaagagccagtgggggaaggagttcctgattgagaaagctgtaatctctcccggtttcgacgtcttcgctaaaaagaatcaggggatactcgagttttacggcgacgatatagctttgttgaagctagcccaaaaggtcaagatgtctacacacgccaggccaatttgtctgccttgtactatggaagccaacctggcgcttcgcagaccacagggctctacatgccgggatcacgaaaatgagctacttaacaagcagagcgtaccggcgcattttgtggctctgaatggatctaaactgaacataaacctgaagatgggggttgaatggacaagttgcgcagaggtggtgtcccaggaaaaaactatgtttcccaacttaaccgatgtgagagaggtggtgaccgaccagttcctgtgtagtggcacgcaggaagacgagtccccttgcaagggggtaaccacaacaccttggtcactcgccaggccacagggcagttgctcactcgagggagtggagattaaggggggaagtttccgacttctgcaggagggacaggccctggaatacgtttgccccagtggtttctatccgtaccctgtgcagactcggacatgtcggtcaactggcagctggagcacactcaaaacgcaagatcaaaagaccgttcgcaaggcagaatgcagggctattcattgccccagacctcacgatttcgagaacggcgagtattggcccaggtctccatactacaacgtgtccgacgagatttcattccactgttacgatggctacacccttaggggatctgccaacaggacttgccaggtcaatggaagatggtctggccagacagccatttgtgacaacggcgccggctactgcagcaatcccggaatacccatagggacgaggaaggttgggagtcagtacagattggaagacagcgtgacttaccactgttcaagaggtctgactcttaggggcagccagcgccgtacatgtcaagagggaggatcatggtcaggaacagagccctcatgtcaggactcattcatgtatgatacgccccaagaagtggctgaagccttcctgtcctcactgactgagacgattgagggcgtggacgctgaagacgggcatggccctggagagcagcaaaagcggaagatcgtgctggaccccagtggcagtatgaatatctatctagtactcgacgggagcgacagtatcggggcatcaaatttcactggtgccaagaagtgcttggtgaacctgatagagaaagtggctagctacggagtgaagcctaggtatggattggttacatacgcaacctaccccaagatctgggttaaggtgtctgaggccgactcctcaaacgccgactgggttaccaaacagctgaatgagataaactatgaggaccacaagctcaagtctggcacaaatactaaaaaggctctgcaggcagtgtacagcatgatgtcctggcccgatgacgtccccccagaggggtggaaccggacccgccatgtgatcatcctgatgactgacggcctgcataatatgggcggggatcctatcaccgtcatcgatgagatacgcgatcttctttatatcggaaaggacagaaaaaatcccagggaggattatctggatgtctacgtgtttggagtgggccctctggtcaatcaagtgaacatcaatgccctagccagcaagaaggataacgagcagcacgttttcaaggtaaaagacatggagaatctcgaggacgtgttttaccagatgattgatgaaagccaatcactgtcactctgtggaatggtctgggagcaccggaagggcaccgactatcacaaacagccctggcaagctaaaatctcagtgatccgcccttccaaaggacacgagagctgcatgggcgctgttgtgagcgagtatttcgtgctgacagctgcacactgtttcacagtcgatgataaggaacattccattaaagtatccgtgggaggggagaagcgcgatctcgaaattgaagtcgtgttattccacccaaactataacatcaacggcaaaaaggaagccggcatcccagagttttatgattacgacgttgcactgataaaactgaaaaacaaactcaaatatggacagaccatccggcccatctgcctcccctgcacggagggcactactcgagcacttcgcctaccacccaccactacttgccaacagcaaaaagaggagctcctgcctgctcaggatattaaggccctcttcgtgtcggaggaggaaaaaaagctgacccgtaaagaggtctatataaaaaatggggataaaaagggttcctgcgaacgcgacgctcagtatgctccagggtacgacaaggtcaaggatatctctgaagtagtgacacctaggtttttgtgtaccgggggcgtatccccgtatgccgaccccaatacctgccgaggagacagcggcggccccctcatagtgcataagagatctcggtttatccaagtaggtgtgatttcttggggggtggtcgacgtatgcaagaaccagaaaaggcagaagcaggttcctgctcatgcaagagactttcacatcaatttgtttcaagtgctcccctggctgaaagaaaaactgcaagacgaggacctcgggttcctttag

SEQ ID NO: 112920 - DNA, 762 bp, synthetic construct
  misc_feature 1..762: note = Description of Artificial Sequence: Synthetic coding sequence
  source 1..762: mol_type = other DNA
atgcattcatgggagcggttggcagtgctcgttctattaggcgctgccgcatgcgctgcgccgcctcgggggaggatcttgggagggcgtgaagcagaagcgcacgccagaccctacatggcttctgttcagctgaatggtgcccacctctgtggcggtgttttggtggccgaacagtgggtgttgagcgctgcccattgtctcgaggacgcagccgacggaaaggtgcaggttctgctgggggcgcactctttgagccagcccgaaccatcaaagaggctttacgacgtgctgcgggcagtcccccaccctgactctcagccggacacaatcgaccacgatttgctgctgctgcaactttcagaaaaggccactcttggcccagcagttaggccactgccttggcagagggtggatcgcgatgttgccccaggcactctgtgtgatgtggccgggtgggggatcgtgaaccacgcaggccggagacccgacagtctgcagcacgtcctgctgccagttctcgaccgcgcaacttgcaacagaagaacccaccacgacggtgcaataaccgaaaggctgatgtgtgctgagtccaaccggcgcgacagctgtaagggggacagtggaggcccactggtttgcggaggcgtgctcgagggtgtggtgacaagtggatctcgggtgtgtggaaataggaaaaagcctggcatctacactcgggtggcgagctatgccgcctggatagacagcgtgctagcctag

SEQ ID NO: 112921 - DNA, 993 bp, synthetic construct
  misc_feature 1..993: note = Description of Artificial Sequence: Synthetic coding sequence
  source 1..993: mol_type = other DNA
atgtggctccttgtgtcagtgatactcatatcacggatctcaagcgtgggtggagaagcaaccttctgcgatttccctaagattaaccacgggattctatatgacgaggaaaaatataaaccctttagccaggtgcccacaggcgaggttttctactatagctgtgaatacaacttcgtgagcccttctaaaagtttctggaccagaataacatgtactgaggagggatggtcaccaacgcccaaatgtttaagattgtgcttcttccctttcgtcgagaacggtcactccgagagttccggacaaacacatctggaaggagacactgtacagattatttgtaacacaggatatcggctgcagaataatgagaacaatatctcctgcgtggaacggggctggtctactccacctaagtgccgaagcacagatacgagctgcgtgaaccctcccacggttcagaatgcccatatccttagtagacagatgtcaaagtatccatccggggagcgagtacgctacgagtgccgtagtccttacgaaatgtttggagacgaggaggtaatgtgcctgaacggcaattggacagaacctccacagtgcaaagatagtactggcaaatgtggaccgcctcctcctatcgacaatggcgacataacctcttttcccttatcggtttatgctcctgccagcagtgtggaatatcagtgccagaatctataccaactggagggaaacaagcgcattacctgtaggaacggccagtggagcgagccaccaaaatgtctgcacccctgcgtaatcagcagggaaattatggagaactataacatcgccttgcggtggaccgcgaaacagaagctctatctccgtaccggcgaaagcgctgagtttgtgtgcaaacgtggctaccgcctttctagtcggagtcacactctgcgcactacatgctgggatggtaagcttgaatatccgacgtgtgccaagcgctag

SEQ ID NO: 112922 - DNA, 813 bp, synthetic construct
  misc_feature 1..813: note = Description of Artificial Sequence: Synthetic coding sequence
  source 1..813: mol_type = other DNA
atgtggctactggtgagtgtgattctaataagccggattagctcggtgggcggagaagccatgttctgtgacttccccaaaatcaaccatggaattctgtatgatgaggaaaaatacaaacctttcagccaagtgcccactggagaggtgttttactacagttgtgagtacaactttgttagcccctctaagagtttttggacccgcattacttgcgctgaggaaggatggtcacccacccccaaatgcctgcgcctttgcttttttcccttcgttgaaaacggccactcggagtccagtgggcagacacatctggagggcgacactgtgcagatcatttgcaatacaggctataggctgcagaataacgagaacaacatttcctgtgtggagcgcggatggtccacccctcctaagtgtcggtccacaatatcagctgagaaatgtggccccccgccacctattgacaatggtgacattaccagctttctcctcagtgtctacgcaccgggctccagcgttgaataccaatgtcaaaatctctaccagctggagggcaataatcaaatcacatgtaggaacggacaatggtcagaaccacccaagtgtctcgatccttgtgtgatttcccaggaaatcatggagaagtacaacatcaaactgaagtggactaatcagcagaagctctacagtcgcacaggcgatatagtggaattcgtttgcaagagtggctaccacccaacaaagtcccattctttcagagctatgtgccagaatgggaaactggtttatccttcttgtgaggagaagtag

SEQ ID NO: 112923 - DNA, 813 bp, synthetic construct
  misc_feature 1..813: note = Description of Artificial Sequence: Synthetic coding sequence
  source 1..813: mol_type = other DNA
atgtggctgctggtcagcgtaatcctgattagcagaataagcagcgtggggggcgaggccatgttctgcgattttcctaagattaatcacgggatcctgtacgacgaagaaaaatacaagcctttctcacaggtccctactggtgaggtgttctattacagctgcgagtataacttcgtatccccttctaagagcttttggacacgtattacatgtgccgaagaaggctggtcccccactccaaagtgcctcaggctctgtttctttccctttgtggagaacggtcactcagagtcgtcaggccagactcacctcgaaggtgatacggtgcagattatatgtaacacagggtacagacttcaaaataacgaaaacaacatatcctgcgtggagcggggatggagcacaccccctaagtgccggtctacaatttcggctgagaagtgtggaccccccccaccaatcgacaacggtgatattacatctttcctgctgagcgtgtacgcaccaggaagttcagtagagtatcaatgccagaacctgtaccaactggaaggtaacaatcaaattacatgcaggaacggccagtggtcggagcctccaaaatgtttggacccatgcgtgatatcccaggagattatggaaaaatataatatcaaactcaagtggacaaatcaacagaaactatatagtagaacaggtgacatcgtggaatttgtgtgtaagagcggataccaccccaccaaatctcactcctttcgtgccatgtgccaaaacgggaaactcgtttacccctcctgtgaagaaaagtag

SEQ ID NO: 112924 - DNA, 993 bp, synthetic construct
  misc_feature 1..993: note = Description of Artificial Sequence: Synthetic coding sequence
  source 1..993: mol_type = other DNA
atgctgctattgataaatgtcattcttacactctgggttagctgcgctaatggtcaggtaaaaccctgcgactttcctgacatcaaacacggagggctgttccacgagaacatgaggcgcccctacttcccagtcgccgtcggcaagtattattcatattattgtgatgagcatttcgagacaccaagcggatcctactgggactatattcactgcacgcagaacggttggtcaccggccgtgccatgcttgcggaagtgttatttcccatacctggagaatggatacaatcagaattatggaaggaagttcgtgcaaggaaatagcaccgaggtggcctgtcaccctggctatggcttaccaaaggcgcaaacaacggtaacatgtacggaaaagggatggagcccgacaccgcgctgtataagggtgaggacgtgctccaagtccgatattgagatcgagaacggcttcatttctgagagctcttccatttacatcctgaacaaggagatacagtacaagtgtaagccaggatatgccacggcagacgggaacagttccgggagtataacttgcctccagaacggctggtctgcccagcctatctgcatcaactccagtgaaaaatgcggcccccctcctcctatctctaacggcgatactacttcttttctgctcaaagtctacgtgccacagagccgggttgagtaccagtgtcagccatattatgagctgcaaggctccaactacgtcacctgttctaacggcgagtggtccgagcctccacgctgtatccatccctgcattatcaccgaagaaaatatgaataaaaacaatatcaaactcaaggggcgcagtgaccggaagtactacgccaagacgggtgatacgattgagttcatgtgcaagctgggctacaacgctaacaccagcatcctttcctttcaggcagtctgcagggaagggatcgtggagtacccaagatgcgagtag

SEQ ID NO: 112925 - DNA, 588 bp, synthetic construct
  misc_feature 1..588: note = Description of Artificial Sequence: Synthetic coding sequence
  source 1..588: mol_type = other DNA
atgttgctgttgattaatgtaattctgaccctgtgggtgtcctgcgccaatgggcaagtgaagccgtgcgactttccagacattaaacatggggggctcttccacgagaatatgaggcggccttactttcctgtggcagtgggtaagtattatagctactactgcgatgaacactttgaaactcctagtggttcttactgggactacatccactgcactcagaatggctggtcgcccgccgttccctgcctccgcaagtgttatttcccctacctcgaaaatggatataatcagaattacggtcggaagttcgtccagggtaactccactgaggtggcttgtcaccccggttacggcttgccaaaagcccagaccaccgtgacctgcaccgaaaaggggtggtcccccaccccaaggtgtatacgggtgcggacatgttccaaaagcgacatcgagattgaaaacggatttattagtgagagttctagtatttacatcctgaataaagagattcaatataagtgcaagcccggatatgccacagctgacgggaatagcagcgatatggtattctgtatttcttattag

SEQ ID NO: 112926 - DNA, 810 bp, synthetic construct
  misc_feature 1..810: note = Description of Artificial Sequence: Synthetic coding sequence
  source 1..810: mol_type = other DNA
atgcttcttctgataaacgtaatcctcactctgtgggtatcgtgtgctaatgggcaggtaaagccttgcgatttccccgatataaaacacggtggcttgtttcacgagaacatgcgtcgtccttacttccccgtcgcagtggggaagtactactcatactattgcgacgagcacttcgagacgccgtcaggctcttactgggactatattcactgcacacaaaacggatggagtccagccgtgccttgtctacgcaagtgttattttccatatctagagaatggctataatcaaaactacggccggaaatttgttcaaggtaactccacagaggtggcctgtcaccctggatatggattgccaaaagctcagacaacagtgacctgtaccgaaaaaggctggagtcctaccccccgttgcatccgagtgaatagcagcgaaaagtgtggccctccaccccctatatctaatggcgacaccacttcattcctgctgaaggtgtacgttccccagtctagagtggagtatcagtgtcagccatactacgagctgcaaggatcgaattatgtgacatgctcgaatggtgagtggtctgagccgcctaggtgcattcatccttgcatcattactgaggaaaatatgaataagaacaatatcaagctcaaaggccgctcagataggaaatactatgctaagaccggggatacaattgaattcatgtgcaagctggggtacaacgcaaacacttccattctctcatttcaggcagtgtgtcgggaaggaatcgtggagtaccccaggtgcgagtag

SEQ ID NO: 112927 - DNA, 996 bp, synthetic construct
  misc_feature 1..996: note = Description of Artificial Sequence: Synthetic coding sequence
  source 1..996: mol_type = other DNA
atgttgctgctgatcaatgtcatcctcaccttgtgggtatcatgcgctaatggtcaggaagtaaagccctgtgactttcccgagattcaacacggcggcctgtactacaagtccctgaggcgcctgtacttcccggcggctgccggccagagctacagttattattgcgaccaaaacttcgttacaccttcgggttcatattgggactatatccattgtacacaggacggttggagtcctacggtgccttgcctgcgaacatgttccaagtcagatatagagatagaaaacggcttcatatccgaatcctcttcaatctacatccttaataaagagatccagtataagtgcaagccgggctacgcaaccgccgacggaaactcaagcggatcaatcacttgcctgcagaatggctggtctgcccagcccatctgtattaagttctgtgatatgccggtgttcgaaaatagtagagccaagtctaacggcatgaggttcaagctccatgatacactagactacgaatgctatgacgggtatgagattagctatggcaacacaacgggctcgattgtatgcggagaagacggctggtcccacttccccacgtgttacaactcgtctgagaagtgcgggcctcctcctccgatctccaatggcgatacaactagctttcttctgaaggtctacgtcccacagtctcgggtcgagtaccagtgccaatcttactacgaattgcagggatccaactacgtgacttgttctaatggggagtggtcagaaccaccaagatgtattcacccttgcatcatcaccgaggaaaatatgaataagaacaacatccagctaaagggcaagtccgacatcaagtattacgcaaaaactggagacaccatcgaatttatgtgcaagctgggatataatgccaacacttctgtgttaagctttcaggccgtttgtcgggaaggaatcgttgagtatcctcggtgcgaatag

SEQ ID NO: 112928 - DNA, 1734 bp, synthetic construct
  misc_feature 1..1734: note = Description of Artificial Sequence: Synthetic coding sequence
  source 1..1734: mol_type = other DNA
atgttgttgcttatcaacgtaatccttactctctgggtctcctgtgcaaacggacaggtaaagccctgcgatttccctgagattcaacacggggggttatattacaagagcctgcggcggttatacttccccgccgcagccggacagtcctatagctattactgtgatcagaactttgtgaccccatcaggctcatactgggactatatccattgcactcaagatggttggtcccccacagtaccttgccttcgtacatgtagtaaaagcgatgtggagatcgaaaacggctttatctctgaaagttcaagcatttacatcttgaatgaggaaacccagtacaactgtaaacctgggtatgctaccgccgagggcaacagcagcggtagcattacttgcctgcagaatggttggtctacacagcccatctgcataaaattctgtgatatgccagtcttcgaaaactctagagctaagagcaacggcatgtggttcaagctccacgatactctggattacgagtgctacgacggctatgagtccagctatggaaacactaccgacagcatcgtgtgtggggaagacggctggtcccaccttccaacctgttacaatagctccgaaaactgtgggcctccacctcccatttccaacggcgacacgacatccttcccccaaaaagtgtacctgccttggagccgtgtagaatatcagtgtcagtcttattacgaattgcaggggagtaagtatgttacgtgctctaacggcgattggtccgaaccacctaggtgtataagcatgaagccctgcgaattccctgaaatccagcatggacatctgtactatgagaacactaggaggccctattttccagtcgccacaggtcaatcatactcttactattgcgatcagaacttcgttacgccgtcaggatcatattgggattacatccactgcacccaggacggatggcttcccacggtaccttgccttcggacatgcagcaagagcgatatcgaaatagagaatggcttcatttccgagtcttcaagtatctatattctgaataaagaaattcagtataagtgcaagccaggctacgccactgccgatggaaattcctccggctcaatcacatgtctgcagaacggatggtctgcacaacccatatgtattaagttttgcgatatgcccgtgtttgagaatagtagggccaagtccaacggaatgcgtttcaaactccacgacacactggactacgaatgctatgatgggtatgagatctcttacggcaatacaactgggtccatagtatgtggcgaggatggttggtctcacttccccacttgttacaatagtagcgagaaatgcggccccccgcctccaataagcaacggggatactacctctttcctgctgaaagtctacgtgccccagtcaagggtggaatatcagtgccaatcttattatgaactgcagggctccaactatgtgacctgttctaacggcgagtggtcagaaccccctaggtgcatccacccatgtatcatcaccgaggagaatatgaacaagaacaatatacagctcaaaggcaagtcagacattaagtactacgctaaaactggtgatacgatcgagttcatgtgcaagctcgggtataacgccaacaccagtgtcctatcttttcaagctgtctgcagagaaggtattgtggaatacccacgctgtgaatag

SEQ ID NO: 112929 - DNA, 996 bp, synthetic construct
  misc_feature 1..996: note = Description of Artificial Sequence: Synthetic coding sequence
  source 1..996: mol_type = other DNA
atgctactgctgattaacgtgatcctaacactgtgggtcagctgcgcgaatgggcaagcaatgaagccctgcgaatttccggaaatccaacacggacacctctactatgaaaatacacgtagaccttattttccggtggccacaggacagagttacagttattattgcgaccagaactttgtgacaccctccgggtcatattgggattacatccactgcacccaagacggttggctcccaacagtgccctgcttgcggacttgttctaagtcggatatcgagatcgaaaacgggttcatttctgaaagctccagtatctatatccttaacaaagagatccagtataaatgcaagcccggatatgctaccgccgatggcaatagctcaggttctattacatgcttgcagaatgggtggagtgcccaacctatctgcatcaagttctgtgatatgccagtgttcgagaattctcgcgccaagagcaacggcatgcgcttcaaattgcacgatactcttgattatgagtgctatgacggttatgaaatctcttacggcaatacaaccggctccatagtctgcggcgaagatgggtggagtcacttccccacctgctacaattccagtgagaaatgcgggccaccccccccgatatccaatggagacaccacaagttttctgttgaaagtgtacgttcctcaaagccgagtggagtatcagtgtcagtcctattacgaattgcaaggaagcaactatgtaacctgttctaatggggagtggagtgaaccaccccgctgcattcacccatgtatcataacagaggagaacatgaataagaataatatacagctcaaaggcaaatctgacattaaatattacgcaaaaacgggcgacactatcgaatttatgtgtaagctggggtataatgcgaacacttccgtgctgtcattccaggcagtttgtcgggagggcatcgtcgaatatcccaggtgcgagtag

SEQ ID NO: 112930 - DNA, 996 bp, synthetic construct
  misc_feature 1..996: note = Description of Artificial Sequence: Synthetic coding sequence
  source 1..996: mol_type = other DNA
atgctgctcctgattaacgtcattctcacactctgggtcagctgcgctaacgggcaggaagttaagccgtgtgacttccctgaaatccagcatgggggcctatactataaaagtctgagaagactctacttcccagctgccgctgggcagagctattcatattactgtgatcagaatttcgtgacgccctccgggagttactgggattacatccattgtacccaggatggctggctccctacagttccgtgtctccgtacttgctcgaagtccgacatagaaatagaaaatggcttcatttctgaatcaagttccatttacatcctgaataaggaaattcagtataagtgcaaacctggatacgctacagccgacggcaactcaagtggatctattacctgccttcagaacgggtggagtgcgcaaccgatctgtatcaaattctgtgacatgccggtattcgagaattctagggcgaaaagcaatggaatgagattcaaattacatgacacattagattacgagtgttacgatggctatgagatcagctatggcaatacaacggggtccattgtctgcggggaggacggatggtcacactttcccacttgttataactctagcgaaaagtgtggccctccaccacccatctcaaacggagatacaacgtcctttctcctcaaggtatacgtgccacaatctcgggttgaatatcagtgccagagttattatgagctgcaaggttcaaattatgtcacatgttcaaatggggagtggtccgagcctccacggtgcattcacccttgtatcattactgaagaaaatatgaataagaacaacatccagctgaaaggaaaatccgacattaagtactatgctaagacaggcgatactatcgaattcatgtgcaaactgggctacaatgcaaacacctctgtattatcatttcaagccgtctgccgggagggcatcgtggaatacccccgctgcgagtag

SEQ ID NO: 112931 - DNA, 1752 bp, synthetic construct
  misc_feature 1..1752: note = Description of Artificial Sequence: Synthetic coding sequence
  source 1..1752: mol_type = other DNA
atgaaacttctccacgtgttcctgttgtttctctgtttccacctccggttctgtaaagtgacatacacctctcaggaagatcttgtcgaaaagaaatgcctggccaagaaatatactcacctgagctgtgacaaggtcttctgtcagccatggcagcgttgcatcgaggggacctgtgtgtgtaaactcccttatcaatgccccaaaaacggcacagctgtgtgcgccactaaccgccgcagttttcccacatactgtcaacagaaatctttggagtgtctgcaccccggcacaaagtttctgaataatggcacttgtacagccgaagggaagttcagcgtgtccttaaaacatgggaatacggatagcgaagggatagtggaggtgaagctggtcgaccaggacaagaccatgttcatatgcaagagttcttggagtatgagagaggccaatgtcgcatgcctggatctgggtttccagcagggggctgacacgcagcggaggtttaagctcagcgaccttagcattaactctaccgagtgtctccacgtacactgtaggggcctggagacctccctggccgaatgcacgtttactaaaagaagaaccatgggttaccaggacttcgccgatgtggtatgctatactcagaaagccgattcaccaatggatgacttcttccagtgcgtgaatggcaagtatatctcccagatgaaagcctgcgacggtatcaatgattgtggcgatcagagtgatgagttatgttgcaaggcttgtcagggtaaaggcttccattgcaaatccggcgtgtgcataccttcacagtaccagtgtaatggcgaagtcgactgcattactggtgaagatgaggtgggatgcgccgggttcgcgtccgtcacgcaggaggaaactgagatcctgactgcagacatggacgctgaaaggcgccgtattaagtctcttctacccaagctgtcctgcggggtgaagaataggatgcacatccggaggaaacgcatcgtgggtggaaaaagggcccagctgggcgaccttccttggcaggtggccatcaaagatgccagcggaattacatgtggtggcatctatatcggcgggtgttggattttaacagcagcccactgcctgagggcttctaaaactcataggtaccagatctggaccacagtcgtggattggatccacccagacctgaagcgaatcgttattgagtacgtagaccggattatctttcatgaaaactacaacgccggcacgtaccagaatgatatcgccctaatcgagatgaagaaagacgggaataaaaaggactgcgaactcccacgctcaatacccgcctgcgtcccttggagtccatatctgttccagcccaatgatacttgcatcgtgtctggttggggtcgagagaaagataacgaaagagtgttctccctccagtggggagaagtgaaactgatcagcaactgttccaagttttatgggaaccggttttacgaaaaggaaatggagtgcgccggcacttatgacgggtcaatcgacgcgtgtaaaggtgatagcggcggccccctggtgtgcatggatgcaaacaacgtgacatatgtgtggggcgtggtgagctggggagaaaattgtgggaagccggaattccctggagtgtatactaaggtggcaaactatttcgactggatttcttatcatgtggggagaccatttatcagtcagtacaacgtgtag

SEQ ID NO: 112932 - DNA, 1776 bp, synthetic construct
  misc_feature 1..1776: note = Description of Artificial Sequence: Synthetic coding sequence
  source 1..1776: mol_type = other DNA
atgaagcttctgcacgtgttccttttgttcttatgtttccatctgagattttgtaaagtgacatataccagccaggaagacctagtcgaaaagaagtgcctggctaaaaagtacactcatttgagttgcgataaggtgttctgtcaaccatggcagagatgtatcgaggggacatgtgtttgcaaactcccctatcagtgtcctaagaatggcacagcagtctgcgccacaaacaggcgctctttcccgacttactgccagcaaaaatctctagagtgtctccaccccggtaccaaattcctgaataacggcacgtgtacagccgagggcaagttctcagtcagcctaaaacatggaaacacagatagcgagggaatcgtggaggtcaaactagtggaccaagataagacaatgttcatctgcaagtcctcttggagcatgagggaagcaaatgtagcctgcctcgacctcggcttccagcaaggagctgatactcagaggagatttaaacttagtgatctgagtatcaacagtaccgagtgcttacacgtgcactgtagaggactcgagacttctctcgctgagtgcaccttcactaagagacggaccatggggtaccaagactttgccgacgttgtgtgttacacccaaaaagctgactctcccatggacgatttctttcagtgtgtaaatgggaagtacatctcccagatgaaggcatgcgatgggatcaacgactgtggcgatcagtccgacgagctgtgttgtaaggcttgtcagggcaagggcttccattgtaaatcgggagtttgcatcccatctcaataccagtgcaacggagaagtggattgtattaccggcgaggacgaggtgggttgtgccgcagccagacacccaactattcaggggtttgcttccgtgacacaggaggaaacagagatcctgacagctgatatggatgccgagagaaggcggattaaatctctgctaccaaagctgagctgtggcgtaaagaatcgcatgcacatccggcgtaagcgtattgtgggtgggaaacgggcacagctcggggacctcccctggcaggttgccatcaaggacgcatctgggatcacatgtgggggaatttacatcgggggttgttggatcctgacagctgcccactgcctccgggctagcaagactcaccgttatcagatatggaccaccgtggtggattggatccatcccgatctgaagaggattgttattgaatacgtcgatcgcatcattttccatgaaaattataatgcaggcacttaccagaacgatattgctctcattgaaatgaagaaggatggaaacaagaaggattgtgagttgccaagatcaatacctgcctgcgtcccttggtccccatatctgtttcagcctaatgatacttgcatcgtatccggctggggtagggagaaagataatgagcgtgttttttctcttcagtggggtgaagtcaagctgatatctaactgttctaaattttacgggaatcgtttttatgaaaaggagatggaatgcgctgggacttatgacggatccatcgacgcctgcaagggagacagcggggggcctctggtctgcatggacgccaacaacgtgacatacgtgtggggcgtagtctcttggggtgaaaactgcggcaagcccgaattcccaggagtgtacactaaggtggccaactatttcgactggatctcatatcatgtgggcagaccctttattagccaatataatgtctag

SEQ ID NO: 112933 - DNA, 1731 bp, synthetic construct
  misc_feature 1..1731: note = Description of Artificial Sequence: Synthetic coding sequence
  source 1..1731: mol_type = other DNA
atgaagctattgcatgttttccttttgttcctctgcttccacctgcgtttctgtaaagtgacttacactagccaagaggacttagttgagaaaaaatgtctggcaaaaaagtatacccacctgtcgtgcgataaagtcttttgccagccctggcagaggtgcatcgaaggcacatgtgtatgcaagctgccttatcagtgccccaaaaacggtaccgccgtctgtgcgactaataggcggtcctttcccacttattgtcaacaaaaatccctggaatgtcttcaccccggaacaaagtttcttaataatgggacctgtactgccgagggcaaattctctgtttctcttaaacacggcaacactgattctgagggcatcgtagaagtcaaactggtggaccaagataaaaccatgttcatatgtaaatcatcgtggtcaatgcgggaagccaacgtcgcatgcctcgacctcggttttcagcagggggccgacactcagagacgttttaagttaagcgacctgagcataaactccactgaatgtctgcatgtgcactgtcgtggcctggagacctccctggctgagtgcactttcacaaaacgacgcacaatgggttatcaagattttgccgacgtcgtgtgttatacacagaaagcggatagccctatggacgacttcttccagtgcgtgaatggcaagtacatctctcaaatgaaagcctgcgacggaattaatgactgtggcgaccagtccgatgaactgtgctgcaaagcctgtcagggcaaagggtttcattgtaaaagcggtgtgtgcatcccctcacagtaccagtgtaacggcgaggtggactgcatcacaggggaagacgaagtagggtgtgctgaagaaacggaaatactgaccgctgacatggacgccgagcggagacgcataaagtccctgctgccaaagttgagctgtggggtgaagaacagaatgcatattcgaaggaaaaggatagtcgggggtaagagggcacagctgggggatttgccctggcaggtcgcaatcaaggacgcatccggcatcacttgcgggggaatctacattggcggctgttggatattgaccgccgcacactgcctgcgcgcctccaaaacacaccgctaccagatttggactaccgtggttgactggattcacccggacctgaaacgaatagtgatcgaatacgttgatagaataatctttcatgagaactacaatgccgggacctaccagaacgatattgcactgatagaaatgaaaaaagatggtaataaaaaggactgcgaactaccgaggtccatccccgcatgcgttccatggagcccctatttgtttcaaccgaacgatacatgtatcgtatcaggttgggggagggaaaaagacaacgagagagtgtttagcttacaatggggcgaggtcaagctgatctctaattgttcaaaattttatgggaatcgtttttatgagaaagagatggaatgtgcagggacttatgacggctccatagacgcatgtaagggagattcgggcggccccctggtctgcatggatgctaataatgttacttacgtctggggcgtagtgagctggggtgagaattgtggcaaacctgaatttcccggagtctataccaaggtcgccaactattttgactggattagttaccacgtagggagaccctttatctcccagtataacgtgtag

SEQ ID NO: 112934 - DNA, 966 bp, synthetic construct
  misc_feature 1..966: note = Description of Artificial Sequence: Synthetic coding sequence
  source 1..966: mol_type = other DNA
caggttacctatacttctcaggaagaccttgttgaaaagaagtgtctggcgaaaaagtacacacacctgtcctgcgacaaggttttctgtcaaccttggcaaaggtgtattgaaggaacgtgcgtatgtaaactgccctatcaatgccctaaaaacgggaccgcggtatgcgcgactaatcgtagaagtttccctacctattgccagcagaaaagcctggagtgcctgcaccctggaaccaaattccttaataacggcacttgcacagccgaaggaaagtttagcgtaagtcttaagcacggtaacaccgatagtgaaggaattgtggaggttaagcttgtggaccaggacaaaacaatgttcatatgtaagtctagctggtcaatgagagaggccaacgtggcctgcctggatttggggttccaacagggtgctgatactcagcgacggttcaagctttccgacctgagtataaactcaaccgagtgcttacatgtgcactgccgggggttggagacgtccttggcagaatgtacattcactaaacggcgcacaatgggttatcaagatttcgctgacgtggtgtgctatacacagaaggcagattcccccatggacgattttttccagtgcgttaacgggaaatacattagccagatgaaggcctgtgatggtataaacgactgcggagaccagagcgacgagctctgctgtaaagcctgccagggcaaaggatttcactgcaagtctggggtgtgcattcctagtcagtaccaatgcaatggagaagtggattgcatcaccggagaagatgaggtcggttgcgctgcatttgctgagctgtgcattgaggagacagagatcctaacagctgacatggacgctgagcggcggcggataaagagccttctgcccaagctttcttgcggggtcaagaataggatgcatataaggcgcaagcgttag

SEQ ID NO: 112935 - DNA, 1134 bp, synthetic construct
  misc_feature 1..1134: note = Description of Artificial Sequence: Synthetic coding sequence
  source 1..1134: mol_type = other DNA
atgaagctactgcacgtctttctcttattcctgtgctttcatttgcggttctgcaaggttacgtatacctcccaggaagacctggtcgagaagaagtgcctggctaagaaatacacacacctgtcctgcgataaagtcttttgtcagccttggcaaagatgcatcgaaggcacctgtgtgtgcaaactgccataccagtgtccaaaaaatgggacagccgtgtgtgcaaccaatcgacgctcattcccaacttactgtcaacagaagtccctcgagtgtctacatcccggcaccaagttcctaaacaacggcacttgcaccgccgaaggaaaattctctgtctcgctgaaacacggcaacaccgactcagagggaatcgtggaggtcaagcttgtagaccaagacaaaaccatgttcatttgcaagtcaagctggtccatgcgggaagctaacgttgcatgtttggatttgggattccaacagggcgccgatacgcagcgccgctttaagttgtccgatctttctattaatagcaccgagtgtctgcacgtgcattgtagggggttggagacatcactcgctgaatgcacattcaccaaacggagaacaatggggtatcaggactttgccgatgttgtttgttatacccagaaggctgactctcccatggatgactttttccaatgcgttaacggcaaatatatcagccagatgaaagcctgcgacggtataaacgactgcggagaccaatctgacgaactctgctgcaaagcttgccaaggaaaggggtttcattgcaagtcgggagtgtgtataccctcccagtaccaatgtaacggtgaggtggattgcatcacaggtgaagatgaggtagggtgtgcgggcttcgcatctgtcacccaggaggagaccgaaatcctgaccgctgatatggatgcagagcgcagacggatcaagtccttgttgcccaaactgtcatgcggggtcaagaaccgaatgcacatccgcaggaagcggattgtgggaggaaagcgggcgcaattagggaaaatgaagcagatctctctggatatctttaaggggcttcaccgtgtctatgctatcctggaattctgttgcatcatcctgaagtag

SEQ ID NO: 112936 - DNA, 405 bp, synthetic construct
  misc_feature 1..405: note = Description of Artificial Sequence: Synthetic coding sequence
  source 1..405: mol_type = other DNA
atggagttcgtgatgaagcaggccctgggcggagcaaccaaagacatggggaagatgctcggtggggacgaggagaaggacccagacgcagccaaaaaggaggaggagcgacaggaggctttgcgtcaggccgaagaggaacgcaaggccaagtacgcaaaaatggaggctgagcgtgaggccgttcggcagggtattagagataagtacggtatcaagaagaaagaggaacgagaggccgaggcccaggctgcaatggaagccaattccgaaggaagtcttacacggccaaagaaggccattcctccggggtgtggggacgaggtggaggaggaagatgagtctatcctggatacagtgatcaaatacttgcctggcccgctgcaagacatgctgaaaaaatag

SEQ ID NO: 112937 - DNA, 405 bp, synthetic construct
  misc_feature 1..405: note = Description of Artificial Sequence: Synthetic coding sequence
  source 1..405: mol_type = other DNA
atggacttcgtaatgaagcaggctctgggaggtgctaccaaggatatgggaaaaatgctcggaggggaggaagaaaaggatccagatgcacagaagaaggaggaagagaggcaagaagcccttcggcagcaggaggaagagcgaaaagcaaaacatgcaaggatggaggcagaacgcgaaaaagtacgccagcagattagagataagtacggcctcaagaaaaaggaggagaaggaagcagaggaaaaagcggcactggaacagccctgtgaaggaagcctcacacggcccaaaaaggccattcctgccgggtgcggcgacgaggaggaagaagaagaagagagcatactggacaccgttttgaaatatcttcctggccctctgcaggacatgtttaagaaatag

SEQ ID NO: 112938 - DNA, 405 bp, synthetic construct
  misc_feature 1..405: note = Description of Artificial Sequence: Synthetic coding sequence
  source 1..405: mol_type = other DNA
atggattttgtgatgaagcaggccctaggcggggccaccaaagacatggggaagatgctgggcggagaagaggagaaggatcccgacgcgcaaaagaaggaggaggaaagacaagaagccttacgacagcaagaagaagagagaaaagctaaacatgcgcgaatggaggcagagagggagaaagtaagacagcagatccgtgataagtacggtttgaaaaagaaagaggagaaagaagcggaggagaaggccgctctggagcagccatgcgagggctccttaactaggcccaaaaaagcaattcctgcagggtgtggcgacgaagaagaggaggaagaagagagcatcctcgataccgtcttaaagtatctgcccggaccactgcaagatatgttcaaaaagtag

SEQ ID NO: 112939 - DNA, 555 bp, synthetic construct
  misc_feature 1..555: note = Description of Artificial Sequence: Synthetic coding sequence
  source 1..555: mol_type = other DNA
atggacttcgtgatgaaacaggccctgggcggggccaccaaggatatgggcaagatgctcggtggtgaggaggaaaaggatccagacgcacagaagaaggaagaggaaaggcaggaggcattaagacagcaggaggaggagcgcaaagccaagcacgcccgtatggaagctgaaagagagaaggtgagacagcagatccgagataagtatggactcaagaagaaggaagaaaaagaggccgaagaaaaggcagctctgagaggcaggggcggcggaggtcggggagagcaccctggtcacggtgcccagattccggcccgggccgccgccgggcatgtgcaagaggtgacacgcccccctgcaccagcctactctacctgttactatttcttcctcgttttgtcttttttattcatccgcttatcactgaattctgagggagagaacttaagttggcctctgccgctattccccggccagggtctgcttcccctatcctccccgtcccacctgcctagcagccaggggatacacctacaccccacacctaagtag

SEQ ID NO: 112940 - DNA, 234 bp, synthetic construct
  misc_feature 1..234: note = Description of Artificial Sequence: Synthetic coding sequence
  source 1..234: mol_type = other DNA
atggacttcgttatgaagcaagctttagggggggctactaaagatatgggcaaaatgctcggcggggaggaggagaaggatcctgatgcacaaaagaaggaagaagagcgtcaggaagccctccggcagcaggaagaggaacgaaaggcaaagcatgctcgaatggaggcagagagagagaaggtaaggcagcagatccgggataagtacggactgaaaaaaaaggaagagtag

SEQ ID NO: 112941 - DNA, 336 bp, synthetic construct
  misc_feature 1..336: note = Description of Artificial Sequence: Synthetic coding sequence
  source 1..336: mol_type = other DNA
atggactttgtgatgaagcaagccctgggcggggcaaccaaggatatgggaaagatgctgggtggcgaggaagaaaaagaccccgacgctcagaagaaagaggaggaaaggcaggaggcactgaggcaacaggaggaggaaaggaaagccaagcacgctaggatggaggccgaacgggagaaggttcgccagcagatccgtgacaaatatggcttgaagaaaaaggaggagaaggaagccgaagaaaaggcagcattggagcagccttgcgaggggtctctcactagaccaaaaaaagccattcccgccgggtgtggggatgaggaagaggaatag

SEQ ID NO: 112942 - DNA, 360 bp, synthetic construct
  misc_feature 1..360: note = Description of Artificial Sequence: Synthetic coding sequence
  source 1..360: mol_type = other DNA
atggatttcgtaatgaagcaggccttgggcggagcaaccaaagacatgggcaaaatgcttggaggagaagaggagaaggacccggacgcacagaaaaaagaagaagagcgccaggaagccctgcggcagcaggaagaggaacggaaggctaagcacgctcgtatggaagccgaacgcgaaaaagtccggcagcagattcgagataaatatggtctgaagaagaaggaagagaaggaggccgaagagaaggctgcactggagcaaccctgtgagggtagcctgaccaggcctaaaaaagccattcccgcgggctgcggagatgaggaggaggaagaggaggagagcattctcgacacatag

SEQ ID NO: 112943 - DNA, 114 bp, synthetic construct
  misc_feature 1..114: note = Description of Artificial Sequence: Synthetic coding sequence
  source 1..114: mol_type = other DNA
atggatttcgtcatgaaacaggcactgggaggcgccacaaaagacatgggcaagatgttgggaggagaggaagagaaagaccccgatgcccaaaaaaaggaggaggaacgctag

SEQ ID NO: 112944 - DNA, 405 bp, synthetic construct
  misc_feature 1..405: note = Description of Artificial Sequence: Synthetic coding sequence
  source 1..405: mol_type = other DNA
atggattttgtcatgaaacaggctctcgggggtgctacaaaagatatgggaaaaatgctcggtggagaagaggaaaaggaccccgatgcccagaagaaggaagaggagcggcaagaggctctccgccagcaagaggaagagaggaaggcaaagcacgctagaatggaagccgagagagaaaaggtgaggcagcaaatccgtgacaagtacggcttgaagaagaaagaagagaaggaggctgaggaaaaagccgctctcgagcagccatgcgaaggaagcttgactagacctaagaaggcaatccctgcaggctgcggagacgaagaggaggaggaggaggagtcgatacttgacacagtgttgaagtatctgcccggccctctgcaggacatgttcaagaaatag

SEQ ID NO: 112945 - DNA, 21 bp, synthetic construct
  misc_feature 1..21: note = Description of Artificial Sequence: Synthetic coding sequence
  source 1..21: mol_type = other DNA
atggactttgttatgaaatag

SEQ ID NO: 112946 - DNA, 2943 bp, synthetic construct
  misc_feature 1..2943: note = Description of Artificial Sequence: Synthetic coding sequence
  source 1..2943: mol_type = other DNA
atggctactgccgccacttcaccagccctgaagcggctggacttaagagaccctgctgcgctttttgaaacacatggagcagaagaaatccgtggacttgaacgccaggtgagggctgagattgagcacaagaaggaggagctaagacagatggttggggaacggtacagggacttgatcgaagcagccgatactatcggccagatgcggcgctgcgctgtcgggctggtcgatgctgtgaaggctactgatcagtattgcgcccgattgagacaggcaggttctgccgccccaaggccaccacgggcacagcagcctcagcagcccagccaggaaaagttctattccatggcggcccagataaagcttctacttgaaatccctgagaagatctggtcctccatggaagcaagccagtgtctgcatgccactcaactgtacctgctgtgttgccaccttcacagtctccttcagctggactcctccagtagccgatacagcccagtgctgtccagattccctattctcatacgacaggttgctgccgctagtcactttagatcaactattcttcatgaaagcaaaatgttgctgaagtgtcaaggagtgtctgatcaggctgtcgcagaagcactgtgtagtatcatgctgctggaggagtccagcccaagacaggctttaacagatttcttgctggccaggaaagcgaccatccagaagctgctgaaccagccccatcacggcgccggcattaaggcacaaatctgctctctcgtggagctcctggccaccacactgaagcaggcccatgcactcttttataccctgcctgaagggctgttacctgatcctgcactgccgtgtggactgttattttccacgctggaaacaataacagggcagcaccctgcgggtaaggggacgggcgtgctgcaagaggagatgaaactgtgcagctggttcaaacacttaccggcatccatagtcgaattccagccgacattgaggaccctggcacaccctatctctcaagagtacctaaaagatacgctccaaaaatggattcacatgtgcaacgaggacattaaaaacggtatcaccaatctgctgatgtatgttaaatctatgaaggggcttgccggaatccgcgacgctatgtgggaactgttgaccaacgaatcaaccaaccatagttgggatgtgctgtgtcggcggctgctagaaaagcctctgttgttctgggaggacatgatgcaacagctgttcctcgacaggctccaaacattaacaaaagagggatttgatagtatttcttctagctcaaaggagctactggttagcgccctgcaagaactggagtcttcaaccagcaatagtccctccaacaagcatatccacttcgagtataacatgtccctgttcctgtggagcgagtcccctaacgatcttccctcggatgccgcatgggtctccgttgctaatcggggccagtttgctagctccggactcagcatgaaggcccaggccatctccccttgtgtgcagaacttttgttcagctcttgactcaaagcttaaggtcaagttagatgacctgctggcttaccttccttccgacgatagctctttacctaaggacgtgagcccaactcaagcaaaaagtagcgcctttgaccgctatgccgacgcaggcaccgtgcaagaaatgctaagaacccaatctgtggcgtgtattaagcacatcgtggactgcatccgggccgagctccagtccatcgaagaaggcgtgcaggggcagcaggatgctctgaactctgccaagcttcacagcgttcttttcatggcacgactatgtcagtccctgggcgaattgtgtcctcatttaaagcaatgcattttgggaaagagtgagagttccgaaaaacccgctcgtgaatttcgtgccttaaggaagcaggggaaagtgaaaacacaggaaatcatccctacgcaggctaaatggcaggaggtgaaagaggttcttttacaacaaagtgtgatggggtaccaggtctggagtagcgctgtagttaaggtgctgatccatggcttcacacagtcactgctgctggatgatgccggatccgtgctggccacggccacgagctgggacgagctcgaaatccaggaagaggccgaatccggatcgtccgttactagcaagatcaggttaccggcccagccaagctggtacgtgcagtcttttctgttttccttgtgccaagagatcaatcgggtcggcggtcatgccttgcctaaagttacattacaggaaatgctgaagagctgcatggttcaagttgtggctgcttatgagaaattgagcgaggagaagcaaatcaagaaggaaggcgccttccctgtgacccaaaatcgcgcactccagctcctgtatgacctgcgatacctgaacattgtgttgacagccaaaggggacgaagtcaagtccggacggtccaaaccagactcacgcatcgagaaggtcacagaccatctagaagccctaatagatccatttgatctggatgttttcacccctcacctaaatagcaatctgcaccgactcgtgcagaggacctctgtgttgtttgggctggtgacaggaactgagaaccaattggcacctcgctcttccaccttcaatagtcaggaaccgcacaacatccttccgctcgcatccagccagattcgctttggacttctgcccttaagcatgacgtcaacccggaaggcaaagtccacacggaatattgaaacaaaggcccaagtggttcctcccgccagatctaccgctggggaccctactgtaccaggcagtctgtttagacaactggtgtctgaagaagacaacacgtctgccccatctctgtttaagttgggttggctgtcttcaatgactaaatag

SEQ ID NO: 112947 - DNA, 2823 bp, synthetic construct
  misc_feature 1..2823: note = Description of Artificial Sequence: Synthetic coding sequence
  source 1..2823: mol_type = other DNA
atggcaacggcagccacaagccccgccctgaagaggctggatttacgcgaccctgccgctctgtttgaaactcacggagccgaagagatacgcggacttgagagacaggtgcgagcggagattgaacacaagaaggaggagctgaggcagatggtaggcgagcggtaccgtgacctgatcgaagcagcggacacaattggccaaatgaggagatgcgccgtggggctcgtggacgcagttaaagccacagatcaatattgcgcgcgactgcgtcaggcaggtagcgccgcaccgcggccaccaagagcacagcagccccagcagcccagtcaggagaagttctactcgatggcagcgcagataaaactacttttggagatcccagagaaaatttggagctccatggaagcctcccagtgcctccatgctacacagttatacctattatgttgccatttacactccctgctgcagttggacagttctagctcccgctatagccctgtgctgtcccggttcccaatcctcataagacaggtagccgctgcatcacacttcagatccacgatcttacacgaaagtaaaatgctcctgaagtgccagggggtgagcgaccaggcagtcgcagaggcgctttgcagcatcatgctgcttgaagaaagttcaccaaggcaggcactgacagactttcttttggcgcggaaggcgactatccagaagctccttaatcagccgcaccacggggccggaattaaggctcaaatatgtagcctagtagagctgcttgccactacgttaaaacaggcacacgccctgttttacactctaccagagggcctgctgccagatccagccctgccttgcggactactgttcagtacgttggagacaatcactggacagcatcccgctggcaaaggcactggcgtcttgcaagaagagatgaaactgtgcagttggttcaagcatttgcctgcctccatagtggagttccagcctacattgaggacgctggcacatcccatctcccaagagtatctgaaggacacgctgcagaagtggattcatatgtgcaacgaggatattaagaacggcattacaaacttgctgatgtatgtgaaaagcatgaagggacttgcgggtatcagggacgctatgtgggagctcctgacaaatgaatctacaaaccacagctgggacgtgctgtgccgacgacttctagagaagccactcctgttctgggaagatatgatgcagcagctctttctggatcgactgcagacgctgactaaagagggctttgacagcattagctcatccagtaaggaacttctggtctccgctctccaggaattggaatccagtacaagtaattccccttctaacaagcacattcactttgaatataacatgtctctcttcttatggtcagagtctcctaacgacctgccctcggacgctgcttgggtgtccgtggcaaacagaggacagttcgcttcctcaggcctttctatgaaagcccaggccatcagcccatgcgtccagaatttttgcagcgctcttgatagtaaactaaaagtgaagctggacgacctgttggcttacctgccttccgatgactcaagcctcccgaaggatgtgtctcccacccaggccaaatccagcgcctttgataggtacgccgacgccggcactgtccaggaaatgttaaggacacagagcgtggcctgcatcaagcatatagtggactgcatcagggcagagctacaaagtatcgaggagggtgtacagggtcagcaggatgcactgaacagtgctaagttgcatagtgtcctcttcatggcccgcctgtgtcagtccctcggcgaactgtgcccccacctgaaacagtgcatcctgggcaagtctgagagctccgaaaaacccgccagggaattcagggccctgagaaagcaagggaaagtcaaaacacaagagattatacccactcaggccaagtggcaggaggtcaaagaggtgctattacaacagtccgtcatgggctaccaggtctggtccagtgccgtcgtgaaagtcctaatccacgggtttactcaaagcctcctgctggatgacgcgggtagcgttctggccacggctacaagttgggatgaactcgaaatccaggaagaggccgaaagtgggagtagtgtaacatcaaaaatcaggctccccgctcagccttcttggtacgtgcaaagctttcttttttcactatgccaggaaatcaatcgggttggcggccacgcactccctaaggtaaccctgcaggagatgttaaagtcctgtatggtccaggtggtcgcagcatacgagaagctgtccgaggaaaagcaaatcaaaaaggaaggcgccttcccagtcacacagaaccgggccttgcagttgctgtacgatctgagatatctgaacattgttctcacagcaaaaggcgacgaggtcaagtctggccgatctaagcccgattcacggatagagaaagtaaccgaccacctggaggccttgatcgacccgtttgatctggacgttttcacccctcatctgaatagcaatttacaccggctggtacagcgaacctctgttctgttcggactggttacaggcactgagaatcagctggctccgcgtagctcgacatttaactcccaggaacctcataatattctccccctggctagttcacaaataaggtttggcctgctgccactgtcgatgacttctacccgaaaagcaaaatctacaaggaacatcgagaccaaggcccaatacgacgccaactgctag

SEQ ID NO: 112948 - DNA, 2214 bp, synthetic construct
  misc_feature 1..2214: note = Description of Artificial Sequence: Synthetic coding sequence
  source 1..2214: mol_type = other DNA
atggagaagagtaggatgaatctacctaagggccccgatactctgtgttttgacaaggacgaatttatgaaagaagatttcgatgtggaccattttgtctctgactgccgtaaacgcgtgcagctggaagaactgcgcgacgatttagagctgtattacaagttgctgaaaactgcgatggtagaactgattaacaaagactacgcagattttgtgaatctctccaccaatctcgtgggaatggacaaagccctcaatcagttgtctgtgccactggggcagctccgggaagaagtgctctcactgcggagctccgtaagcgaggggatccgcgcagtagatgagcgcatgtccaaacaagaggacattaggaagaaaaagatgtgtgtgctacgcctcatccaagtgatccgttcagtggaaaaaattgagaaaatactgaacagccaaagttccaaggagaccagtgctctggaggccagctctcctttactgaccgggcagattctggagcggatagcaaccgagttcaaccagctgcaattccacgccgtgcaatctaagggaatgcctttactcgacaaagtgaggcctagaatcgcaggcataactgccatgctgcagcagagccttgagggtctgcttctggaaggtctccaaacgagtgatgttgacattatacgccattgcctccggacatacgcaacgatcgataagactagggatgcggaggcccttgttgggcaggtccttgtcaagccctacatagatgaagtaatcattgagcagttcgtggaatcccacccaaatggactgcaagtgatgtacaacaaactgctggagtttgtcccgcaccactgccgcctgctgcgggaggttaccggaggagctatcagctccgagaaaggcaatacagtgcctggatatgactttctagttaattccgtgtggccccagatagtgcagggattggaggagaaactgccgtccctgtttaatcccggcaacccggatgcctttcacgaaaaatacactattagcatggacttcgtgcgtagacttgaaaggcagtgtggtagccaggcatctgtcaagaggctgcgggctcatcccgcctaccattctttcaacaaaaaatggaatctacctgtgtacttccaaatcagattccgggagatagccggtagcctggaggctgccctgaccgacgtattggaagatgcgccagcagagtcgccctactgcctcctcgccagtcatcggacctggagctctctcagacggtgctggagcgacgaaatgtttctccccctacttgtccacaggctctggcgccttacactccaaatcctggctaggtattccgtgttcgtcaatgagctctcacttcgaccaatctcaaacgaatcacccaaggagattaaaaaacccctggtcacagggtctaaagagccttcaatcactcagggaaatacggaggatcaagggtcgggtcctagcgaaaccaaaccagttgtgagtatctctcggacccagctggtttacgtggtggccgaccttgataaattgcaagaacagctgccggaattactggagatcattaagcctaagcttgaaatgatcgggttcaaaaacttcagcagtatctctgccctagaagattctcaaagcagcttctccgcctgtgtccctagtctgagcagcaaaataatacaggatctgagcgatagttgcttcgggttccttaagagcgctctggaagtgccacgcctgtaccgccgcacaaacaaagaggtgcctactacggcatcttcctacgtggacagcgctttaaagcccctgttccagttgcagagtggccataaagataagctcaaacaggcaatcatacaacagtggcttgaaggcaccctcagcgagagtacccacaaatattatgagaccgtttctgatgttttgaactcagttaaaaagatggaggagtctttgaagagactgaaacaggccaggaagaccacacctgctaatccagtagggccatccggcggcatgagtgatgacgataaaataagactacaactcgctctggacgtggagtacctgggagaacagatccagaaactaggtctgcaggcatcggacatcaaaagcttctctgctctagcggaactggtggcggcggccaaggatcaggcgaccgccgaacagccttag

SEQ ID NO: 112949 - DNA, 2217 bp, synthetic construct
  misc_feature 1..2217: note = Description of Artificial Sequence: Synthetic coding sequence
  source 1..2217: mol_type = other DNA
atggaaaagtcgaggatgaaccttccgaaaggtcccgacactctgtgtttcgacaaagacgaattcatgaaggaagacttcgacgtcgaccacttcgtgtccgattgtcggaaaagggttcagttggaggaactccgagatgacctcgagctgtattacaagctgctaaaaactgccatggttgaattaattaataaagactatgctgactttgtgaatttgagcacgaatctcgttgggatggacaaagccctcaatcagctctcagtgccactgggacagctaagagaggaagtactctcactcaggtcaagtgtgtccgagggaattagagccgtcgatgagagaatgagcaaacaggaggacattcgaaaaaagaaaatgtgtgttttgagactcattcaagtgattaggtccgttgaaaagatcgaaaaaatcctgaattctcagagcagtaaggagacaagtgcactggaggcaagctcccccctgctgacaggtcaaatcctggaaagaatcgccacggaatttaaccagctccaattccacgccgtgcagtcaaaaggaatgcctctgctcgacaaggttcgcccacgcattgctggtatcactgctatgctgcagcagagcctggagggcctgcttctggagggattgcagacttctgatgtcgatatcattaggcattgtctcaggacctacgccacaatcgacaagactcgagatgccgaagcccttgtggggcaggtgctggtgaaaccttatatagacgaggtcatcattgagcaattcgtggaatcgcacccaaacggcttgcaggttatgtataacaagctgctggagtttgtaccccatcattgccgccttttgcgcgaggtgaccgggggagcaatctccagcgagaaagggaacacagtgcctggatacgattttctggtgaattccgtctggccacaaattgtccaggggttggaggagaagctgccaagcctctttaatcccggtaaccctgacgcttttcacgagaagtatactatctccatggatttcgttcggaggctggagcggcagtgtggctctcaggcctctgtgaagcggctgcgggcccatcctgcctaccactcattcaacaagaaatggaaccttccggtgtactttcagatcagattcagggaaattgcagggagcctcgaagccgcccttaccgacgttcttgaagatgcgcccgccgaatcaccatattgcctgctagcctcccatcgcacatggagcagcctgagacggtgttggagtgacgaaatgtttcttccactcctagtccataggctgtggaggctaacgttacaaatcctggctcggtattccgtctttgtgaacgagctgtccctcaggcccatcagcaacgagagtcccaaggagattaaaaagccactagtaactggcagcaaggagcccagcattacacagggtaatacagaagaccagggctctgggccctccgaaaccaaaccagtggtgtccatatctaggacccagctggtctatgttgtggctgatttggataagctccaagaacaactcccagagctactcgaaatcattaaaccgaagctggagatgatcggcttcaaaaacttttccagtatatctgcggccttagaagattctcagagcagcttcagcgcttgtgtgcctagcctcagcagtaaaattattcaggatctgtctgactcctgttttggcttcctcaagtctgccctggaagtgccacgcttataccgaaggaccaataaggaggttcccacgacagctagttcctacgttgacagcgctctgaagccgctatttcaacttcagtcagggcataaagataaactgaaacaagccatcatccaacaatggttggaaggtactctctctgagtcgactcacaagtactacgaaacagttagcgacgtgcttaattcagtcaagaaaatggaagagtctctcaagcggctgaagcaggcacggaaaaccactcctgccaatccggtggggccgtccggggggatgagcgatgacgataagatcaggttacagctggccctagatgttgagtatttgggcgagcagatccagaagctggggctccaggcgtcagatatcaaatctttctccgctctcgccgagttagttgcagcagccaaggatcaggctacagctgagcagccctag

SEQ ID NO: 112950 - DNA, 2040 bp, synthetic construct
  misc_feature 1..2040: note = Description of Artificial Sequence: Synthetic coding sequence
  source 1..2040: mol_type = other DNA
atggtcgagcttatcaacaaggactatgcagactttgtcaacctgtctactaatctcgtaggaatggacaaggcactaaatcagctcagcgtgcccctgggccaactgagagaagaggttctgtccttgagaagtagcgtatccgagggcattcgtgcagtggatgagcggatgagtaaacaggaagatatcagaaagaaaaagatgtgtgtgctgaggttgatacaggtcatacgcagcgtagagaagatcgaaaaaatcttgaattctcagtcatctaaagagacgtccgctctagaggctagctcaccactgctcactggacaaattctcgaacgaattgccaccgaattcaatcagctccagtttcatgccgtgcagtccaagggaatgcctttgctcgataaggtgcgcccgaggatcgcgggcatcacggctatgcttcagcaatcactcgagggactgcttctggaaggtctgcagacctcggacgtcgacattattcgccactgtctccggacgtacgccaccatagacaagacacgtgatgctgaggccctcgtcggacaggtcctggtgaagccatatattgacgaggtgattatcgaacaatttgtggaaagccatcccaacggactgcaggtaatgtacaacaaacttctggagtttgtcccgcaccactgtagacttctacgtgaagtgacaggaggggcgatcagctccgagaagggaaacaccgtccctggatatgatttccttgtcaactcagtctggcctcaaatcgtgcagggactcgaggaaaaacttcctagtctcttcaatcccggcaatcctgacgccttccacgagaaatacaccatctcgatggattttgtgcggcggcttgagcgtcagtgcggctcgcaggcttccgtgaagcgattacgggcacacccggcctaccactccttcaataaaaaatggaaccttcctgtttactttcagatccggtttcgggaaatcgcagggagtctggaggcagctcttaccgacgtgctcgaggatgccccggcggagtcaccatattgcttattggccagccacagaacatggagctctcttagaaggtgctggagtgacgagatgtttctccctttgttggtgcacagactgtggagacttaccctgcagattctggctcgttattcagttttcgtgaacgagctgtcattacggccgatcagcaatgagtcccccaaggagatcaagaaacctctggtcactggctccaaggagcccagtatcacacaggggaatacagaggatcaaggcagcggccccagcgaaaccaaaccagttgtctcaattagcagaacccagcttgtgtatgtggtggctgatctcgataagctacaggagcagcttccagaactgctggagattataaaaccaaaacttgagatgatcgggttcaaaaacttttcgtcaatatccgccgctcttgaagacagtcaatccagttttagcgcttgtgtacccagcctgagctctaagatcatccaagatttgtctgactcttgtttcgggtttctgaaaagcgctctagaggtcccacggctgtataggaggacgaataaggaggtacctaccacagcctcttcatacgtcgactcagctctgaaaccactgttccaacttcaatctggacacaaggacaaactgaaacaagcaattattcagcagtggctggagggaactctttctgagagtactcataaatactatgagaccgtgtccgatgtgttgaacagtgtcaagaaaatggaagagtccctgaagcgtctgaaacaggcaaggaaaactacccccgcgaaccctgtgggaccgtctggcggcatgtctgatgacgataaaatcagattacagttggccctggacgtcgaatacttgggagaacaaatccagaagcttggccttcaggccagcgatataaagtctttctcggctctggcggagctcgtggccgctgccaaagatcaagctactgcggaacaaccatag

SEQ ID NO: 112951 - DNA, 1869 bp, synthetic construct
  misc_feature 1..1869: note = Description of Artificial Sequence: Synthetic coding sequence
  source 1..1869: mol_type = other DNA
atgtctaagcaggaagatatcagaaaaaagaagatgtgcgtgctcaggctgatccaggtcattaggagcgttgagaagattgaaaagatcctcaacagccagagctccaaagagacaagtgcactggaggccagctcaccgcttctgacagggcagatattggagcgcatcgcaaccgaatttaaccagttacagttccatgctgtgcaaagtaaggggatgccactccttgacaaggtcagacccaggatcgctggtattacagctatgctacagcagtccctagaagggctcctgctcgagggtttgcagacatctgacgttgacatcattcggcactgtctacgtacctacgcgactatcgacaagactagggacgccgaggccctggttggacaggtgctcgttaagccttacatcgacgaggtgataatcgaacagtttgttgagtcgcacccaaatgggctccaggtgatgtacaataagctactggagttcgtacctcatcactgccgcctcctgcgggaagttacaggtggggccatttcttccgagaagggaaacactgtgcctggctatgactttttggtgaattctgtgtggccccagattgttcagggccttgaagaaaaactgcctagtctcttcaatccaggtaatccagatgccttccacgagaagtatactatttccatggacttcgtgcgccggttagagcgtcagtgtggatctcaagcctccgtgaagaggttgcgcgctcaccccgcatatcattcttttaacaagaagtggaatctcccagtgtacttccagataaggttccgagaaattgcaggcagccttgaagcagctttgacagatgtgctggaggatgctcctgctgagagtccctattgccttctcgcctcccataggacatggtctagcctccgaaggtgctggtcagacgagatgttcctgcccctcctggtacataggctctggaggctcaccctccagattttggctaggtactctgttttcgtcaatgaattatccttgaggccaatttctaatgagtctcccaaggaaatcaaaaaaccccttgtcacgggctccaaagagccttctatcacacagggcaatactgaggatcagggtagcggtccttctgagacgaaaccagtagtgagcatctcaagaacgcagctggtgtatgtcgttgcagatctggataaactccaggagcagctgcccgaactgctcgagattattaaacctaagctggaaatgatcggcttcaagaacttttccagtattagcgccgcattggaggatagccagtcatcctttagcgcatgcgttccttctctgtcgagcaagattatacaggatctgtccgactcctgcttcgggttcttaaagagtgctctcgaggtgccaagactgtatagacgaactaataaggaggtgccaaccacagccagttcctatgtggatagcgccttgaagcctctatttcagctgcagtctggacacaaagacaagctgaaacaggctattatccagcaatggttggaaggaaccctatccgagtctactcacaagtattacgaaacagtgtctgatgtcctgaattctgtcaagaaaatggaagagagtcttaagcggctcaagcaggcccggaaaaccaccccagccaaccccgttgggccctccggtggcatgagcgacgatgacaagatcaggctgcagctggctctggacgtggagtatttgggcgagcagatccaaaagctggggcttcaggcttccgatatcaagtcattctctgctctcgccgagttggtcgctgctgctaaggatcaggccacggcagagcagccgtag

SEQ ID NO: 112952 - DNA, 1284 bp, synthetic construct
  misc_feature 1..1284: note = Description of Artificial Sequence: Synthetic coding sequence
  source 1..1284: mol_type = other DNA
atgggcttcgccatggaggatacagaagacatcagtcaaaaccattttgggcatttatgcatctttaagtgggggcattggaagaaagacttgaagtacacgatctcgatggacttcgtacgacgtctagagcgacaatgcgggagtcaagccagcgtcaagcgcctgcgggcacacccggcctatcactcatttaataaaaagtggaacttgcccgtgtacttccagattaggtttagagagatcgcagggtcactggaagccgcgctcactgacgtactggaggatgcacctgcggagtcgccctactgcctgctggcgtcccatcggacctggtccagcctgcgacgatgttggtccgacgagatgtttttgccactgctggtccacaggctgtggcggctcactttgcagattttggctcggtactcggtgttcgtgaacgagctcagcctgaggcccattagtaatgaatctcccaaggagattaaaaaaccactagttactggatcaaaggaacctagcataacgcagggaaatacagaggatcagggatctgggccttccgaaaccaagccggtcgtctccatatctcgtacgcagttagtctacgtggtggctgacctggacaaactccaggagcagctacccgagctgcttgaaattatcaaaccaaagctggagatgatcggttttaagaatttcagctctatctccgctgccctggaggatagtcaatcaagcttttcggcctgcgttcctagcttgtccagtaaaattatccaggatctgtcagactcttgctttggcttcctgaagagtgcactagaggtccctcgcctatatagacgaactaataaggaggtgccgaccacggcctccagttacgtggactccgcgctgaagccacttttccagctgcagagtggccataaggacaagctcaaacaggcaatcatccagcagtggctggagggaactctatctgaatctacgcataagtactatgaaacagtgtctgacgtccttaattcagtcaaaaaaatggaagagtctttaaagcggttaaagcaagcacgtaagacaactccagcaaatccagtaggcccttcaggagggatgagcgatgacgataaaattagactccaacttgccttggacgttgagtaccttggcgagcaaattcagaaactggggctgcaggccagtgatataaaatcattttctgctctcgcggaactcgttgctgctgccaaggatcaagccactgctgaacagccatag

SEQ ID NO: 112953 - DNA, 2487 bp, synthetic construct
  misc_feature 1..2487: note = Description of Artificial Sequence: Synthetic coding sequence
  source 1..2487: mol_type = other DNA
atggccgaagctgccctgctcttattgccagaggctgccgctgagcgtgatgcccgggagaagcttgctctatgggaccggcgccctgatactactgcacctttgactgatcgccaaacagacagcgtactagagctaaaagccgccgcggagaatctacctgtcccagcagagctccctattgaggatttgtgctccctgacttcccagtccttgccgatagagctaacttccgtggtgcccgagtccactgaggatattctgctcaagggtttcacatctctcggtatggaggaagagcgcatcgaaacagctcagcagttcttcagttggtttgcaaagctgcagacgcagatggatcaggacgagggaaccaagtatcgtcagatgcgtgactacctctccggtttccaggaacagtgcgatgccatcctcaatgatgtgaattcagccttacaacatctagagtccctccagaaacaatatctgttcgtgtcgaataaaacaggaactctgcatgaggcatgcgaacagctgttgaaggaacagagtgagctggtagatcttgccgaaaatattcagcagaagctgtcttactttaacgagcttgagaccattaatactaagttaaattctccaaccctctccgtgaacagtgatggattcatccctatgcttgccaagcttgatgactgtattacctacattagttctcatcccaacttcaaggactaccctatttacctgctgaagttcaagcagtgcctgtccaaggctctgcatttgatgaagacttatactgtgaatactctgcagacccttacctcccaattgcttaaacgcgaccccagcagtgtgccgaacgcagataacgcctttacactgttctacgtaaagttcagggcggcggccccgaaagtgcggaccctgatagaacaaatcgagctgcgcagcgaaaaaattcctgaataccagcagctgctgaacgacatacaccagtgttatctggaccagagggagctcctgctgggaccttccatagcctgtacggtggccgaattaaccagtcagaataacagagaccattgcgcgctggtgcgaagcgggtgcgccttcatggtgcacgtgtgtcaggatgagcatcagctctataatgagttttttacaaaacccaccagcaaattggacgaacttctagagaagttgtgtgtgagcttgtacgacgtcttccggccccttatcattcacgtgatacaccttgaaacccttagcgagctttgtggcatcctcaagaatgaggtgctggaggatcacgtccaaaacaatgccgaacagctcggcgctttcgcagcaggtgtgaagcaaatgcttgaagacgttcaagaacgattggtctatcgaacccatatctacatccaaacagatattacgggctacaaaccagctcccggggatctggcataccctgacaagctcgtcatgatggaacagatcgcccaatccctcaaagacgagcaaaaaaaggttccttctgaggcaagcttctccgacgtccatctcgaggagggagaatcaaactcgcttaccaaatctggatcgacagagtcactgaacccaagaccacaaactacaataagtcccgctgatctacatgggatgtggtacccgacagtgcggcggactctcgtttgcctgagtaaactatataggtgtattgatcgcgccgtgtttcaggggcttagtcaggaggccctgagtgcctgcattcagagcctgttgggagcaagcgagtcaatctcaaagaataaaacccaaattgatggacagctgttcttaattaaacatctccttatcctccgggaacagatcgctccctttcacacggagtttactatcaaggagatctccctggatctcaaaaaaactcgggacgcggccttcaagattctcaaccctatgacagttccgcgcttttttcggctgaacagcaataatgcacttatagaatttctattggagggaaccccagagatcagagagcactacttggacagcaaaaaggacgtcgataggcatctgaagtccgcttgcgaacagttcatccagcagcaaacaaaactgtttgtcgagcagttggaggagtttatgaccaaggtttccgccttaaaaacaatggcgagtcagggaggcccaaaatatactctgtcacagcagccatgggcccagccagctaaggtgaacgatcttgccgcaaccgcctataagaccattaagacaaagctccctgttaccttgcgctccatgtctctctatctgagcaacaaggatacagagttcatcctgtttaagcctgttcgaaataacatccagcaggtgtttcagaaattccacgcgctacttaaggaggagtttagtcccgaggatatccagattattgcctgcccttcgatggagcagctgagccttctgctcctggtgtcaaagtag

SEQ ID NO: 112954 - DNA, 2370 bp, synthetic construct
  misc_feature 1..2370: note = Description of Artificial Sequence: Synthetic coding sequence
  source 1..2370: mol_type = other DNA
atgggcacaaaaatggcggatttggacagcccaccaaagctgtccggagtccagcaaccaagcgagggggtagggggcggccgatgcagcgagatttccgcggagttgattaggagcctcacagaactgcaggaactagaagcggtctatgagcgcctatgcggagaagaaaaagtcgtcgagagagaactcgatgcactgctggagcagcagaatactatcgaatcaaaaatggtgacgctccaccggatgggccccaacttgcagttgatcgagggcgacgctaaacagctcgcgggaatgatcacctttacttgtaaccttgccgaaaacgttagctcaaaagtgagacaacttgatcttgctaagaatagactgtaccaggctattcagcgcgccgacgacatactggatctgaaattttgcatggacggcgtgcagacagccctgcgatcagaggactacgagcaggcagccgcccacacgcatcggtacctgtgcctcgacaagagtgtgatagagttgtctcgtcagggcaaggaggggtctatgattgacgccaatctcaagttactgcaggaggccgagcagaggcttaaagccatcgtggccgagaaattcgccatcgctactaaagagggggatctcccccaggtggagaggttcttcaagatcttccccctcctagggttacacgaggagggattgaggaaattctctgaatacttgtgtaagcaggtggccagcaaggctgaggagaatctgctgatggtcctgggaacagacatgagtgacaggcgagcagctgttatctttgccgatacgctgacactactcttcgaaggcattgctcgaatcgtcgagacgcaccagccaatcgtggaaacctattatggacctggacgactgtatacactcatcaaatatctccaggtcgagtgtgataggcaagtggaaaaagtagtggataagttcattaagcagcgcgactaccatcagcaatttcggcacgtccaaaacaacctgatgaggaattctaccacagagaagatcgagccgcgagagctggaccctattctgacagaggtgactttaatgaatgccagatcggagctctacctccgatttcttaagaagagaatttctagcgactttgaagttggggactctatggcttcggaggaggtcaagcaggaacaccagaagtgtctcgacaaattgctgaacaactgcctcctcagttgtacaatgcaagagctgataggattatatgtgaccatggaggagtattttatgcgggagaccgtcaacaaagcagtggctctcgacacttacgagaaaggacagctcacaagcagcatggtggatgacgttttttacatcgtgaagaagtgcatcggcagggcgctcagcagtagtagtattgactgtctctgtgcaatgatcaacctcgcaactaccgagctggagtccgattttagagatgttctgtgcaacaagctcaggatgggcttcccagcaaccactttccaggacatccagagaggtgtgacctccgcggtaaatatcatgcattcatctctgcaacaggggaagtttgacaccaaaggtattgagagtaccgacgaggctaagatgtcattcctggttacgttgaataacgttgaggtttgctccgagaacatttctacattgaagaaaacactggagagtgattgcaccaagctgttctctcaagggatcggcggagagcaggcgcaagctaagttcgattcatgtctgtccgacttggccgccgtaagcaataaatttcgcgatctgctgcaggaggggctgacagagttgaattcaaccgccatcaaaccccaagtgcagccttggattaacagttttttctccgtaagccataacattgaggaagaggaattcaacgactatgaggccaatgatccatgggtgcagcagttcatcctaaacctagagcagcagatggcggagtttaaagccagtctgtctccagtaatttatgatagcctcaccggtctgatgaccagtctggtggcggttgaactggagaaggtggtcctaaaaagcaccttcaacagattgggagggctgcaatttgacaaagagctgcgaagccttatcgcctacctcaccaccgtcacaacctggacaattcgtgataaatttgcccgactgagtcagatggctacaattttgaatctggaacgtgtgacagagattctggactattggggccctaactctggccccctgacctggcggcttacgcccgcagaggtacgacaggttctggcccttcggattgacttccgctccgaggacatcaagaggctgcgcctgtag

SEQ ID NO: 112955 - DNA, 2295 bp, synthetic construct
  misc_feature 1..2295: note = Description of Artificial Sequence: Synthetic coding sequence
  source 1..2295: mol_type = other DNA
atggctgacctagacagcccccccaagctgagcggtgtgcagcaaccatccgagggggtaggtggaggccgctgttccgaaatttccgccgagctgatcaggtcgctgacagagttacaggagctggaagcagtgtacgagagactgtgtggcgaagagaaggttgtggagcgtgaactggatgctctactggagcagcagaacacaatcgaatcaaagatggttactttgcatcgcatgggacctaacctccagctaatagaaggggatgccaagcaacttgccggcatgatcacatttacctgcaatcttgccgagaatgtgtcttctaaggtgcgccagctcgacctggccaaaaatcgtctgtaccaagccattcaaagggctgatgatattctagacctgaaattttgcatggacggggttcagaccgctctccgatctgaggattatgagcaggccgctgcacacactcatcgttacttgtgtctggacaagtctgtgatcgagttgagcaggcaaggcaaggaggggagcatgatagatgccaatctcaaactactccaggaggcggagcagagactcaaagccatcgttgccgagaaatttgctattgcaactaaagagggagaccttcctcaggtcgaacggtttttcaagattttcccactcttgggtcttcacgaggagggactgaggaagttcagcgaatatctgtgcaaacaagtggcctctaaggcggaggagaatctcctgatggtgttaggcacagacatgtccgatagaagagccgcagtgattttcgccgacaccctgaccctcctgttcgaggggatagccaggatcgttgaaacgcaccagcccattgtcgaaacgtactatgggcccggacgtctttatacactcattaagtatcttcaggtggaatgtgaccggcaggtggagaaggtggtggataagtttattaagcagagggattatcaccaacaattccgacacgtacagaacaaccttatgcggaattctactaccgagaaaatcgagccacgcgaactggaccctatcctgactgaggtgaccctgatgaacgctaggtctgaactttatttgcggtttttgaagaagcgcatatccagcgatttcgaggtgggcgatagtatggcgtcggaggaggtgaagcaggagcaccagaaatgcctcgataaactcctgaataactgcctgttgtcttgtaccatgcaggaactcattggactttatgtgacaatggaagaatatttcatgcgggagacagtgaacaaagccgtggctcttgatacttatgagaaaggccaactgacaagttctatggtcgacgatgtgttctatatagtgaaaaaatgtatcggccgcgccctctcttcttcctctatcgattgcctatgcgcaatgataaacctggctaccacagagctggaaagtgatttccgtgatgtgctgtgtaacaagctcaggatgggcttcccggccacgacatttcaggacattcagcgtggggtgacctctgcggtgaatataatgcacagcagtctccaacaggggaagttcgacaccaagggcatagagagcacagatgaggccaagatgtctttccttagtgactgcaccaaactcttctcccagggcataggaggtgagcaggcccaggccaagtttgactcttgcctcagcgacctggcggcagtttccaataagtttcgcgaccttcttcaggaaggcctgaccgaactcaatagcactgctattaagccacaagttcagccttggattaattcattttttagcgttagccataacattgaagaggaggagtttaatgattacgaagccaatgacccatgggtacagcagttcatactaaacttagaacagcagatggcggaattcaaggccagtttatcgccagttatctatgatagcctaaccggactaatgacatcactcgtggccgtggagctggaaaaggtagtgctgaagtctacttttaataggctaggcggtttgcaatttgacaaagagttgcgatctctgattgcctaccttaccaccgtcactacctggacaatcagggacaaatttgcacgactaagccaaatggccaccatccttaatctggaaagagtcaccgaaattttagactattggggccccaactccgggccactgacctggaggcttaccccagctgaggttcggcaagtgctggctctcagaatcgatttcaggtccgaggacatcaagagacttaggctctag

SEQ ID NO: 112956 - DNA, 1014 bp, synthetic construct
  misc_feature 1..1014: note = Description of Artificial Sequence: Synthetic coding sequence
  source 1..1014: mol_type = other DNA
atggctgatttggattcgccccctaagctctcaggcgtgcagcaaccaagtgagggggttgggggcggtaggtgctcagagatctctgccgagctgattaggtcgctgaccgagttgcaggagcttgaggctgtgtacgaaagactttgtggcgaagagaaggtcgtggagcgagagttggacgcgctgctggagcagcagaacacaattgagagtaaaatggtgacgctgcatcgcatggggccaaatctgcagctgatagaaggggacgcaaagcagctcgccggcatgataactttcacttgtaatctcgccgagaacgtatcctctaaggtccgccagctagatctcgccaagaacaggctgtaccaagccattcagcgtgctgatgatatcttagacttaaagttctgtatggacggagtgcagactgcgctccgcagtgaggattatgagcaggctgcagctcatacccacagatatctgtgcctagataagagtgtgattgaactgtcacgccaagggaaggaaggcagcatgatagacgcaaatctcaagctgctccaagaagctgaacagcggctgaaagctatagtggcagagaaattcgcaatcgcgactaaagagggggatctgccacaagtggagcggttcttcaagatcttcccccttctgggcctccatgaagagggcttgcggaagttctccgagtacctatgcaagcaggtggccagcaaggccgaggagaacttactcatggttctggggaccgatatgtccgataggagagccgcggtaatcttcgccgatactttaactctcctgtttgaagggattgctagaatagtcgaaactcatcagcccatagtggaaacatattatggccctggccgcttatacacactgatcaagtacctccaagttgagtgtgatcgccaagtggagaaagtcgtcgacaaattcataaaacagcgcgattaccatcagcagaacttcgtgttcagcttcttttag

SEQ ID NO: 112957 - DNA, 1344 bp, synthetic construct
  misc_feature 1..1344: note = Description of Artificial Sequence: Synthetic coding sequence
  source 1..1344: mol_type = other DNA
atgcgcaattccaccacagaaaagatagaaccgagggaactggatcccatccttaccgaggtaaccttaatgaacgccagatccgagctgtacttacgatttttaaaaaaacgcatctccagcgactttgaggtgggagatagtatggcaagcgaggaggtgaagcaggaacaccagaagtgcctggacaagttgcttaacaattgtctgcttagctgtaccatgcaggaattgatcgggctctatgttaccatggaggagtactttatgagggagaccgtgaataaagctgttgctctggatacttacgagaaaggacagcttacttcctccatggtggacgacgtattctacattgtcaaaaagtgtattgggagagctctttcttcaagtagcattgactgtctgtgcgcgatgatcaacctcgccactactgagctggaatccgatttcagggacgtactgtgcaacaaacttcggatgggttttccggctactacattccaagatatccagcgtggggtgacaagcgctgtgaacatcatgcattcatccctccagcaagggaagttcgacaccaagggaatcgagtccacagatgaagcaaagatgtccttccttgttaccctgaataatgtggaggtctgttcggaaaatatcagcactctgaaaaagacccttgaaagcgattgtaccaagttgttcagccagggcattggcggcgagcaggcccaagctaagttcgacagctgtctgtcagacctagccgctgtctcgaacaaattccgggatctgttgcaagaggggctgacagaactgaacagcaccgctattaaaccacaggtccagccgtggatcaactctttcttttcagtgtcgcacaatatcgaggaggaagagtttaacgactatgaagccaacgatccctgggttcagcagttcatcctgaatctggaacagcagatggccgagttcaaggcgagcctgagtccagtgatttatgacagcctcaccggccttatgacctctctcgtcgcagttgagcttgagaaggtggtactgaaatccacatttaacagattgggcggcctgcagtttgacaaggagctccgcagcctgatagcttatttaacaaccgtgaccacatggacaatcagggataaatttgcacgcttgtcccagatggccaccatactcaatctagagcgcgtcaccgagatattggactattgggggccgaactctgggcccctcacatggcgcttgactccagccgaagtgcggcaggtgttagccctgcgtatcgactttaggtctgaggacatcaagaggctcaggctgtag

SEQ ID NO: 112958 - DNA, 2583 bp, synthetic construct
  misc_feature 1..2583: note = Description of Artificial Sequence: Synthetic coding sequence
  source 1..2583: mol_type = other DNA
atggggtgggtaggggggcgccgcagagattctgcaagtccaccgggccgtagtcgctcagcagcagacgacattaatcctgcaccagccaatatggaaggaggaggcggcagcgtagccgttgccggtctcggagccagaggctcaggcgctgctgctgccacagtccgcgagctgttgcaggatgggtgctattctgactttctgaacgaggacttcgacgtgaaaacctacacttcccagtctattcatcaggcagtcattgccgaacaactggcaaaacttgcccaagggatatcccaacttgatcgagagctccatttgcaggtagttgctcgtcatgaagatctcctcgcgcaggccacagggatcgagtcgctggagggggtccttcagatgatgcagacccggattggagcgctgcagggggccgtggatcgtattaaagccaaaatcgttgagccttacaacaagatagttgcacggacagcgcagctggcccgattacaggtggcttgtgatcttctgcgcagaatcataaggatactgaatctgagtaagcgcctccaagggcaactgcagggcgggagtcgcgagatcaccaaggcagcacaatctctaaatgaactggactacttgtctcagggcatcgacttaagtggaattgaggtcatcgagaacgacctattgttcatcgctagagcccggttagaggtcgaaaaccaggcaaagcgcctccttgaacaagggctcgagactcagaatccaacacaggtgggcacagccctacaggtgttctacaatctggggactttgaaggataccattacttcagtggtggacggttactgcgcaacgttggaggagaatatcaattccgcactcgacatcaaggtcctcactcagccttcccagtccgctgtgcgaggggggcctggacgatcgacaatgcccacccctggcaatactgccgccttgcgcgcttctttttggacaaatatggaaaaattaatggaccacatctacgctgtttgcggccaagtgcaacatctccagaaggtgcttgctaaaaaaagagatccagtgagccacatctgttttatagaagaaattgtgaaggacggacaacccgaaatcttttacacattctggaactccgtaacacaggctcttagctctcagtttcacatggccaccaatagttccatgtttctgaagcaggcattcgagggggaatacccaaaactccttcggctgtacaatgatctatggaagcggctgcagcagtattctcaacatatacagggcaattttaacgcttctggaaccacggatctctatgtcgacctccagcatatggaagacgacgctcaggatattttcataccaaagaagcctgactatgaccctgaaaaggctctaaaggattctctgcaaccttacgaggccgcctacctctccaagtcactatcacggctcttcgacccaatcaatctggtgttcccccccgggggccgcaacccccccagcagcgatgaactcgacggcattattaaaacaatcgctagcgaacttaatgttgccgcagtggataccaatctgaccctggctgtgagtaaaaatgtggccaaaacgatccagctgtatagcgttaaatctgagcagctcctctccacccagggcgatgccagtcaggtgattggcccactgaccgaaggtcaacgcaggaatgtagccgtggtgaactcactttataaacttcatcagagtgtgacaaaagtggtctcctcccagtctagctttcccctggcggccgaacagaccatcatctctgctcttaaggccattcacgctctcatggagaacgcagtgcagcctctgctcacatctgtgggggacgccatcgaggccattataatcacaatgcatcaggaagattttagtggtagtctgagttcctctggaaagccggacgtgccatgtagtctttacatgaaggagctgcaaggcttcatcgccagggtgatgtctgactattttaagcactttgaatgcctcgattttgttttcgacaataccgaggcgatcgctcagagggccgtggagctattcatcaggcacgcatccttgatccgccccctgggcgagggggggaaaatgagacttgcggccgatttcgcccagatggagctcgctgtagggcctttttgtaggagagtatctgatctgggtaagagttatcggatgttgaggagcttcagaccactgctttttcaggcaagtgaacatgttgcttccagtcctgcactcggtgatgttattccttttagtataattattcagtttctgttcaccagagctcctgctgagcttaagtcgcctttccaacgggctgagtggtcacatacaagattttcacagtggcttgatgatcatccttctgagaaggatcgactcttactaattagaggcgcgttggaagcatatgtccagtcggtgcgcagccgcgaggggaaggagttcgcaccagtttatccaatcatggtgcaactcttacagaaagcaatgtccgcgcttcagtag

SEQ ID NO: 112959 - DNA, 2520 bp, synthetic construct
  misc_feature 1..2520: note = Description of Artificial Sequence: Synthetic coding sequence
  source 1..2520: mol_type = other DNA
atgggctgggtcggaggccgtagacgcgatagtgcctctcctccaggacgtagccgttccgctgccgacgatatcaatcccgcccccgctaatatggaaggaggcggcggttccgtggctgtggcaggtctgggagctaggggtagcggggccgcagccgccaccgtgagggaactgctgcaggacggatgctacagcgacttcttgaacgaggacttcgacgtgaaaacttacacaagccagagcattcatcaggcagttatcgcggagcagttagctaagctagctcagggcatctctcagctagatcgagagctacacctacaggtagtggccaggcacgaagacctgcttgcccaggccacgggcatcgagagcctggagggagtgctccagatgatgcagactaggattggagcccttcaaggggcggtggaccgaattaaagccaagatagtggagccatataacaaaatcgtggctcgcacagcccagttggctcgtttgcaggttgcatgtgatcttctcagacgcatcattcggatcctgaatctgtccaagcgtttgcagggacagctgcaggggggtagtagagaaataacaaaagccgcccaatccttaaacgaactcgactatctgtcccagggtattgacctgtccggtattgaggtgatcgagaacgatttactgttcattgctagagctcgactggaagtcgagaatcaggccaagagactgttggaacagggtcttgaaacacaaaatccaacccaggtgggcaccgcactccaggtgttctacaatctggggacattgaaggacacaattacaagcgtagtggacggctattgcgccacgctggaggagaatatcaactccgctctggacattaaggtattgacacagccctcccaatctgccgtccggggcggcccaggtcgctctacgatgccaacacctggaaataccgcggccctgagagcctccttctggactaacatggagaaattgatggatcatatttacgccgtgtgcggacaggtccaacaccttcagaaagtgcttgccaagaaacgggacccggtctctcacatctgttttatcgaggagatagtgaaagatggacaacccgaaattttctatactttctggaatagcgtgacccaagctctgtcctcccaatttcatatggccaccaacagctccatgtttctgaaacaagcctttgagggtgaataccccaagctgctcaggttatataacgatctctggaagcggttgcaacagtatagccagcacatccaggggaattttaacgcaagtggtacgactgacttgtacgtcgacttgcagcacatggaggacgacgcccaggatatattcatccctaagaaacccgattacgacccggagaaagccctgaaggattctcttcaaccctacgaagccgcatacctctctaaatcattatctcgcttgtttgaccctattaatctcgtgttcccccctggcgggagaaacccccccagttctgatgagctggacgggatcatcaaaaccattgcttctgagctaaatgttgcagccgtggatacaaacttaacactagccgttagtaagaatgttgcaaaaactatccagctatactctgttaaatccgaacagctgctatcaacccaaggggacgcgtcccaggtcattgggcccctcaccgaaggtcaaagaagaaacgtggcggtggtgaatagcctgtataaactgcaccaaagcgtgactaaggccatacacgcactcatggaaaatgcagtgcagcccttgcttacctcagttggtgacgccatcgaggcgatcataattaccatgcatcaagaagatttctccgggtccctgtccagctccggcaagcccgatgtgccctgttcactttacatgaaagaactgcaggggtttattgctagggtcatgagcgactatttcaagcatttcgaatgccttgatttcgtgtttgacaacacagaggccatcgcacaacgagctgtcgagcttttcatcagacatgcctcgttaatcagacctctgggcgagggagggaagatgaggctggcagctgacttcgcccagatggagctagcagtaggccctttctgccgccgagtatcagacctggggaaaagctaccggatgctccgctcctttagaccgttgctgttccaggcctccgaacacgttgctagctctcctgccctcggcgacgtgatccctttctccataattatacagttcctgttcacacgggccccagccgaacttaagtccccatttcaacgcgcagagtggtcccatactcgcttctcccagtggttggacgaccacccaagcgagaaggatagacttcttttgatccgaggtgcattggaagcgtacgtgcagtcagtcagaagccgcgagggcaaagaattcgcgcccgtgtatcctatcatggtgcagctgctgcaaaaggctatgagtgctctgcagtag

SEQ ID NO: 112960 - DNA, 2472 bp, synthetic construct
  misc_feature 1..2472: note = Description of Artificial Sequence: Synthetic coding sequence
  source 1..2472: mol_type = other DNA
atgggatgggttgggggacgtcggagggactcagcctcccctccagggcgctcaaggagcgctgctgatgacatcaatccggccccagctaacatggaggggggcggaggatcagtggctgtagccggcttgggagcaaggggatctggggccgccgctgccacagtcagggagttgctgcaggacggatgctatagcgactttctgaacgaggattttgatgtgaaaacctatacgtcacaatccattcaccaggccgtgatagccgagcaactagccaaacttgcccagggcatttcccagctagacagggagttgcacctgcaggtcgtagctcgtcatgaagatctcctggctcaagcaacaggtattgaaagtctggagggagttctgcagatgatgcagacccgcattggggctttgcagggagccgtagaccggataaaagctaagatcgttgagccctacaataagatcgtggccagaaccgctcagcttgcgagattgcaggtagcatgtgacctccttcggagaattatccggatactcaatctgtcaaagaggctgcaggggcagctgcagggtggttccagagaaattacaaaagctgcccagtctctaaacgagctcgactatttaagccagggaattgatctttccggcattgaggttatcgaaaacgacctgctgttcattgctcgcgctagactagaggtggagaaccaggcaaagcgcctccttgagcagggactagagacacagaacccgacccaggttggtacggccctgcaggtcttctataatctgggaaccctcaaggacaccatcacatcggtggtcgacggctactgtgcgactctggaggagaacatcaacagcgctctggatatcaaagttctgacccagccctctcagagtgccgtgagaggggggcccgggagaagtacaatgcccacgccgggcaacaccgcagcccttagagcttcgttctggaccaacatggagaaacttatggatcatatctacgcggtgtgcgggcaggttcagcacctgcagaaagtcctcgcaaagaaacgggaccctgtgtcccacatatgctttatcgaggagatcgtcaaggatggccaaccagagattttctacaccttttggaacagcgtgactcaggcacttagcagtcagttccatatggcaactaactcttcaatgttccttaagcaagctttcgaaggagagtacccgaaactcctaagactgtacaacgacctctggaagcgtctgcagcaatacagtcaacacatccaaggaaacttcaacgcctcaggaaccaccgatctgtatgtagatctccagcatatggaagacgacgctcaagatatcttcatcccaaagaaacccgactatgacccagaaaaggctctgaaagatagcttacaaccatatgaggctgcttatcttagtaaatccctgagccgcttgttcgaccccataaatctcgtcttccctcccgggggccggaaccccccctcttcagacgagctggacgggatcattaaaacaatagcatcagaactgaacgtggctgcggtggatacgaacctaactctggccgtgtctaagaatgtggcaaaaacgatccagttgtattctgtaaaatctgaacagctgcttagtacccaaggtgacgcatcacaggtcattggccctttgaccgaaggccagcgccgcaacgtagctgtcgtgaacagcttatataaacttcatcagagcgtgaccaaagtggtcagctcccagagttcattcccattggccgccgagcagaccatcatctccgctctaaaagctatccatgccctgatggagaatgcagtgcagcctctcctgacgtccgtgggtgacgctatcgaggcaatcattatcaccatgcatcaggaggatttttcagggtccctgagctcttcgggcaaaccagacgtgccatgttcgttgtacatgaaagagctccaaggctttatcgccagggttatgtccgattattttaagcatttcgaatgcttagacttcgtctttgataataccgaagccatcgcccaacgcgctgtcgagctgttcattaggcacgcatcactcataaggcccctaggagagggtggtaaaatgcgcttggcagccgactttgctcaaatggagctggcagtgggccctttttgtcgccgggtttcagatctggggaagtcttacagaatgctgcgctccttccgccccctgttatttcaagcgtcagagcacgtagccagttcccctgcccttggcgacgtgattcccttctccatcattatccaattccttttcacaagggctccggctgaacttaagtcaccgttccagagagcagagtggtcgcacactcggttcagtcaatggctcgatgaccaccccagcgagaaagacaggctgctgcttatacgatag

SEQ ID NO: 112961 - DNA, 2067 bp, synthetic construct
  misc_feature 1..2067: note = Description of Artificial Sequence: Synthetic coding sequence
  source 1..2067: mol_type = other DNA
atgaggggtcgattcgcccacgcacaatacagtcgttgtctccggggaccttgtctagccgaggtggctgctgggggcggaacaaggtcagcaatggcggagggaagcggtgaggtcgtggcagtcagcgcgaccggcgccgccaatggactaaacaatggcgccgggggcacatccgctacaacttgcaacccattgagtagaaaattgcacaaaatcctggaaacccgtttggacaacgacaaagaaatgctcgaagcactgaaggccctgagcacctttttcgtcgaaaattccctgagaactaggaggaatctgcgaggagacattgaacgcaaatcgctggcgatcaacgaggagtttgtctccatttttaaagaagtgaaggaagagctcgagtcaatcagcgaagacgttcaggcgatgtccaactgctgtcaagatatgacctctcgcctgcaggctgctaaggagcaaacccaggatttaattgtgaaaacaaccaagctccaatcggagagtcagaagcttgagattcgagcgcaggtagctgatgcgtttctgagcaagttccagctcacgagtgacgaaatgagcctgttgagagggactagggagggccctattactgaggacttcttcaaggctctgggtagggttaaacagatacataacgacgttaaagtattactacggacaaaccagcagacagccggcctggagatcatggagcagatggctctgttgcaggaaaccgcctacgagagactgtataggtgggcccagagcgaatgccggacactgacccaggagagttgtgatgtctcgcctgtgctcacgcaagcaatggaggccctgcaggacagacctgtgctgtacaagtatactctggacgagttcggaaccgcgagacgctccacagtggttcgtgggtttattgatgctctcaccaggggtgggcctggcggcacacctagacctatcgagatgcatagtcacgacccactcaggtacgtgggggatatgctggcctggctacatcaagccactgcatctgagaaagagcacttggaggctctactgaagcatgtgacgacccaaggcgtggaggaaaacatccaggaggtcgttggccatatcaccgaaggggtttgccggccactgaaggttcgcattgagcaggttatcgttgccgagccaggcgctgtgctcttgtacaagatctcaaatctattaaagttctaccatcacacgatctctggcattgtcggcaacagcgccacggccttgctcaccacgatcgaggaaatgcacctgctcagtaagaagatcttttttaattcactttcactgcatgccagcaagttgatggacaaggtagaattgccgccccccgacctaggtccctcgtctgctctcaatcagactctaatgttactccgcgaggttctcgcttctcacgattctagcgtcgtgcccctggatgcacgtcaagccgacttcgtgcaggtcctctcctgtgtcctcgatcctctactgcaaatgtgcacggtgagcgcgtcaaaccttggaaccgcggacatggccaccttcatggtgaactcattatacatgatgaaaacgaccctagctctgttcgaattcaccgacagaagactcgagatgctccagtttcagatcgaggcacacctggacacactgattaacgaacaggccagttacgtgctaacccgcgtcgggctgtcgtacatatacaacaccgtgcagcagcacaaaccagagcaagggagcctcgccaacatgcccaacctggactccgttacccttaaggccgccatggtgcagttcgatagatacctgtccgcgccagacaacctcttgattcctcaactgaattttctgttgagcgccacagtaaaagaacagatcgtaaaacagagcactgaacttgtttgcagagcctacggagaggtatacgcagccgtcatgaacccgattaatgagtacaaagacccggagaacatccttcatcggtctccccaacaggtccagacattactcagctag

SEQ ID NO: 112962 - DNA, 1848 bp, synthetic construct
  misc_feature 1..1848: note = Description of Artificial Sequence: Synthetic coding sequence
  source 1..1848: mol_type = other DNA
atggccgaaggcagcggcgaggtcgtggcggtgtctgccactggggccgctaacggcctcaacaatggagcgggcggcacgagcgcaactacatgcaatcccctttcacgcaagctgcataaaattctagaaacccggttggataatgacaaggagatgcttgaggctcttaaagctctttctactttttttgtagagaactcgctgcggacacgtcggaatctgcggggcgatatcgaaagaaagtcactggcaatcaacgaagaattcgtatctatttttaaagaggtcaaggaggaactggagtccatttcggaagatgtgcaggccatgagcaattgctgtcaggatatgacatcgcgcctccaggccgcaaaagagcagacgcaggacctgattgtaaaaaccactaagctgcagagcgaatctcaaaagctcgagatccgggcacaagtggcagacgcattcctgagtaaatttcaactgacaagcgatgaaatgagtctgctccggggaacgagggagggacccattaccgaggacttttttaaagcactgggcagggtcaaacagattcacaacgacgttaaagtgctgcttagaacaaaccaacagaccgcaggcctagaaatcatggagcaaatggcgcttctgcaggagactgcatacgagagattgtatagatgggcccagtcggagtgccggaccctgacccaggagtcctgcgatgtgagccctgtgctgacacaagccatggaggccctgcaagacagaccggtcttgtacaagtatacactggatgagttcggtacagcccggagaagcaccgtcgttcgaggcttcatcgatgcactcacccgagggggccctggcgggacacctaggcccattgaaatgcatagccatgacccactgcgatatgtgggagatatgctagcatggctgcaccaggctaccgccagcgagaaagaacacttggaagctctcctaaagcatgtgacaactcaaggcgtggaggagaatatccaagaggtggtcggacacatcacagagggcgtatgtcggcctctgaaggtccgcatcgaacaggtgattgtggcagaaccaggagccgtgctgctgtacaagattagtaatctgctgaagttttaccatcatacaatcagtggaatagtaggcaattctgcaaccgcgctgctgactaccattgaagagatgcacctgctttccaaaaagatcttcttcaattccctctctttgcacgcctctaagctcatggacaaggtggaactcccccctcctgatttaggcccctcctccgccctcaatcagaccctgatgctcctgagagaagtactggcttcacacgatagttctgtggtgcccctcgacgcaagacaagccgatttcgtccaggtgctgagctgcgtgctagacccgcttctgcagatgtgcaccgtgagtgcaagtaatcttggtactgcagatatggccactttcatggtgaatagcctgtatatgatgaaaactacactggccctgttcgagttcacagacagacgcctggagatgctccagttccagatagaggcccacctcgataccttaatcaacgaacaggcgtcatacgtcctgactagggtcggcctctcatacatttataatactgtccagcagcacaagcctgagcaggggtccctcgccaacatgcccaacctcgacagtgttaccctgaaggctgcaatggtccaattcgaccgctatctgagtgctcctgataatcttttgattccacaactgaactttctgttaagcgccacagtcaaacggccacctaacggaccttag

SEQ ID NO: 112963 - DNA, 1974 bp, synthetic construct
  misc_feature 1..1974: note = Description of Artificial Sequence: Synthetic coding sequence
  source 1..1974: mol_type = other DNA
atggcagaaggctccggagaggtggttgcagtaagtgctacaggggccgccaacggccttaacaacggggctggcgggacctcagccacaacttgtaacccactgagccgaaagctccacaagatcttggagacacggctcgacaacgataaggagatgctggaagccctaaaagcactttctacgttcttcgtcgaaaactccttgaggacaagacggaacctccggggcgacatagagcgaaagagccttgccattaatgaagaattcgtgagcatctttaaggaagtaaaggaagaactggaaagtatcagtgaagatgtgcaggccatgtcaaattgttgccaagatatgacttcccggctgcaggccgcaaaggagcagacccaggacttgattgtgaagactaccaagttgcagtctgagtctcaaaagctggaaatcagagcccaagtcgccgacgctttcctctctaagttccaactcacatctgatgaaatgagcctgctgcggggcactcgggagggacccatcacggaggactttttcaaggcgctcggccgagttaaacagatccacaacgacgtgaaagttcttcttagaacaaaccaacagacggcgggacttgaaataatggaacagatggcgttacttcaggaaaccgcatatgagaggctatatcgctgggcccagtctgaatgcagaacactaactcaggagtcatgcgatgtgtccccggtcctcactcaagccatggaggcactgcaggaccgaccagttctgtataagtacacgcttgacgagttcggaactgctcgccgatctactgtggtgaggggattcattgatgcactgactcggggaggacccggcgggacgccgaggcctatcgagatgcacagccacgaccccctacggtacgtgggcgacatgcttgcctggctgcaccaggctaccgcatctgagaaggaacaccttgaggcactccttaagcacgttacgacgcaaggcgtcgaagagaatattcaagaggtggttggccatattaccgaaggcgtatgcaggccactcaaggttcggattgaacaggttatagtagcagagccgggagccgtgctcctctacaagatatctaacttactaaagttttaccaccacactatttctggaattgtgggcaattccgctacagccctcttaacgacgatagaggagatgcaccttctgagtaaaaagatcttcttcaattccctgtctttgcatgcctccaaactgatggacaaggtggagttaccgccccctgacttaggcccaagtagtgcattaaaccagacactgatgctgctgcgtgaagttctggcgtcccatgattcatcggtcgtccccctggatgctaggcaggcagattttgtgcaagtgctctcttgtgtcctcgacccactgctgcagatgtgtacagtttccgcctcaaacttgggaactgccgacatggctactttcatggtcaacagtctatatatgatgaagacaacactcgcgttatttgagttcaccgacagaaggttggaaatgttgcagttccaaatagaggctcatctggacacactgattaacgaacaggcctcctatgtgctcacccgagtaggactgtcatacatctataacaccgtccagcagcataaacccgagcagggatccttggctaacatgccaaatctcgacagcgtgaccctgaaagctgctatggttcagtttgatcgctacttatctgcacctgacaacctcctcataccccagctcaatttcttattgtcagccaccgtgaaagagcagattgtaaaacagtctacggagttggtgtgccgagcatacggggaagtgtacgctgctgtaatgaaccctatcaacgaatataaggatcctgaaaacatcctccatcgaagtcctcagcaagttcagaccttgctgtcctag

SEQ ID NO: 112964 - DNA, 2313 bp, synthetic construct
  misc_feature 1..2313: note = Description of Artificial Sequence: Synthetic coding sequence
  source 1..2313: mol_type = other DNA
atggacttttccaagttccttgcagacgacttcgacgtcaaagagtggatcaacgccgcattcagggccgggtccaaggaggcagccagcggcaaagctgatggccatgcagccacactggtgatgaagctacagctgtttatccaggaagtgaatcatgctgtggaggagacatcccaccaggcactccagaacatgcctaaggtgctgcgggacgtggaagccctgaagcaggaggcaagtttcctaaaggaacagatgattctggtgaaggaggatatcaaaaaatttgagcaagacaccagccaatcaatgcaggttctagtggagattgatcaggtgaagtcacgcatgcagctagccgccgaatcactacaggaggcggataagtggtcaacactatctgcagatatcgaggaaacattcaaaacgcaggatattgcagtgataagtgctaaactgaccggtatgcaaaattctctcatgatgctggttgatacacctgactactcagagaaatgtgtgcacctcgaggccctaaaaaacaggctggaggcgctagcatcccctcaaatagtcgcggcctttacttcacaggccgtggaccagtccaaggtgttcgttaaggtatttacagagatcgatcgaatgcctcaacttcttgcctattactataaatgccacaaggtgcagttgctcgccgcatggcaggagctgtgccagtcagatctgtctcttgatcggcagctgacaggcctgtatgacgcactcttgggggcttggcatactcagatccagtgggctactcaggtgttccagaaaccccacgaggttgtcatggtgctactgattcaaactctgggcgctctcatgccgagcttgcccagctgtttgtcaaatggggtggaaagagctgggccggagcaggagctaaccagactgctggagttctatgatgccacagcccattttgccaaagggctggaaatggctctgctgccccacctccacgagcataatctggttaaggttacagagctcgtagacgcggtttacgacccttataagccatatcagctgaaatatggcgatatggaagagtctaatctgctaatacagatgtcagcggtaccacttgagcacggagaagtgattgactgtgtccaggaactgagtcactcagtgaacaagctcttcggactggcaagcgctgccgtcgataggtgcgtccggtttactaatggattaggcacttgcggactgcttagcgcactcaaatcattgtttgctaagtacgtgagtgattttacttctacccttcagtcaattaggaagaagtgtaaattggatcacattcctccaaactcactgttccaggaggactggaccgccttccagaattccatcagaataatcgccacctgcggcgaactgcttagacattgtggagactttgaacagcagctcgcgaatcgcatactgagcactgccggcaagtacctgagcgactcttgcagtcctcggtctctggctggcttccaggaaagtatcctcaccgacaaaaagaattccgcaaaaaacccctggcaagaatataattacctacaaaaggacaatcctgccgaatacgcctccctgatggaaattctgtataccttgaaagaaaaaggtagcagcaatcataacctgctggccgctccgcgagcagctctcacacggctgaaccagcaagctcatcagcttgctttcgattcggtattcttgcgcatcaagcagcaattgctgctcatctccaaaatggactcatggaataccgctggaattggggagacactgacggacgagctcccagcctttagcctgacaccactggagtacatctctaatatcggccaatacatcatgagcttgcctttaaaccttgagcccttcgtcacgcaagaggactctgctctcgaactggccctgcatgctggtaaactgcccttcccacctgaacaaggtgatgaactgcccgaacttgataatatggcagataattggcttgggtccattgcgagagccacaatgcagacatactgcgatgctattctgcagattcctgagctctctccccacagcgccaagcagctggcaacggacattgactatctcatcaacgtgatggatgccctgggtcttcagccatcgagaaccctgcagcacattgttacactgctgaagacaaggcctgaggattaccgacaggtgtcaaagggactaccacgccgactagccacaactgtggcgaccatgcggtctgtcaattattag

SEQ ID NO: 112965 - DNA, 1839 bp, synthetic construct
  misc_feature 1..1839: note = Description of Artificial Sequence: Synthetic coding sequence
  source 1..1839: mol_type = other DNA
atggcaactgctgctacgattcctagcgtggctactgccaccgctgcggcactgggggaggtcgaggacgaggggctcttagctagtctgttcagggataggtttcccgaggcacaatggcgagaacgacccgatgtgggccggtacttacgcgagctttctggcagcgggctcgaaaggcttagacgtgaaccggaacggctggcggaggagagggcccaactgcttcagcaaacccgggatctggctttcgcaaattataaaacatttattaggggtgccgaatgcaccgaacggattcataggctgtttggcgatgtggaagccagtctggggaggctgctcgacagactgccttcttttcagcagtcctgcagaaatttcgtcaaggaggctgaggagatttcatccaatcgccgcatgaacagcctgacactgaatcgtcatacagaaatcctcgagatcctggaaattccccagctgatggatacctgtgtgcgcaatagctattacgaagaggccctcgaactagcagcctatgttcgaaggcttgaacggaaatattcttccattcctgtaattcagggaattgtaaatgaagtgaggcaatctatgcagcttatgttgtcacagctcatacaacaactacgaacgaatatccagctacccgcttgcctgcgggtgattggctatctgcggcgtatggatgtgttcactgaggccgagctgcgggtgaagtttctgcaggcaagagatgcatggctgcggagcatcctcacagccattccgaatgacgacccatattttcatattaccaagactatagaggcctctagagtgcacctcttcgatattattacgcagtatagggccattttctcagatgaggaccccctgcttccacctgcgatgggagagcacactgtgaatgagtctgccatttttcacggatgggtcctacagaaagtatcccagtttcttcaggtgctggaaaccgatctctatcgcggaattgggggccacctggacagcttattagggcaatgcatgtactttggactgtccttctcacgagtcggggctgacttccgtgggcagctggctccagtctttcaaagagtggccatttcaacattccagaaagccatacaagagaccgtggagaagtttcaagaagagatgaactcttatatgctgatctctgcacctgccattcttggcacttctaacatgccggcagccgtgccagccactcaaccaggtaccctacagcctccgatggtgctcctggattttccgcccctggcttgcttcctgaataatattctggtggccttcaatgatcttcggctatgttgtccagtggccctggcccaagacgtgactggtgctctggaggacgccctcgctaaagtgacaaagatcatattggctttccaccgcgctgaggaggccgccttctcttctggtgagcaggaattgtttgttcagttttgtactgtgttcctggaagatctggttccctatcttaacagatgcctgcaagtcctgtttcctccagcccagatcgcacagactctgggcatcccccctacgcagctcagcaagtatgggaacctaggccacgtaaacatcggagcgatccaagagcctctcgcattcattctgcccaaaagggagaccctcttcaccttggatgaccaggctttgggtcctgaattaactgctcctgccccagaaccacccgccgaggaacctcggcttgaaccagcaggacctgcctgccccgagggcggtcgtgccgagactcaggctgaacctcccagtgtaggcccctag

SEQ ID NO: 112966 - DNA, 2109 bp, synthetic construct
  misc_feature 1..2109: note = Description of Artificial Sequence: Synthetic coding sequence
  source 1..2109: mol_type = other DNA
atggagagcccatccgccccccctcatcggtggtgcatcccttggcaacgtctgcttctcaccgcgtcccttctgaccttctggaatccaccgactacagctaagctcacaatcgagtctacacccttcaacgtggccgagggtaaagaagtgttattgctggttcacaatctgcctcagcatttatttggctactcttggtataaaggggagcgggtcgacgggaacaggcagattattggatacgtaatcggaactcaacaggccacacctgggcccgcgtattcaggtcgagaaattatttaccccaatgcgtctctgcttattcagaacattattcagaacgataccggattctacactctgcacgtaatcaaatctgatctggtgaacgaggaagcgacgggacaattcagagtgtacccagagctaccgaaaccatcaatctcttccaataacagtaagcctgttgaagataaggacgcggtggcatttacctgtgaacctgagacccaagacgccacctatctgtggtgggtgaataatcagagcctgccggttagtccacggctgcagctctccaacggaaaccgcactcttacactttttaacgtcacgaggaatgatactgcctcctacaagtgcgagacccagaacccagtgtccgctcgtaggtccgacagtgtgattctaaacgtactctatggccccgacgcacccacaatcagtcctttgaatacatcctatcgttccggtgagaacctgaacctctcatgtcatgctgcaagcaatcctccagctcagtactcctggttcgtcaacggcacgttccagcagtctactcaggagttgttcatcccaaatatcacggttaacaattcgggctcttatacctgtcaagcccacaattcagatacgggccttaatcgcaccactgtgactactataacagtgtatgcagagccaccaaaaccgttcataacgagcaataattccaaccccgttgaagacgaagatgccgtagctctgacctgcgagcccgagatccaaaacacaacatacctatggtgggtgaacaaccagtcactacctgtttcaccccgcctgcaactctcgaacgacaatagaacattaactttgctgtcagtgacccgaaatgacgttgggccgtacgaatgtgggatccagaacaagctatctgtggatcactcagaccccgtaattcttaatgtcctttacggtcctgatgaccccacaatcagccctagttacacttattaccggccaggggtgaatctcagtttatcttgccatgcggctagcaatcctcctgcccagtactcatggttaattgacggcaacatccagcagcacactcaagagctgttcatcagcaatattaccgagaagaactcaggcttgtatacctgccaggccaataacagtgctagcggacactctaggaccaccgtgaaaaccatcacggttagtgctgagcttccaaagccatcaatcagtagcaacaatagcaagcccgtggaggacaaagatgcggtcgcctttacctgcgaacccgaggcccagaacaccacctatctgtggtgggtcaacggacaatccctaccggtgtccccgcgattgcaactgtcaaatgggaaccgcactttaactttgtttaatgtgaccagaaatgatgccagagcttatgtgtgtggcatacaaaatagcgttagcgcaaacaggtctgatcctgtgacacttgacgtcctttacggcccagatactcccatcatctctccacctgactcgtcatatctgtccggagccaacctgaacttgagctgtcattccgcatcgaatcccagtccacaatatagctggaggattaatgggatccctcagcagcacactcaagtgctctttatcgctaagataacccctaacaataatggaacctacgcctgtttcgtgtcaaatctcgctacaggacgtaataactcaatagtcaaaagtatcactgtcagcgccagtggaacctcccccggtctgagcgctggggctacggtggggattatgatcggagttctcgtcggagtggccctgatctag

SEQ ID NO: 112967 - DNA, 981 bp, synthetic construct
  misc_feature 1..981: note = Description of Artificial Sequence: Synthetic coding sequence
  source 1..981: mol_type = other DNA
atgatggcctacatgaacccgggcccacactattcagtgaatgccctggctctgagcggtcctagcgtggatctgatgcaccaggcagtgccttacccctcaccgcccttggcacttgaccctccaaggcgacagagacaggaacgcacagtatataccgagtcccagcaaaaggtcctggagttctactttcagaaggaccagtatcccaactacgaccaaagattaaacctggctgaaatgcttagcctgcgtgaacaacaactgcaggtttggttcaagaatcgcagagctaagttggctcgagaacgtaggctgcagcagcaaccccagcgcgtcccgggccagcgcggtcggggtgcccgcgcagcgcctctggtgcccgtggcagccgcctctttccccggcggaccggaattcccgcagggtcggggcagttggatctccccacagccaggcccctggggagtgcttcccgcagcagaaccaaagatttattcactgccgcgtacatggggtgggccagagtgcgggactcaggaggggcttaaggccgtgccagctcctggtccagggccaattccggcccctataccgggacctgctcagattccaggccccgtgccgggccctgcccctaacctgggccccatgtcagggccccttagcgtgagcattcctgggcctatcccggcaccaatctcatgtccaggaccaatccctgaccctgttctcggaaggactctgatgcccgggcccggatctctgccaactcccgcacctggcgctctgtggcctcagtccccctatgccagcaatctgtctcccgacacccagctgtacccagatttcacaaaactgcttccattgttggaccgatttgaggaatccagtctgagtaccacaacttcacagtacaaagaggaggatggctttgtggacaagaatcactcggtaccacgctctctcctggacctatag

SEQ ID NO: 112968 - DNA, 900 bp, synthetic construct
  misc_feature 1..900: note = Description of Artificial Sequence: Synthetic coding sequence
  source 1..900: mol_type = other DNA
atgatggcgtatatgaacccaggcccccactacagtgtgaatgccctcgccctttccgggccgtcagtcgacctcatgcaccaggcagttccctacccttccgctccacgcaagcaacgtcgagagcgcacaacctttactagatcacaactagaggagctggaagcactgttcgcaaagacacagtaccctgacgtctacgccagagaggaagtggctctcaaaatcaatttaccggaatctagggttcaagtgtggtttaagaatagaagggccaagtgcagacagcagcggcaacagcagaagcagcagcagcagccaccaggcggccaggcaaaggctaggcccgctaagcggaaagctgggactagccctcgcccctctactgacgtctgtcccgacccgctggggatttctgattcttatagtccaccactgcctggcccatcaggtagtcctacgactgctgtggccacggtttccatatggtcacccgctagtgagtcaccccttccagaagctcagagggccggcctggtagcctccggtccttcactgacatctgccccgtatgccatgacatacgctcccgctagcgcattctgttcttccccatctgcatatggctccccttcctcatacttttctggcctcgatccttacctcagccctatggttccccaactgggaggccccgccctcagtccgctgagcggcccttcagtaggaccctccctggcccagtcgccaacgtctctcagtggccaatcctacggggcatacagccccgtggacagtctcgaattcaaggatccgactggtacttggaagtttacatacaatcctatggatcccctagattacaaagaccagtccgcgtggaagttccagattctttag

SEQ ID NO: 112969 - DNA, 900 bp, synthetic construct
  misc_feature 1..900: note = Description of Artificial Sequence: Synthetic coding sequence
  source 1..900: mol_type = other DNA
atgatggcatatatgaacccagggccccactacagcgtgaatgcactggcgctgagcggccccagcgtcgacctgatgcaccaggccgtaccttatccttcagcccctcgcaaacagaggcgggagcggacgacatttacccggagccaactagaagaattggaggcgctgtttgcaaaaacacaataccctgacgtttatgctcgcgaggaagtggctctcaaaattaatctgcctgagtcgcgcgtacaggtgtggttcaagaatcggagagccaagtgtcgtcagcagaggcaacagcaaaaacagcagcaacaaccacccgggggccaggctaaggctcgccccgctaagaggaaggccgggacctctcctcggccttcaacagacgtgtgtccagacccactggggatttcggattcatacagtccccccctgcctggcccctcaggcagccctaccacagcagtggctacggtctcgatatggtcaccagcttccgagtcgcctctccccgaggcgcagagggcagggctcgtggcctcaggtccatccctcacatccgccccctacgcaatgacgtatgccccagccagcgctttctgttcctccccaagtgcctatgggtctcctagctcttatttctccggactggacccctacttgtcacctatggttccacagctgggcggacccgccctgtcacccctcagcggtccctctgtcggtccttctctagctcagagccctactagcctgtctgggcagagttacggggcatattcacccgtggactctctcgagttcaaggatcctacgggcacttggaagttcacatacaatcccatggaccctctggactacaaagaccaatcagcatggaaattccagatcctatag

SEQ ID NO: 112970 - DNA, 900 bp, synthetic construct
  misc_feature 1..900: note = Description of Artificial Sequence: Synthetic coding sequence
  source 1..900: mol_type = other DNA
atgatggcctatatgaaccctggcccccactattccgtgaacgcgcttgcgctatcggggccctccgtggatctgatgcatcaagccgtgccttaccctagcgccccccgcaagcagcgaagagaaagaacaacattcacacggtctcagctggaggagctcgaggctctctttgccaaaactcagtaccctgatgtgtacgctagggaggaagttgctttgaaaatcaaccttccggaatcccgggtgcaggtatggtttaagaatcgccgggcaaagtgcagacaacaacgccagcagcagaaacagcagcagcagccaccgggcggacaagccaaggctcgaccggctaaaagaaaggctggcacttccccaaggccttccacggacgtttgtcccgatcccttaggaatttctgacagttactcaccaccattaccaggtcctagcggcagccccactaccgctgtggcaacagtgtccatatggtctcctgcctctgaaagccctcttcccgaggcccaaagagcagggcttgtggcttctgggcctagcttaacttccgccccatatgctatgacatacgctcccgcaagtgcgttttgttcatccccatccgcatacggatctccctctagctatttttctgggttggacccttatttgtcacccatggtcccacagctgggggggcccgcactgtctcccctgagtgggcctagtgtgggtccttcgctagcccagtcaccaacctccctttcaggccagagctacggggcctactctcccgtggacagtctggagttcaaggatcctacaggaacatggaagtttacgtacaatcctatggatcctctcgactacaaggaccagtctgcatggaagtttcaaatactctag

SEQ ID NO: 112971 - DNA, 3678 bp, synthetic construct
  misc_feature 1..3678: note = Description of Artificial Sequence: Synthetic coding sequence
  source 1..3678: mol_type = other DNA
atggcagctgtgctggagtctttgctgagagaggaagtcagtgtggccgctgtggtccggtggatagcaagaagtactcaaggatccgaggacaatgctggtgaggcagctgccctctcaagccttcgtgctctccgtaaagagttcgttccatttctgttaaattttctcagagaacagagcagcagagttctgccccaggggcccccaacacccgcaaagacacccggcgcctccgccgccctgccaggcagaccagggggtccccccagggggagccgcggagcgcggagccaactgttccctccaaccgaagcccagtccaccgccgccgaagcacctcttgctagaagagggggacggaggcgaggccccggtccagcacgggagagaggtggacgcgggctagaggagggggtctccggagagagtctgccaggcgcaggcggaaggcggttacggggttccgggtctccaagtcggccgagcctcaccctttcagatccacccaacctgagcaacctcgaggagttcccacctgtaggctccgtgccaccaggcccaacagagacacagctgtcctgccgtcgatgggtgccgagaagactgtggggggtcagtcactcctcttcagctttacgctcaggcgcgcctgggtgtaggaccaaaccctctcggcggataaatcccactccggtttcggaagaacggagcctgtccaagcctaaaacctgtttcaccagccccccaatatcttgcgtgcccagcagtaaacaactgcagcagtctcctaccccgacttgtcccacccctgaactgggaagtcccctgccatccagaacaggaagcctgacagacgaaccggcagaccctgcccgggtgagcagcaggcagagactggaactcgtggctttggtctattccagttgcatcgccgagaacctcgttcccaatcttttcttagagcttttctttgtgtttcagctcctcaccgctagaagaatggtcactgccaaggacagtgaccctgaattgtccccggccgtgctggactccctggaatctcccttgtttcagtccatccatgactgtgtgttcttcgctgtgcaggtgctggaatgtcactttcaggtgctgagcaacttggataagggaactctgaagctcctggctgagaacgagcgcctgctttgcttttcacctgctctccaaggtcgcctgagagcggcatatgaaggcagcgtggccaaagtgtcactggtcatgccaccgtccacccaggccgtgtccttccagcctgaaacagacaatagagcgaacttttcatccgaccgagcctttcatacctttaagaaacagagggacgtcttctatgaagtcctgcgggaatgggaggaccaccatgaggagcccggttgggacttcgaaaaggggttgggatctcggattagggccatgatgggacagctctctgccgcctgtagccacagccatttcgtacgattattccagaagcaattattgcagatgtgtcagtcccccgggggagcagggggcacagtgcttggcgaagctcctgacgtgctttccatgttgggtgccgacaaacttggacgcctttggagattgcaggagcggctgatggctcctcagtctagtggcggaccctgccccccaccaacttttccagggtgccagggcttcttcagggatttcattttgtctgcaagctctttccaattcaaccagcacctgatggactccctctccctgaagatccaagaactgaacggactggcactgccccagcatgaaccgaacgatgaagatggggaaagcgacgtagattggcagggggagcgaaagcagtttgctgtggttcttctttcactccgactgctggccaagtttctcggcttcgtggccttcctgccgtacaggggacctgagccacccccgacaggcgaattgcaagattctatcctggccctgagaagccaagtgccgcctgttctcgacgtgcgaacactactgcagagggggctgcaggcacggagggccgtgctcactgtgccctggttagttgagtttctgagtttcgcagaccacgtcgtgcctctgctcgagtactatcgcgacatctttaccctattactgcgcctccatcgcagcttggtattgtcgcaggagagcgagggaaagatgtgttttctgaacaagctgttactgctagctgttctgggatggttgttccagattcctactgtgcccgaggatctgttcttcctcgaggagggaccttcttacgcatttgaggtggacacagtggcacctgaacacgggctagacaacgccccagtggtggaccagcagctgctatacacatgctgtccatacataggagagctgcggaagctactggcctcatgggtctctggtagtagtggacgcagtggtggatttatgcgcaaaataaccccaaccacgacaacctcactgggcgctcaaccaagccagacttcccaggggctgcaggctcagcttgcacaggcatttttccataaccaacctccatccttgcgccgcacggttgagtttgtagcagagcgcatcggttcaaattgcgtgaagcacataaaagcaacacttgtcgctgatctcgtgcgccaggctgaaagcctacttcaagagcagctggtcacccagggtgaggaaggcggagaccccgcccagttgttggaaatcttgtgctctcagctgtgtccccatggggcacaagccctagctttaggacgggaattttgccagcgcaagtcacccggggccgttagggccctgttgccagaggagacgccagcggctgtgctcagctctgccgaaaatattgcagtggggctggcaacagagaaagcctgtgcttggttgtcggctaatatcacagccctgattcggcgagaagttaaggcagctgtgagtcgtactttgcgagcacagggtcccgagcctgcagctagaggagaacggcgcgggtgctcacgggcttgtgagcaccatgctcccttaccaagccacctcatcagcgagattaaggacgttttgtccctggcagtcggaccacgcgacccggatgaaggcgtgagtcctgagcacttggagcagttactgggacagctgggacaaacgctgcgttgtcggcaatttctgtgtccacccgccgaacagcacctggccaagtgttccgtggagctcgcctcgctgcttgtggccgatcagattccgatcctgggccctcctgctcaataccggctggagcggggccaggcccgacggctcctgcatatgcttctttcactgtggaaagaagacttccagggtcccgtgccactccaacttctgctgagccccaggaacgtgggtctcctggcagacacaagaccgcgcgagtgggatcttctactgtttttactcagggaactcgttgagaaggggctgatgggccgtatggaaattgaggcctgcctcggatccctccaccaagctcaatggcctggggattttgccgaggaactggccactctctcaaatttgtttctcgctgaaccacaccttcccgagcctcagctccgcgcgtgcgagctggttcagccaaacagaggtacggtcctggcccagtcatag

SEQ ID NO: 112972 - DNA, 3684 bp, synthetic construct
  misc_feature 1..3684: note = Description of Artificial Sequence: Synthetic coding sequence
  source 1..3684: mol_type = other DNA
atggcggccgtactggagagcctgctccgtgaggaagtcagcgtcgctgctgtggtcagatggatagctcggagtacgcagggttccgaagataacgctggagaggcggcggcattaagttctttaagggctctcaggaaggagtttgtaccttttctgctcaacttccttcgcgagcaatcctccagagttttaccgcagggaccaccaactccggccaaaacgcctggggcttccgccgcactcccaggcaggccaggtgggccgcctcgcggatccaggggcgccagatcccagttgtttcctcccactgaggctcagagtacagccgccgaggctcctctggctcgccggggaggacggcgtcggggtcccggccctgctcgtgagaggggcggccgaggactggaggaaggggtgtccggagagtccctacccggggcaggcggacggagactccgcggctctgggtccccttctaggccttctctgactctcagcgatcctccaaatctttcaaacctggaggaattcccaccagtgggcagcgttccccccggacccacaggtaccaagccctcccgccgaatcaatcctacacctgtgtctgaggagagatcactgtccaaacctaagacatgctttactagtccacctataagctgtgtgcctagctcacagccatctgccctcgacacatccccttggggtcttgggctgcctcctggatgtcgatctctgcaggaggagagagagatgctgaggaaagaacggtcaaagcaactgcagcaaagtccaaccccgacatgtccgacccccgagctgggctctccactgccctcgcgaacaggctccctgactgatgaaccagctgatcccgctcgcgttagtagcagacagcggttagagctcgtcgctcttgtatatagctcttgcatcgcggagaacctggtgcccaacctcttcctggagctgttcttcgtctttcaactattgaccgctcggagaatggttacagccaaggactcagaccccgagctcagtcccgctgtccttgatagtttggagtcccccctgttccagagcatccacgattgcgtcttttttgccgtgcaggtcttggagtgtcacttccaagtcctgtcaaacctggacaagggaacactgaagttactggctgagaacgaaagactgctgtgtttcagtcccgcgctccagggccggttacgggctgcttatgagggctccgtagccaaggtgtcattggtcatgccccctagtacccaggctgtgtccttccaacccgaaaccgataatcgagccaacttctcaagtgatagagcttttcacacttttaagaagcagcgcgatgtgttctacgaggtgctcagggaatgggaggatcatcacgaagagccaggctgggacttcgaaaagggcctgggctcacggattagagccatgatgggacaacttagcgccgcatgctcccactcccatttcgttagactatttcagaaacagctactccagatgtgtcagtcaccaggaggcgccggcggaactgtcttgggcgaagctccggatgtcctttccatgctgggagccgacaagctcgggaggctgtggcgtcttcaagagcgcttgatggcccctcagagcagcggcggcccctgtcccccacccacattcccaggatgccaagggtttttcagagattttatcctgtcagcttcatcttttcagtttaaccagcatctgatggattcgctcagcctgaagatccaagagctcaatggattggccctgccacagcatgagcctaacgatgaggacggggagtccgacgtcgactggcagggggagcgaaagcaatttgctgttgtgctgctcagcctcaggctcctcgccaagtttctgggcttcgtcgcctttttgccttatagaggccccgagcctcccccaaccggagagctccaggatagcatccttgctttgcgatcacaggtgccacccgtgctggacgttagaactctcctgcagcgcggacttcaagcacgacgagcagtgttaaccgtgccatggctagtcgagtttctgagtttcgccgaccacgtggtgcctctcctcgaatattatcgcgatatctttacgctgctccttaggctgcaccgatccctcgtgctgtctcaagagagtgaaggcaagatgtgcttcctgaacaaactcctgctattggctgtgttaggatggctcttccaaattccgaccgtgcccgaggacttgttttttctggaggaggggccaagttacgcgttcgaggtagatactgtggctcctgaacatggcctcgacaatgcccctgttgtggatcagcagctgctgtacacctgctgcccctacattggtgagctgagaaagttgctcgcatcttgggtgtccggatcctccggtcgctcaggtgggttcatgcggaaaataaccccaaccacgacaacatccctcggggcccagccttcacaaacgtcccagggcttacaagcccagcttgctcaagccttttttcacaatcagccaccaagtctccgccggacggtggagtttgtcgcggagagaatcggttctaactgtgttaagcacatcaaagccacactggtggcagacctagtgcgacaagctgaaagcctactacaggagcagctggtgacacagggcgaagaaggaggcgatccagcccagctgctcgagatactgtgttctcagctgtgtccacacggggcacaagcactggctttgggccgcgagttttgtcagaggaagtctcctggggccgttcgtgcgttgcttccagaagaaacccccgctgcggtcctctcctcagctgagaatatcgcggtgggacttgcaaccgaaaaagcttgcgcttggctgagcgctaacataactgcattaatccgacgcgaggtgaaagccgccgtttctcggactctgcgcgcacaggggccggaacctgccgctcgaggagagagacgcgggtgctctcgtgcttgcgagcaccatgctccactgccctctcatcttatatctgaaattaaggatgtgctgtctcttgcagtgggcccccgcgacccagacgagggagtgagtccagaacatctcgagcagctcctgggccagctgggccagacccttcgctgtcgtcaattcttatgtccaccggccgagcagcacctggctaagtgcagcgtcgagctggctagcctcttggtggcagatcagatacccatactgggcccacccgcccaatacaggcttgagcgcgggcaagcaagacgactgctccatatgctgctctcattgtggaaggaggacttccaaggacccgtgccccttcagttgttactttctcctcgcaacgtcggactgttggccgacacccgtccaagggaatgggatctgctgctgtttctgcttcgggagctggtcgagaaggggctaatgggccggatggaaattgaagcctgtttgggatctttgcaccaagcccaatggcccggtgacttcgcagaggagcttgctacactgagtaaccttttcctggctgagcctcatctgcctgagccgcagctccgggcctgcgaactcgtccagcccaaccggggtacggtactggcccagtcttag

SEQ ID NO: 112973 - DNA, 2697 bp, synthetic construct
  misc_feature 1..2697: note = Description of Artificial Sequence: Synthetic coding sequence
  source 1..2697: mol_type = other DNA
atggcactcatcatggagcctgtgtctaaatggagcccatcacaagtcgttgactggatgaaggggctggatgattgtctgcagcagtacataaagaactttgaaagagaaaaaatttctggcgaccagctgctgaggattacccaccaggaactagaagacttaggcgtgtccagaattggacaccaggaattgatcctcgaggccgtggacctcctgtgcgcccttaactacggcctcgaaacggaaaatttgaaaaccttgtcacacaagcttaacgcttcagccaagaatctccagaactttattacaggccgcagacgatcgggtcactatgacggtaggacctcaagaaagttacctaacgacttcttgacctcagtggtagacctcatcggagctgccaaatcattacttgcttggctggaccgctcaccttttgcggcggtaaccgattattcggtcacaagaaacaacgttatccagctgtgtttggaactcacaaccatcgtgcagcaggattgcactgtgtatgagaccgaaaataaaatcctgcatgtctgtaagaccctcagcggcgtctgcgaccatataatcagcctgagtagcgatccacttgtgtctcagtccgcccatttagaggtgatccagctggccaacatcaaacctagtgaagggttaggcatgtacattaagtctacctacgacgggttgcacgtgatcacgggtaccacggaaaacagcccggccgaccgctgcaagaagattcacgctggggacgaagtgatacaggtgaaccaccagacggttgtgggttggcaactcaaaaacctggtgaatgccctgagagaggatccctcgggtgtcatcttgacattaaagaaacgaccgcagtccatgctgacaagtgcacctgcacttttaaagaacatgaggtggaagccgttggcactccagcctctcatacccaggagtcctaccagtagcgtagccactcctagctccaccatcagcactcctaccaaacgcgacagtagcgccctgcaggatctgtatatccctcccccgcctgctgaaccctatatcccccgtgacgagaagggtaacctcccatgtgaggatttacgcggacatatggtaggtaaacctgtgcacaaaggcagcgaatctcctaactcttttctcgaccaggagtaccgaaagcggtttaacatagtggaggaggacaccgtgctctattgctacgaatacgagaagggccggtcatcaagtcagggccgcagagaatcaacaccaacttatggcaaactgcgccccatctctatgcctgtggaatataattgggtgggcgattacgaagatccgaataagatgaaacgtgacagccggcgcgagaacagccttctacgctacatgtctaacgaaaagatcgcacaagaagaatatatgttccagcggaattctaagaaagacactgggaagaaatctaaaaaaaagggagataagtctaattctccgacccactacagcctcctcccttccctgcaaatggacgccttgcgccaggatatcatggggactcctgtacctgaaaccacactgtaccacaccttccagcaaagttctctgcagcacaagagtaaaaaaaagaacaagggacccattgccggcaagtcaaagcgcaggatctcttgcaaagacctggggaggggcgattgtgagggttggctgtggaagaagaaggatgctaagtcatacttttcacagaaatggaagaagtactggtttgtcctcaaggatgctagcctgtattggtacatcaatgaagaagacgaaaaagcggaagggtttatttccttacctgagttcaagatagaccgcgcgagcgaatgtcgcaaaaaatatgcgttcaaagcctgtcaccctaaaattaaatcattctactttgcggccgaacatctggacgatatgaataggtggctaaacagaattaacatgcttacagccgggtacgcggagcgggaacgaataaaacaggagcaggactactggtccgagagcgacaaagaggaggccgatacgccttccacacccaagcaggattctccccccccaccatacgacacatacccgagacccccatctatgtcgtgtgcttccccgtatgtagaagccaaacattcacgactaagctctaccgagacctcacagtcacagagttcgcacgaggagttccggcaggaggtcaccggctctagcgcggtcagccctatcagaaagaccgctagtcagcgccgtagttggcaggacctgattgagactcccttaacaagtagtgggttgcactatctgcagacgctacccctcgaggatagcgtgtttagcgacagtgctgctatctctccagagcacaggaggcaatctaccttaccaacgcaaaagtgccacctgcaggatcattatggcccctatccccttgccgaatcagagcgcatgcaggttctgaacggtaacgggggcaaacctagatcttttaccctccctcgcgactccggcttcaaccattgttgtctgaatgctcctgtctctgcctgtgatccacaagacgatgtgcagccgccggaagtcgaagaggaggaggaggaagaggaggaggagggggaggccgcaggagaaaacattggagagaagagttag

SEQ ID NO: 112974 - DNA, 3105 bp, synthetic construct
  misc_feature 1..3105: note = Description of Artificial Sequence: Synthetic coding sequence
  source 1..3105: mol_type = other DNA
atggccctgatcatggagcccgtgtccaaatggtctcctagtcaggtggtggactggatgaaaggcttagacgactgcctgcaacagtatataaagaactttgagagggaaaaaatcagcggcgaccagttactgcgaatcacccatcaggagcttgaggatctgggggtgtcccgcatcggtcaccaggagcttatccttgaagccgttgatctgctttgcgccttgaattacggcctggagaccgagaacttaaagactttgtcccataagcttaacgccagcgccaagaatctgcagaacttcataacgggcagacgacggagcggccactacgatggaagaacaagccgaaaattacccaatgattttctcacgtcggtggtagacttgatcggagcagcgaaatccctcctcgcctggttagaccgctcgccatttgcagctgtgaccgactattctgtcacgaggaataatgtgatacagctttgcctggaactgactactattgtgcagcaggattgcaccgtgtacgagaccgagaataagatcttacacgtctgcaaaacgcttagcggggtctgcgatcatattatctccctctcttccgacccattggtgtcacagagcgcccatctggaggtgattcagctggcaaatatcaagccctccgaagggctcggtatgtatataaagtctacatatgatggactacacgtcatcacaggcaccacagagaacagtcccgccgatagatgcaaaaagatacacgccggggacgaagtgatacaagtgaatcatcagacagtggtcggctggcagctgaagaatctcgtgaatgccctccgagaggatccatccggggtcatcctgacactgaaaaagcgcccacagagtatgctaacaagcgcccccgcgcttctcaaaaacatgagatggaagcctttggccttacagccgcttattccaaggagcccaacttccagcgtcgcaactccatcctctacgatcagcacgcctacaaaaagggattcatccgcgctgcaggacctgtacatccccccacctcccgccgagccgtatattccacgcgatgagaaagggaacctgccgtgtgaggatctgcgaggacacatggtgggcaaaccagtgcacaaaggaagcgaatcacctaacagtttcctggaccaggagtacagaaagagattcaatattgtggaggaagatacagtgctgtattgctacgagtatgagaaaggacgctcttcctcgcagggcaggcgcgaatcaactccaacatacgggaaactgagacccatttctatgccggtggagtacaattgggtaggcgattacgaggaccctaacaagatgaaacgcgactcgaggagagaaaacagccttctccggtacatgtcaaatgaaaagattgcacaggaagagtacatgtttcagaggaattctaagaaggacacaggcaaaaagtctaaaaagaagggcgataagagcaacagcccaacacattactcactcctgccatcattgcagatggacgcactgaggcaggatatcatgggcacccccgttcctgagacaaccttgtaccacaccttccagcaatcctctctacagcacaaaagcaagaagaaaaataagggaccgatagccggcaaaagcaaaagaaggatctcttgcaaagatcttggtagaggagattgcgaaggctggctctggaaaaagaaggacgctaagagctatttttctcagaagtggaaaaaatattggtttgtgttgaaagatgcgagtttgtactggtacataaacgaggaagatgagaaagccgagggtttcattagcttaccagagttcaaaattgacagagcatctgaatgtcgaaaaaagtacgcctttaaggcctgtcatccgaaaataaagtctttctatttcgcagccgaacacctcgacgatatgaatcgatggcttaataggatcaacatgctgaccgcagggtatgcagaaagagaacggatcaagcaagagcaagattactggtcggaatcagacaaggaagaagctgacactcctagtactccaaaacaagactctccaccccctccatacgatacttacccaaggcctccctccatgtcctgcgcatcgccctatgtagaggctaagcattctcgcctctcctctacagagacctcccaatcgcaaagtagccacgaggagttcagacaggaggtcacaggctcttccgcagtttctccaattcgtaaaactgcttcacagcgacggtcatggcaggacctgattgaaacccccttgacttcgagcgggctgcattatctgcagacactgccactagaggattcggttttttcagattcagctgcaatttcacccgaacaccgacgccagtctacactgcccacgcagaagtgtcatcttcaggaccactacggtccttaccctctggccgaatctgagcggatgcaggtgctgaatggaaacggcggaaagccccggagctttacccttcctcgggactccggctttaatcactgttgcctcaatgcaccagtgagcgcctgcgatcctcaggatgatgtgcagccacccgaggtggaggaagaggaggaagaagaagaagaggagggcgaagctgctggcgagaacatcggtgagaagtcagagtcgcgcgaggaaaaactgggcgactccctgcaggacctttatagagcactggagcaggccagcttgagtcccctgggagagcaccgtatttccacgaagatggagtacaagctgagcttcatcaagcgctgcaatgatccggtcatgaacgagaaactgcataggttgaggattctgaaatccactttgaaagctagagagggggaagtggctattatcgataaggtgctggacaaccctgatctcaccagcaaggagttccagcagtggaagcaaatgtatctcgacctgttcctggacatttgtcaaaacaccacatcgaacgacccactgagcatttcatcggaagtggacgtaatcacgagtagtctggctcacacccacagctatatcgagactcacgtgtag

SEQ ID NO: 112975 - DNA, 3015 bp, synthetic construct
  misc_feature 1..3015: note = Description of Artificial Sequence: Synthetic coding sequence
  source 1..3015: mol_type = other DNA
atggctttaattatggaacccgtttccaagtggtctccatcacaggtcgttgattggatgaaagggctcgacgattgcctgcagcagtacattaagaacttcgagcgggagaaaattagcggagaccagctcctccgcattacacaccaggaattggaagatctgggtgtgtcaaggattggccatcaggagctgatactggaagcagtggacctgctttgcgccctgaactatggactggaaaccgagaacctcaaaactctgtcacacaagcttaatgctagtgcaaagaatttgcagaatttcatcacagggcgccgccggtcaggccactatgatggacggacaagccgcaaattgccaaacgacttcttaacttccgtggttgatctcatcggtgctgccaagagcctattggcatggttagatcgctccccatttgccgccgtgactgattacagtgtgactcgcaataacgtaatccagctctgtctcgagctgactacgatcgtccagcaagactgcaccgtgtacgaaacagaaaataagatacttcacgtgtgcaaaacattgagcggcgtatgcgaccacataatatctctgtcttcagaccctctcgtttcccaaagtgcgcacctggaggttattcaattagcaaacattaagccgagtgagggccttgggatgtatattaagtccacatacgacggccttcacgtgattacaggcaccaccgagaatagccccgcagatcggtgtaaaaagatccacgcgggagatgaagtgatccaggtaaaccatcagactgtggttggctggcagctgaaaaaccttgtcaatgccctgagggaagatcctagcggcgtaatcctgactctgaagaagagacctcagagcatgctaacatcagctccagctttacttaagaatatgagatggaagccactcgctttgcagcccctgattcccagaagccccacctcttctgttgcaacccctagcagtactatttccactccaacaaagcgggatagctccgccctgcaggacctttacataccgcctcctcctgctgagccctacatcccaagagatgagaaaggaaacctcccgtgtgaggacttgcgagggcatatggtgggaaagccagtccacaaaggttcagaatcccccaacagcttccttgatcaagagtacaggaagagattcaatattgtagaagaagatacagtgctctactgctacgagtacgagaaagggcgttcttccagtcagggccgccgagaatccaccccgacttacgagaacagcctgctacgctatatgtctaacgaaaaaatcgcgcaggaggaatacatgtttcagcggaattctaagaaagacaccggcaaaaagtctaagaagaagggtgacaagtctaatagtcccacccactactccctgctgccttctttgcagatggatgccctcaggcaggatattatgggcacgcctgttcccgagactacactgtatcacacctttcagcagtcatctctgcagcacaaatccaaaaaaaagaacaagggtcccattgccgggaagagcaagcggcgaatctcatgtaaggacctgggtaggggcgactgtgaaggctggctctggaaaaaaaaagatgccaagtcctatttctcacagaaatggaaaaaatactggttcgtactgaaagacgctagtctgtactggtatattaacgaggaggacgagaaggcggaggggttcattagcctgcccgaattcaaaattgaccgtgcgtccgaatgccggaagaaatacgcatttaaagcttgccaccccaaaataaagagcttttattttgccgctgaacacttagatgacatgaatagatggctgaaccgaatcaacatgcttacagctgggtacgccgaacgggagcgaattaagcaggaacaagactactggagcgagtctgacaaagaggaggcagatacaccaagcacacctaagcaggactctccaccgccaccgtatgatacataccctagaccaccatctatgtcctgcgccagtccctacgtagaagctaaacacagtcgacttagttcgactgagactagccagagtcaaagttcccatgaggaatttcgacaggaggtgaccggcagttcagccgtctcacctatcaggaagactgcctcacagaggcggtcctggcaggacttgatagagacccctctgacctcaagcggcctccactaccttcaaacactgcccttggaagattctgtctttagcgactccgctgcaatctctcccgaacacagacgacagtccactctgccgacccagaagtgtcacctgcaggaccactatggcccatatcctctggccgagagcgaaaggatgcaagtgttaaatgggaacgggggcaagccgcgttccttcacgctaccaagagactctggcttcaatcactgctgcctcaatgccccagtgagcgcgtgtgacccccaggacgacgtgcagccgcccgaagtggaggaagaggaagaagaggaggaagaggaaggagaagccgccggagagaacataggcgagaagtcagaatcccgggaggagaaacttggcgactcacttcaggatctttatagagcgcttgagcaggcttcgctttctccactgggagagcacaggatcagcacaaagatggaatacaagttgtcttttatcaaaaggtgtaacgaccctgtcatgaacgaaaagctccacagactcagaattcttaagtccacactgaaagccagagaaggggaagtggctattattgacaaagtcttagataatccggacctcaccagtaaagagtttcagcagtggaagcaaatgtatttagacctgtttttggatatctgtcagaatacaacatcaaacgatcctttatccatcagctccgaagtcgacgtgatcacatcctccttggcacacacacattcttacattgagacgcacgtatag

SEQ ID NO: 112976 - DNA, 2550 bp, synthetic construct
  misc_feature 1..2550: note = Description of Artificial Sequence: Synthetic coding sequence
  source 1..2550: mol_type = other DNA
atggcactgatcatggagcctgtgtcaaagtggtcacccagccaggtcgtggattggatgaagggcctcgacgactgtcttcagcaatatattaaaaacttcgagcgggagaagatcagcggcgatcaacttctccgaatcacccatcaggagcttgaagatcttggcgtgtcgcggatcggtcaccaggaactcatcttggaagccgtcgacctcctctgcgccctgaactacggcctcgagaccgaaaatctgaagactctgagccataaacttaatgcttccgcaaagaacctgcagaacttcatcaccggcagaagacggagcggacactatgatgggcgcacttcaagaaagttgcctaatgattttttgacctctgtcgtggacttgataggtgccgccaagtctttgctggcctggttggaccgttcgccattcgccgcggtcaccgattatagcgtcacacgcaacaatgtgatccaactgtgtttagaactaaccactatagtacagcaagactgtaccgtgtacgagaccgagaataagatccttcacgtctgcaaaacactcagcggcgtgtgtgatcacatcatcagtctatcttctgaccccctggtctctcaatcggcccacttggaggtgatccagctagccaatattaaaccgtcagaaggcctaggaatgtatatcaagtcgacttacgatggtctgcacgttattaccggcactaccgagaacagtcccgcggatcgctgcaagaagattcatgccggggacgaggttattcaagtgaatcatcagacagtgccgttgattccgaggagccctacatcaagcgtggctacaccatcctcgactatatctacccccaccaaacgagattcctcagcactgcaagatctgtacattccccctccccccgctgagccatatatcccgagggacgagaagggcaacctgccgtgcgaagaccttcgtggccacatggtcggtaagcccgtgcacaagggctccgaaagtcccaatagtttcttggaccaggaataccgcaaacggttcaatattgtcgaggaggacactgtgctctattgttacgagtacgagaagggacgcagcagctcgcagggtcggagggagagcaccccgacgtatggaaagttgcgtcctatctcaatgcctgtcgagtataactgggtaggcgactatgaggatcctaataagatgaagcgtgattccagacgcgagaattctctgctgagatatatgtccaatgagaaaatcgcgcaagaggagtacatgtttcagcgtaacagtaaaaaagataccggcaagaaatccaaaaagaaaggagacaagtctaatagtcctactcattacagtctactgcccagtctgcagatggatgctctgagacaagacataatgggcaccccagttcctgaaacgacgctgtatcacacatttcagcagagtagcctgcagcataagtccaagaaaaaaaataaaggacctatcgctggtaaaagcaaaagacgaatttcttgcaaggacctgggacgaggggactgcgagggttggctgtggaagaaaaaagacgcaaaaagctatttcagtcagaaatggaaaaaatactggtttgtgttgaaagacgctagtctgtactggtatatcaatgaggaagatgaaaaagcagagggctttatctccctgcccgaatttaagatagatcgcgctagcgaatgtcgcaaaaagtatgctttcaaggcctgccatcctaaaatcaagagcttctatttcgccgctgagcacctcgatgacatgaacaggtggctgaacaggattaacatgctcaccgcaggctacgctgaaagggaacgaataaaacaagaacaggattactggtctgagagcgataaagaagaggcagacacaccatccactcctaaacaggactctccacccccaccatatgatacttatcctcggcctccctctatgtcatgtgcgagcccttacgtcgaagcgaaacattctcggctgtcctcaaccgaaactagccaatctcagtcttcccatgaggagtttcgccaagaggtgaccggttcttcagccgtgtctcccattcgcaagaccgccagccagaggagaagctggcaggatctgatcgaaaccccactcactagcagtggcctgcactatttacagaccctgccattggaagattcagtgttctcagattccgcagcaatctcaccagagcatcggcgccagagtacactcccaacgcaaaagtgccacctgcaggaccactatggcccttatccactagcagaatcggaaaggatgcaggtgctgaatggtaacggcggaaaaccccggtcatttactctccctcgtgactcagggtttaaccactgctgcctcaacgcccccgttagcgcatgcgaccctcaagacgacgtccagccgccagaggtggaagaggaagaggaagaagaagaagaggagggcgaggccgccggagaaaacatcggggagaaatcctag

SEQ ID NO: 112977 - DNA, 414 bp, synthetic construct
  misc_feature 1..414: note = Description of Artificial Sequence: Synthetic coding sequence
  source 1..414: mol_type = other DNA
atggatgattctgacacgccaacatattacttgcaaattgaaccccaagacggatgccatcctggagattccgtggagaggagtgttacttgcttgccgagcgcctctgacgagaatgagaaccagttagatggagacgggcacgagcacctgacctcctccgatagtgccatggggaaaccacaggtgtccgagcaggactctttgaataacaacgaatcttgcaccttgtcctgcgaggtagctgcaggcgagaaccttcagaatactctatgcgaggcctcccgcgatgaacaagctttcctcggcaaggacaaaaagattcctggcaagcgcagtcccagaagcaagaaaggtactgccaagaaaattcctccagactcgcgcattctattcccgggcggcgggctgtag

SEQ ID NO: 112978 - DNA, 1851 bp, synthetic construct
  misc_feature 1..1851: note = Description of Artificial Sequence: Synthetic coding sequence
  source 1..1851: mol_type = other DNA
atggacgattctgacactccaacctactatcttcagattgagccacaggatgggtgtcatccaggtgactctgttgaaagatccgtgacttgccttccaagcgcttcagacgaaaacgaaaaccagctggatggagacggccatgagcacttaacgagtagcgatagtgcaatgggcaaacctcaagtctccgagcaagactcgctcaacaacaatgaaagttgcaccttaagttgtgaagttgccgctggggaaaatctccagaacactctgtgcgaagcctctagggatgagcaagcctttctgggtaaggataagaaaatacccggcaagcgctctcctcgatctaaaaagggaacggccaaaaagattcccccgggactgttcagcggagacatcgcacccctgatgcaagaaaaggttctgagcgctgtcacatacgccgttgatgatgaagaagctgctgaggttaacgccaatgagcaaccggaggctccaaagttggtgctgcagagtctcttctctctgatcagaggcgaggtggagcagctggactcaagagccctgccgctgtgcctgcaccagattgccgagtcctactttcaagaggaggattatgaaaaggcaatgaagttcattcagctcgagaggttgtaccacgaacaactgctggccaatctcagtgccattcaggagcagtgggagaccaagtggaagacagtgcagccccacaccgttaccgcgcttcgcaactcagagaaaggattcaacggcgaagattttgagcgcctgactaagatctgcgctactcaccaagacccccttctcagtaaacacaaaatcgccgccgtggaaaagtctcaagagaggaagtgttcaacacagttgcttgtctcagaggacccgaaggagggaggcgctaccacaaaggagtccgagagtaagacttgcctagggacagagagttccaaagagtcgcaacataccgtggagcccctgggttccagcccatgctgccaccagatggatgtgcagaccgactcgccaagtttatccgtgacagccggtaaggatcatatggaagaattgctttgctccgctgaagctaccctagccctgcacacccaatcgtctgagacggcaggctctccgagcggacctgatagtagcgaggacgcctgcgaggatgactctaggctgcagctcgcacaaacagaggcctgccaagacgtggcccgtatcgaagggattgccgaggaccctaaagtgttcctcagtagtaagagtaaaacggaaccactgatctctccaggatgcgatcggatcccaccagcattaatctccgaggggaaatatagccaggctcaacggaaagaattaagactgccattgcgcgatgcctccgaagctctgcctacggatcagttggagaacaatgaactgaacgagttacagcaacccgacttgaccgactccgatggcaagagccctcaagcacaggctgactccgacggttccgaaaacgtcctttgtggtaacaatcagattagcgacttaggcattttacttccggaagtgtgtatggcaccagaggagaaaggggacaaggacgaccagctcaataaggaaacagaagattatctgaactctctgctggaggggtgtctgaaagataccgaagactccctatcctatgaggacaatcaggacgacgattcagaccttctgcaagacctgtccccggaggaggccagctactctctgcaagagaacctccctagcgacgagtcctgtctgtccctggatgacctcgccaaaagaattgaaatcgctgaagtcaaccaacgatag

SEQ ID NO: 112979 - DNA, 2178 bp, synthetic construct
  misc_feature 1..2178: note = Description of Artificial Sequence: Synthetic coding sequence
  source 1..2178: mol_type = other DNA
atggacgactctgacacccccacatactatctgcagattgaaccccaagatggctgtcatcccggggattcagtcgaaaggtccgtcacatgtctgccaagcgcctccgacgagaatgaaaatcagttagacggtgatgggcatgagcacctgaccagctctgactccgcgatgggtaagccacaggtttcagagcaggacagcctgaacaataatgaaagctgtacactgtcttgtgaggtcgccgccggagaaaacctgcagaataccctttgcgaggcatccagggacgagcaggcattcctcggaaaagacaaaaagattcccggcaagagaagtccacgatctaagaagggaaccgccaagaagattccaccggggttattctccggagatatcgcccccctgatgcaagagaaagtcctatcggctgtcacatatgccgtggacgacgaagaggcagctgaggttaacgctaatgagcagccagaagcaccgaagctagttctgcaatcactgttctcgctcattcgaggtgaggtcgagcagctggattcccgggccctaccgctttgcctgcaccaaattgccgagtcttattttcaggaagaggactacgagaaggccatgaagtttatacagctggagagactgtaccacgagcagttactcgcgaatctcagcgcaattcaggagcagtgggagactaaatggaagactgtacagcctcacaccgttaccgcattgaggaactccgaaaaggggttcaatggagaagatttcgagagactcaccaaaatttgcgctacacaccaggatccactcctaagtaagcacaagatcgctgccgtggaaaaatcacaggagaggaagtgctctacgcagttattagtatctgaggatcccaaagaaggcggggctaccacaaaggagtcagagtctaagacctgtcttggtaccgagagctccaaagagagtcagcatacagttgaacccctcgggtcatccccatgctgtcaccaaatggatgtgcagaccgattccccatctcttagcgtcacagcaggcaaggatcacatggaggagctgctctgctccgccgaagcaacactcgccctgcacacccaaagctcggaaacggctgggtccccttcgggccccgacagctcagaagacgcctgtgaggacgattcacgcctccagttggcacagacagaagcttgtcaggacgtggctagaatcgaggggatagccgaggatccaaaagtctttttgagcagtaaaagcaagacagaaccacttatatcacccggttgtgaccgtattccacccgcacttatctccgaaggcaagtacagtcaggcccagcggaaggagctcagactccctctgagagatgcctctgaagcgctcccaaccgaccagctggaaaataacgaattaaatgaactgcagcaacccgacctgacagatagcgatgggaagtccccgcaggctcaagcagactcagacggatctgagaacgtcctctgcggtaataatcaaataagtgatttggggatacttctgccagaagtgtgcatggcaccagaggagaagggggataaggatgaccagctgaacaaggaaacagaggattatcttaacagcctcctggagggttgtctcaaggataccgaggattcattgagctatgaggacaaccaggatgacgactcggatctgctgcaggacctcagcccggaggaagcgagctattcgctgcaggaaaaccttccttcagacgagagttgcctaagcctcgacgatctggcaaaacggattgagatcgctgaggtggtccctactgaaggcctggtgtcaattttgaagaagcggaatgacactgttggcgaccatcccgcacagatgcagcataaaccttctaaacgcagagtgagatttcaggagatcgacgatagccttgatcaagacgaggtaggcggaggcagttgtatcctactcgtgctcttgtgcattgccaccgtgtttctcagtgttggtggaaccgcactctactgcaccttcggcgatatggaatctcccgtctgcacagacttcgcagacaatatggacttttactacacaaagctcctacaaggagtggctgaactcaaacattggatctatctctcatag

SEQ ID NO: 112980 - DNA, 3057 bp, synthetic construct
  misc_feature 1..3057: note = Description of Artificial Sequence: Synthetic coding sequence
  source 1..3057: mol_type = other DNA
atgaagatgtggctgctggtatctcaccttgtcatcatttctatcacaacctgcctcgctgaattcacatggtacagaaggtacggacatggggtcagtgaagaagataaaggatttggtccgatattcgaagagcaacctattaatacgatctaccccgaagagtctcttgagggaaaagtgagtctgaattgcagggctagagccagtccttttccagtgtataagtggcgaatgaacaacggcgacgtagacctcacgtccgacaggtattctatggtgggaggaaatctggtgatcaataatccagacaagcagaaggacgctggcatttattactgcctagctagcaacaactacggcatggttcgcagcaccgaggctacactctcctttgggtatctggaccccttcccaccagaggagagaccagaagttcgggtgaaggaaggcaaaggcatggtgttgctctgtgaccctccgtatcattttcccgacgatctgtcgtataggtggctgctcaacgaattcccagtttttattacaatggacaaacgacggttcgtatcgcaaactaacggcaatctatatatcgccaacgtggaagcgagtgacaaaggcaattatagctgtttcgtgagtagccccagtatcaccaagagcgtgttcagcaaattcataccattgattccaatcccggagaggaccaccaaaccgtaccctgccgatatcgtcgtgcagttcaaggacgtctacgcacttatgggacagaacgtgactcttgagtgctttgcattagggaatcctgtacccgacatccgctggaggaaggtgcttgagcccatgccgagtacagcagagatctccacttcaggagccgtgctgaaaatctttaacatccaactcgaggacgaagggatatatgagtgtgaggcagagaatataagaggcaaggataaacaccaggcccgtatctacgtccaggccttccccgaatgggtcgaacatataaacgacactgaggtcgatattggttctgatttatattggccctgtgtggccactggcaagcccattccaaccatccgatggctaaaaaatggctatgcctaccacaagggcgagcttagactttacgatgtgacctttgaaaacgccggaatgtatcaatgcatcgccgagaacacctatggcgctatttatgccaacgctgagctgaagatactggctctggccccaactttcgaaatgaacccaatgaagaaaaagatcctggccgcaaaaggtggtagggtgatcattgagtgtaagcctaaagcagctcccaagccgaagttttcatggtccaagggcacagagtggctggtcaactcctcgaggatactgatttgggaggacggtagtctcgagattaataatatcacaaggaatgatgggggaatctacacctgctttgccgaaaataatagaggcaaggcaaatagcacgggcaccctggttatcacagaccccacaaggattattctcgctccgattaatgccgacattaccgtcggcgagaacgccactatgcagtgcgccgcttccttcgacccggccctggacctaacttttgtctggagtttcaatggttacgttattgatttcaataaggaaaatatccattatcagagaaacttcatgctcgactcaaatggagaactgctgatcaggaacgcccagttgaaacacgcggggagatacacttgcaccgcacaaaccattgtagacaactcctctgcgtccgctgaccttgtagtgagaggtcctcctggacctcccggcggcctgaggattgaagacattcgcgcaacttctgtggcactgacctggagcagaggctccgataatcactcaccgatatctaagtacaccatacagactaaaaccatcttgagcgatgactggaaagatgcgaagacagacccacctattattgagggcaatatggaggcagcacgggcggtcgatctcatcccatggatggagtatgagttccgtgtcgtggcaaccaacactctcgggagaggcgagcctagtatccccagtaaccggatcaagacagacggtgccgccccaaacgtcgccccaagtgatgtaggcggcggtggcgggcggaaccgtgagctaacaatcacctgggcccccctctcccgagaataccactacggaaataactttggatatatcgtcgcatttaaacccttcgacggagaggagtggaagaaagttacagtcacaaatcctgatacagggaggtatgtgcacaaggacgagactatgtctccttccacggcctttcaggtaaaggtaaaggcttttaacaacaagggtgacgggccgtattcgctggtcgccgtgatcaatagcgctcaggatgcaccgagtgaggcacccacagaggtcggggtgaaggttctgtcttcttcggaaatctcggtccactgggagcatgtcctggaaaagatagtagagtcctaccaaataaggtattgggcagcacacgacaaagaagaagctgcaaatcgcgtccaagtgaccagccaggagtattcagcaaggcttgagaacctccttcctgacacccaatacttcatcgaggttggagcctgcaactcggccggttgcggccctccgtctgacatgatcgaagccttcacaaagaaggcaccaccctctcagccccccaggatcatatccagtgtgcgttcggggagcagatatattatcacatgggaccacgtggtcgccctctcgaatgagtctactgtgacaggatataaggtcctctaccggccggatggacagcacgacggtaaattatatagtactcacaaacacagtatcgaggtgcccatccctcgtgacggcgagtacgtggtggaggtgagggcccactcagatgggggggatggggtagtttcgcaggtcaagattagtggagctcccacgctgtccccaagcctgctaggtctcctgttaccggcctttggcatacttgtctacctggaattctag

SEQ ID NO: 112981 - DNA, 3024 bp, synthetic construct
  misc_feature 1..3024: note = Description of Artificial Sequence: Synthetic coding sequence
  source 1..3024: mol_type = other DNA
atgaagatgtggctattagtgagtcacctggtgatcatttccataactacttgtctggctgtgtccgaggaagataagggttttggtcctattttcgaagaacagccgattaacactatctaccctgaagaatctctggaagggaaagtgagcctcaattgccgagctcgcgcaagccccttcccagtgtacaaatggaggatgaataacggcgatgtggatttaacttccgatagatactctatggtcggtggcaacctggtaattaacaaccccgacaaacagaaggatgcaggaatctattactgcctggcaagcaacaattacggtatggtcaggtctaccgaagcaaccctcagctttgggtatctggatcccttccctccggaagaaagacctgaggtgagggtgaaagagggcaaaggaatggtgctgttgtgcgacccaccctatcacttcccagacgacctctcctatagatggttgctgaatgagtttccagtgtttataacgatggacaagaggcggttcgtgagtcagaccaatggaaacctgtatattgcaaacgtagaggcaagcgacaagggtaactattcatgctttgtttccagtccctcaataactaagtcagtgtttagcaaattcatcccattgatacctatacctgagcggactactaaaccataccctgctgacatcgtggtccagttcaaggacgtatacgctttgatggggcagaatgtaactctcgaatgctttgctctcggcaatcccgtgccagacatcagatggcgtaaagtgttggagcccatgccctccacggccgagatttcgaccagcggggcagtcctcaaaatatttaacatccaactcgaagatgaggggatatacgagtgtgaagcagagaacatccgggggaaggacaagcaccaggctaggatctacgtgcaggcatttcccgagtgggtcgaacatatcaacgacacggaagtggatatcggatctgatctgtattggccttgtgtcgcaacaggaaaaccaattcccactattcgctggttaaagaacggttatgcctaccacaagggcgagctgcgcctctatgatgtgacatttgagaacgctggcatgtaccaatgcatcgccgaaaatacttatggcgctatctacgccaacgcagaactgaagatactggcgttggctccgacattcgagatgaaccccatgaagaagaagattcttgcagcaaaggggggacgggttattattgaatgcaaaccaaaggcagcacctaagccaaagtttagctggtccaagggaactgaatggctggtcaacagttccaggatcctcatttgggaggacggatcgctagagatcaataatataactagaaacgatggcggcatctatacatgttttgctgagaataatcgcggaaaagccaacagtacagggaccctggtgattaccgaccccacccgcatcatcctcgcccctattaacgcagacattaccgtaggagaaaatgccaccatgcagtgcgccgcctcattcgaccccgctttggacctgacatttgtgtggtcttttaacgggtacgttattgactttaacaaagagaacatccattatcaacgcaacttcatgttggacagtaacggagaactcctgatcaggaacgcccagctcaagcatgctgggcgatacacttgtaccgcacagactatcgtagataacagttcagcatctgccgatttggtcgtgcgtggacctccaggaccacctggggggctgagaattgaggacattcgagccaccagcgtggctctgacctggtctcggggcagtgataatcattcgcccatcagcaaatacaccattcagactaaaacaatcctctcggatgactggaaggacgcaaagacggaccctcccattattgagggcaatatggaggccgcacgtgccgtggatctcatcccctggatggaatatgaatttcgggtagtcgcaaccaacacactgggaagaggcgagccgagtatccctagcaatcgcatcaagaccgatggggcagctcctaatgtggccccttctgatgtcggtggggggggaggcagaaaccgggagcttacaattacgtgggctcctttgagtagagaatatcactacggtaataacttcgggtatatcgtagcctttaagccgttcgatggggaagaatggaaaaaggtgaccgtgacgaaccccgacacaggaagatacgtccataaggatgagacaatgagcccaagtactgcatttcaagttaaagtgaaggcttttaataataagggagatggaccttactccttggtggcggtgatcaattctgcccaggacgccccaagtgaggccccaactgaggtgggtgttaaagtgctcagttcttctgagatctcagtccactgggagcacgtgctcgaaaaaatcgtggagtcataccagatccggtactgggctgctcatgacaaggaagaggctgccaatcgtgtccaggtgacctcacaagaatactcagctagacttgaaaatctcctaccagacactcagtatttcattgaggtgggagcctgcaattctgcgggctgcggccccccatctgatatgattgaagccttcaccaaaaaggcaccgccaagtcaacctcctcggattatctcttccgtgagatccggatcccgctatattatcacctgggatcacgtggtggcattgtccaacgagtccaccgtcacaggctataaggtgctgtatcgcccagatgggcagcatgatggcaagttgtactctactcataagcattctattgaggtaccaatacccagagatggggagtacgtcgtagaggtgcgggcccattccgatgggggagacggagtcgttagtcaagtaaagattagcggtgcacctaccctgtccccatccctccttgggttacttcttccagcttttggaattcttgtttatctcgagttctag

SEQ ID NO: 112982 - DNA, 1884 bp, synthetic construct
  misc_feature 1..1884: note = Description of Artificial Sequence: Synthetic coding sequence
  source 1..1884: mol_type = other DNA
atgaaaatgtggcttctggtcagtcacttggtgataattagcattaccacctgtctggccgagttcacatggtatcgaagatacggtcatggagtgtcggaggaagataagggcttcggacccatcttcgaagagcagccgataaataccatctacccggaggaaagcctggaagggaaggtgagcctgaactgcagagccagagcctctccattccctgtgtacaaatggcggatgaacaacggtgacgtcgacctcacaagtgatcggtactctatggtgggcggtaacctggtcattaataatcccgacaaacagaaagacgcgggcatttactattgccttgcaagcaataattatggcatggtgaggtccactgaggcgactctgtcttttggctatttggatcctttcccacccgaagaaagacccgaagtgcgggtgaaggagggcaaggggatggttctgctttgtgaccctccttaccactttcctgacgatttgagttatcggtggctgctgaacgagttccccgttttcattacgatggacaagcgccggttcgtgtctcagactaatgggaatctttacattgcaaatgttgaggcttcagataaggggaactacagttgttttgtctctagtccctctattactaagagtgtgtttagcaaatttatacccctcatccctatacctgagagaacaactaaaccataccctgccgacatcgtggtgcaattcaaggacgtctacgctctcatggggcagaacgtgacactggagtgtttcgcattaggcaatcccgtccccgacataagatggcgaaaagtgttagaacccatgcccagtaccgccgagatctctacgagtggcgcagtgttgaagatatttaatatccagctcgaggatgagggcatttatgagtgcgaagcggaaaacatcaggggcaaggataaacaccaggctcgcatctacgttcaggcattccccgagtgggttgaacatattaacgatacagaagtcgacataggttcagacttgtactggccctgcgtggcaaccggtaagcctatcccgactattagatggttgaaaaacggctacgcctaccataagggggagctgcgattatacgacgttacatttgagaacgcgggcatgtatcagtgcatcgccgagaacacatatggggctatctacgccaatgccgagctgaagattctcgccctcgctccaacatttgaaatgaaccccatgaagaagaaaattctcgcggctaaaggggggagagtgatcatagaatgtaagcccaaagccgcccctaaacctaaatttagctggagtaaaggcaccgagtggcttgtgaacagtagccggattctcatttgggaagatggaagcctggaaattaacaacatcactagaaacgatgggggaatatacacctgtttcgcagaaaataaccgcgggaaggcaaactcaactggtacactggtgattaccgaccccacaagaataatacttgctccgattaacgccgatatcacagtcggtgaaaacgcaacgatgcagtgcgccgcctcatttgacccagccctggacttgaccttcgtatggtcatttaacgggtacgtcatcgacttcaacaaagaaaatattcattatcagaggaactttatgcttgacagtaacggagaattactcatccggaatgcacagctgaaacatgccggcaggtacacttgtaccgctcagaccatcgtggataatagttccgcaagcgctgacctggttgtacggggaaagaaccgaaaaggcggggaaaagaacatggtagattcgttcctgcctgtttgtgcttcgctgccgccaacctggtag

SEQ ID NO: 112983 - DNA, 1884 bp, synthetic construct
  misc_feature 1..1884: note = Description of Artificial Sequence: Synthetic coding sequence
  source 1..1884: mol_type = other DNA
atgaaaatgtggctgttagtgtctcatctggtaatcattagcatcactacgtgtctggcagaattcacgtggtataggagatatggccatggggtatcggaggaagacaaggggtttggccccattttcgaagaacagccaattaatactatctatcctgaggaaagcttagagggcaaggtgagcttaaattgcagggcccgagcttcccctttccctgtttataaatggaggatgaataacggagacgtcgatctcactagtgacaggtacagtatggtgggtggcaacttggtaattaataaccctgacaaacagaaggatgctggcatctactactgcctcgcgtccaacaattatgggatggtgcggtcaaccgaggctacattatcttttggttacttggaccctttcccgccagaggagagacctgaagttagagtgaaggagggaaagggaatggtgttgttatgcgatcctccttatcactttccagacgatctctcgtatcgttggctcctcaatgagttccctgttttcatcacaatggataagcggcggtttgtaagccagaccaacggaaacttatacatcgcaaacgtggaggcctcagataaggggaattattcttgtttcgtcagtagcccttctattaccaagtctgtgttctctaagttcattccacttattcccatacctgaacgtaccacaaaaccgtatcccgccgatatagtggttcagtttaaggacgtttacgctttaatgggacagaacgtaaccctggaatgcttcgccctaggtaaccctgtccccgatatcagatggaggaaagtcctggagccaatgcctagcacagctgaaatcagtacaagtggagcagtgctgaagatatttaacatccagctggaggatgaggggatatacgagtgtgaggccgaaaatatcagaggcaaagataagcatcaggcccggatttacgtgcaggcctttcctgagtgggtcgagcatataaatgatactgaggtggatatcggtagcgacctctactggccttgcgtggcaacaggcaagcccattccaactatccgatggttgaagaacggctacgcttatcacaaaggcgaactgcggctgtatgacgtgacgtttgagaatgccggcatgtatcagtgtattgcggaaaatacctatggtgccatttacgctaatgcggagctgaagatccttgctttggccccaacatttgagatgaatccaatgaaaaagaagatcttggccgcgaaaggggggagggtaatcattgagtgcaagcccaaggccgcacccaaacccaagttttcctggtccaagggcacagaatggctggtgaatagttctcgcatactaatctgggaggacggctctctggaaattaataatattacccgaaacgatggaggaatatatacatgttttgctgagaacaatcgtgggaaggccaattccacaggtacgttggtgattaccgacccgacgagaattattttggcccccattaatgcagacattacagtgggggaaaatgcaaccatgcaatgtgccgctagctttgaccctgcactagacctgaccttcgtgtggtctttcaacggatacgtaattgatttcaataaagaaaatatacactatcagaggaatttcatgctcgactccaacggggagctgttgataaggaatgcccagctgaagcatgcggggcgatatacgtgcaccgcacagactatcgttgacaatagctcagcctctgccgacctcgttgtcagaggtaagaacaggaaggggggagagaaaaatatggtagactcctttctgcctgtttgtgccagtctgcctcccacatggtag

SEQ ID NO: 112984 - DNA, 1884 bp, synthetic construct
  misc_feature 1..1884: note = Description of Artificial Sequence: Synthetic coding sequence
  source 1..1884: mol_type = other DNA
atgaagatgtggctcctggttagccatctggtgattataagtataaccacatgtctggccgagttcacctggtaccggaggtatggtcatggcgtgtctgaagaagataagggattcggacctatctttgaagaacagcccatcaacactatatatccagaagagagccttgagggtaaggtgtcactgaattgcagggctcgagctagtccctttccagtgtacaaatggcgtatgaacaacggcgacgtcgacctgacaagcgacaggtattcaatggtgggaggtaatcttgtcatcaacaaccccgacaagcaaaaggacgctggtatctattattgtctggcgagcaataattacggaatggtcaggtctaccgaagcgaccctgtcattcggatacctggatccattccccccggaagaaagacctgaggtcagggttaaggagggcaaaggtatggtcctcctctgtgatcccccttatcatttccccgatgatttgtcttatcggtggctcctgaatgagttcccagtgttcatcactatggacaagcgcaggtttgtcagtcagactaatggcaatctgtatatcgcaaacgtggaggcgagcgacaaaggtaattactcatgcttcgtaagttcccccagtattaccaaaagcgtgttttcaaagttcatccccctcatacctatccccgagaggacgacaaagccctatccagcagacatcgtagtgcaattcaaggacgtatatgcacttatgggacagaatgtgaccctggaatgcttcgcgctggggaaccccgtgcctgatatccggtggcgcaaggtgctggagcccatgccaagtaccgctgaaatatccacttctggcgctgtgctgaaaatctttaacatccaactggaggacgaggggatttacgagtgtgaagctgagaacattcgtggcaaagataagcaccaagctcgcatctatgtgcaagcttttccagaatgggtagaacatatcaacgatacagaggttgatatcggcagcgacctttattggccttgcgtggctacaggaaagccaattccaacgattcgctggctgaagaacggttacgcttaccacaaaggcgaacttagactttatgatgtgacctttgagaatgccgggatgtaccagtgcatagcagagaatacctatggagctatttacgcaaacgctgagttgaaaattttagccctggccccgaccttcgaaatgaaccccatgaagaagaaaattctggcagccaaaggagggagggtgataatagagtgcaaacctaaggccgctccgaaacctaagttttcctggagcaaaggcacagagtggctcgtcaactcaagcaggattctgatttgggaggatggctctctggagataaataacattacccgtaatgatggaggaatttacacttgtttcgccgagaataacaggggtaaagccaactcgacgggcactctggttattactgatcccaccaggataattctggcaccaattaatgccgatatcaccgtgggagagaacgccacgatgcagtgtgccgcttcattcgatccagcactggatctcacatttgtgtggagcttcaacgggtacgtgattgacttcaacaaagagaacattcattatcagcggaactttatgctggactccaacggcgagctcctcattcggaatgcacagctaaagcacgcaggcagatatacctgtacagctcagactatcgttgacaactcttccgcctcagctgatttggtggtgaggggtaaaaaccggaagggcggggaaaaaaatatggtggactccttccttcccgtatgtgcctcgctgcctcccacatggtag

SEQ ID NO: 112985 - DNA, 258 bp, synthetic construct
  misc_feature 1..258: note = Description of Artificial Sequence: Synthetic coding sequence
  source 1..258: mol_type = other DNA
atgaagatgtggctactggtctcccacctggtgataatctccatcacgacctgtctggctgagttcacctggtacagaagatatggtcacggagtcagcgaggaagacaaaggttttggcccgatatttgaggagcagccaattaacacaatttatcccgaagagagcttggaagggaaggttagcctcaattgccgagcgagagcctctccattccccgtgtacaagtggcgaatgaacaacggggatgttgactag

SEQ ID NO: 112986 - DNA, 3057 bp, synthetic construct
  misc_feature 1..3057: note = Description of Artificial Sequence: Synthetic coding sequence
  source 1..3057: mol_type = other DNA
atgaagatgtggctgctggtcagtcacctggttatcatatccatcacaacctgtctcgccgaatttacttggtaccgccgctacggccatggcgtgagcgaggaggataagggctttgggcccatttttgaagagcagccaattaatactatctaccctgaagaaagcctcgagggcaaagtgagtttaaactgtagagcaagagcaagcccctttccggtatacaaatggagaatgaataatggagatgtcgacctgaccagtgatcgctatagcatggtgggcggaaacttggtgattaataatcctgataagcagaaagacgctggaatctactactgcctggcctctaacaattatggtatggtgcgctccacagaagcgacccttagcttcggctatctcgatccatttccaccagaggaacggcccgaggtgcgagtaaaggagggtaaaggcatggtcctgctttgtgacccaccatatcacttccccgatgacctatcatataggtggttattgaacgaattcccggtttttataacaatggacaaaaggcggtttgtgagccaaacgaatggaaacctgtacatagccaacgtagaggccagtgacaagggaaactatagctgctttgtaagcagcccaagcatcaccaagtctgtgttctctaagttcatcccacttatacccattcctgagagaaccactaaaccttatccagcagacattgtcgttcaatttaaagatgtctatgctctgatgggacagaatgtcacgctggagtgttttgccctcgggaatccagtgcccgacatacgctggcggaaggtcttggaaccaatgcctagcaccgccgagatatcaacaagtggggccgtgcttaagatcttcaacattcaattagaagacgaggggatatatgagtgtgaggctgaaaatatcagaggaaaagataagcaccaagcccgaatctacgtgcaagcatttcccgagtgggtagaacacattaatgacaccgaagtggacatcggaagtgatctctactggccctgcgtggcaacagggaaacccattccaacaattcggtggttaaaaaatggctatgcatatcacaaaggggagctcagactctatgatgtgaccttcgagaacgctggtatgtaccaatgcatagcggaaaacacttacggagcaatttatgcaaatgccgaactgaaaatcctggcgctggcgcctacatttgagatgaaccctatgaaaaagaagattctggccgccaagggcgggcgtgttataatcgaatgcaagccgaaagctgcaccaaagcccaaattcagctggagtaaaggcacagagtggcttgtgaacagctcccgcatactcatctgggaggacggatctctcgagatcaataacatcaccagaaatgatggaggaatctacacttgttttgctgaaaataaccggggcaaggctaactccaccgggactctggtgatcactgaccccactaggattattctggcaccaattaacgctgatattaccgttggcgaaaacgcaacgatgcagtgtgcagcctcattcgatcccgccctggacttaacattcgtgtggagcttcaatggctatgtcatcgactttaataaggaaaatattcattatcaacgtaattttatgcttgactccaatggggagctgttgatcaggaatgcacaactcaagcatgccggaagatatacctgtaccgcacagaccattgtcgataattcttctgcttccgctgatctggtggttagggggcctcccggaccccctggcggcctgcgaatcgaagacatcagggctacctctgtcgctttgacgtggagccgagggagtgataaccattcccccatcagcaaatacacaattcagactaagactatcttgtcagacgattggaaagatgccaaaacggacccccccattatcgagggcaatatggaggcggctagggccgtagacctaatcccatggatggaatatgaatttagggtagtcgctaccaacacactgggccggggcgaaccttctattccctcgaaccggatcaagacggacggggccgccccaaacgtggctccgtctgacgtgggtggcggaggaggaaggaaccgcgaactcactattacatgggcccccttgtcacgtgagtaccattacgggaataatttcggatatattgtcgccttcaagccctttgatggcgaggagtggaaaaaggtgactgtgacgaatcccgataccggccgctacgtccacaaggacgagaccatgtctcctagcactgcatttcaggtaaaggttaaagcctttaacaataagggggacggcccctacagcttggtggccgtgataaactccgcccaggatgctccgagtgaggctcccaccgaggtgggggtgaaggtcctttcctcctcagagatcagcgttcactgggagcacgttctggagaagattgtggagtcctaccaaattagatactgggccgcacacgacaaggaagaggccgccaatagggtgcaggtcacctctcaggagtactctgctcgcctcgagaacctgcttcctgacacgcagtacttcattgaggtgggagcatgcaactcagctggctgcggcccacccagcgatatgatcgaagcatttacaaagaaagctccccctagccagccaccccggattatttcctcagtaaggtcaggtagcagatatatcatcacttgggaccacgtcgtggccctaagcaatgaaagtaccgtgacgggctacaaggtgctgtaccgccctgatggacaacatgacggcaagctatactccactcacaagcattctatcgaggtccctatccccagagacggcgaatacgtggtcgaggttagagcacatagcgacggaggggatggcgtagtaagccaagtgaaaatttctggggcgccaactctgagtcctagcttgctggggcttctcctgcctgcctttggtattctcgtgtatctggaattttag

SEQ ID NO: 112987 - DNA, 192 bp, synthetic construct
  misc_feature 1..192: note = Description of Artificial Sequence: Synthetic coding sequence
  source 1..192: mol_type = other DNA
atgaagatgtggctgctcgtatcacatcttgttataattagtatcacaacttgcctcgcagagttcacctggtatcgcagatacgggcatggggtgagtgaggaggataaggggttcggacccatttttgaggagcagccgattaatacgatctaccctgaagagagtcttgagggcaaggttagtctgtag

SEQ ID NO: 112988 - DNA, 273 bp, synthetic construct
  misc_feature 1..273: note = Description of Artificial Sequence: Synthetic coding sequence
  source 1..273: mol_type = other DNA
atgaagatgtggctgctcgtttcgcacttggtgatcattagcattaccacctgtctggcagaattcacgtggtaccggcggtatggtcatggggtctctgaggaagacaaagggttcgggcctatctttgaggaacagccaattaatactatctaccccgaggagtctctcgagggcaaagtctcactgaactgccgagctcgagcctcacctttcccagtgtataagtggcgaatgaataatggagatgtcgatttaactagtgaccgttag

SEQ ID NO: 112989 - DNA, 222 bp, synthetic construct
  misc_feature 1..222: note = Description of Artificial Sequence: Synthetic coding sequence
  source 1..222: mol_type = other DNA
atgaaaatgtggttgttagtgtctcatttggtgatcatctccataaccacctgcctggcagaattcacatggtaccgacggtatggccatggggttagcgaagaagataaaggattcggcccaatctttgaggaacagcccattaacacaatataccccgaggaatcactagaagggaaggtctccctcaactgcagagcccgtgcctccccttttccatag

SEQ ID NO: 112990 - DNA, 3123 bp, synthetic construct
  misc_feature 1..3123: note = Description of Artificial Sequence: Synthetic coding sequence
  source 1..3123: mol_type = other DNA
atggggactgcaacgcgccggaaaccccatctgctgctggttgccgcggttgccctggtatctagcagcgcatggtcttctgccctggggtcccagactacctttggccccgtatttgaggaccagcccctgagcgtcctgttcccagaggagtctaccgaagaacaggtgctcctggcgtgtcgcgcgcgggccagccctccagccacatacagatggaaaatgaacggcaccgaaatgaagctggaacccgggagcagacatcagctcgttgggggaaacttggtcatcatgaatccgaccaaggcccaagacgctggcgtgtaccaatgcctcgcctcaaatcccgtcggcacggtcgtctcccgtgaagctatccttcggtttggctttctgcaggaattttccaaagaggagcgggatcctgtcaaagcccacgaagggtggggcgtgatgctgccttgtaacccccctgcacattaccctggcctgagctatagatggctgttgaatgaatttccaaatttcatccccacggacgggaggcatttcgtgtcgcagacgacagggaatttgtacattgcacgcacgaacgcttctgacttgggaaattattcctgcctggccactagccatatggatttctccaccaaatccgtattcagcaagtttgcacagcttaacttggccgccgaagacacccgactcttcgctccatccataaaggctcggtttccggccgaaacctatgctctggtaggccaacaggtgacccttgaatgtttcgcattcggcaaccccgtccctagaatcaaatggagaaaagtagatgggtctctgagtccacaatggacaacggcagagcccactctccagataccctccgtgagctttgaggacgaaggaacttatgaatgtgaggcagaaaactccaaggggagggacactgtacagggccgcatcatcgtgcaggcccagcccgagtggctgaaggtgatatcagacacagaagcggacatcggatcaaacctgcggtggggatgtgccgccgccgggaagcctagacctaccgttcgttggctccgcaacggagagcctctggctagccagaatagggtggaagtacttgctggcgaccttcggttcagtaaactcagcctggaagatagcgggatgtatcaatgcgttgcagagaacaaacacgggacaatctacgcctccgcagagctggcggttcaggcgctggcccccgacttcaggctgaatccggttcgccgtctgattcctgctgcaagaggaggagagatcctcattccctgccaaccgagggccgcccccaaagctgtggttttatggtcaaagggaaccgagatcttggttaactcctctcgcgttaccgtgactcctgacggaacgctcattattaggaacatttcaaggtcggacgaagggaaatacacgtgctttgccgaaaattttatgggaaaagcaaatagcacgggcatcttgtctgtccgcgatgccaccaagatcactctcgccccatctagcgccgatatcaacctgggtgacaacctgacactgcagtgccacgcgagccatgatcccacgatggacctgactttcacctggacactggacgactttccgatagattttgacaaaccgggggggcactaccggcgcacaaacgtgaaagagacaattggggacttgacaatactgaacgcgcagctgaggcacgggggaaaatacacgtgcatggcccagactgtggtggactccgccagtaaagaggctactgtgctggtgaggggcccgccgggcccacctgggggtgtggttgtgcgggacatcggcgacaccacaatccagttgagctggagcagaggatttgacaaccattccccgattgctaagtacacgcttcaggcgagaaccccaccagctggcaagtggaagcaggtgaggacaaatcctgcaaatatcgaggggaatgccgaaactgctcaggttctggggttgactccgtggatggattatgagttccgagttattgccagtaacatcctggggactggagaacctagcggtccatcaagtaagatccgcactagggaagccgcccccagtgtggcaccgagtggactgagcgggggcggtggcgccccaggcgagctcatcgtgaactggacccctatgtcaagggagtaccagaatggagatgggttcggatatctgctgagctttcgccggcagggtagcacccactggcagacagctagggtgcccggggctgacgctcagtactttgtgtatagtaatgaatcagtgcgcccatacactccgtttgaagtgaagatcagatcatataaccgtcggggggatggacctgagagcctgaccgccctcgtgtattctgccgaagaggagcctcgcgtggctcccacaaaagtctgggccaagggagtgtcatcttcggagatgaacgtcacctgggaaccagtgcagcaggacatgaacggaattctgctgggttacgagatccggtattggaaggcaggcgataaggaggccgccgcagaccgggtaaggacagccggtctcgataccagtgcgcgcgtttcaggtctgcaccctaacactaaataccacgtgactgttagagcatacaaccgggcaggcacaggcccagcttcgccatctgctaatgcaacaactatgaagccgccacctagacggcctcctgggaatatttcttggaccttctcctcatcttcattatccatcaaatgggaccccgttgtcccattccgcaatgagtctgccgtaactggctataaaatgctctaccagaacgacttgcatcttactccgacactgcacctgaccggaaaaaactggattgaaatccctgtccccgaggatataggccacgcccttgttcagataagaactacgggcccgggaggggacggaatcccggctgaggtgcacatcgtgagaaacggcggcacttcaatgatggtagagaatatggcagtaaggcctgccccccaccccggcactgtaataagccacagcgtggcaatgctgatccttatcggttcactcgagttgtag

SEQ ID NO: 112991 - DNA, 3087 bp, synthetic construct
  misc_feature 1..3087: note = Description of Artificial Sequence: Synthetic coding sequence
  source 1..3087: mol_type = other DNA
atgatgttcccttggaagcagttgattctgctaagttttattggctgtctggggggcgaactcttgcttcaggggccagtgttcataaaggaaccgtctaactccatctttccagtcggtagtgaggacaaaaagataacccttcactgtgaggcccgagggaatcccagccctcactaccgctggcagctgaacggaagcgacattgacatgtctatggagcataggtataagctcaacggaggtaacctggtcgtaatcaaccccaataggaactgggataccggtacatatcagtgctttgccaccaactcgctgggtacgattgtgagccgtgaggctaagctccagttcgcatatctggagaatttcaaaaccaaaatgaggtcgacagtgtcagtgagagaaggccagggtgttgtccttctctgcggcccacccccacatagcggggaattgtcatacgcatggatttttaatgaatacccatcgttcgtggaagaggactctcgcaggttcgttagccaggagacaggacatctctacatcagcaaggttgagccatcagacgtgggtaactacacctgcgtggtgaccagtatggtcaccaatgcccgcgtgcttgggtcgcccacccccttggtgctgagatccgacggcgtgatgggcgaatatgagccaaagatcgaagtgcagttcccagagacactgcctgcggccaaaggttcaaccgtcaagctggaatgcttcgctctcggaaaccccatcccccagattaactggcgccgctcggatggccttcctttctcttccaagatcaagctcagaaaattctcaggcgtgctggaaatacccaattttcagcaagaggacgccggtagttatgagtgcatcgccgaaaacagccgtggcaagaatgttgccagaggtaggctaacctactatgcaaagcctcattgggttcagctcatcaaagacgtggaaatcgctgtggaggactcgttgtactgggagtgtagggcttcaggcaagcctaaaccatcctatcgctggctaaaaaacggtgcagctctggtgctggaggagcgcacccagatcgaaaacggcgctttgactataagcaatctgtccgtcaccgactcggggatgttccagtgcatcgccgagaacaaacacggcttggtgtattctagcgccgagcttaaagtggtggcctcggctcccgacttcagcaagaatccgatgaaaaagctcgttcaagtgcaagtggggtcgttggtgtccctggactgcaagcccagggcctctccccgggccctgtcatcttggaagaagggcgacgtgtcagtgcaggagcacgaacgtatcagtctgctgaatgacggcgggctcaagatcgctaacgtgacaaaggcggatgcaggaacttacacctgtatggctgagaatcaatttggaaaggctaacggtactacacacctcgttgtgaccgaaccaacacggatcaccctcgctcccagtaacatggacgtgagtgtgggggaatccgtaattttaccatgtcaggtgcagcatgacccactgcttgacatcatttttacctggtacttcaatggagccttggcagactttaaaaaggatggatcccactttgagaaggttggcggcagtagcagcggtgatctgatgatccggaatatccagctgaaacacagcgggaagtacgtgtgtatggttcagacgggcgtagacagtgtgtccagcgctgccgaccttatcgtgagaggaagccccgggcctccagaaaacgtgaaggttgatgagatcaccgatactactgctcagctctcctggaaagaaggtaaggataatcatagccctgttatttcttattccatccaggcaagaactccgttcagtgtcgggtggcagacagtgactacagtaccagaggttattgacggaaagacgcataccgcaacagtggtggagctgaacccatgggtggagtacgaattcagggtcgtggctagcaataaaattggcggaggggagccctctttgccatcagagaaggtaaggacagaggaggccgtgcctgaggtgcctccgtcagaagtaaatgggggcggagggtcacggagtgaattggtgatcacatgggaccccgtccctgaggagcttcagaacggagaaggcttcgggtacgtagttgcctttaggccactcggcgtgaccacgtggatacagaccgtggttacctctcccgacacaccccgttacgtgtttcggaacgagagcattgtaccatattccccatatgaagttaaagtgggcgtttataacaacaagggggaaggaccatttagccctgttaccaccgtgtttagcgccgaggaagagcctaccgtggctccatcacaggtgtctgccaattccctctctagcagcgagattgaggtgagctggaatacaattccctggaagctttctaacggccatcttctgggctacgaggtccgctactggaacggcgggggaaaggaggaatcctcaagcaaaatgaaggtggccggtaatgagactagcgccagactccgcggattgaagagcaatctggcatactacaccgctgtcagggcctataactctgctggcgccggtcccttcagcgctacagtgaacgtgaccaccaaaaagactccaccatcacagccccctggcaatgttgtgtggaatgctaccgatactaaggttttattaaactgggaacaggttaaagctatggagaacgaaagcgaggtgacaggttacaaggtcttttaccgtaccagttctcaaaataatgtccaggttctcaacactaataagacttctgccgaactggtgctgcctattaaagaggattacatcattgaggtcaaggccaccaccgacggaggggatgggacatctagcgagcagattcgcattccaaggatcaccagtatggatgcccgcgggagcacaagtgccatcagtaacgtccacccaatgtcctcatacatgcctattgtcctattccttattgtttacgttctgtggtag

SEQ ID NO: 112992 - DNA, 2424 bp, synthetic construct
  misc_feature 1..2424: note = Description of Artificial Sequence: Synthetic coding sequence
  source 1..2424: mol_type = other DNA
atgggagagtacgagccaaaaatagaagtccagttccctgagaccgtccccactgctaagggagccacagtgaagttggagtgtttcgcactaggtaaccctgtcccaacaataatatggcgaagagccgacggcaaacctattgccagaaaggcccggaggcacaagtcaaatggcatactggagatccccaactttcaacaggaggatgccggcctttacgagtgcgttgctgaaaactcaagaggtaagaatgtggctagaggccagctcaccttttatgcgcagcctaactggattcagaaaataaatgatattcatgtggcgatggaagagaacgttttctgggagtgtaaggccaacggccggccaaagccgacctacaaatggttgaagaatggcgaacccctcctgacccgggaccggatccaaatcgaacagggtacactgaatatcacaatcgtcaacctttctgatgccgggatgtaccagtgcttagccgaaaataagcacggagttatatttagcaacgcggagttatccgtgattgctgtgggcccagattttagcagaaccctgctgaagagagtgaccctggtgaaagtggggggggaggttgtgatcgagtgcaagccaaaggcttctccaaaacctgtgtatacctggaaaaagggtagggacatcctcaaggagaatgaacgaattaccatttcagaggacgggaacctcaggattatcaatgtgactaaatctgacgctgggtcttacacttgcatcgcgaccaatcattttggcactgcgtccagtaccggcaatctcgtggtgaaagaccccacaagagttatggtcccccccagctctatggacgtgactgtgggggaatcaattgtcctgccttgtcaggtgacacacgaccactccctggacatagttttcacctggtcatttaacggccatcttattgactttgatcgcgatggtgatcatttcgaacgagtgggaggtcaggacagcgccggggacttgatgatccggaatatccagctcaaacatgcgggcaaatatgtctgcatggtgcagaccagcgtggataggctgtcagctgcggctgatctcattgtaaggggaccgcccggaccccctgaagctgttactatcgacgagatcaccgatactacggcccaactgtcatggagacccggtccggataaccactcaccgattaccatgtatgtgatccaggcacgtactccattttccgtgggctggcaagcagtgagtactgtccctgagctgatcgatggcaaaacattcacagcaaccgtggtgggcctgaatccgtgggttgaatacgaattcagaacagtggcggccaacgtgattggcatcggagaacccagccgcccatccgagaaaaggaggaccgaagaggcactgccggaagttaccccagctaatgtctccggcggtgggggttctaagagcgaactggtgatcacttgggaaacagtcccagaggagctgcagaacggcaggggttttgggtatgtcgtggcctttcgcccttatggtaaaatgatatggatgctcaccgtgctcgcctccgctgatgctagtagatacgtcttcagaaacgaatctgtgcaccccttctcgccttttgaagtaaaggttggcgtttttaataacaaaggtgaggggccattttcgcctaccactgtagtttattccgcagaggaagaacccacgaagccccccgctagcatcttcgctagatcactgtctgcaacggatattgaggtcttctgggcaagccccctcgagaaaaatcgggggaggattcaaggttacgaggttaaatactggcgccatgaggataaggaagagaatgcaagaaagatcagaacagtgggcaatcagacaagcacaaagatcactaaccttaaaggatctgtcctctatcatttagctgtgaaagcatataatagtgccggtactggtccaagcagtgccactgtcaacgtaaccacacgcaagcctcctccatcccagcctcctggcaatatcatatggaatagcagcgactcaaagatcatcctcaactgggatcaggtgaaagccttggacaatgagtctgaagtcaaagggtataaggtgctctacaggtggaatcgccagagttccacttctgtgatcgaaaccaacaaaacctcggtggaactgtcactacccttcgacgaagattatataatagagatcaagcccttctctgatggaggggatggctcttcatcagagcaaatcaggattcccaaaatcagcaacgcatatgccaggggttcaggcgccagtacaagtaatgcatgtaccctgagtgcaatttctacaatcatgatctccttgacggcccgctcttccctatag

SEQ ID NO: 112993 - DNA, 2097 bp, synthetic construct
  misc_feature 1..2097: note = Description of Artificial Sequence: Synthetic coding sequence
  source 1..2097: mol_type = other DNA
atggaggagaacgtattctgggaatgcaaagccaacggaagaccaaaacctacatataagtggctgaagaatggtgaacctctcctgacccgggacagaatccagatagaacagggcacccttaatattacgattgtgaatctctccgacgccgggatgtatcagtgtctcgccgaaaacaagcatggggtaatcttcagcaacgctgaactctccgttatcgcggtggggccagacttttcacggacgctcctgaaacgggtgacccttgtgaaggtggggggcgaggtcgtaatcgagtgcaagcccaaagcttccccaaaacctgtgtatacctggaagaaaggtcgtgacatcctaaaggaaaatgagagaatcactatttccgaagacggtaaccttcgtatcatcaacgtgaccaagtccgatgctggctcatacacgtgtattgcaacgaaccacttcggcactgcctcttcaactggcaaccttgtagtgaaagaccctacaagggtgatggtgccaccaagctccatggacgtgacagtcggagagtctattgtgttgccctgtcaggtaacccatgatcatagtctcgatatcgtgttcacatggtctttcaatggacacctgatcgactttgatcgggatggcgatcacttcgagagggtcggggggcaggattccgcaggagacctgatgatccgtaatatccagttgaagcacgcaggcaaatacgtgtgtatggtgcagacaagcgtggaccgcctgtccgccgccgccgatcttatagtcagaggcccacccggaccgccggaagccgttaccattgacgagattacagacacaactgcgcagctgtcctggcggccgggccctgacaatcatagtcctatcacaatgtacgtcatacaggcccgtactcctttctccgtgggttggcaggccgtttcgacagtgcccgagttgatcgatggaaagacattcactgcaacagtggtcggcctgaatccttgggtcgaatatgagtttaggaccgtagcagctaatgtaatcggcatcggtgaaccaagcaggccatcggagaagcggcgaactgaggaggctcttcctgaggtcacgccagctaacgttagtggcggcggcgggagcaagtccgaacttgtcatcacatgggagacagtgcccgaagagctacagaatggacggggcttcggttacgtcgtcgcctttagaccctatggaaaaatgatctggatgcttacggtgctggcgtcagccgacgcatcacgatatgtattcagaaatgagtcagtccaccctttttcccccttcgaggttaaagtgggggttttcaacaataaaggtgaaggaccatttagccctactacggtggtctacagcgctgaggaagaaccgacaaaaccaccagcctccatatttgcccggagcctgtcggctaccgacatcgaggtcttctgggcttctccacttgagaagaacagaggacgaatccaggggtatgaagtgaagtactggcgacacgaggacaaggaggagaatgctcggaaaattagaactgtagggaatcagacctcaacgaagattaccaaccttaagggatctgttttgtaccacttggccgtgaaagcctataacagcgccggtaccgggccctcgtctgccaccgtcaacgtgacaaccaggaaacccccgccctcgcagcctcctgggaatattatttggaactcttctgattctaaaatcatcttaaattgggaccaggtgaaggccctcgataacgaaagcgaagtcaaagggtacaaagttctgtatagatggaatagacagagctccaccagcgttatcgaaactaacaagacatcggtcgagctctcgcttcccttcgatgaggattacatcattgaaattaaacctttcagcgatggtggggacggttcgtccagcgagcaaattagaatccctaaaatcagtaacgcctacgcccgcggctcaggtgctagcacctccaacgcctgcaccttgtctgccattagcacaatcatgatatctctgactgcccgttcttccttgtag

SEQ ID NO: 112994 - DNA, 3081 bp, synthetic construct
  misc_feature 1..3081: note = Description of Artificial Sequence: Synthetic coding sequence
  source 1..3081: mol_type = other DNA
atgcgcctgccctgggaactcctggttttgcagagctttattctgtgcctggccgacgacagcaccttgcacggccctatctttatacaagagcccagccccgtcatgttccccttggatagcgaggaaaagaaggttaagcttaattgcgaagtgaagggaaatccgaagccacatattagatggaaactaaatggaacggatgtggacacaggcatggactttcgttatagcgtggtggagggctcactcctcattaacaatcctaataaaacacaggacgcaggcacctaccagtgtaccgccaccaatagcttcggtactatcgtttcccgagaggccaaactgcagtttgcctacttggacaacttcaagacacgcaccaggtcaaccgtaagcgtacgccgaggacagggtatggtcctcctgtgcggcccacccccacactccggcgaactgtcatacgcatggatcttcaatgaataccccagctaccaggacaatcggaggtttgtctcccaggagacaggaaacctgtacatcgcaaaagttgaaaaatccgacgtagggaactatacctgcgtggtcaccaacacagtaaccaatcacaaggtcctagggccacccactccactgatcctgagaaatgatggagtgatgggagagtacgagcccaagatcgaggttcagttcccagagacagtccccacagcaaaaggcgccaccgtaaagttggaatgtttcgccctggggaatcctgttcccactattatttggaggcgagccgatgggaagccgatcgcgcgcaaagcccgtcggcataagtcaaacgggattctggagatccccaattttcagcaggaagatgcaggtctgtacgaatgcgtggcagaaaatagccgaggaaaaaatgtggctaggggacagctcacattctacgcccagccgaattggatacagaagatcaatgatatccatgtggccatggaggaaaatgtgttctgggaatgcaaagcaaacgggcggccaaaacccacctataagtggttaaagaatggtgagcccttgttgactcgtgatcggatccagattgaacaagggacactcaacattacaatcgtcaacttgtctgacgcaggcatgtatcagtgcctggctgaaaacaagcacggagttatcttcagtaacgcggagctgagtgtgatcgccgtaggccctgactttagcaggacgttactcaaacgggtgaccctggtgaaggtgggaggcgaagtagttatcgagtgtaaacccaaagcatctccaaagccagtgtatacctggaaaaaaggaagggatatcctcaaggagaatgagaggataaccatctccgaggacggaaatctgagaatcataaacgtcaccaagtctgatgcgggatcttatacctgcattgctaccaatcattttggcaccgcctctagcacaggtaatctagtcgtgaaggatccgacaagggttatggtaccaccaagctcaatggatgtgactgtcggcgagtccattgtcctaccttgccaagtgacccatgaccatagcctggatatcgtcttcacctggtcattcaatggtcatctcattgatttcgatagggacggtgatcactttgaacgagttgggggacaggatagcgcaggggacctgatgatcagaaacattcagctcaagcatgctggaaaatacgtgtgcatggtccagacatctgtagaccgattatctgcagcagcagacctgatcgttaggggcccccccggacccccagaggcagtgaccatagacgagattaccgacacgactgcacagcttagctggaggccagggccagataatcattcccccattacaatgtatgtgattcaggcacgcacccccttctcggtggggtggcaggctgtatccaccgtgcctgaacttatcgacggcaagactttcacagctaccgtggtgggcctgaatccctgggtggaatacgagtttaggactgtggccgccaacgtcatcggcattggcgagccctctagacctagcgagaagaggagaaccgaggaagccctccccgaggttaccccagctaacgtcagtggcggcggaggcagcaaaagcgagctggtgataacctgggaaaccgtcccagaggagttgcaaaacgggagaggctttggctacgtggtggcttttcgcccgtatggcaaaatgatttggatgctgacagtgctcgcctctgcagatgcatctcggtacgtgttcaggaatgaaagtgtgcatccttttagccctttcgaagtaaaggtgggagttttcaacaacaaaggcgagggaccattctcccccactaccgtggtgtactcagctgaagaggagccaaccaaaccccccgcctcgattttcgctcggagccttagtgccaccgatattgaggttttttgggcttcaccccttgagaagaatcgcggtaggattcagggatatgaggtgaagtattggcggcacgaagacaaggaggaaaatgccaggaagataaggactgtcggaaatcagacctctacaaagataacaaatctaaaggggtccgttttatatcatttagccgtgaaagcatacaactctgccggcacagggccatcttcagcaaccgtgaatgtgacaacccggaagcctcccccgtcacaacctcccggaaacattatttggaatagtagtgattcaaaaatcattttgaattgggaccaggttaaagctcttgataacgagtctgaggtgaaggggtacaaagtcctgtaccgctggaacagacaaagtagtaccagtgtgatcgaaactaacaagacctctgtggagttgagcctcccctttgatgaggattacattattgagattaaacctttttcggatggtggagatggctccagcagcgaacaaatcagaatccccaagatctccaatgcctacgctcggggatccggcgcctcaacctccaacgcctgtacactcagcgcaatcagcaccattatgatctccctgacagcgcgtagctcactttag

SEQ ID NO: 112995 - DNA, 3081 bp, synthetic construct
  misc_feature 1..3081: note = Description of Artificial Sequence: Synthetic coding sequence
  source 1..3081: mol_type = other DNA
atgcgtttgccttgggagctgctagtgttgcagagctttatcctgtgtctagccgacgatagcaccttacacggcccaatctttatccaggaaccaagtcccgttatgttccctctggatagtgaagagaagaaagtgaagctgaattgtgaggtaaagggcaaccccaagccccatattcgctggaagcttaatggcaccgatgtcgatactggaatggacttccgctactcagttgtggagggttcgctgctaattaacaacccaaacaaaacccaagacgcgggaacataccagtgtactgcaaccaactcctttggtacaatcgtatcgcgggaagctaaacttcagttcgcttatctggacaatttcaaaactcgaacaaggtctacggtgagcgttcgaaggggccaaggtatggtgttactctgcggcccgcctccacactccggagagctttcatatgcctggatcttcaatgagtacccatcgtatcaggacaatcgtcgctttgtgtcccaggagaccggaaatctgtatatcgccaaggtcgagaagtctgacgtagggaactacacctgtgtggtgaccaatactgtgactaaccacaaggtcctgggaccgcccacccctcttatacttcgcaatgacggcgttatgggagaatacgagccaaagattgaagtgcagttccctgagactgttcccaccgctaaaggcgccacagttaagcttgaatgttttgctctgggcaacccagtgcccactataatctggaggagagccgatggcaagcctatcgcaaggaaagctaggagacataaaagcaatggcatcctggagatacccaatttccagcaggaagacgccgggctctacgagtgcgtggccgagaattctagggggaaaaatgttgcacgtggtcagctgacattttatgctcagcctaattggatccagaagatcaacgatattcacgttgctatggaggaaaatgtgttctgggagtgtaaggctaatgggcgccccaaacctacttataagtggctcaagaacggcgagcctttgctcacgcgtgatcgaattcagattgagcagggaacattgaatatcacgattgtgaacttaagcgacgccggcatgtaccagtgtttggccgaaaataaacacggcgttattttctccaacgctgaactcagcgttatagccgtgggccctgacttctcccgcaccctgttgaagcgggtgaccctggtcaaggtgggtggggaagtagtcattgagtgcaagcccaaagcctcacctaagccagtgtatacatggaagaaaggccgggacattttgaaagagaacgaaaggatcacaattagcgaggacggcaacttacggataataaatgtcaccaaatcagacgccggtagttacacttgtatcgccacaaatcatttcggcacagcctcttcaactgggaacctcgtggtgaaggatcccactcgcgtcatggtgccgccgtcatcaatggatgtcacggtcggcgagagcatcgtgctaccttgtcaggtgacccatgaccacagtctggatattgtgttcacatggtctttcaatggccacctgattgatttcgaccgtgacggggatcatttcgaaagggtgggcggacaggacagcgctggcgacctcatgatcagaaacatccagctgaaacacgctggtaagtacgtgtgcatggttcagacctctgtcgaccgtttatctgcggcagcagacctcattgtgcgtggcccgcctggcccccctgaagctgtcactattgacgaaatcaccgataccaccgcccagttaagctggcgccccgggcctgataaccactccccgatcacaatgtacgtaatccaggctagaactcctttcagtgtgggatggcaggctgtttcgaccgtgccagagctgattgatgggaagacatttaccgccacagtagtagggctgaatccttgggtcgagtatgagttccgaaccgtggccgcgaatgtcatcggaattggggaacccagcagaccgtctgaaaagaggagaacagaggaagccttacctgaggtcacaccggccaacgtcagtggaggggggggatcaaaaagcgagctggtgattacctgggagacagtgccagaagagttgcaaaacggtaggggattcggctatgttgtggcattccgcccatatgggaagatgatatggatgttgaccgtccttgcctctgccgacgcgagcaggtatgtgtttaggaacgagtcagtgcatcccttctcaccatttgaggtgaaagtgggggtgttcaacaacaagggggaaggcccattctcacctacaactgtcgtctactctgccgaagaagagcctaccaagcctcctgcatctatatttgctcggagccttagcgccactgacatcgaagtgttttgggcatcacctcttgagaagaaccgcggaagaatccaaggatacgaggtaaagtattggcggcacgaggacaaagaagaaaacgcacgcaaaatccgaaccgtaggtaaccagacttcgacaaaaatcacaaaccttaagggtagtgttctctatcatctggctgtgaaggcctacaactcagccggaaccggcccgagctctgccactgtcaacgtgacgacccggaaaccaccgcctagtcaaccacccggaaatatcatttggaatagtagtgactctaaaatcatcctgaattgggaccaggttaaggcactcgacaatgagagcgaggtgaagggctacaaggtgctgtacagatggaatcggcagtctagcacttcagtcattgaaacaaacaaaacttctgtcgaactgtctctaccttttgatgaagattatatcatcgagataaaacctttcagcgatgggggagatgggtcctccagtgagcaaataagaattcccaagattagtaatgcttacgctcgaggcagtggcgcatccacctccaacgcctgtactctgtcggcaattagtactataatgattagtctcaccgctagatcgagtctctag

SEQ ID NO: 112996 - DNA, 351 bp, synthetic construct
  misc_feature 1..351: note = Description of Artificial Sequence: Synthetic coding sequence
  source 1..351: mol_type = other DNA
atgagactgccctgggaactgctggttctgcagtccttcatcctgtgccttgctgacgacagtacgctgcacggcccaatttttatccaggagcctagtccagtgatgttccctcttgactccgaggagaagaaagtcaaactcaactgcgaggtgaaaggaaatcctaaaccacatatcaggtggaaactcaatggcacagacgtggacactggaatggacttcagatactctgtggtggagggtagcctgctcatcaataatcctaacaagactcaggatgctggcacgtaccagtgtacagctaccaatagttttggcacaatcgtctccagggaagccaagctatag

SEQ ID NO: 112997 - DNA, 3081 bp, synthetic construct
  misc_feature 1..3081: note = Description of Artificial Sequence: Synthetic coding sequence
  source 1..3081: mol_type = other DNA
atgcgtctgccttgggagctgctggtgctccagtctttcatcctatgccttgccgatgactccacattacatgggccaatctttatacaggagcccagcccagtcatgttccctctggactcggaagagaagaaggttaagctaaactgtgaggtgaaaggcaaccctaaacctcacatcagatggaaactaaacggtacagatgtggatacagggatggatttccggtactccgtcgtggagggcagtctgctgattaataacccaaataaaactcaggacgctggcacttaccaatgtacagccaccaatagcttcggcactattgtgtcaagagaggccaaactgcagttcgcttatctggacaattttaaaaccaggactcggtctaccgtgtcagtgaggcgcggccaggggatggtactattgtgcggacctcctccacattccggcgagctgtcttacgcctggatattcaatgagtacccttcctatcaggataacagacgctttgtttcccaggagacggggaacctgtatattgccaaagttgaaaagtctgatgtgggcaactatacctgcgtcgtaactaatacagtgaccaaccataaagttttgggccccccaacacctctgatcttaaggaacgacggcgtcatgggagagtacgagcctaaaatagaagtccagtttccggagacggttcccacagctaaaggcgccaccgttaagttggagtgttttgcactcggtaatcccgtccccacgattatctggcgtagagcagatgggaagcccatagccaggaaggcaagaagacataagtcaaacggaattctggaaatacccaacttccagcaagaagatgcaggtctctacgagtgtgtggcagagaatagccgtggcaagaacgttgcccgaggacagctgacattctacgcccaacccaactggatacaaaagatcaacgacatacatgtggctatggaggagaacgtgttctgggagtgcaaggctaacgggaggccgaaacccacatacaagtggctgaagaacggcgagccactcctgaccagggaccggattcagatcgaacaggggaccctgaatattacaatcgttaatttatcagatgctggtatgtatcagtgcctggctgaaaacaagcatggcgtgatctttagcaatgccgagttgagtgtgatagccgtgggacctgacttctctaggaccttactaaaacgggtgactctcgtgaaagtcggcggtgaggtggttatcgagtgcaagccaaaggcgagtcccaagccggtgtacacctggaagaagggcagggatattcttaaggagaacgaaaggatcacgatttccgaagacggcaacttgaggattatcaatgtcactaagagcgacgcagggagttatacgtgtattgctacaaatcattttggtacagctagctctaccgggaacctggtggtaaaggaccctacccgggtgatggtcccccccagctccatggacgtaaccgtgggagagtccatcgtcttaccatgtcaagtgacccacgaccactccttagacattgtatttacctggagcttcaatggccatctgattgacttcgatagggacggggatcatttcgagagggtgggcggccaggatagcgctggcgatctgatgatccgcaatattcagctcaagcatgccggaaaatacgtatgcatggttcaaacttcagtggaccgcctgagcgctgccgctgaccttattgtcagaggccccccaggtcccccagaggctgtgaccatcgacgagatcacagataccaccgcccagttgtcatggcgcccagggcccgataaccacagccccattaccatgtacgtgattcaggctagaactccattctctgtcgggtggcaggccgtcagcaccgtgcccgagcttattgatgggaaaacttttaccgcaactgtcgtgggtctgaacccatgggtggaatacgagtttagaaccgtcgcggctaatgtaatcggcatcggcgaaccctctcgaccatcagaaaagcgcaggaccgaagaggccctccccgaagtgaccccggcgaacgtgtcaggcggtggaggaagcaaatccgagttggttatcacctgggagacagttcctgaggaattgcagaacggacgcggttttgggtacgttgtggccttcagaccctacggtaaaatgatctggatgctgacagtgttggcttcagccgacgcaagtagatacgttttccgcaatgagtccgttcatccattttctccattcgaggtgaaggtgggcgtttttaacaataagggggaaggccctttttctccaacaacggtagtgtacagtgccgaagaggagcccacgaagccccctgcatccatcttcgcccggtcactctcagctacagacatcgaggttttttgggcctcaccactggaaaagaaccggggcaggatccagggctatgaggtcaagtactggaggcatgaggataaggaggagaatgcccgcaagattagaaccgtagggaaccagacaagtaccaagattaccaatctgaagggcagcgtcctgtaccacttggcagtaaaagcctacaatagtgcagggactggaccgagctccgcaactgtcaatgttaccacccgaaaacccccaccctcccaaccccctggcaacatcatttggaattcgagtgattcaaagattatcttgaattgggaccaggtgaaggcgctcgataacgaatctgaagtgaagggctataaggtcctgtacaggtggaatcggcagagcagcacaagtgtgattgaaaccaataaaaccagtgtggagcttagcctgccatttgatgaagattacattatcgagataaaaccattcagcgatggtggcgacggatcatccagtgaacagattcgcattcctaaaatctctaatgcctacgctagaggatcgggcgcctcaacatccaatgcctgcactctctctgctataagcacaatcatgatttcactcacagctcggtcaagcttgtag

SEQ ID NO: 112998 - DNA, 2097 bp, synthetic construct
  misc_feature 1..2097: note = Description of Artificial Sequence: Synthetic coding sequence
  source 1..2097: mol_type = other DNA
atggaggagaatgtcttctgggaatgcaaagcgaatggccgccctaagccgacttataaatggctcaagaatggagagccattacttactagggaccgtattcaaatagagcagggcaccctcaatatcacaatcgtgaacttatcagacgccgggatgtaccagtgtcttgcagagaacaaacacggagtcatcttctctaacgccgaactgtccgtgatcgctgtggggcctgatttttcaagaacattgctcaaacgggtgacactagtcaaagttggcggtgaggtggttatcgaatgcaagccaaaggcctcccccaagccagtgtatacgtggaagaagggaagggacattttaaaggaaaatgagagaataacaatcagtgaggatgggaacttacgtattattaatgtgactaagtcagacgctggctcatatacttgtatagctacgaatcatttcggcacggcgagttctaccggaaacctggtggttaaggatccaacccgtgtaatggtgccgccttcatcaatggatgtgaccgtgggggaatcgattgtgcttccatgccaggtgacacacgatcactccctggatattgtgttcacatggagcttcaacggacatctgattgacttcgatagagatggagatcattttgaaagagtcgggggtcaagactccgcaggagacctaatgataagaaacatccagctaaagcatgcgggcaaatacgtttgtatggtgcagaccagtgtcgaccgtcttagtgccgcagctgacctcattgtgcgcggccccccaggcccgcctgaggccgtcacaatcgatgagataactgataccactgcacagctttcctggcgaccaggccccgacaatcactctcctatcactatgtacgtcatccaggcccgcacaccatttagtgtcggctggcaggctgtatccacagtcccagaactgattgatggtaaaacatttacagcaaccgttgtgggactgaacccatgggtcgagtatgagtttcgcacagtcgctgctaatgtgattgggataggcgaaccctcccggccatctgagaaacgccggacggaagaggcactgcccgaggtcactccggccaacgtatccgggggcggcggttctaaaagcgagctagtcatcacctgggagactgtaccagaagaactgcagaacgggagaggcttcggatatgtggttgcctttaggccctacggtaagatgatttggatgctgactgtccttgccagcgccgatgccagccggtatgtgttcagaaacgagtcagtacacccattctcacccttcgaggtcaaggtgggggtgtttaacaacaaaggggaaggccccttttctccaactaccgtggtctactccgcggaagaggagcctactaagccaccggccagcatatttgcacggtccctgtcggctactgatatcgaagtattttgggcaagcccactcgagaagaatagaggaagaatacaaggctatgaggtgaaatattggcgacatgaggacaaggaagaaaacgctcgcaaaatccgaacagtgggaaatcagacttcaactaagattactaatctgaaagggtcagtactctaccatttggccgtgaaggcgtacaattcggccgggacaggccctagcagcgcaaccgttaacgtgactactcgaaaaccaccccctagtcagcctccaggaaacatcatatggaactcctctgatagcaaaatcattttgaattgggaccaagttaaagcacttgacaatgaatccgaggtcaaaggctacaaggtgctgtatcgttggaacagacaatccagcactagcgtcatcgaaactaataagacaagtgtggaactgtccttacctttcgacgaggactacatcatcgaaatcaaacctttctcagacgggggcgatggtagcagttcagaacagatccgcatccctaagatcagcaacgcctatgcccggggtagcggtgctagcacttcgaacgcatgcacactctcggctatctcaaccattatgatcagtctcaccgctcgctccagcctgtag

SEQ ID NO: 112999 - DNA, 165 bp, synthetic construct
  misc_feature 1..165: note = Description of Artificial Sequence: Synthetic coding sequence
  source 1..165: mol_type = other DNA
atgcgcctcccctgggaactgttagtactgcaatcgttcatactctgccttgctgatgattccactctccacggaccgatttttatccaagaaccaagccctgtaatgttccccttagatagtgaggagaaaaaagtgaagttgaattgcgaagttaagggctag

SEQ ID NO: 113000 - DNA, 3303 bp, synthetic construct
  misc_feature 1..3303: note = Description of Artificial Sequence: Synthetic coding sequence
  source 1..3303: mol_type = other DNA
atggccagtagttggaaactcatgctcttcctgagcgtaacgatgtgcctgagtgagtattccaagtccctcccgggactcagtacttcttatgcagccttgcttcgaatcaaaaagtcgtcttcctcaagcctgtttggctccaagacccgcccccgttactcctcaccctccctgggaaccctgtcagcatccagcccttcatggcttggagcagcacaaaattactactctccaatcaacctttatcacagctccgacgcctttaaacaggacgagagcgttgactacggccccgtcttcgtgcaggagcctgacgacatcatatttcctactgacagtgatgaaaagaaagtcgccttgaattgtgaagtccgcggaaatcccgttccgtcttatcggtggttgcggaacgggaccgaaattgacctggagtccgactaccgttacagccttatcgatggcacgtttattatttctaatccgtctgaggcaaaggattccggacactaccaatgccttgctactaacacagtgggttccattttgagcagagaagctactctgcagtttgcctatctgggaaatttctccggacgtacaaggtctgcagtctcagtgagggaaggccaaggggtggtcctgatgtgttccccacccccccactctcctgagatcatctattcctgggtattcaacgaattccctagctttgttgcagaggacagccgacggtttattagtcaagaaacagggaacctctacattagtaaggttcagacctctgatgtcgggtcctatatctgtttggtgaagaacaccgttacgaatgctagagtgctgagtccaccaactcctctgaccctcagaaatgacggcgtcatgggcgaatatgaaccgaagattgaagtgcattttccattcacagtgacagctgcaaagggcactacagtgaaaatggaatgttttgccctgggcaaccctgtgccaaccattacatggatgaaggtcaatggttacataccctcaaaagcccgcctcagaaaatcccaggctgtgctggagatcccaaacgtccagctcgacgatgctgggatctacgaatgtagggctgaaaactcgcggggcaaaaacagctttcgtggacagttgcaggtctacacatacccacattgggtggagaaactgaacgacactcaacttgactcgggatcccccctcagatgggagtgcaaggcgactggcaaacccagacccacatacaggtggttgaagaacggcgtgcccttatcaccacagagccgggttgagatggttaatggtgtccttatgatacataatgtaaaccagtctgatgcaggaatgtatcagtgcctggccgaaaataaatatggggccatctatgcatccgccgagctcaagatcctcgcctcagcaccaaccttcgcactcaatcagcttaagaagactatcatcgtgacgaaagaccaggaagtggtaatcgagtgcaaaccccagggaagcccaaagccaaccattagttggaagaaaggagatcgggcagtcagagagaacaagcggatagctattctcccggacggcagcctcaggatcctcaatgcaagtaagtctgatgaagggaaatacgtttgccggggcgagaacgtgtttggctccgccgagatcatagcatctctgagtgtgaaggaacccacaagaattgagttaactcctaagagaactgaactgaccgtgggtgagagtattgttctgaattgcaaggcgatccacgatgctagtctagatgtgacattttactggacccttaaagggcagccgatcgatttcgaggaagaaggaggccattttgaatctatcagagcgcaagccagcagcgctgatcttatgattagaaacattctcctcatgcacgctggcagatatggttgtcgggtgcagaccacggcagactccgtctccgacgaagcagaacttctggttaggggccctcccggtcctcctggtatagtcatcgtggaggagataacggagtccaccgctaccctgagttggagtcccgccgccgacaaccacagcccaatctcctcttataacctccaggcacgctctccgttctctctcggctggcagacggtcaagacagtccctgagattatcactggagacatggagtcagctatggccgtcgatttaaatccatgggtggaatatgaattccgcgtcgtagcgactaatcctatcggcactggggatccaagcactccttcccgtatgatcagaaccaacgaggccgtgcctaaaactgcccccaccaatgttagtgggaggagcggccgcagacacgagttggtgattgcctgggagcctgtgagtgaagagttccagaacggcgaaggcttcggatatattgtggcctttcggcccaatgggacacgtggttggaaggaaaaaatggtgacttcctccgaggccagcaagttcatttaccgagatgagtctgtcccccctcttacccccttcgaggtgaaggtcggcgtctataacaataagggcgacggcccctttagtcagatcgtggtaatctgctccgccgaaggagagccatctgccgcccccacggacgttaaagccacttcagtttccgttagcgagatcctagttgcctggaaacacatcaaggagagtttgggccggccacagggattcgaagtggggtattggaaagacatggagcaggaagacaccgccgaaacggtgaagactagaggcaatgaatccttcgtaatccttaccggcctggagggtaatacactttaccattttacagtgcgggcatacaatggcgcagggtatgggcccccttcatcagaagtcagtgccaccacgaaaaagagcccaccctctcaagctccctccaacctccgctgggaacagcaggggtcccaggtgtcactgggctgggaacccgtgataccactggccaacgagtccgaagtcgtcggctacaaggtgttttaccggcaggaagggcattccaatagtcaggtgatcgagacacagaagcttcaggctgtggtgcctctcccagatgccggtgtttatatcattgaagtgagagcctactccgaaggcggcgacggaacagcaagctcccagattagggttccttcatactcaggcggcaagatcacatcagctcagagtactttacacagcttgagcacatcttcctcaagcgtgactctcctactcgccctcatgataccatcgacttcatggtag

SEQ ID NO: 113001 - DNA, 3081 bp, synthetic construct
  misc_feature 1..3081: note = Description of Artificial Sequence: Synthetic coding sequence
  source 1..3081: mol_type = other DNA
atggcatctagttggaaactcatgttatttctctcagtgacaatgtgtctttccgaatccgtggattatggccccgtttttgttcaggagcctgatgacattatcttcccaaccgatagcgacgagaaaaaggttgcattgaattgcgaggtgagggggaaccctgtaccaagctatcgttggctgcgaaacggtaccgagatcgatctggagtcggactatagatattccctcatcgatggaacatttatcatctccaacccaagcgaagccaaagactccggccattatcaatgcctcgcaacaaacaccgtgggaagcatcctgagtagagaagccacattgcagtttgcatacctgggcaacttcagtggacggacgaggagcgcagtttcagttcgagagggacagggggtcgtgttaatgtgttcccccccgccacacagccccgaaattatctattcctgggtttttaatgaattcccgtctttcgtcgccgaagacagccgtcgattcatctcccaggagactgggaacctgtacatctcaaaggtacagacttcagacgtgggcagctatatatgcctggtgaagaatacagtgacgaacgcccgcgtgctatcacccccaaccccgttaacactgcgcaacgacggggttatgggagaatatgaacccaagattgaggttcattttccatttactgtaactgcagcaaagggcacaacagttaagatggagtgctttgccctgggcaaccctgtgccgacaatcacctggatgaaagtgaacggctatatcccctcaaaggcccggctgaggaaaagccaagccgtgctcgaaatccctaacgtccagttagatgatgctggaatctacgagtgccgggcggaaaattcccgagggaagaattccttccgaggccagctgcaagtctacacctacccacactgggtagagaaattgaatgatacacagctagatagcggctctcctttgagatgggaatgtaaggcaaccggaaaacccagaccaacctatcgatggctcaagaatggagtgcctttgtcccctcagagcagagttgaaatggtgaatggtgttctcatgatccacaacgtcaatcagtccgacgctggtatgtaccagtgtctggcagagaacaaatatggtgcaatctacgcttcagcggagctcaaaatcctggcctctgccccgaccttcgcgcttaatcaactgaagaagactatcatcgttacgaaggatcaggaggtagttatcgagtgtaaaccgcagggttccccaaagccaactataagctggaagaagggcgatcgggcagtccgcgagaacaagaggatagccattctgcctgatggcagcctcagaatactgaacgccagtaagtcggacgagggtaagtatgtgtgcaggggcgaaaatgtgttcggaagtgctgaaataattgcatctctgagtgtgaaagagccaacccgaatcgagcttacacccaagcgaaccgagctgacagtaggggaatccatcgtgctgaactgcaaggcaatacacgacgcctcactggacgtcacattctattggacgctgaaaggtcagcctatcgattttgaggaagaagggggccactttgagtccatccgtgcccaggcctctagtgccgatctcatgattcggaatatattactgatgcacgccgggagatatggctgtcgtgtacagactaccgccgactccgtatctgatgaggccgagctcctcgtcagagggcctccaggtccccccggcatcgtgatcgttgaagaaatcacagaatctactgcaaccctttcatggtcacctgctgctgataaccacagtccaattagcagctataacctccaggccagatcacctttctcgcttggatggcagaccgtcaagaccgttcctgagatcatcacaggagacatggagtcagccatggcggtcgacctcaatccgtgggtggagtatgaattccgcgtcgttgctactaacccgataggaaccggcgacccttccaccccctcacgcatgattagaaccaatgaagccgtccccaaaacggctcccaccaatgtatccggacgctccgggcgccgacacgagctggttatcgcttgggagccagtatccgaggagtttcagaatggggagggtttcggctacattgtcgccttcaggcccaacggtacgcggggatggaaagaaaagatggtcacatcttcagaggcctccaaatttatttatcgtgatgagtctgttccccctctgactcctttcgaagtaaaagtcggcgtgtacaacaataagggcgatggccctttctcacagatcgtggttatttgctctgcggaaggagaaccttccgcagccccgaccgatgtgaaagcaacctcagtgagtgtaagtgaaattctggttgcctggaaacacatcaaagagagtctggggaggcctcagggtttcgaagtgggctactggaaggatatggagcaggaagatactgccgagaccgtgaagacacggggaaatgaaagctttgtgatcctgacaggtttggaggggaacaccctctatcatttcactgttcgggcatataacggggccggctacgggccaccctcctctgaagttagcgcgactaccaaaaaatcccctccatcccaggctccgtctaacctccggtgggaacagcaagggtctcaggtgtcgctaggctgggagccagtgataccactggctaacgagtccgaagtggtgggttataaagtgttttatcgccaggaaggccactctaactcccaggttatagaaacccagaaactgcaggcagtagtccctctgcctgacgctggagtatatatcatcgaggtgcgggcgtacagcgagggcggcgacggcaccgcaagtagccaaatccgcgtgccaagttattcaggcgggaaaattacaagcgctcagagcacactccacagcttatccacttccagttccagcgtgacattattattggccttaatgatcccctcgacgtcatggtag

SEQ ID NO: 113002 - DNA, 3303 bp, synthetic construct
  misc_feature 1..3303: note = Description of Artificial Sequence: Synthetic coding sequence
  source 1..3303: mol_type = other DNA
atggcctcatcctggaaactgatgctcttccttagcgttactatgtgtctgtccgaatatagcaagagcctgcctggtctgagcacttcctacgcagccctgctcaggatcaagaaatcgtctagctccagtctgtttgggagtaagacgcgaccccggtacagcagcccatctctggggaccctgagcgcctcctccccctcttggctgggagccgcacaaaactactattcccccatcaacctttatcattcatctgacgcttttaagcaagatgagtcggtggattatggacctgtgttcgtgcaagaaccggacgacataatatttcccacagacagtgacgagaaaaaagttgcactgaactgcgaggtgaggggcaatcccgtgccatcatacaggtggttgcgtaacggcacggaaatcgacttggagagtgactaccgatatagcctgatcgatggtacgtttataatctcaaatccctcagaggccaaagattcaggacattatcagtgtctagccaccaatacagttgggtccatactgagccgagaggctaccttacagttcgcttacctgggaaatttcagtgggcgcactcgcagtgcggtaagcgtgcgggagggtcagggagtcgtcctcatgtgctcacctcctccccactctcccgaaataatctacagttgggtgtttaacgaattcccttcatttgtggctgaggattcccggcgcttcattagccaggaaactggaaacctgtatatttctaaggtacagacctcagacgtgggcagctacatctgtcttgtgaagaacaccgtcactaatgcccgcgtcctgtctccgcccacgcccctcactttaagaaatgacggagttatgggcgagtacgaacccaagatcgaggtacactttcctttcaccgtgacggccgccaagggcaccaccgtgaaaatggagtgctttgccctcgggaatccggttccaactataacctggatgaaagtgaatggatatattccttccaaggcgaggctacggaagagccaggcagttctggaaattccaaacgtgcagttggatgacgctggcatctacgagtgccgggccgagaactccagaggcaaaaacagtttccgcggccagcttcaggtatatacatacccccattgggttgaaaagctgaatgatactcagctcgactccggcagccccctgaggtgggagtgcaaagctacaggaaaaccccgaccaacatatcgctggctcaagaatggggttcctctgtcaccacagtcacgggtggaaatggttaatggcgtcctaatgattcacaatgtgaaccaatccgacgctggtatgtaccagtgcctagcagaaaataagtatggagctatctacgccagcgccgaattgaagatcctggcttcagctcccacttttgctcttaatcagcttaagaaaaccatcattgtcacgaaagaccaggaggttgttattgaatgtaaaccccagggctctcctaagcccaccatcagttggaagaaaggcgatagagccgtacgcgaaaacaaacgcattgcaatcctgccagacggaagcctccgtatcctcaacgcctccaaaagcgacgaggggaaatacgtttgtcggggggagaatgtctttggaagcgccgagataattgcatctttatcagtgaaggaacccacccgaatcgaactcaccccaaaaaggaccgagcttaccgtgggcgagtcaatcgtgttgaattgtaaagcgatacacgacgccagcctagatgtcaccttctattggactctcaagggccaacccatagacttcgaagaagaaggtggtcactttgaatcgattcgggctcaggcctcttccgctgacctcatgatccgaaacatcctgctgatgcacgctgggcgatatggctgccgggtgcagaccacagcggatagcgtcagtgacgaagccgagctactagtaaggggaccccccggcccgcctggcattgtgattgttgaagagatcactgagtccactgctactctttcctggtcccccgccgcggacaaccattccccaatttcttcctataatttgcaggcccggagccccttttctctgggatggcagacagtgaaaaccgtcccagaaatcatcactggtgatatggagtcggcgatggctgtagacctaaacccatgggtggagtatgagtttcgagtggtggctacaaacccaatcggtactggtgacccgtcgaccccatcaagaatgatacgtacgaatgaagcggtgcccaagaccgccccgaccaacgtctctggaagatccggtaggaggcatgagttagtcatagcctgggagccagtgtccgaggaattccagaacggggagggcttcggctatatagtggccttccgccctaacggaactcgggggtggaaagagaaaatggtgacttcttccgaagcgtcaaaatttatctacagggatgaatccgtgccacccctgaccccatttgaagtcaaagtgggcgtgtataataataaaggcgacggcccattcagccagattgttgtcatctgctccgctgagggtgagcctagcgctgcacccactgatgttaaagctaccagtgtgtcagtcagtgaaattctggtggcctggaagcatatcaaggagtctctggggaggcctcagggcttcgaggttggatattggaaggatatggagcaggaagacaccgcagagactgtgaagacccgtgggaatgagtccttcgtgatactgacggggttggaaggcaacactctgtaccatttcactgtcagagcatacaacggtgctggctacggaccacccagttccgaggtctccgcaactactaaaaagagcccaccctcacaggcacctagcaatctccgttgggaacaacagggctcccaagtgagtctcggatgggaaccagtgatacctctcgctaatgaatctgaagtggtaggatataaagtgttttacagacaggagggtcactcaaactcacaggtgatcgaaacgcagaaattgcaggctgtagtccctcttcccgatgccggcgtgtacattattgaagtgagagcttatagcgagggcggagacgggaccgcaagctcacagatccgggtgccatcgtatagcgggggaaagattacttccgcacagtctaccttacactctctgtcaacctcaagctccagtgtgaccctgttactggctctgatgatcccttcgacaagctggtag

SEQ ID NO: 113003 - DNA, 3303 bp, synthetic construct
  misc_feature 1..3303: note = Description of Artificial Sequence: Synthetic coding sequence
  source 1..3303: mol_type = other DNA
atggcctcatcgtggaaactgatgctttttctctccgtaaccatgtgcctgagtgaatactctaagtctctgccaggcctctcaactagctacgcggcgttactgaggattaaaaaatctagttcttccagtctgttcggaagcaagacccgcccccggtactcctccccctcattggggacactgtcagcaagctccccttcttggctgggtgccgcccagaactattatagcccaatcaacttgtaccattccagcgatgctttcaagcaagatgaatccgtggattacggtcccgtttttgtgcaggagcctgatgacatcatctttccaactgatagcgacgaaaagaaagtggcactcaactgcgaagtgcggggaaaccccgtgcccagctatcgctggttacggaatggcaccgagatcgaccttgagtccgactacagatatagtctgattgacggcacttttatcatttccaaccccagcgaagcgaaggattccggacactaccaatgtttggctaccaataccgtcggctctatcctgtctcgggaggcaaccctccagttcgcctatctcggaaactttagtgggcgcacacgctccgctgttagcgtgcgcgaaggccagggagtagtgctgatgtgttctcctcccccgcattctcccgagatcatctactcatgggtttttaatgagttcccttcttttgtcgctgaagacagccgccgctttatttcccaagagaccggaaatctttatatcagcaaagtgcagacttcagatgtggggtcctacatctgtctcgtaaagaacactgtaacaaacgcaagagttttgagccctccaactccgctcaccctgcgaaacgacggcgtgatgggcgagtatgagcccaagatagaggtccacttcccatttaccgtcacagcagccaagggtaccaccgtgaagatggagtgcttcgcactcgggaacccggtgcccactatcacctggatgaaggtgaacggatatatcccgtccaaagcccggctgagaaagagtcaggccgtgctggaaattccgaatgttcagcttgatgacgctggcatatacgaatgtagggccgagaactcacgggggaagaattcatttagaggccaactgcaagtgtatacctacccacactgggtggagaagctcaacgatactcagctggatagcggatcgcccctgcgctgggaatgtaaggctactggtaaaccaagacccacatataggtggctgaagaacggggtgcctctgtctcctcagtcccgggtggaaatggtgaatggcgtccttatgatccacaacgtgaatcagtctgatgccgggatgtaccaatgtcttgcggagaacaaatacggcgcaatatacgcgtccgctgagctgaaaattcttgcctccgccccaacctttgctctgaaccaactgaagaagaccattattgttacgaaagaccaggaggtggtaattgagtgcaagccacagggtagtcctaaacccaccatttcttggaaaaaaggcgaccgggctgttagagagaacaagcgtatcgccattctgcctgatggctccctgaggatattgaatgcctccaagtctgatgagggcaaatatgtgtgcaggggcgagaacgtgttcgggagcgctgaaatcattgcctcactgtccgttaaggagccaacccgcatcgagctgacacccaaaagaactgagctgactgtgggggaatctatagtgctgaattgtaaagccatccacgatgcctcgctggacgtgacgttttactggaccctgaaaggccagccgatcgactttgaggaggaagggggccacttcgagtccatccgcgctcaggcatcaagtgccgatctcatgatccgtaacattcttctgatgcatgccggtagatacggatgcagggtccagaccacagccgattcggtcagcgacgaggccgaactgctggtccgcggccctcctggcccccctgggatagtgatcgtagaagagattaccgagtccacagctacgctttcatggtccccggccgcagacaatcatagtccaatatcttcctacaatctgcaggccaggtcccctttctctctgggttggcagacggtgaaaacagtgccagagattatcacaggggatatggaatctgccatggctgtcgacctgaacccttgggtggaatatgagtttagagttgtggccaccaacccaatcggtacaggcgacccgtctaccccatctcggatgattcgaactaacgaggcagtccccaagactgcgcctacaaacgtgtccggcaggtcagggcggaggcatgagctggtgattgcgtgggagcctgtctccgaggagttccagaatggcgaggggttcggatacatagtggcctttaggccgaacggtaccaggggctggaaagagaagatggtgaccagttccgaggcgagcaaatttatatacagggacgagagcgtccctcctctgaccccttttgaggtgaaagtgggggtttacaataacaaaggtgacggccccttttcccagatcgtcgtgatctgttccgcagagggtgagccatccgcagcccccaccgacgtgaaagccaccagcgtgtcagtgagtgagattctggtggcttggaagcatattaaagaaagtctggggcggcctcaggggttcgaggtgggctactggaaggacatggagcaagaagatactgccgaaaccgttaaaactcgcggcaatgagagctttgtgattctgaccggcttggagggcaacaccctgtatcactttacagttagggcctacaacggtgcaggttacggccctcccagcagtgaggtaagtgcgacaactaagaaatcaccaccatcccaagcgccgtccaatctgcgctgggagcagcagggttcacaggtttcactcggatgggagcccgtgatcccactcgctaatgaaagcgaagtcgtcggctataaggtgttctatcggcaagaggggcatagtaactcccaggtcattgagacccaaaagctgcaagcagtggtacccctgcccgacgctggcgtgtacattatcgaagtaagagcgtactccgaaggaggggatgggacagcctcatctcaaatcagagtgccatcctacagcggagggaagatcacatctgcccagtctaccttgcactctctttctacatctagttcgtctgtaacactcctgttggccctgatgatcccgtccacatcttggtag

SEQ ID NO: 113004 - DNA, 2736 bp, synthetic construct
  misc_feature 1..2736: note = Description of Artificial Sequence: Synthetic coding sequence
  source 1..2736: mol_type = other DNA
atggcgtcctcctggaagctgatgctctttttatctgtcaccatgtgcctgagtgagtacagcaagtctttgcctggcctatccacatcatacgccgcgctgctgaggattaagaagtcaagcagcagctctctgtttggatcaaaaactaggcctaggtactcatctccatccctgggcaccctgtccgcctcttctccctcctggctcggtgccgcccagaactactactcccctatcaacctctaccacagttccgatgctttcaaacaggacgagagcgtagattacggacctgttttcgtccaggagccggacgatattatattcccaacggacagcgatgagaaaaaagtcgccctcaactgtgaggtgcgcggtaaccctgttcccagctataggtggctcagaaacggcaccgagatagatctggaatctgactaccgttactccttaatcgacggcacctttatcattagtaacccttcagaagcaaaagactccggtcattatcagtgtttggcaaccaacacagttgggtcgattctctcgagggaggcgaccctccaatttgcctacctcggcaatttcagtggccggaccaggtcagctgtgagtgttagggaggggcagggggtggtgctgatgtgtagcccacctcctcatagcccagaaattatctactcatgggtcttcaacgaatttccaagcttcgtcgccgaggactctcgccggtttatttcacaagagaccgggaatctctatatctccaaggtccaaacaagcgacgtgggttcatatatctgcctcgtcaaaaatacagtcaccaatgccagggtcttaagccccccaacccctttgacactgcgcaacgacggtgtcatgggcgagtacgagcctaaaatcgaagtccattttcctttcacggtgacggctgctaaagggacgacggtgaagatggagtgttttgccctggggaacccagtgcctacaataacctggatgaaagttaatggttacataccgtccaaggcaagacttagaaagagtcaggccgtccttgagatacccaacgtccaactggacgacgctgggatttacgaatgtcgtgccgagaatagccggggcaagaactcgttccgcgggcagctgcaagtctatacctacccacattgggtcgagaaactgaacgatacccaactggattccggcagcccgctccgttgggaatgtaaggcaaccggtaagccaaggccaacgtacaggtggctaaagaacggcgtgcctctctccccacagtctcgtgtggagatggtcaatggagtactgatgatccacaatgtaaaccagagcgacgcaggtatgtaccagtgcctggcagagaacaagtatggagccatctatgcatctgcagagctgaagatcttggctagcgcgcccactttcgcactgaaccagctgaagaaaacaataattgtcactaaggaccaggaagtggtgatcgagtgcaaaccccagggcagtcctaagcccacaatctcctggaagaaaggagaccgcgcagtgagagaaaataaaagaatcgccatactacctgacggctctttgaggatcttgaacgctagcaagtccgatgagggtaagtatgtctgtcgaggcgaaaatgtttttgggtcagcagagattatcgcttcactgtccgtcaaggaaccaacacgcatagagctcacacctaaacgcacggagctgactgttggagagagtatagtcctgaactgcaaagcaattcatgacgcttccctggacgtgacattttactggacactgaaaggccagccaattgactttgaagaggagggagggcatttcgagagtattcgggcccaggcatcgtcagccgacctaatgatccggaatatcctgctgatgcacgctggacggtacgggtgtcgagttcaaacaacagctgatagcgtctctgatgaggccgaactgctggtacgaggccctcccggaccaccaggcatagtgatcgtggaggagatcactgagagtacagctacactgagctggagccctgcggcggacaaccacagccctatctcatcttacaatttgcaggctcggagtccattctctcttggctggcaaacagtaaagaccgtgcccgagattatcacgggtgacatggaaagcgcgatggctgtcgatctgaatccctgggtggagtacgagtttcgggttgtggccacaaaccccattggaacgggtgatccaagtactccttcgcggatgatccgcaccaacgaggcagttcccaagaccgctccgacaaacgtgtctgggcggagcggtcgacggcatgaattggttatcgcctgggagcccgtcagcgaagaattccagaatggtgagggcttcggatacatcgtcgcgttccgccctaacgggacccgcggctggaaagagaaaatggtaacttcttccgaggccagtaaattcatctatcgtgatgaaagcgtaccgccccttacaccttttgaggtcaaggtcggtgtttataataacaagggagacggccctttttcccagatcgtcgttatctgctccgcagagggtgagccttcagccgccccgaccgacgtcaaagcaacttccgtcagtgtgtccgaaattcttgtcgcctggaaacacatcaaggaatctctgggcaggccacagggatttgaagtttag

SEQ ID NO: 113005 - DNA, 3087 bp, synthetic construct
  misc_feature 1..3087: note = Description of Artificial Sequence: Synthetic coding sequence
  source 1..3087: mol_type = other DNA
atgcgtctcctgtggaaactggtgattctgctacccttgattaactccagtgctggtgatggcctcctgagccggcccattttcacacaggaaccccacgatgtcatttttcccctcgatctgtctaagtcggaggtgatactcaactgtgctgctaatggatatccttcccctcattatcggtggaaacagaatggcacagacatcgatttcaccatgtcctatcattaccgcctggacggaggcagtctggcaatcaatagccctcatacagatcaagatatcggtatgtatcaatgtctagcgactaacctacttgggacaatcctttctcggaaggccaagctgcagttcgcatatatcgaagacttcgaaacaaagaccaggtccactgtgtccgttcgcgaaggtcaaggggtagtgctgctgtgcggccctcccccacattttggcgacctgagctatgcctggaccttcaacgataaccccctttacgtccaagaggacaataggcgcttcgtgagccaggaaaccggcaacttgtatattgccaaggtggaaccttccgatgtcggcaactatacatgctttattactaataaggaggcccagcgatctgtgcagggtccacctacacccttggtgcaaaggacggatggcgtgatgggagagtatgagccaaaaatcgaagtcagattccccgaaaccatacaggccgccaaagattcctccgtaaagctggaatgtttcgcgctggggaaccccgtgccggatataagctggcggagactcgacgggagcccactgcctggtaaggtgaagtatagtaagtctcaggccattctggagatcccaaactttcagcaagaggacgagggattctatgagtgcattgcttccaatctaagaggcaggaacctggctaagggccaattgatcttctatgcacctccggagtgggagcaaaagatccaaaatactcatctgagcatttacgataacctgctgtgggagtgcaaagcctcgggtaaacctaatccttggtacacctggctaaagaatggcgaacggctgaaccctgaggagcgaatccaaattgagaacgggacactcatcattaccatgttgaacgtgagtgacagtggagtttaccaatgcgccgccgaaaataagtaccagatcatctacgcaaatgcggagttgagggtactggcttcggcccctgatttctcaaaatcccccgtcaaaaaaaagtctttcgtgcaggtcggtggcgatatcgttatcggatgcaagcctaatgctttcccccgggctgccatttcctggaagagaggaacagagacgctccgacaaagcaagcgcattttcctcttggaggatggcagtctgaaaatttataacattacacgcagtgacgctggctcctatacttgcatcgcaaccaaccagttcgggactgctaagaacacaggaagcctgatcgtgaaagagagaactgtcattaccgtgccccccagcaaaatggacgtgaccgttggcgaaagtattgtgttgccgtgtcaggtaagccatgatccctctattgaggttgtattcgtatggttctttaatggggacgttatcgacctgaagaagggggtcgcgcatttcgagagaatcgggggggagtcagttggagaccttatgatcaggaacatccagctgcatcattcaggcaaatacttatgtacggttcagactacgctggagtccctctcagccgtggctgatataattgtacgcgggcccccggggccccctgaagatgtacaggtggaggatatttccagcaccacaagtcagctgtcatggcgggctgggcccgacaataactctcctattcaaattttcacaatacagaccagaacaccttttagcgtcgggtggcaagccgtggcaaccgtccctgaaatactgaacggcaagacatataacgccacagtagtgggcctgagcccctgggttgagtatgagtttcgggtggtggctgggaatagcataggcatcggagaaccgtcagagccctcggaactgttgagaaccaaggcctccgtgcccgtggtggctcctgttaacatccacggtggcggagggtcccgcagcgaactggttattacatgggagagcattcccgaagagcttcaaaatggggagggtttcgggtatatcattatgttcaggcccgtggggagtacaacgtggtccaaagagaaggtgtcctctgtggaaagttctcggtttgtataccgaaatgaatcgatcatccccctgtcaccctttgaggtgaaagtgggcgtgtacaacaacgagggcgaggggagccttagtacggtgactatcgtgtactctggagaagacgaaccacaattggcgccccgcgggaccagcttacagagcttttccgcttccgagatggaggtgtcctggaacgccattgcgtggaatcgaaacacaggtcgtgtgttaggatacgaggtgctctactggaccgacgactccaaggagagcatgatcgggaagattcgggtgagcgggaatgtgacgactaagaatatcaccggcttgaaagcaaacactatctactttgcctcagtgcgcgcttacaatacggccggtactggcccctcatctccacccgtcaatgttacgacaaagaagtcccctcccagccagccacctgctaatatagcatggaaattaaccaactctaaactctgtctgaactgggagcatgttaagaccatggagaacgagtccgaagtgctgggttataagattctgtatcgtcaaaatcgacagtcaaagactcacatccttgagacaaataatacatccgctgaactgctggttccttttgaggaagattacctgattgagatcagaacagtgtcggatggcggggatggctcatcatccgaagaaattcggattcctaaaatgtcctcactctctagtagagggatccagtttttggagcctagcacccacttcctctcaattgtcattgtcatttttcattgctttgctatccaaccactaatttag

SEQ ID NO: 113006 - DNA, 3087 bp, synthetic construct
  misc_feature 1..3087: note = Description of Artificial Sequence: Synthetic coding sequence
  source 1..3087: mol_type = other DNA
atgaggctgctatggaaattggtcattctcctacccctcattaatagcagcgctggtgatggtttgttgtctaggccgatattcacgcaagagccgcacgacgtcatttttcctttagatttatccaagtccgaagtcatcctgaattgtgctgctaacggatatccatcaccccactatcgttggaagcaaaatggaacagatatcgactttactatgagttaccactaccggctggacggtggctcacttgcaataaactctccccatacggatcaagacatcgggatgtaccagtgtttagccactaacctcctgggtaccatcctgagccgcaaggccaagttacaattcgcctatatcgaagatttcgaaacaaagacaaggtccaccgtctcagtcagggagggtcaaggcgtcgtgctgttgtgcggcccccccccacacttcggggatctgagttacgcctggacctttaatgacaatccactgtacgttcaagaagataaccggagatttgtgtcccaagagactgggaatctgtatattgctaaagttgagccatcagacgtcggtaattacacttgcttcataaccaacaaagaggcacaacgcagcgttcagggaccccccacccccctggttcagcgcactgacggggtgatgggagagtacgagccaaaaatcgaggtccgctttcctgagaccatccaggccgcgaaagattctagcgtgaagctggaatgctttgccctgggtaatcctgtgccagacatatcgtggcgacgtctggatggctctcccttgcctggaaaggtcaaatattcaaagtctcaggcaatattggaaattcccaattttcagcaggaagacgaagggttttacgagtgcatcgcctccaatcttcggggccgaaacctggctaagggacagctgattttttacgcaccccctgagtgggagcagaagatacagaacacgcatctttccatttacgacaacttgctctgggaatgcaaagcttccggaaagcctaacccctggtatacttggctcaagaacggcgagaggctgaacccggaagagcgcattcaaattgagaacgggactctgattatcaccatgttgaacgtgagcgacagcggcgtatatcagtgcgccgcagagaataaataccagatcatatacgccaatgccgagctgagggtgctagcctctgcacctgacttttctaaaagtccagtgaaaaaaaagagttttgtgcaggtgggcggagacattgtaatcggttgcaaacccaacgccttccctagagcggctatcagctggaagcggggaaccgaaacactgcggcagagcaagagaatttttctccttgaagacggctccttgaagatatataacattacgcggtccgacgcaggctcatacacctgcatcgccacaaaccagttcgggacggccaaaaacactggatccctgatcgtcaaggaacggacagtgatcactgttccgcccagcaagatggatgtgaccgttggggaaagcatcgtgctgccttgccaggtatcccacgatccaagcattgaggtagtttttgtgtggttttttaatggcgacgttattgacctgaagaaaggtgtagctcattttgaacgcatcggaggcgagagcgtgggggatttaatgatcaggaacattcagctgcaccactctggcaagtatctatgtacagtgcaaaccacactagaaagtctgagcgccgtcgctgacatcatagtgagagggcctcccggcccccctgaggacgttcaagtcgaagacattagctctacgaccagccagttgtcctggagagctggtcccgataacaatagtcctattcaaattttcacaatccagacgcgcacaccattttctgtgggctggcaggccgtggcaaccgtgccagaaatcctgaatggcaagacatataacgctaccgttgtcggactgtcaccttgggtggagtatgaattccgggtggtggccggcaactcaattggcatcggggagccctccgagccctccgaattattgagaaccaaggcttccgtgcccgtcgtagctccggttaacattcatggagggggcgggtccaggagcgaactcgtgataacttgggaatccattcctgaagagcttcagaatggcgaggggttcggctacatcatcatgtttaggcctgtgggatctacgacatggagcaaagagaaggtgtccagtgtcgaaagctcaagattcgtgtaccgcaacgagtctatcattccactgagccctttcgaggtgaaggtgggcgtgtacaacaacgagggtgaaggttctctctccaccgtgacaatcgtgtatagcggcgaggatgagccccaactggccccacggggcacttcgctgcagagcttttcagcttcagagatggaagtctcatggaatgccattgcttggaaccgaaacactggcagggtcttagggtacgaggttctgtattggaccgatgactccaaggagtccatgattggaaagattcgggtgagcggtaatgtgaccacgaagaacatcaccggactgaaagcaaacaccatctatttcgccagcgtaagggcttataataccgccgggacaggcccatctagtcccccggtgaacgtgacaactaagaagtcccctccttcacagcccccggccaacatagcctggaaattaactaacagcaagctgtgtttgaattgggagcacgtcaagactatggaaaatgaatctgaggtcttggggtacaagatactgtaccgccagaacaggcagagtaaaacccatatactggagactaacaacacaagcgcagaactgctggtgcctttcgaagaggactacctcatcgaaataaggactgtgtctgacgggggggatggcagtagcagcgaggagataaggatccccaagatgagctcattgtcttccaggggcatccaattccttgagcccagcacacatttcctgagcatcgtcatcgttattttccattgttttgcaatccagcctctgatttag

SEQ ID NO: 113007 - DNA, 2871 bp, synthetic construct
  misc_feature 1..2871: note = Description of Artificial Sequence: Synthetic coding sequence
  source 1..2871: mol_type = other DNA
atgtcctatcactacagactggatggtggttcgttagcaatcaatagcccgcatacagaccaagacattggaatgtaccagtgcctggccaccaacctactgggaacgatcttgtcacgaaaagctaaattacagttcgcatatatcgaagatttcgagactaagacgcggtctacagtgtcagtcagagaaggtcagggggtagtactcctttgtggccccccaccccattttggagatttatcctacgcctggaccttcaacgacaaccccttatacgttcaggaagacaaccgtcgattcgtttcacaggaaacaggtaatctgtacattgccaaggtagagcccagcgacgttggcaattacacctgctttattacgaacaaagaagcgcagcgaagcgttcaaggaccgcccacccctctggtgcagaggaccgatggtgtcatgggggagtatgaacccaagatcgaagtgaggtttcccgagactatacaggcagcgaaagactcatctgtgaagctcgagtgttttgccttgggtaaccccgtccccgacatttcctggagacgccttgatggatctccactcccgggtaaagttaagtactctaagagccaagcaattctggaaatcccaaatttccagcaggaggatgagggattctatgaatgcatcgccagtaatctccgtggccgaaatttggcgaaagggcagttaattttctatgcccccccagaatgggaacaaaaaattcagaatacacatttgtccatctatgacaatctcttgtgggagtgcaaagcatccggtaagcccaacccatggtacacctggttgaagaacggggaaagactcaatccagaggagaggatacagatagagaacggtaccctcatcattactatgttaaacgtgtcagactcaggtgtataccaatgcgctgcagagaataaatatcagattatctacgccaacgccgaactgcgggtcctggcctctgctccagacttcagtaagtcccctgtgaaaaagaagagtttcgtgcaggtggggggtgatatcgtgatcggatgtaaacctaatgccttcccacgagccgctatctcatggaagaggggtaccgaaactcttaggcaatccaaacgcatcttcttgcttgaggatggatccctcaaaatctataatataacacgcagcgacgcagggtcctacacctgtatcgcaaccaaccaattcggcaccgccaaaaacacagggtctctcatcgtgaaggagaggaccgtcatcaccgttccaccatccaagatggacgtcacagtcggggaaagcatcgtactaccttgtcaggttagccacgaccccagcatcgaggtagttttcgtatggttcttcaatggggacgttattgacctgaaaaaaggtgtcgcccattttgaacggattgggggtgaatcggtgggcgacttgatgatcagaaatattcagctccaccactctggcaaatatctgtgtaccgtgcagactactctggaatccttgtcagccgtggccgacattatagttcgcggcccacctggacctcctgaggacgtgcaggtggaagatatctccagtactactagccaactatcttggcgggcaggccccgataacaattccccaatacagatcttcaccatccagacacgaactcccttcagtgtgggctggcaggcggtcgccacagtgcccgagatcttaaacgggaagacctacaatgctacggtagtggggctttccccctgggtggaatacgaattccgtgttgttgctggcaactcaatcggcataggtgagccgtctgaaccctctgagctactgcgaaccaaagcctccgtgcccgtggtggcgcctgtaaacattcacggtggaggcggcagccggtctgaactggttatcacatgggagtccatcccagaagagctgcagaacggagaaggattcggctatattattatgtttcgtcccgttggttccacgacttggtcgaaagagaaggtatcctctgtcgagtcatcgcggtttgtgtaccgcaacgagtctatcatccccctctctcccttcgaagttaaggtgggcgtgtataataacgaaggtgaaggctcactgagcactgttactattgtgtacagcggagaagacgaaccccagctggcaccccggggaacatccttgcagtccttcagcgcatccgagatggaagtgtcgtggaatgcgatcgcttggaatcggaacacaggaagagtcctcggatatgaggttttatattggacagacgattctaaggagtctatgattggcaagataagagtgagtgggaatgtgactacgaagaatatcaccggcttgaaagccaacacaatatatttcgcctccgtgagagcatataataccgccggcactgggcccagcagtccccccgtcaacgtgacaaccaagaaaagtccaccaagtcaaccacccgcgaatatcgcttggaaattgacaaacagtaagttatgcctgaactgggagcatgtcaaaacaatggaaaatgagagcgaggttctggggtacaagattttgtaccgtcaaaacaggcagtcaaagactcacatccttgagacaaataacacctccgcggaactgctggtgcctttcgaggaggattacctcatcgaaatccggactgtaagtgacggcggcgatgggagtagctctgaagagattcgtatccccaaaatgtcatccttgtccagccgggggattcaatttctggagccctccactcacttcctgtcaatcgttatcgttatctttcactgcttcgctatccagccattgatctag

SEQ ID NO: 113008 - DNA, 3996 bp, synthetic construct
  misc_feature 1..3996: note = Description of Artificial Sequence: Synthetic coding sequence
  source 1..3996: mol_type = other DNA
atgcaggcagcgccaagagcggggtgcggagcagccttactgctgtggattgttagttcctgcctatgccgcgcctggacagccccaagtacatcccaaaaatgcgatgagcctctggtgagcgggctgccacacgtggcattctccagtagttcgtccataagtggatcatattctcccggctatgccaaaatcaacaagcgcgggggtgcaggtggatggtctccatctgactctgatcactaccagtggcttcaggtcgacttcggaaacagaaagcaaatctccgccatcgccacacagggacgctactccagtagcgattgggtaacccagtatagaatgctctattctgacacagggcggaactggaaaccttatcaccaagacggtaacatttgggcctttcccggcaatatcaattccgatggcgttgtgcgccacgagcttcagcaccctattatagctagatatgtgcgcattgttcccctagattggaacggggagggacggataggcctccggatcgaggtctacggttgttcttattgggcggatgttataaattttgacggacatgttgttctcccttatcgctttaggaataagaagatgaaaacccttaaagacgtcatcgctctcaactttaaaacctccgaatctgaaggagttatcctgcacggcgagggacaacaaggcgactacatcacactcgagttaaagaaggcaaagctggtgctcagcctgaaccttggcagcaatcagctcgggccgatctatgggcatacctcagttatgactggctcattgcttgacgatcaccattggcacagcgttgtgatcgaacgccagggacgatcgattaacctgacgcttgaccgctccatgcaacacttcagaactaatggtgaatttgactatttagacttggactacgaaatcacttttggaggcattccattcagcggcaagccttcttcctcatcaaggaagaactttaaggggtgtatggagtctattaactacaacggcgttaatattaccgacctcgcccgcaggaagaagctcgaacccagcaatgtgggtaacctgtccttctcttgcgttgaaccctacactgttccagtattctttaatgccacttcttacctggaggtgccagggagactgaaccaggatctattctccgtgtcatttcaattccgcacatggaaccctaacggcttactggtattttctcatttcgctgacaatctagggaatgtcgaaattgacttgacagaatccaaggtaggcgtccacataaatatcactcagacgaagatgtctcagattgatatttcctcgggatctggtctgaacgacggtcagtggcatgaggtccggttcctggcaaaggagaattttgccatccttaccatcgacggtgacgaggcctccgcagtacgcaccaattcacctctgcaagtcaagacaggtgaaaagtacttctttggagggttcctcaaccagatgaacaacagtagccattctgtcctgcaacctagctttcaaggctgcatgcagttaatccaagtagatgaccaactcgtaaatctgtatgaagtggcgcagagaaagcctgggagctttgctaatgtgtctattgatatgtgtgccattatcgaccggtgcgttcccaaccactgcgaacacggagggaaatgctcccagacatgggacagctttaaatgtacttgtgacgaaacaggctactccggagccacttgtcacaactcaatctacgaaccaagctgcgaggcgtacaagcacctcggacagacatccaactattactggatcgatcctgatgggtccggcccgctgggccccctcaaggtctattgcaatatgaccgaggataaagtgtggaccattgtcagccacgacctgcaaatgcaaacacctgtggtgggctacaaccccgagaagtacagcgtcacacagctcgtgtatagcgcgagtatggatcaaatttccgcaataactgacagtgccgagtactgtgaacagtacgtatcttacttttgtaagatgtcccgcctcttgaacaccccagacggttccccatacacgtggtgggtcggaaaagccaacgaaaagcactactactggggaggatcaggccccggcatacagaagtgcgcctgcggcattgagcgcaactgtactgatcctaagtactattgtaactgcgacgcggattacaaacagtggcggaaagacgcaggctttctctcttataaagaccatctgccagttagtcaagtggtcgtcggtgacaccgacagacaaggtagcgaagccaagctgtctgtggggcccttgaggtgtcaaggcgataggaactactggaatgcggcctcttttcccaacccttcaagctatctgcatttctctacatttcagggggaaaccagcgctgacatttcgttttatttcaagaccctgaccccttggggtgtgttcctggagaacatgggcaaagaagacttcattaagctggaactcaagtccgctacggaagtgtcgttctcgttcgatgtcggaaatgggcctgttgagattgttgtccgcagtcccacgcctttgaacgatgaccagtggcatagagttaccgcagagcggaacgtcaaacaggccagcttgcaggtagaccggctgccccagcagattagaaaagcaccaacagaaggccacaccagactggaactctatagccaactctttgttggcggggccggaggtcagcagggcttcctagggtgtattaggtccctgagaatgaatggggtgacactggacctcgaagaacgggctaaggtcacctctggattcatttcgggatgttccggccactgtacatcttacggcaccaactgtgagaacggtgggaaatgtctggaacggtatcacggctattcttgtgactgcagcaacacagcatacgacggtacgttttgtaataaagacgtcggagcgttttttgaagagggcatgtggttaagatacaattttcaagcccctgccacgaacgcaagggatagctcttcccgtgtcgataacgcccccgaccagcagaatagccaccctgatcttgcccaggaagaaatcagattcagtttcagtaccactaaggccccatgtatcctgttatatatcagctcttttaccactgactttctagcggtgctcgtcaaaccaaccgggtcacttcagattagatataatctgggtggaaccagggagccgtacaacattgatgtagatcacagaaacatggcaaacgggcagccacattcggtgaatatcaccaggcacgagaaaactatttttctgaagctggatcattatccgagcgtgagctatcatctgcccagttcaagcgacactctttttaatagtcccaagtccctcttcctcgggaaggtcatcgaaacaggcaagatcgatcaggaaatccacaaatataatactcccggtttcacagggtgcctttctcgggttcaatttaaccaaattgcaccccttaaggccgcacttcgacagactaatgcctcagctcacgttcacattcagggagagctcgttgagagcaactgtggagccagtccgctcaccttgtcaccgatgagctcagcaaccgacccatggcacctcgatcacttggactccgcaagcgcggactttccttataacccgggccaggggcaggccatccgaaatggcgtgaaccgcaacagtgccatcataggcggtgtgatcgctgtggttattttcaccattctgtgcactctggtgtttctgatacggtacatgtttcgtcacaagggaacctaccatactaacgaagccaagggcgcagagtctgcagagtccgcagacgctgcaatcatgaataacgaccctaatttcaccgagaccatcgatgaaagtaaaaaagagtggctcatctag

SEQ ID NO: 113009 - DNA, 1173 bp, synthetic construct
  misc_feature 1..1173: note = Description of Artificial Sequence: Synthetic coding sequence
  source 1..1173: mol_type = other DNA
atgaacggggtcaccctggaccttgaggagcgagcgaaggtaacaagcgggtttatatccggttgtagtggccattgcacttcttatggcactaattgcgaaaatggcgggaagtgcctcgaacggtaccacggttattcctgtgactgctcaaatactgcgtacgatggaaccttctgcaacaaagatgtcggagcattcttcgaagagggaatgtggctgcggtacaattttcaggcccctgccactaacgcgagggatagtagttcaagggtcgataacgcccccgatcagcagaactctcaccccgatctggcacaagaagaaatccgttttagcttctccacgactaaagccccctgtatcctgctgtatatctccagctttaccacggacttcctcgcggtgttagtgaaacctaccggaagtctgcagattcgttacaaccttggggggactcgcgagccctacaatattgacgtggaccacagaaatatggctaatgggcagcctcatagcgtaaatatcactagacacgaaaagaccatttttctgaaattggaccactacccgagcgtctcttaccacctgccgtctagttctgacacactctttaactcacccaaatccctgttcttggggaaagtcatcgaaacagggaaaattgaccaagagatacataaatacaacacaccagggtttaccggatgcctttctcgcgtacaattcaatcaaattgccccgctgaaagccgccctcagacaaactaatgccagtgcacatgttcacattcagggagagctggtggagagtaactgtggggcatcaccactgacattaagtcccatgagctcagcaaccgacccatggcacttggaccacctggacagtgctagcgcagatttcccatacaaccccggtcaggggcaggctatccggaatggcgtgaatcggaatagtgccatcattggaggggttattgctgtagtcatctttacaatcttatgtacacttgtcttcttaatccgttacatgttccggcataagggaacataccacacaaatgaagccaaaggcgcagagtccgcagaaagcgccgacgcggccattatgaacaatgatccaaactttactgagactatcgacgagagcaaaaaggaatggctaatttag

SEQ ID NO: 113010 - DNA, 1353 bp, synthetic construct
  misc_feature 1..1353: note = Description of Artificial Sequence: Synthetic coding sequence
  source 1..1353: mol_type = other DNA
atgtctgatatggaggacgattttatgtgtgatgacgaagaagattacgacctcgagtactcagaagattccaactctgagcctaacgttgatttggaaaatcagtattataattcaaaggccctgaaagaagacgatcctaaggctgccctgtcttctttccaaaaagtattggagctcgagggcgaaaaaggggaatgggggttcaaagcactgaagcaaatgatcaagattaacttcaagctcacaaatttccctgaaatgatgaaccgctataagcagctattaacctacatccgctctgctgtgacgcgcaactattccgaaaaaagcatcaactccatcctcgattacatatcgacgagtaaacagaactcagactttctgtgccaaatggatctcctgcaagaattctacgaaaccacgctcgaggccctaaaagatgcgaagaacgaccggttgtggttcaagaccaacaccaaactgggcaagttatatctcgagcgtgaagaatatgggaagctccagaagattctccgccagcttcaccaaagctgtcagactgacgatggcgaggatgatctcaagaagggcacacagctgctggagatttacgcactggagatacaaatgtatacagctcaaaagaataacaaaaaactgaaggcactctatgaacagagtctgcatattaagagcgctattccgcaccctctgatcatgggagtgatccgagagtgtggcggcaaaatgcacttgcgcgagggcgagtttgagaaggcacacacagacttctttgaagctttcaagaattacgatgagagcggttcgcctaggagaaccacatgtcttaagtatctggtgttagctaacatgcttatgaagagtggtatcaaccctttcgattctcaagaggccaagccttacaaaaacgatccagaaattctcgctatgaccaatcttgtttccgcttaccagaacaacgatatcaccgagttcgagaagattcttaaaactaaccattcaaacattatggacgacccattcatcagggagcatattgaggagctcctcaggaacatacgcactcaagttttgataaaactgattaaaccctacaccagaatacacatcccctttatatcaaaggaactaaacatagatgttgcagacgtggagagcctgctcgttcagtgcatattagacaatacaatccacggacggattgaccaggtgaaccagctgctggaactcgatcatcagaaacggggtggtgctcgctacactgcgctggataagtggacaaaccagctcaacagcttgaatcaggcggttgtgtccaagcttgcatag

SEQ ID NO: 113011 - DNA, 1332 bp, synthetic construct
  misc_feature 1..1332: note = Description of Artificial Sequence: Synthetic coding sequence
  source 1..1332: mol_type = other DNA
atgtccgatatggaggatgatttcatgtgtgatgatgaagaagactatgatcttgagtatagcgaggattcaaattcagaacctaacgtagacctggaaaaccagtactacaactccaaggccctgaaggaggatgacccaaaggccgccctgtcttctttccagaaggttctcgagctggaaggcgaaaagggtgaatggggattcaaggctctgaaacagatgatcaaaattaactttaagctcacaaactttccggaaatgatgaaccgctataagcagctgctgacttacatccgcagtgccgtcacgagaaactactctgagaagagcattaatagcatcctcgactacatctccacttcaaagcagatggacttgctgcaggaattctatgaaaccaccctcgaagccctgaaggatgccaagaatgacaggctctggttcaagacgaacacgaagctcgggaagctgtacctggagcgagaggaatatggcaagttgcagaaaattttgcggcagttgcaccagtcatgtcaaacagacgatggagaggacgacctgaagaagggcacccaactcctggagatctacgctctggagattcagatgtacaccgcacagaagaataataaaaagctcaaagctctttacgaacaaagtttgcatatcaagagtgccatccctcaccctctgatcatgggggttattagggagtgtggcggaaaaatgcatctaagggaaggggagtttgagaaggcgcacacggatttcttcgaggcattcaagaactacgatgagagtgggagtcctaggagaaccacttgcctgaagtacctggtcttagctaacatgctgatgaagagtggtattaaccccttcgatagtcaagaagccaagccgtataaaaacgatcccgagattctcgcaatgaccaacctagtttctgcataccagaacaacgatattacagaattcgagaagattcttaagacaaaccacagcaatatcatggacgaccccttcatccgagagcatatcgaagaattgcttaggaatatccgcactcaggtgctcattaagcttatcaagccctatacacgaattcacatcccatttatttcaaaggagctcaatatcgacgtggcagacgtggagtccctacttgtacagtgcattcttgacaataccatacacggcaggattgaccaggttaatcagctgctcgaattagatcaccaaaaaagaggaggggcaaggtataccgctcttgataagtggaccaatcagcttaattcacttaaccaagcagtcgtgagcaagctcgcctag

SEQ ID NO: 113012 - DNA, 1272 bp, synthetic construct
  misc_feature 1..1272: note = Description of Artificial Sequence: Synthetic coding sequence
  source 1..1272: mol_type = other DNA
atggcgtctgcgcttgaacagttcgttaatagcgtgcgtcagctttctgcccagggacaaatgacgcagctctgcgagctcataaacaagtccggagagcttttggcaaaaaacctgagccatctcgacacagtcctgggagccctggacgtgcaggaacactccctgggtgtcctggcggttctcttcgtgaagttctcaatgcctagcgtccctgactttgagaccttattttcccaagtgcaactgtttatctctacctgcaacggcgagcacatccgttacgcaacagacacctttgctggattgtgccaccagctgactaacgcactcgtggagcgtaaacagccgttaagaggtattggtatcctaaagcaggctattgataaaatgcagatgaatacaaaccaactcacatccatacatgctgatctctgtcagctgtgtttactggctaagtgtttcaagccagcactgccctacctggatgtcgacatgatggacatctgcaaggagaacggagcctatgacgccaagcacttcctgtgttactattattatggggggatgatttatacagggctcaagaattttgaaagagccctatatttctatgaacaggccatcaccactccagccatggcagtgagccatattatgttagaatcttataaaaagtacattctggtgtcactcatcctcttgggaaaagtgcagcagctccctaagtatacctctcagatagtgggtagatttatcaaaccacttagtaacgcgtaccacgaactcgcacaggtttattccacaaataatccatctgagctaagaaacttagtgaacaagcacagcgagaccttcacaagagataacaacatggggctggtaaaacaatgcctgagctcgttatacaaaaagaatatccagcggttgactaaaacgtttctgacactctcactccaagatatggctagtcgggtgcagctctccggcccgcaggaagccgaaaagtatgtgcttcatatgatagaagacggcgaaatctttgcaagcattaaccagaaagacgggatggtgtcatttcatgacaatccagaaaagtataataacccagcaatgcttcataatatagaccaggagatgctgaaatgcatcgagttggatgagcgactaaaagcaatggatcaggagatcactgtaaatccccagtttgtacagaaatcaatggggtcacaggaggatgactctggaaacaagcctagttcctatagctag

SEQ ID NO: 113013 - DNA, 960 bp, synthetic construct
  misc_feature 1..960: note = Description of Artificial Sequence: Synthetic coding sequence
  source 1..960: mol_type = other DNA
atggcctctgcgctcgagcaatttgtcaactctgttcgccagttaagcgcacaggggcaaatgacgcagttgtgcgaattaatcaataaaagtggtgaactgctggcaaaaaacctctcacacctcgacaccgtactcggcgcactggatgtgcaagaacattcccttggtgtacttgcagtcctgttcgtgaaattctcaatgccttcggtccccgatttcgaaacactcttctctcaagtccagctttttatttcaacttgtaacggggaacatattcgctacgcgaccgacacgttcgccggcctttgccaccaattgactaacgccctggttgagcgcaagcaacctctacgggggattggaattttgaaacaggccattgataagatgcagatgaacaccaaccaattaacctccatccacgccgacttgtgtcaactctgcctcttggcgaaatgcttcaagccagccctgccttatctggacgtggacatgatggatatctgtaaggaaaacggggcctacgacgcaaaacacttcctgtgctattactactatggggggatgatctacaccgggctaaagaatttcgagcgggctctctatttctatgagcaggctattaccactcctgccatggctgtatctcacataatgctcgaatcttacaagaaatacattctggtgagcctgatcctactcggaaaggtgcaacaactgcctaaatacacatctcagattgttggcaggttcattaaacgccagagcctcgccatgttggctcgattagtccttaattcgtggcctcaagctgttttgttgcgtctccctcccagggttcttgggttacaacccctctcaaatgcttaccacgagctggcacaggtctactcaacaaataatccttccgagctgcggaatctggtgaacaagcacagtgaaacttttactcgatag

SEQ ID NO: 113014 - DNA, 834 bp, synthetic construct
  misc_feature 1..834: note = Description of Artificial Sequence: Synthetic coding sequence
  source 1..834: mol_type = other DNA
gcttcgcccttttgggttagctggctctacggctctcctctcccggccccccctctgccaggcggtgcccgttccggaacatgtgccccaattctcgttcttcagaacgcagctgaagctcttgcccgccagatgacacagctctgcgaactcattaacaaaagtggcgagctcctggcgaagaacctctcgcacctggacactgtccttggggccttggatgtacaagagcactcactcggcgtactggcagtcctgtttgttaagttctctatgccctccgtgccagacttcgagacactcttttcacaggtgcagctgtttatatcgacatgcaacggcgagcacattagatacgctactgacacttttgctgggctgtgccatcagctgacaaatgccttggttgaacgcaaacagcccctgagaggcattgggatcttaaagcaagccatcgataagatgcagatgaataccaaccagttgacatccatacatgcagacttgtgccagctgtgtttattggcaaaatgttttaagccggccttaccttacctggacgtggacatgatggatatctgtaaagagaacggcgcttacgatgctaagcacttcttgtgctactattactatggaggcatgatctataccgggctcaagaacttcgagcgcgcgctatacttttatgaacaggccatcaccaccccagccatggcagtgagtcacatcatgttagaaagttacaaaaaatatattctggtgtcgttaatcctactgggcaaagtgcaacaactgcccaaatacaccagccaaatcgttgggagattcatttag

SEQ ID NO: 113015 - DNA, 1212 bp, synthetic construct
  misc_feature 1..1212: note = Description of Artificial Sequence: Synthetic coding sequence
  source 1..1212: mol_type = other DNA
atgacccaactctgcgagctcatcaacaaatctggggagctattggcgaaaaacctgtcacatttagacaccgttctcggcgcactggatgtgcaggagcattctttgggcgttctcgccgtattgtttgtgaaattctccatgccctccgtgcccgactttgaaactctcttttcacaggtgcagctcttcatctctacatgcaacggcgagcacatcaggtacgcgactgacacgttcgcagggctctgtcatcagctgaccaatgccctcgtggaacggaagcaacctctgagaggaatcggtattctgaaacaagctatcgacaaaatgcagatgaatacaaaccagctgaccagcatccatgctgacctatgccagctgtgtctactggcgaagtgtttcaaaccggctcttccctatctggacgtggatatgatggatatttgcaaagagaacggcgcatatgatgcgaaacatttcctatgttattactattatggcggcatgatctataccgggttaaagaatttcgaacgggccttatacttctacgagcaggccatcactactcccgccatggccgtgagccacattatgcttgagagctacaagaagtatatcctcgtttccttgatccttttgggcaaggtacagcagttaccaaagtatacaagccagattgttggacggttcataaagccgttgagcaacgcctaccacgagctggctcaggtatatagcacaaataacccttctgagctaaggaacttagttaataaacactctgagactttcaccagagacaataacatgggccttgtgaagcaatgcctgagcagcctgtataagaaaaatatccaaaggctgacgaaaacattcctgaccctgtcattacaagacatggcatcacgagtgcagctgtctggaccacaggaagcggagaaatacgttcttcacatgatagaggacggcgagatctttgccagcattaatcagaaagacgggatggtgagctttcatgataaccctgaaaaatataataacccggctatgctccacaacatagaccaggagatgctgaaatgcattgaactggatgaacggctgaaggccatggatcaggaaatcacagtgaatcctcagttcgttcagaagagtatggggtcccaggaggatgactccggcaataagccctcgtcctatagctag

SEQ ID NO: 113016 - DNA, 1614 bp, synthetic construct
  misc_feature 1..1614: note = Description of Artificial Sequence: Synthetic coding sequence
  source 1..1614: mol_type = other DNA
atggctgctcagtgcgtgacaaaagttgctctcaacgtgtcgtgcgccaacctgctcgataaggatatcgggtccaagtcagaccctctttgtgtgctgttcttgaatacctccggccagcagtggtacgaggtcgagaggacagagcgaattaagaactgcctgaacccgcagttctcaaaaacattcatcattgattactacttcgaggtggtccagaaattaaaattcggggtttatgatattgacaataagacgatcgagctatcagacgatgacttccttggcgagtgtgagtgcaccttggggcagattgtgagctccaaaaaactgactagaccactggtcatgaaaacaggaagacctgcaggtaagggcagtatcaccatatcagccgaggagatcaaagataacagagtcgtgctgtttgagatggaggcccgcaaactggataataaagacctctttggcaaaagcgatccctacctggaatttcacaagcagacaagcgacggtaattggctgatggtacataggaccgaagtggtgaagaacaatttaaacccagtgtggcgaccctttaaaatttccttgaactctctgtgctacggggacatggacaagactatcaaagtcgagtgttatgattacgataatgatggcagccatgatcttatcggaacctttcagactaccatgacaaagttaaaggaggcctcacggagcagcccggtagaattcgagtgcatcaacgagaaaaagcgtcaaaaaaaaaaaagttacaagaacagcggcgtcatttccgttaaacagtgtgagataacagtagagtgcacatttttagattacattatgggcgggtgccaactgaactttacagtaggagtcgattttactggaagtaatggagatcctaggtccccagattctctgcactacatatccccgaatggtgtgaatgagtatctgaccgcactgtggagtgtaggtctggtgattcaagactacgatgcagacaagatgtttccagcctttggattcggggcccagatcccaccgcagtggcaggtctctcatgagttccctatgaacttcaacccgagcaatccctactgtaatggcatccagggtatagtggaagcttatagatcctgcctgccccagatcaagctttacgggcccaccaattttagtcctatcatcaaccacgtcgccaggtttgccgccgcagccactcagcagcagaccgctagtcagtactttgttctgttgattataactgacggagtgataacagaccttgacgagacccgtcaggcaatcgtgaacgcctctcgtctgcccatgtctatcatcattgtgggggtggggggggctgacttttcggcaatggaatttctggatggggatggcggctccctgagatcccccctgggagaggtagcgattcgagatatagttcagttcgtgcccttcagacagttccagaatgcgcctaaagaggcccttgcccagtgcgtgttggctgagatcccccagcaggtcgtgggctacttcaatacgtataagcttttacccccgaaaaacccagcaactaagcagcagaagcaatag

SEQ ID NO: 113017 - DNA, 420 bp, synthetic construct
  misc_feature 1..420: note = Description of Artificial Sequence: Synthetic coding sequence
  source 1..420: mol_type = other DNA
atggcagcccaatgcgtcaccaaggttgcactaaatgtatcctgcgcaaatcttttggacaaggacatcgggtccaagtcagacccactatgtgtactcttcctgaacacaagcggccaacagtggtatgaggttgagaggactgaacgcattaaaaactgtctgaaccctcagtttagtaaaacgttcattattgactactactttgaagtggtgcaaaagcttaaattcggcgtttacgacattgataacaaaactatcgaactctccgacgatgatttcttaggggagtgcgagtgcactcttgggcagattgtgtcctctaaaaaactcacacgtccccttgtcatgaagaccggccgacccgccggaaaggggtccatcacaattagcgccgaggagattaaggataacaggtag

SEQ ID NO: 113018 - DNA, 30 bp, synthetic construct
  misc_feature 1..30: note = Description of Artificial Sequence: Synthetic coding sequence
  source 1..30: mol_type = other DNA
atggcagcccaatgtgttaccaaggtgtag

SEQ ID NO: 113019 - DNA, 1614 bp, synthetic construct
  misc_feature 1..1614: note = Description of Artificial Sequence: Synthetic coding sequence
  source 1..1614: mol_type = other DNA
atggccgctcagtgcgtcactaaggtcgctctgaacgtttcctgcgcgaacctgttagataaagacattggtagcaagtccgatcccctgtgtgtgttgttcctgaacacatcggggcagcaatggtatgaagtcgagcgcaccgaacgtattaagaattgcctgaatccgcagttttcaaaaaccttcatcattgactattattttgaagtcgtccagaaactgaagtttggggtctacgacattgataacaagacaatagagctctccgacgacgacttcctcggcgaatgtgagtgtaccctgggtcagatcgtgtctagtaagaaactgacaagaccgctggtgatgaagacaggcaggcccgcaggaaaaggttccattacaatctcagcggaagagattaaggacaatcgtgttgttctgttcgaaatggaggcacgaaaactggacaacaaagacctatttgggaagagcgatccctatttggaattccacaagcagacttccgacggcaattggcttatggtacaccggaccgaggttgttaaaaacaatttaaatcccgtgtggcggccatttaagatcagtctcaactcactctgctacggcgacatggacaagaccataaaggtcgagtgctatgattatgataacgatggttcacatgatctaatcggcacatttcagacgaccatgactaagttaaaggaggcttcccgcagcagccccgtcgaattcgaatgtatcaatgagaaaaagcgacagaagaaaaagagttacaagaatagcggcgttatttcagtcaaacagtgcgaaatcacagtggaatgtaccttcctggattatatcatggggggttgtcagctaaacttcaccgttggtgtggatttcaccgggagtaatggggacccacgcagtccagactcgctgcactacatttcaccaaatggtgtcaacgagtaccttacagccctgtggtcagtgggtctcgttattcaggattatgatgctgacaagatgttccccgcctttggattcggagcccagatcccccctcagtggcaagtctcgcatgagttcccaatgaattttaacccctctaacccatattgcaacggcatccaggggatcgtcgaggcttatcgttcctgcctgcctcagataaaactgtacgggccaacgaatttcagtcctattatcaaccacgttgcaaggttcgccgccgccgccactcagcagcaaactgctagtcaatactttgtcctactcattataactgatggggtcattacagacttagatgaaactcgccaggcgattgtgaatgcttctcgacttccaatgtccattataattgtgggtgtcggaggtgcagacttttctgccatggagtttttggacggagatggtggtagcctgagatctcccctaggtgaggttgctatcagagacatcgttcagtttgtgcccttccggcagttccagaacgcacccaaagaggctctcgcccagtgtgtgcttgcagaaatccctcagcaggttgtagggtattttaacacctacaaactgctcccccctaagaatccagccacaaagcaacagaagcagtag

SEQ ID NO: 113020 - DNA, 240 bp, synthetic construct
  misc_feature 1..240: note = Description of Artificial Sequence: Synthetic coding sequence
  source 1..240: mol_type = other DNA
atggcagctcagtgtgtgaccaaagtggctctcaatgtctcttgtgctaatttactcgacaaggatataggctctaaatccgatcccctatgtgtgctctttctcaacacctccggccaacagtggtacgaagtggaaagaacggagaggatcaaaaattgcctgaacccacagttttctaagacctttataattgactactactttgaggtggtacagaagctcaaattcggggtctag

SEQ ID NO: 113021 - DNA, 408 bp, synthetic construct
  misc_feature 1..408: note = Description of Artificial Sequence: Synthetic coding sequence
  source 1..408: mol_type = other DNA
atggccgcccaatgtgttactaaggtggcattgaacgtttcatgtgctaacctcctagacaaggacattgggtctaaatccgaccccttgtgcgtcctcttcctgaatacatccggacagcagtggtacgaggtggagcgaactgagaggatcaagaactgcctgaatccccagttctccaaaacattcatcatcgattactatttcgaagttgtacagaagttgaagttcggtgtatatgacatagataacaagaccattgagctatctgatgacgacttcctgggtgagtgtgagtgtactttgggccaaatcgtgtcttccaagaaactgacaagacccctcgtgatgaaaacaggacgcccagctggtaaaggttccatcaccatcagcgccgaagagatatag

SEQ ID NO: 113022 - DNA, 705 bp, synthetic construct
  misc_feature 1..705: note = Description of Artificial Sequence: Synthetic coding sequence
  source 1..705: mol_type = other DNA
atggcggcccagtgcgtaaccaaagtagcgctaaatgtgtcttgcgctaacctgttagataaagacatcggtagtaaatcagatcccctgtgcgtgttgttcttgaatacctccgggcagcagtggtatgaggtggaacgaacagaacggatcaagaattgcctgaacccccagtttagcaaaactttcattattgactattacttcgaagtagtccaaaagctgaagtttggcgtttacgatattgacaacaagaccatagagctgtccgacgatgacttcctgggggaatgtgagtgtaccctggggcaaatcgtttcatctaaaaagctgaccagaccgctcgtgatgaagactggccgccctgccggcaagggcagcatcacaatctcagccgaggagattaaagataaccgcgtcgtactgttcgagatggaggctcggaagctggataacaaggatttattcggaaaatccgacccgtacctggagttccacaagcagacatcagacggcaattggctgatggtgcataggaccgaagtggtcaagaacaacctcaatcccgtctggcgtcctttcaagatcagcctaaactccctgtgctatggggacatggataaaactataaaggtggaatgctacgattatgataacgacggatcccacgatctgatcggcacctttcagacgacaatgacctag

SEQ ID NO: 113023 - DNA, 462 bp, synthetic construct
  misc_feature 1..462: note = Description of Artificial Sequence: Synthetic coding sequence
  source 1..462: mol_type = other DNA
atggccgctcagtgcgtgaccaaggtcgcacttaatgtctcttgtgccaatctactggacaaggacataggatcaaagagcgatcctctttgtgttctgttcctgaatacctctggccagcaatggtacgaagtcgaacggacggagaggatcaagaattgtttgaacccgcaattttctaaaactttcatcatagattactattttgaagtggtgcaaaagttaaagtttggcgtctacgacattgataataagaccatcgagctatccgacgatgattttttgggtgagtgtgagtgcactctgggccagattgtgagttccaaaaaactcacccggcccctggtcatgaaaaccgggcgcccggccgggaaggggtctatcactatcagtgcagaggaaataaaagataacagggtagtcttatttgagatggaagcaagaaagctggataacaagtag

SEQ ID NO: 113024 - DNA, 1782 bp, synthetic construct
  misc_feature 1..1782: note = Description of Artificial Sequence: Synthetic coding sequence
  source 1..1782: mol_type = other DNA
atggagcagccggaagacatggcttctctgtcggaattcgattcgttggctggcagtattcctgcgactaaagtagagatcacagtgtcatgccgaaacctgttggataaggacatgttcagcaaatcagaccccctctgcgtgatgtatacacaaggaatggagaacaagcaatggagagaattcgggcggactgaggtgatcgacaacaccctgaatccagacttcgtgaggaaattcattgtggactatttttttgaggaaaagcaaaacctgagattcgacttatacgatgtggactccaagtcccccgacctgagtaagcacgactttctgggccaggccttctgcacgctgggagagatcgttggaagtccaggtagccgcctggagaagccgctgacaattggcgcatttagcctgaattcccgcaccggcaaaccaatgccagctgtgtccaatggaggggtccccggtaagaagtgtggaaccattattctcagcgccgaggaattgtctaattgtcgcgatgttgccaccatgcagttctgtgctaataaattagacaaaaaggacttttttgggaagagtgatcctttcctagtcttctacaggagcaatgaggacggaacgtttacaatctgtcacaagacagaggttatgaaaaataccttaaacccagtttggcagactttttcaattcccgtgagggcattgtgtaatggggactatgatagaacaatcaaagtcgaggtttacgactgggacagagacggctcacacgacttcatcggcgagtttaccaccagctatagagaactggctcgagggcagtcccagtttaatatttatgaggtggttaaccccaagaaaaagatgaagaagaagaagtatgtcaatagcgggacggtgactctcctttcttttgccgtcgagagtgagtgcaccttcctcgattacattaagggtgggacacagatcaactttactgtggctattgacttcactgcaagtaatgggaacccaagtcaatcaacctctctccactacatgtctccatatcaactcaatgcctatgccctggctctgacagctgtgggggaaatcatccagcattacgatagtgataagatgtttcccgccctgggttttggagccaaactgcccccagatggacgtgtttcccatgagtttcctctgaacggcaatcaggagaatccatcatgttgtggaatcgatgggatcctggaggcctatcatcgctccctcagaactgtccagctgtatggccccacaaatttcgcacctgtggttacacatgtcgctcgaaacgccgccgccgtccaagatggttcccagtactcagttttgctgattatcaccgatggggtgatatcagatatggcacagaccaaggaagccattgtcaacgcagctaaattacccatgagcattataatcgtgggagtgggtcaagctgaatttgacgctatggttgaacttgacggggacgacgtgcgcatctcgtctagaggcaagttagctgagagggatatcgtccaatttgtcccttttagggactatgtggataggacgggcaaccatgtactgtcaatggctcgcctggcacgggacgtccttgcggaaatacctgaccagttggtttcttatatgaaagcacagggtatccggcccaggcccccccctgcagccccaacgcactctccgagccagtcccccgccaggaccccccccgcttcccctctccatacacatatctag

SEQ ID NO: 113025 - DNA, 906 bp, synthetic construct
  misc_feature 1..906: note = Description of Artificial Sequence: Synthetic coding sequence
  source 1..906: mol_type = other DNA
atgaagaagaagaaatacgtcaactcaggaaccgttacgttactctccttcgccgtggagtcggagtgcacatttctggactacatcaaaggcggcacacaaattaatttcaccgttgccatcgattttaccgctagcaacggcaatcctagccagtccaccagcctgcactacatgtcaccttatcagttgaatgcatatgccctggccctcaccgccgtaggcgagattatacagcattatgatagcgacaaaatgttccctgctcttggctttggcgccaaactcccaccagacggcagagtgagccacgaatttcccctgaatggtaaccaggagaacccctcatgctgcggaatcgatggaatcttagaagcgtaccaccgaagcctccggacagtacagttgtacggacccaccaattttgccccggtcgtaactcacgtggcgcggaacgccgccgcggtgcaggacggatcccagtattcagttctgttgataatcaccgacggagtgatcagcgatatggctcagactaaggaggccatagtaaatgccgctaaactgcctatgtctattatcattgtgggcgtgggccaagctgagtttgacgccatggtggaactggatggcgatgacgtgagaatcagcagtcgtggtaagctcgctgaacgcgatattgtgcagtttgtacccttcagagattatgtggaccgtacaggcaaccacgtcctctctatggctcgcctggctagagacgttctcgccgagattccagaccaacttgtaagctatatgaaagcacaggggattaggccaaggccgcctcctgctgcacctacccattcaccatcccaaagtccagccaggacccccccggcaagtcccttacatacccacatctag

SEQ ID NO: 113026 - DNA, 1515 bp, synthetic construct
  misc_feature 1..1515: note = Description of Artificial Sequence: Synthetic coding sequence
  source 1..1515: mol_type = other DNA
atggtgctcgccgacttgggccgcaaaattaccagtgctctgcgaagtctgagtaatgccaccataattaatgaggaagtgctgaacgcgatgctgaaggaagtatgtaccgctctgctggaagccgacgtgaatattaagttggttaagcagcttagagaaaacgtaaaatcggctattgaccttgaggagatggcttctggtctcaacaaacggaagatgattcagcatgccgtctttaaggagctcgttaaattggtggaccccggtgtgaaggcctggacacccaccaagggaaagcagaatgtcataatgtttgttggcctgcagggctccggcaaaaccactacctgtagtaagctcgcctattattatcagcggaaaggatggaaaacttgtctgatatgtgccgacacctttagggccggggctttcgaccagttaaaacagaatgctaccaaagcccgcatccccttctacggttcctacacggaaatggatccagtcattatcgccagtgagggcgttgaaaagtttaagaatgagaattttgagatcataatcgtggacacctctggccgacataagcaggaggacagcctgtttgaagaaatgcttcaggtggccaatgcaattcagcctgataacatcgtctatgtgatggacgcgagcattggacaggcgtgtgaagcccaggccaaggcattcaaggacaaagtcgacgtcgctagcgtcattgtgactaagttggacggtcatgctaagggaggaggcgccttgagcgcggtggctgcaacaaagtcgcccatcatttttattgggaccggtgagcatattgatgacttcgaaccttttaagacacaaccttttattagcaagcttctcggaatgggtgacattgaaggcttgattgacaaagtcaacgaactgaaattggatgacaatgaagcattgattgaaaaactgaaacatggccagttcaccctgcgcgatatgtacgagcagttccagaacatcatgaagatgggaccttttagccagattctgggcatgataccgggattcggaacggatttcatgagcaagggcaatgaacaagagtctatggccaggctcaaaaagcttatgaccatcatggactctatgaacgaccaggagcttgatagtacagacggtgccaaggtgtttagtaaacagccaggacggatccagcgggtcgcacgggggtccggcgtgagcaccagggacgtacaggaacttctcactcagtataccaagtttgctcagatggtgaaaaaaatgggcggtattaaaggactctttaaaggaggcgatatgagcaagaacgtcagccagagtcaaatggccaagctgaatcagcagatggccaaaatgatggatccgcgcgtactacaccatatgggcggaatggccggcctgcaatctatgatgcgacagttccagcaaggtgcagcaggtaacatgaaaggtatgatgggattcaataatatgtag

SEQ ID NO: 113027 - DNA, 1674 bp, synthetic construct
  misc_feature 1..1674: note = Description of Artificial Sequence: Synthetic coding sequence
  source 1..1674: mol_type = other DNA
atgagcgaccccgagatgggctgggttccagagccgcctactatgactctcggggccagtagggtcgagttgagggtttcctgtcacgggctgctcgaccgcgacacccttacaaaaccacatccttgcgtgttgctcaagttatattctgacgagcagtgggtcgaggttgagcggaccgaagtactgcggtcatgctccagtccagtgttctcccgcgtgctggctctcgaatacttctttgaggaaaaacagcctctccagtttcacgtattcgatgcagaggacggcgccacatcgccaagaaatgacacatttctgggctcaacagagtgcaccctcggacagatcgtatcgcagaccaaggtgactaagccactgctgctgaagaatggaaagactgcaggaaagtccactatcaccattgttgccgaagaggtgtcgggaactaacgactacgtccagctcacattccgggcttataagctggacaataaagacctgttctcaaaaagcgacccattcatggagatctacaaaacgaacgaggaccaatccgaccaactggtctggagaacggaagtagttaagaataatctgaatccatcctgggagccttttaggctttcactccactccctctgctcctgcgacgtacataggcccctgaagttcctagtttatgactatgactccagcggaaaacatgatttcatcggtgaattcacatccacttttcaagagatgcaggaagggaccgccaacccgggacaggagatgcagtgggactgtatcaatcctaaatatcgggacaagaagaagaactacaaatctagcggaaccgtggtgttggcacaatgcactgtcgagaaagtgcatacctttttggattacatcatgggcggatgtcaaatttcctttaccgtcgccatagactttaccgcatcaaacggagatccgcggtccagccagtcattgcattgcctatcccctcggcaaccgaaccattacctgcaggcactgcgcgccgtgggtggaatatgccaagattatgatagtgacaaacggtttcccgcctttggctttggagcacgaatccctccgaatttcgaagtctcccacgattttgctatcaatttcgaccctgaaaacccggaatgcgaggagatcagtggggtgatcgcttcctacagacgctgcttgccccagatccagttgtatgggcctacaaatgtggcacccatcatcaaccgggtggcagaacccgcccagagggaacagtctaccggacaggcaaccaagtacagcgttttgctcgtgctgaccgatggcgttgtgagtgacatggcagagacgcgcactgctattgttcgagcctctcgcttgcctatgtccatcatcattgtaggcgttgggaacgcagacttctccgacatgcggctgctcgatggcgatgatggccctttgagatgtcccaggggggtgccggccgctagagatatagtgcaatttgtgcccttcagggatttcaaagacgccgcaccatcagctctcgcaaaatgtgtcttggcggaggtcccgagacaggtcgtcgagtattatgcaagccaagggatcagcccaggagcaccccgcccttgcacattggccaccacacctagcccatccccctag

SEQ ID NO: 113028 - DNA, 1839 bp, synthetic construct
  misc_feature 1..1839: note = Description of Artificial Sequence: Synthetic coding sequence
  source 1..1839: mol_type = other DNA
atggcgtttaaagagcatggtaagatcactagttgctgtatccccggaccgattaattcctccagagcgggcgctggggctggcgcctccgggtggtcttcgaagggtgttagagctcgagcaagagagcccgagcgaggtgcgcccgaccgtgaaccgagcgatatgagcgaccctgaaatggggtgggtgccagaaccacccacaatgaccctgggggctagcagggtggagctgcgggttagttgtcatggattgctggatagagacaccctgacgaagcctcatccgtgcgttctgttgaaactgtattctgatgaacaatgggtggaagttgagagaacagaggtgctacggtcttgcagctcccccgtcttcagcagagtgctggccttagaatacttttttgaggagaaacagcctctacaattccacgtatttgacgctgaggacggggccacctcccccagaaacgacacgttcctgggatctacagaatgtactctggggcagattgtgagccagacaaaggtgacaaagccattactgctgaagaacggaaaaacagccgggaagtccaccatcacaatcgtagctgaagaagtgtctggcaccaacgactatgtgcaactcacattccgagcctacaaactagataacaaggacctgtttagcaaatctgacccatttatggagatatacaaaaccaacgaagatcagagcgatcagctcgtctggagaacagaagtagttaagaacaacttgaatccaagttgggaaccttttcgcctctcactgcacagcctgtgtagttgcgatgtgcacaggccactgaagtttcttgtttatgattatgactcttctggaaagcacgatttcatcggagagtttaccagtacattccaggagatgcaagaaggtaccgctaatccggggcaggaaatgcagtgggactgtattaatccaaagtaccgcgacaagaagaagaattataaaagttcaggcaccgttgtcctggctcagtgtactgtcgagaaggtgcacaccttcctagactatattatgggaggttgccagattagcttcacagtggcaatagacttcactgcttccaacggcgacccaaggtcctcccagtctttacactgcctttctccacggcagcctaaccattacctccaggccttacgggccgtaggaggtatttgccaagactatgattctgataagcggttccccgcgttcgggtttggtgctagaatcccgcccaactttgaggtgagccatgattttgcaatcaatttcgatcctgagaaccccgagtgtgaggagatatccggagtcatagcctcttacagaaggtgtttaccccagatccaattatatggcccgaccaacgtggccccaattataaaccgagtcgccgagccagcacaacgggagcagtctaccggacaggctaccaagtactccgtgctcctcgtccttacagacggcgtggtgtcagatatggccgaaacccgaacggccatcgtcagagcctcacgactccccatgtctatcatcatcgtgggagtcgggaatgctgactttagcgacatgcggcttctcgatggagatgatggccctctcaggtgcccaaggggggtcccggctgctagagacatcgttcagtttgtccccttcagggattttaaggacgcggcgccatctgcactggctaagtgcgtgctagctgaggtaccaaggcaagtggttgaatactacgccagtcaagggatctcccccggggctcctaggccgtgcacacttgccacaactccttccccgagcccgtag

SEQ ID NO: 113029 - DNA, 159 bp, synthetic construct
  misc_feature 1..159: note = Description of Artificial Sequence: Synthetic coding sequence
  source 1..159: mol_type = other DNA
atgagcgatcctgagatggggtgggtgcctgagccccccaccatgacattgggagcaagccgtgttgaactacgggtcagctgccatggcctgttagaccgcgataccctgacaaaacctcatccttgcgttcttctgaagctctatagtgacgagtag

SEQ ID NO: 113030 - DNA, 396 bp, synthetic construct
  misc_feature 1..396: note = Description of Artificial Sequence: Synthetic coding sequence
  source 1..396: mol_type = other DNA
atgtccgaccccgaaatgggttgggtccctgagccgcctacgatgaccttgggcgcaagtcgggttgagctgcgggtatcttgccacgggcttctggacagagacacactcactaaacctcacccatgcgtattgttgaaactgtacagcgacgaacagtgggtggaagtggagaggactgaagtgttgcggagttgcagttctccggtcttcagtcgggtgttggcattggagtattttttcgaggaaaaacagccattacagttccacgtcttcgacgctgaagatggagccacatcgccccgcaacgacacatttttggggagcaccgagtgcacccttggtcaaatcgtttcacaaaccaaagtgaccaaacctctactgctaaaaaattag

SEQ ID NO: 113031 - DNA, 681 bp, synthetic construct
  misc_feature 1..681: note = Description of Artificial Sequence: Synthetic coding sequence
  source 1..681: mol_type = other DNA
atgtccgatccggaaatgggctgggtgccagagcctcctactatgaccctgggcgccagtagggttgaactccgggtgagttgtcacggccttctggatcgggataccctgacgaagccacacccatgcgtattgctgaagctctatagcgacgagcagtgggtagaggtggaacgcaccgaggtgctgagaagctgcagctctcctgtgttcagtcgggtgctagcccttgaatacttctttgaggagaaacagcctctccaattccacgtgttcgatgctgaggacggggcgacctcccctcgtaatgatactttcttagggtcaaccgagtgtactctgggccaaattgtaagccagaccaaggtgactaaaccgttgctgctgaaaaacggcaaaacagcaggaaagtccaccatcacaatagtggccgaagaggtctcagggaccaatgactacgtccagttgaccttcagggcctacaagctcgacaacaaggacctctttagtaaatctgaccccttcatggagatttataagacgaacgaggatcagagcgatcaactcgtatggcggacagaagtagtgaagaacaatttaaacccatcttgggagccgtttagattaagcttgcactctttatgctcctgtgacgttcaccgacccttgaagtttctgtag

SEQ ID NO: 113032 - DNA, 318 bp, synthetic construct
  misc_feature 1..318: note = Description of Artificial Sequence: Synthetic coding sequence
  source 1..318: mol_type = other DNA
atgagcgatccagagatgggatgggttccagaaccaccaaccatgacattgggggcatctagagttgagctgcgagtttcctgccacggcctgctggaccgagacacattgacaaagccccacccttgcgtactgctgaaactgtacagcgatgaacagtgggttgaagtggagcggactgaagtactacgctcttgtagtagccccgtgttctcccgcgttcttgcactagagtacttttttgaggaaaagcaacctctgcaatttcacgtcttcgacgcagaagatggtgctacatccccacggaatgacacatag

SEQ ID NO: 113033 - DNA, 426 bp, synthetic construct
  misc_feature 1..426: note = Description of Artificial Sequence: Synthetic coding sequence
  source 1..426: mol_type = other DNA
atgagtgatcccgagatgggttgggtgcctgagcctccaacaatgactctgggggcttcacgggttgagctgcgcgtgagctgccacggtctgttggatagggacacgcttactaagccccatccttgcgtgctgcttaaactctactcagacgaacagtgggtggaagtcgagaggaccgaggtgctaaggtcttgcagtagtcccgtcttcagcagagtgctcgccctggagtacttttttgaagaaaagcagccattgcaatttcatgtttttgacgcagaggacggtgcgacttctccccgtaatgacacctttctcggcagcactgaatgcacactgggccagatcgtgtcacagaccaaagtgactaaaccactgctgttaaaaaacggcaagaccgccgggaaatcgacaataacatag

SEQ ID NO: 113034 - DNA, 450 bp, synthetic construct
  misc_feature 1..450: note = Description of Artificial Sequence: Synthetic coding sequence
  source 1..450: mol_type = other DNA
atgtctgatccagaaatggggtgggtccctgaacctcccacaatgaccctcggtgcctccagagtcgagctgagagtcagctgtcacggcctgctggacagagacaccttgactaagccccacccctgcgtgcttttgaaactctattccgatgaacaatgggtggaggtggaacggaccgaagtgctgcgctcatgttcatctcccgttttctcacgggtgctggcccttgagtactttttcgaagaaaagcagccgctgcaattccacgttttcgacgctgaagacggagctacttctccacgaaacgatacctttcttgggagcaccgagtgcaccctgggtcagatagtgtcccaaaccaaggttactaaaccgctgctgctgaagaatggcaagaccgccggcaagtctaccatcacaattgtggccgaggaggtgtctggttag

SEQ ID NO: 113035 - DNA, 1902 bp, synthetic construct
  misc_feature 1..1902: note = Description of Artificial Sequence: Synthetic coding sequence
  source 1..1902: mol_type = other DNA
atgtcggcaggaagtgagaggggagccgcagccaccccaggagggctgcccgcaccgtgcgcatccaaagtcgagcttagactgagctgccggcacctgctggacagagaccccctgaccaaatccgacccatctgtggctttgctgcaacaggcccagggacagtgggtccaagtcggaaggaccgaagttgtgcggagtagcctccaccccgtttttagcaaggtgttcacagttgattattactttgaggaggtgcagagacttcggtttgaagtgtacgatacccacggaccaagtgggtttagctgccaagaggatgactttctgggaggaatggaatgtacgttgggccaacctgcgcagaagtggctactgcaggtggtaatgcgcgtatctgtggacgttctaggccctgcaggccattgtgctaagcacttcctatgttgtaccgagagttcacaccttgcccggactggtccatcctttctgcttaggtacgatgacttgtgccttccttgggctacagcgggagctgttcgctggtggacctgccgaggaggccacacccaaggttggcagattgtggcccagaagaaggtaacacgccccctgctgttaaagtttggtcgcaatgccgggaagtcaaccatcactgtgatagcagaggatatttcagggaacaacggatacgtggagctgagttttcgggcaaggaaactggatgataaggacttattttccaaatccgaccctttcttggaactgtatcgagttaacgatgatcagggcctccagctcgtttacaggactgaggtggtcaagaataacctcaatcccgtttgggaggccttcaaagtctcattgagtagcctgtgcagctgtgaggaaacacgtcctttgaaatgcttagtttgggactacgactctcggggcaaacatgactttattggcgaattcagcaccaccttcgaagaaatgcaaaaggcctttgaagagggacaggcccagtgggactgcgtgaacccgaaatacaaacagaaaaggagaagctacaagaacagcggcgtggtggttctggccgatttaaagtttcatcgcgtgtattcttttctggactacattatgggtgggtgccagatccacttcactgtggcaatcgatttcactgcctcgaatggcgaccccagaaacagttgctcgttacattacatcaacccataccagccaaatgagtatctcaaagcactagtatctgtgggtgagatttgccaagactacgattctgacaagaggttctcggcattgggattcggggctcggattccaccgaaatatgaggtgtcccacgactttgccatcaattttaatcctgaggatgacgagtgcgagggaatacagggcgtcgttgaagcataccagaattgtctgcccagagttcagctgtatgggccgaccaatgtagccccaatcatttccaaggtagcaagggtggccgctgcagaggagagcacggggaaggccagtcagtattacatcctacttatcctgacagatggcgtggtcacagatatggcagatacccgtgaggcaatcgtgcgcgcttctcgactcccaatgagtattattatcgtcggagttggaaacgccgattttacagacatgcaagtgcttgacggagacgacggggtgttgagatcccccagaggggagcccgcgctgcgcgacattgtccaatttgtgcccttcagggaattaaaaaatgctagtccggcagcgctggccaaatgtgttctggccgaggttccaaaacaggtggtcgaatactatagtcatcgggggttgcccccaagaagcctgggtgtccccgcaggagaggcatctccgggatgtacaccttag

SEQ ID NO: 113036 - DNA, 1677 bp, synthetic construct
  misc_feature 1..1677: note = Description of Artificial Sequence: Synthetic coding sequence
  source 1..1677: mol_type = other DNA
atgtctgctggatcagagcgaggcgcagccgccacacctggaggtcttcccgctccttgtgcctccaaagtagagctcagattaagctgccgccacttattagaccgggaccctctgactaagagtgaccctagtgtggcattgcttcagcaggcccaggggcaatgggtgcaggtgggccgaaccgaagtagtaagaagcagcctacatcctgtgttttctaaagtattcaccgtggattattacttcgaggaggttcagcgccttaggtttgaggtgtatgacacacatgggccttcaggcttttcttgccaggaggatgacttcttgggtgggatggagtgcacactcgggcagatcgttgctcagaagaaagtgactcgacctcttctgctgaaattcggacggaacgccggcaaatcgacaattacggtgatcgcagaagacatatctggaaataatggttacgtggagctttcttttagggccagaaaacttgatgacaaggatttattcagcaaatcagaccctttcctcgaactttacagggtaaatgacgaccagggattgcagctggtatacagaactgaagtggtgaagaacaacctgaaccccgtttgggaggcctttaaggtatcactctcctccttgtgctcatgcgaagagacacgacctctaaagtgcttagtgtgggattacgattcccgtggaaaacacgatttcattggagagttcagtactaccttcgaagagatgcagaaagcgttcgaagagggacaggcccagtgggactgtgtgaacccaaagtacaagcagaaacgaaggtcctacaagaatagtggggtggtggtactggcagatctcaaatttcacagagtgtattcttttctggattacatcatgggtgggtgtcagattcatttcaccgtagctattgactttacagcctccaatggggatccccgtaacagctgttcactgcattacattaacccctatcaaccgaacgaatatttgaaggcattggttagtgtaggcgaaatctgccaggattacgactccgacaaaagattcagtgcattaggctttggagcgcggatacctcccaagtacgaggtgagccatgatttcgcgattaactttaacccggaggatgacgagtgcgagggaattcagggggtggtagaagcataccaaaactgtctccctcgagtgcagctgtacggaccaaccaacgtagccccgatcattagcaaagtcgcccgtgtggccgctgccgaggagagcaccgggaaggctagccagtattatatacttctgatcctgactgatggggttgttaccgacatggccgacactagggaagcaattgttcgcgcaagtcggttacccatgtcgatcattatcgtcggcgtggggaacgcagacttcacagatatgcaggtcctggacggcgacgatggagtgctgagatctcccagaggcgagccagcactgcgagatatcgtccagtttgtgccatttagagagctcaagaacgccagcccagcggctctggccaagtgcgtgctggcggaggtcccgaaacaagttgtcgagtattacagccaccgtggacttccgccaagatcgctcggcgtcccggcaggggaagccagtccagggtgcaccccttag

SEQ ID NO: 113037 - DNA, 825 bp, synthetic construct
  misc_feature 1..825: note = Description of Artificial Sequence: Synthetic coding sequence
  source 1..825: mol_type = other DNA
atggccagtgattccggaaaccaggggacactgtgcaccctcgaatttgccgttcagatgacatgtcaaagttgcgtcgatgctgtgcgtaaatctctgcagggcgtggccggcgtgcaagatgttgaggtacatctggaggaccagatggtgctcgtacacactactctcccttcccaggaggtgcaggccctgctggaaggcaccgggcgacaagcggtgctcaagggcatgggctccgggcagcttcagaacctaggagccgccgtcgccatcctgggaggccctggaaccgtccaaggcgtcgtacggttcctccagctgacgccagaacgctgcttaatcgaagggacaattgatggccttgaaccaggtctgcatggtctccatgttcaccagtacggtgatctcacaaacaactgcaattcttgcggaaatcactttaatccagacggagcgagccatggcgggccccaggacagtgatagacacagaggtgatttaggcaacgtaagagccgatgctgacggaagggccatattccgtatggaggatgagcaattaaaggtctgggacgtgatcggacggtcccttattatcgacgaaggcgaggatgacttagggcgcggcggccatccgttgtccaaaatcaccggaaattctggagagcggttggcgtgtggtattattgcgcggtctgccggtctttttcaaaatcccaaacagatctgcagttgcgatggactcactatatgggaagagaggggaaggcctatcgctggcaaaggccgtaaagagtccgcacagccacccgcgcacctgtag

SEQ ID NO: 113038 - DNA, 1365 bp, synthetic construct
  misc_feature 1..1365: note = Description of Artificial Sequence: Synthetic coding sequence
  source 1..1365: mol_type = other DNA
atggccctgcagctcggacgcttaagttccggtccttgttggctggtggcccgcggtgggtgtggggggcctcgtgcgtggtcacaatgcggggggggcggtttgcgcgcgtggagccagcgctcggcagctggtagggtttgtaggccaccgggtcctgccggcacagagcagtcacgcggtctggggcacgggagcacctcccggggagggccgtgggtcggaacaggcctggcagctgcactcgccggactcgtcggacttgccactgctgcattcggacacgtccagagagccgagatgctcccaaagactagtgggaccagagcaacctctctcggacggcctgaggaggaagaggatgaattggcccacaggtgttcttccttcatggctccccccgtgacggacttaggtgagctaaggaggcgtcctggggacatgaaaaccaagatggagctactgatcctcgagacccaagcccaggtatgtcaggccttggcccaagtggatggtggcgctaatttcagtgtagatcggtgggagcgtaaagaagggggaggcgggatttcctgtgtcttgcaggacggttgcgtgtttgagaaggccggagtgtcaatcagcgttgtacatgggaatctttcagaagaggccgccaaacaaatgcggtccagaggaaaggttctcaaaactaaagacggcaagctgcctttttgcgcaatgggtgtgtcctccgtgatccaccccaagaatccccacgctcccaccatccattttaactaccggtattttgaggtggaggaggcggacgggaacaagcagtggtggtttgggggagggtgcgacttgactcccacatacctcaaccaggaggatgccgtgcacttccacagaacattaaaggaagcatgtgatcagcacgggcctgacctctatccaaagtttaagaaatggtgcgacgattacttcttcatcgctcatagaggcgagagaagagggataggggggatattcttcgacgatctggattcgcccagcaaggaggaggtctttcgtttcgtgcaaagctgcgcccgcgcggttgtgccctcttatatccccctggtaaagaaacattgtgacgacagcttcaccccccaagaaaagttgtggcagcaactgaggcgtggccgctatgtggagttcaatctgctctacgaccgcgggaccaagttcggcctcttcactccaggcagccgcatagaaagtattctgatgtcactccccctaactgctcgttgggagtatatgcattcaccttccgaaaatagtaaagaggctgagattttggaggtgttacgccaccctcgggactgggtgcgttag

SEQ ID NO: 113039 - DNA, 1026 bp, synthetic construct
  misc_feature 1..1026: note = Description of Artificial Sequence: Synthetic coding sequence
  source 1..1026: mol_type = other DNA
atgggcgtggcaactaccttgcaacctcccacgacctctaagaccttgcaaaagcaacacctagaggctgtgggagcttaccagtacgttttaaccttcctgtttatgggaccttttttctctttgctcgtttttgtgctgctgttcacaagcctctggcctttcagcgtgttttacctcgtgtggttatatgtggattgggatacccctaatcaaggtggccgccgcagcgagtggattaggaatcgcgccatctggagacagctccgcgactattaccccgtgaagctcgtgaaaaccgcggagctccctccggatagaaactatgtcctgggtgcacacccccatggtatcatgtgcactgggttcctctgtaactttagcaccgagagtaacggtttctcccagctcttccccggcctgcgaccctggctggccgtcttggccggattattctatcttccggtgtaccgcgattacattatgagctttggactgtgtccggtgtccaggcagtctttggactttatcctcagccagccacagttgggacaagcggtggtcattatggtaggcggcgctcacgaggccctgtattctgtgccaggagaacactgtctaaccctacagaagcgcaaggggtttgtccggcttgctctgcgccacggtgcatccctggttccagtttattcctttggtgagaatgatatcttcaggctaaaggcgtttgccactggctcctggcaacactggtgtcagctgacatttaagaaattgatgggcttcagcccctgcatattttggggacggggtctgtttagtgcaacctcctggggactgctgcctttcgctgtacccatcaccaccgttgtggggcggcccatccccgttccacagcggttgcaccctactgaagaagaggtcaatcattatcatgccctatatatgactgctctggaacagctgtttgaagaacacaaggaaagttgtggcgtaccagcttctacatgtcttacctttatctag

SEQ ID NO: 113040 - DNA, 930 bp, synthetic construct
  misc_feature 1..930: note = Description of Artificial Sequence: Synthetic coding sequence
  source 1..930: mol_type = other DNA
atggctagcaaatcctggctcaatttcctgacattcctgtgtgggagtgctattggatttctgctatgctcgcagctctttagcatcctgctgggtgagaaggtggacacccagcccaacgtgctgcacaacgatccccacgcaagacactcggacgataacggtcagaaccatttagagggacaaatgaactttaatgcagacagtagtcagcacaaggacgagaacacagatattgctgaaaatctgtatcagaaagtgaggatcctctgttgggtgatgactggaccacaaaacctggagaagaaagccaaacacgttaaagccacatgggcccagagatgcaacaaagtactgttcatgagcagcgaggagaataaagattttccggccgttggactgaagaccaaagaggggcgggaccagttgtactggaagaccatcaaggcgttccagtacgttcatgaacactatctcgaggatgccgattggtttctcaaggccgatgacgatacctatgtcattctcgacaacctgcgatggctactgtctaagtatgaccccgaagagcctatatactttggccgacgctttaagccctatgtcaagcaagggtacatgagtggcggcgcgggctacgtcctctccaaagaggccctcaagaggttcgttgacgccttcaaaacagataaatgtactcactccagttcgattgaggatcttgcattggggcgatgtatggagatcatgaacgttgaagctggggatagtcgagacaccatcgggaaggagactttccacccctttgttcccgagcatcatctgatcaagggatatctgcctcgaactttctggtattggaattacaattattatccaccagttgaagtctcattagagattctactgttatgccaatacttagattag

SEQ ID NO: 113041 - DNA, 303 bp, synthetic construct
  misc_feature 1..303: note = Description of Artificial Sequence: Synthetic coding sequence
  source 1..303: mol_type = other DNA
atggcatctaagagctggttaaatttcctcacattcctgtgtgggtccgccatcgggtttctgctatgttcacagctcttctctatattactgggagaaaaggtcgatactcagcccaatgttctgcataatgacccacacgctcggcactccgatgataatggccaaaaccacctggagggtcagatgaatttcaatgctgacagttcccagcacaaggacgaaaacactgacatcgcagagaacctgtatcagaaagtgaggattctgtgctgggtgatgaccgggccccagaatctctag

SEQ ID NO: 113042 - DNA, 396 bp, synthetic construct
  misc_feature 1..396: note = Description of Artificial Sequence: Synthetic coding sequence
  source 1..396: mol_type = other DNA
atggctagcaagtcttggcttaatttcctgacgtttctgtgcggcagcgctattggctttctgttgtgcagtcagctcttcagcatcctgctgggggaaaaagtggacacccagcctaacgttctccacaacgatccgcacgcccgacattccgacgataacgggcaaaaccatctggagggtcagatgaactttaatgccgattcttcccaacacaaggacgaaaatacagatatagccgagaatttatatcagaaggttcgaatcttatgctgggtgatgaccggtccacagaatcttgaaaaaaaggctaagcatgtaaaagctacttgggcccagagatgtaacaaggtgctttttatgtccagtgaagagaataaggattttcctgcctag

SEQ ID NO: 113043 - DNA, 1092 bp, synthetic construct
  misc_feature 1..1092: note = Description of Artificial Sequence: Synthetic coding sequence
  source 1..1092: mol_type = other DNA
atggcgagtaagagctggctgaactttttgaccttcctctgcggttccgcaatcggattccttctctgttctcagctgtttagcatcctccttggcgaaaaggtcgacacacagccaaatgtgctgcacaatgatcctcacgcacggcactctgatgataacgggcagaatcacctcgaaggacagatgaactttaatgcagatagcagccagcacaaggacgagaataccgatattgccgaaaacctgtaccagaaggtgaggattctgtgttgggtgatgacaggtcctcagaatctcgaaaagaaggccaagcacgtgaaggcgacctgggcccaacgatgtaataaagttcttttcatgtcctccgaggagaataaggactttccagctgtcgggctgaaaacgaaggaaggcagggaccagctctattggaaaactattaaagcctttcaatatgttcatgagcattacctggaagatgcggattggtttttaaaggccgacgatgatacatatgtcatcctcgacaacctgcgctggttactaagcaaatacgacccggaagaacccatctacttcggaagacgttttaaaccctatgtcaagcagggctatatgagcggcggtgcggggtacgtgctcagcaaagaggccctcaaacgcttcgtggacgcattcaagactgataagtgtactcactcctcgtctatagaagatctggcattaggccggtgcatggaaataatgaatgtggaggcgggcgattcaagagacacgatcggaaaggaaaccttccacccatttgtgccagagcaccatctgataaaagggtacctacctagaacattctggtactggaactataactattatccccccgtggaaggccctggctgttgttccgacctcgcggtgtctttccactacgtggatagtaccactatgtacgagctcgagtatctggtttaccatcttaggccgtacgggtacctctaccgctaccaaccaacccttcccgagcggattttgaaagagataagccaggcgaacaaaaatgaggacaccaaagtcaaattaggaaacccgtag

SEQ ID NO: 113044 - DNA, 549 bp, synthetic construct
  misc_feature 1..549: note = Description of Artificial Sequence: Synthetic coding sequence
  source 1..549: mol_type = other DNA
atgccacgggtcgtgccagaccaaaggagcaaattcgagaacgaagaattttttcggaaattgtcacgcgagtgtgagattaaatatacgggattcagagaccggccccatgaggagagacaagccagattccagaacgcatgtagggatggccgtagcgagatcgcattcgtggctaccggaacaaacctgagcttgcagttctttcctgctagttggcagggagagcagagacagaccccatcacgcgaatacgttgatctggagagagaagctggcaaggtctatcttaaagcacctatgatcctcaacggcgtctgtgttatatggaaaggctggattgatctgcaacggctcgatggtatggggtgcttggagtttgatgaagagcgggcacagcaggaggacgctctggcgcaacaagcctttgaagaagcacgaaggcggactcgggaattcgaagatagggacagaagccacagagaggagatggaagtcagagtctcacagttgctcgcggttaccggcaagaaaactactagaccttag

SEQ ID NO: 113045 - DNA, 564 bp, synthetic construct
  misc_feature 1..564: note = Description of Artificial Sequence: Synthetic coding sequence
  source 1..564: mol_type = other DNA
atgccccgggtggtgcccgaccaacgctcaaagttcgagaatgaagaatttttccgcaaacttagcagggagtgcgagattaagtacacaggattccgagatagaccacacgaggaaaggcaggccaggttccagaatgcctgccgggacggaaggtctgaaattgcttttgtagcgactggtacgaatttatctttgcagttctttccggcctcgtggcagggagaacaacgtcagacaccatccagagagtacgtggatctcgagcgagaggccggcaaagtgtatctgaaggcacccatgatcttgaatggcgtgtgcgtgatttggaaaggatggatcgatttgcagcggctcgacggaatggggtgtctggagttcgacgaggagcgcgcacagcaggaagatgcgctcgcccagcaagcctttgaggaggcccgccgaagaacacgggagttcgaggaccgcgacaggagtcaccgcgaggagatggaggccagacgccagcaagatccatctccgggctccaaccttgggggcggggacgacctgaagttgcgatag

SEQ ID NO: 113046 - DNA, 1788 bp, synthetic construct
  misc_feature 1..1788: note = Description of Artificial Sequence: Synthetic coding sequence
  source 1..1788: mol_type = other DNA
atggtcggggtgccaggcgccgcagccttccagctgggccctgagaagagagtgccagctatgcccggctctcctgtagaggtgaaaatccaaagtcgcagtagccccccgaccatgccaccccttccccccatcaaccctggtggcccccgacccgtgtccttcacgcccaccgccctgtccaatggtatcaaccatagccctcctactctgaacggcgctccttctccaccacaacggttcagcaatggacctgctagctccacctcctcagctcttacaaaccagcagttgcccgctacatgcggtgcgcgccagttgtctaaactgaaaagatttcttaccacactgcaacagtttgggaatgatatctctcctgagataggcgaaaaggtccgcacactagttctcgctcttgtcaactcaaccgtgacaatagaggagtttcattgcaaactacaagaggccacgaactttccccttaggccctttgtgatccctttcctcaaagctaacctgccccttctacaacgtgaacttttgcattgcgctagggctgccaagcagaccccatcacagtatcttgctcaacatgaacacttgctgttaaatactagcattgcatctccagctgatagctcagagctgctaatggaggtgcatgggaatggcaagaggccctcacccgaaaggcgggaggagaattctttcgaccgggacaccatagctcccgagcctcccgcaaagcgagtctgcaccatcagcccagcccctcgccactcccctgcactgacagtgccattaatgaaccccggtgggcagttccaccctacacccccacctctgcagcactacacactggaagatatagccacctcacacctgtatagggagcctaataaaatgctcgaacaccgagaggtgagagatagacaccattccttaggtttgaatggcggataccaggacgagcttgtcgaccacagacttacagagagagagtgggcagacgaatggaagcatttggatcatgcactgaactgtattatggaaatggtggagaagaccaggagatccatggccgtcttacgaagatgtcaagagagcgaccgagaggagcttaactactggaagcgacgatataacgagaacaccgaactccggaaaacgggtactgaactagtgtcgcggcaacattcgccaggcagcgcagactccttatccaacgatagtcaaagggagtttaatagcagaccagggaccggatacgtaccagtggagttctggaagaaaaccgaggaggctgtcaacaaagttaagatccaagctatgagtgaggtgcagaaagcggttgccgaggccgagcagaaggccttcgaggtcatagccaccgaacgtgcccgcatggaacagacgatagctgacgtcaaacggcaggccgccgaagacgcgtttctggtgatcaacgaacaagaggaaagcacagagaactgctggaattgtgggcggaaggcctccgagacttgttcagggtgcaatattgcaaggtattgcgggtccttctgtcaacacaaagattgggagaggcatcataggctgtgcggacagaaccttcatggacagagccctcacggccagggtaggcccctgttgcctgtcggacgaggcagctcggcccgaagtgcagattgttcagtgccttcaccggccctggataagacgagcgccaccacctctcgttcatccactcccgcctcagtgaccgccatcgataccaatggcctgtag

SEQ ID NO: 113047 - DNA, 1815 bp, synthetic construct
  misc_feature 1..1815: note = Description of Artificial Sequence: Synthetic coding sequence
  source 1..1815: mol_type = other DNA
atggccaaggagtccgggatatccttaaaggagatccaagtcttagctcggcagtggaaggttgggccagaaaaacgagtgcctgctatgccaggtagccccgttgaggtcaagattcagtctagatccagtcccccaaccatgcctcctctgcctccaattaatccaggggggccccggcctgtgagttttactcccaccgcgctgtccaacggcattaaccactctccgcccaccctcaatggggcgccatccccccctcagaggttcagcaatggccccgcatcttccacgagtagtgcactcacaaaccaacagctgcccgcaacgtgcggagctcgccaactgagcaagttaaagcgctttctgactaccctgcaacaatttggtaatgatatctcccctgagattggggagaaagtgcgcactctggtgctcgctttggtgaatagcacggtgacaatcgaagagtttcactgcaagctgcaggaagctaccaacttcccactgaggccctttgtaattccatttttgaaggcgaaccttcccttgttacagcgggagctacttcactgcgctagggccgcgaaacagacgccttcacagtacctggcacaacatgaacacctgttactgaacacatcaattgcctctcccgccgactcctccgaattactgatggaagtccatggaaacggcaagcgtcccagtccagagcgaagagaggaaaattccttcgacagggataccattgccccagagcccccagccaagcgcgtatgtacaatatctccagcccccagacattctcctgccttgacagtacccttaatgaatccgggagggcagttccatccaactcctccaccattacagcactacacattggaggacattgccacttctcacctctatagggaaccaaacaagatgctcgaacaccgcgaggtgcgggaccgccaccattctctgggcctaaacggcggttatcaagacgaattggtggaccaccggctgaccgaaagggaatgggcagacgagtggaagcacttggaccatgcattgaactgcattatggaaatggttgagaagactcgacgaagcatggccgtgctgaggaggtgccaggagtctgaccgggaggagcttaactactggaaaagaaggtacaacgagaataccgagctgcgtaagacgggaactgagcttgtttcccggcaacacagtcccggttcagcagacagcctgtctaacgatagtcaaagggaattcaactcacgacccgggactggctacgttcctgtcgagttctggaagaagaccgaagaagcagtgaacaaggtaaaaattcaagccatgagcgaagtccagaaggcagtggccgaagccgagcaaaaagcgtttgaagtgattgcgaccgagcgggctaggatggagcaaaccatagcggatgttaagagacaggcggccgaagacgcgttcctcgtcattaacgagcaggaggaatcaactgagaattgttggaattgtgggcggaaggccagtgaaacttgtagcggatgcaacatcgctagatattgcggtagcttttgtcagcataaggattgggaacggcaccacagattatgcggacaaaaccttcacgggcaatctcctcatggccagggacgccccctacttcccgtggggcgcggctcatccgcaaggtctgctgattgcagcgtgccttcacctgccctcgataagacgtcagcaacaacgagccgatcaagcacgccggcttctgtgactgcgatcgacaccaatggcctgtag

SEQ ID NO: 113048 - DNA, 1815 bp, synthetic construct
  misc_feature 1..1815: note = Description of Artificial Sequence: Synthetic coding sequence
  source 1..1815: mol_type = other DNA
atggccaaagagtctggaatttcactaaaagaaatccaggtccttgctcgtcagtggaaagtagggcctgagaaaagggtcccagccatgccggggagtcctgtcgaggtcaaaattcagtctcggtcatcccccccgacgatgcctccgctcccaccaataaatcctggaggcccaagacccgtgagtttcacacccaccgccttatctaatgggattaatcactctccacctaccttaaacggggcgccatcgcccccccagcggtttagcaatggccccgcgagttccacaagtagcgcactgactaatcaacagctgcccgcgacgtgtggcgcccggcaattgagtaagttaaagaggtttctgactactctgcagcagttcggcaacgacatttcccctgagattggcgaaaaagtgcgaaccctggttctggcactggtaaattccacggtcacgattgaggagtttcattgtaaactgcaagaagcaaccaacttccctctgagaccctttgtcattccattcctgaaggcaaatctcccattgttgcagagagaactgctccactgcgctagagcagcgaagcagaccccatctcagtatctagcccaacatgaacacctgttactcaacacctccatagcaagccctgcggactcctccgagctgctgatggaagtccacggcaacggtaaaaggccaagtcctgagaggagagaggagaacagctttgatagggatacgattgctcccgagcctcccgctaaaagagtttgtaccattagtccagcgcctcggcattccccagctcttacagtcccactgatgaacccaggaggccagttccatcctaccccacccccactgcagcattataccctggaagatatcgcaacttcgcatctatatcgggaaccgaacaagatgttggagcaccgcgaagtgagagaccgacaccatagcctgggtctcaacggtgggtaccaggacgagttagtcgatcaccgcctgacggagcgagaatgggccgacgaatggaagcatctggaccacgcgctgaactgcatcatggagatggtagaaaaaacccgccggtccatggccgtcttgaggagatgccaggaatccgaccgagaagaactgaattattggaagcggcggtacaatgagaacactgagttgcggaagaccgggacggagctggtatcaaggcaacactcacctggctccgcagatagcctttccaacgactctcagagggagttcaatagccggccggggacgggttacgtgcccgtggagttctggaaaaaaacagaagaagcagtgaataaagtcaagatccaggccatgtccgaggtccagaaggcagtcgccgaggctgagcaaaaggctttcgaggtgatcgcaacggaacgtgcccggatggagcagacaatagccgatgtaaagaggcaggctgcggaggatgctttcttggttattaacgagcaggaggaatctaccgaaaattgctggaattgcggacgtaaggccagcgaaacttgctcaggctgtaacatagctagatactgcggctctttctgtcagcacaaggactgggaacgccaccatcgcctctgcggtcaaaatctgcatggccaatctcctcacgggcaagggcggcccctcctaccagtcgggcggggctcctccgcccgttccgctgactgttcggtgccatctccagcacttgacaaaacgtctgcaacaacgtctagaagctctacccctgcatcggtgactgccattgacacaaatggtttgtag

SEQ ID NO: 113049 - DNA, 792 bp, synthetic construct
  misc_feature 1..792: note = Description of Artificial Sequence: Synthetic coding sequence
  source 1..792: mol_type = other DNA
atgccgggcagtcccgtagaggtgaagatccagagtagaagcagtccccccactatgcctccactgccacccattaatccaggcggcccacggccagtgtcttttacccccactgccttgtccaacgggattaatcatagtcctcccactttgaacggcgcaccctcacccccccaacgcttcagcaacggacctgccagttccacctcttctgctctaactaaccagcagttgccggctacttgtggcgcccggcaattgagcaagctcaagcggtttctgacaacacttcagcaattcggtaacgacattagccccgaaattggcgagaaagtgcgtacccttgtccttgcgcttgtgaatagcaccgtgaccatcgaggagtttcactgcaagttgcaggaagcaactaactttccactgaggccctttgtgatcccattcctaaaggcaaacctcccgttgctgcagcgagagctgttgcactgcgcgagagctgccaagcaaactcctagccagtatctcgcgcagcacgagcacctgctgttgaataccagtatcgcgtccccagccgatagtagcgaactcctgatggaggtccatggcaatgggaaaaggccaagcccggagagttgcatcattcacctcaaaagtatgggcgtagcatccagacacgagtacttttccgggacccttcagatgccggcccaccctgttagaaattctactcttgaaaatttgtgggttgactgttcccgatccctgcggtcaactgtgcttccgttcccttag

SEQ ID NO: 113050 - DNA, 1728 bp, synthetic construct
  misc_feature 1..1728: note = Description of Artificial Sequence: Synthetic coding sequence
  source 1..1728: mol_type = other DNA
atgccaggctcccctgttgaggtcaagatccagtctagaagttccccaccaacaatgcctcctcttcctccaattaaccccggcgggccacgtccagtgtccttcactcctaccgctctgagcaacgggatcaaccacagcccccccaccttgaatggggccccctctcctcctcagcgatttagcaacggacctgcaagctctacatcttccgcattaactaatcagcagctgccagccacctgcggcgccaggcagctctctaagctaaagcggtttctcacaactctgcagcagttcggaaatgacatctcgcccgaaataggcgaaaaagttcggacactggtcctggctctcgtgaactctactgtgaccatagaggaatttcactgcaagctgcaagaggcaaccaattttcctctccgcccctttgtgatcccattccttaaggccaacctccctctattacagagagagctcctacattgcgcgagagccgccaagcagaccccctctcagtatttggcccagcacgaacacctgttgcttaatacttcaatcgcttccccagcagattcttcagaactattgatggaggtgcacggcaatggaaaaaggccgtcccccgagaggagagaagaaaatagtttcgatagagataccatagcaccagagcctccagccaaaagagtgtgtacgatcagtccagcccctaggcactcaccggctctaaccgtaccattgatgaaccccggaggacagtttcaccctaccccaccacccctgcaacactataccctggaggacattgcaacaagtcatctctatagggaacctaataagatgttagaacaccgcgaggtaagagatcggcaccacagcctaggactgaatggaggctaccaggacgaactggtggatcatagattaactgaacgggaatgggctgatgaatggaaacatttagaccacgcactgaactgcattatggagatggtggaaaagacccgcagatctatggcagtattgaggaggtgtcaagagtctgacagggaggagctgaactactggaagagaaggtataacgaaaatactgagttaaggaaaacaggcacggaattggtctctcgacagcactccccaggttccgccgattctctcagtaatgactcacagcgcgagttcaactctaggccaggtacaggctacgtaccagttgaattctggaaaaaaactgaagaggcggtgaataaggtcaaaattcaagctatgagcgaggttcagaaggctgtcgccgaagccgaacagaaggcctttgaagtgatcgcgactgagcgggcccgtatggaacaaactatcgctgacgttaagaggcaagcagcagaagacgctttcttggtgataaacgaacaagaggagtcaactgagaactgctggaattgcggtcgcaaagcatccgaaacttgctctggctgcaacattgcccggtattgtgggagtttttgccagcataaggactgggaacggcatcatcgtctttgcggacaaaatcttcacggacagagtccacacgggcagggacgccccttgctccccgtgggaagaggctccagtgcccggtcagcagactgttcagtgccaagcccggctctggacaagaccagcgccactacatcacgttcgagcactcccgccagcgtaaccgccattgatactaacggcctgtag

SEQ ID NO: 113051 - DNA, 1137 bp, synthetic construct
  misc_feature 1..1137: note = Description of Artificial Sequence: Synthetic coding sequence
  source 1..1137: mol_type = other DNA
atggaggtacacggcaacggcaagcgaccgtccccggaaagacgtgaggaaaattccttcgaccgggataccatcgccccggaaccacctgccaaaagagtgtgcactatcagtccagcaccgcgccactccccagcactgaccgtccccctgatgaaccctggcggccagtttcacccaaccccacccccactccagcattacacacttgaagatattgctacctcacacctttaccgcgaacccaataagatgctggagcaccgcgaggtgcgtgaccgacaccactctctggggcttaacggagggtatcaggatgagttggtggaccatagactgactgaacgcgagtgggcagacgaatggaagcatctggatcatgccctgaattgcataatggaaatggtggagaaaacacgcagaagcatggctgtgctgagacgctgccaggagagcgatagggaggagttgaattactggaagcggcgctacaacgagaatacggaattaagaaaaactgggactgagcttgtgagtcggcagcatagtcctggctcagcagatagtctgtcaaatgattctcaacgagaatttaatagccggcctggaacaggttacgtccccgtggaattctggaagaagaccgaggaggccgtgaataaggtgaaaattcaagctatgagcgaggtacagaaggctgttgctgaagcagaacagaaagcctttgaagtcatcgctaccgagcgtgcaaggatggaacagaccattgctgatgtcaaacgacaggcggctgaggacgcctttctggtaatcaacgagcaggaagaatcaaccgagaactgctggaactgcggaagaaaggcgtcagagacgtgtagtggctgcaatattgcacggtattgtggctctttctgtcaacataaggactgggagcgacatcaccgcctctgtggacagaatctccatggccaaagcccccatggacaggggcgccctctgctgcctgtaggacggggctcttccgctaggtcagcagattgctccgtgccatctccggcactcgacaagaccagcgccactacgtctaggtctagcacaccagcatcggtgactgcaatcgacaccaatgggctgtag

SEQ ID NO: 113052 - DNA, 546 bp, synthetic construct
  misc_feature 1..546: note = Description of Artificial Sequence: Synthetic coding sequence
  source 1..546: mol_type = other DNA
atggtgggggtgcccggtgcagcagcgttccagctggggcctgagaagcgagttccggccatgcctgggagccctgtagaagtaaaaatacagagtagatcatctcctcccacaatgcctcctttgccaccgataaaccccggtggcccacggcccgtttcttttacgcccaccgcgcttagcaatggcatcaatcactctccccctacgctgaatggcgcgccgagtccgccccaacgctttagcaatggtccagctagctccactagcagcgccttaaccaaccaacagctgcctgctacatgcggagcacggcagctttcaaaactcaagcgttttttaacgaccctccaacagttcggaaacgacattagccctgagattggagaaaaggtaaggaccctggttctggctctggtgaatagcaccgtcaccattgaggagtttcactgtaaattgcaagaagctacgaacttccctcttcgccctttcgtcattccattcctgaaagctaacctcccacttctgcaacgcgagctactctag

SEQ ID NO: 113053 - DNA, 243 bp, synthetic construct
  misc_feature 1..243: note = Description of Artificial Sequence: Synthetic coding sequence
  source 1..243: mol_type = other DNA
atggccaaagagtccggcatatcactcaaggagatacaggtcctggcaagacagtggaaggtcggccctgagaaaagggtgcccgcaatgccaggaagcccggtggaggttaagattcaatctcgatccagccctcctaccatgccaccgctgcctcccattaacccaggtggcccgcgacctgtcagcttcaccccgaccgccctcagcaacggtataaatcattcacctcctacactctag

SEQ ID NO: 113054 - DNA, 459 bp, synthetic construct
  misc_feature 1..459: note = Description of Artificial Sequence: Synthetic coding sequence
  source 1..459: mol_type = other DNA
atgagcgaggtgcagaaggctgtcgccgaagcggagcagaaggcttttgaggtgattgccactgagcgagccaggatggagcaaactatcgctgacgttaagcggcaagccgcagaggacgcatttttagtcataaacgaacaggaggagagcactgagaactgttggaactgcggtcgcaaggccagcgaaacgtgtagcggctgtaatattgcacggtattgcggcagtttctgtcaacacaaggactgggagagacatcatagactgtgcggtcagaacctgcacggccagtctccacatggccaagggcgcccgcttctgccggtggggagggggagtagcgctcgatcggctgactgctcggtcccttcacccgccctcgacaagacatcagccactacgtcaaggagttccactccagcatccgtaaccgctatcgatacaaacgggttatag

SEQ ID NO: 113055 - DNA, 1962 bp, synthetic construct
  misc_feature 1..1962: note = Description of Artificial Sequence: Synthetic coding sequence
  source 1..1962: mol_type = other DNA
atgcctgcctctcggctgcgagatagagctgcttcctctgcttccgggagcacatgcgggagcatgtctcagactcaccctgtgctcgagtctggcttgttagcatcggcaggctgctccgccccaaggggtccccggaaaggaggccctgcacccgtcgacaggaaagcaaaagcatctgcgatgcccgactctccagctgaggtgaaaacacagccccgaagcaccccaccatccatgccccctcccccccccgcggcgtcccaaggcgctacacgacctccctccttcacccctcacacacaccgggaggatgggccggccactctcccacatggtcggttccatggatgtttgaaatggtcaatggtgtgtctgctcatgaacggaagtagccattctcccacagctataaatggtgccccttgcacgccaaacggcttttctaacggccctgcaacatctagcaccgcatccctaagtactcagcacctgccgcctgcgtgcggtgccagacaactgtcaaaactgaagcgctttctgacaacccttcagcagtttgggagtgacatttcacctgaaataggggaacgtgtccggacgctcgtcctgggccttgtcaatagcaccttaacaattgaggaatttcacagcaagctccaggaggcaaccaatttcccgcttcgcccatttgtcatccccttcctaaaggccaatctgcccttgcttcagagggaactgcttcactgcgcgcgcctggccaagcagacaccagctcaatacctggcccagcacgaacagctgttgttggacgcctccgcctcctctcccatcgacagcagtgagttgctccttgaggttaacgaaaatggaaagagacgcacgcccgacagaacaaaagaaaatgggagcgacagagaccctttgcaccccgagcacttgtctaagagaccttgtacgctgaacccagcacagcggtactccccctctaatggaccaccccagccgaccccccccccccactaccggctcgaggatattgctatggcacaccacttccgcgacgcatatcgacaccctgacccgcgggaactgcgtgagcgtcaccgaccgctagtggtgcctggatctcgccaggaggaggttatcgatcacaaactgaccgaacgcgagtgggctgaggagtggaagcatctgaataacttattgaactgcataatggatatggtggaaaagacacgccgaagcttgacagtgctccgccgctgtcaggaggcagacagagaagaactaaaccattgggcccgccgatatagcgatgctgaagacacaaaaaaaggacctgcccccgcagccgcccggcctaggtcatcctcagcaggcccagaaggcccacaactggacgtgcctagagaattcctgccccgaaccctgacaggctatgtgcccgaggacatctggcggaaggccgaagaagccgttaatgaggtgaaaaggcaggcaatgtctgagcttcagaaagctgtgtctgatgcagagcggaaagcccacgagctgatcacaacggaacgcgccaagatggaacgggccctggctgaggccaaacgccaggcttcagaagatgcactgacggtgattaatcagcaggaggatagcagcgagtcgtgttggaactgtggacggaaagcaagtgagacctgttccggctgcaacgccgccaggtactgtggttctttttgtcagcaccgggactgggagaagcaccatcacgtgtgcggccaatccctgcagggcccaaccgcagtcgtggcagacccagtcccagggccgccggaagcagctcactctctggggccttctctgccagtgggagctgccagtccatctgaggccggctccgctgggccttctcggccggggagtccctccccgccggggccccttgacacagtgcctcggtag

SEQ ID NO: 113056 - DNA, 1704 bp, synthetic construct
  misc_feature 1..1704: note = Description of Artificial Sequence: Synthetic coding sequence
  source 1..1704: mol_type = other DNA
atgccagattcgccagctgaagtcaagactcagcccaggagtactccgccctccatgccacccccaccgcccgccgcgtcccagggtgctactaggcccccctccttcacaccccacaccctgatgaacgggagctctcactcacctaccgcaattaacggggcgccttgcaccccaaacggattctccaatggtccagcgacctcttccacagcctccctttcaacccagcatcttccacctgcctgtggcgccagacagctgtcgaaactcaagaggttccttacgactctgcagcagttcgggtccgatatcagccccgagatcggcgaaagggtgaggacactggttctgggcctcgtgaacagtacccttactattgaagaattccattcaaagttgcaggaagctaccaatttcccactcagaccattcgtcatcccctttctgaaagcgaatctaccactgttgcagcgtgagctgctacactgcgcccgtttggctaaacagactcctgcccagtatttggctcagcatgagcagttactgttagatgcatcagccagctccccaatcgacagttccgagcttttgctggaagtgaacgagaacgggaagcgtagaaccccggaccgcactaaggagaatggttctgatcgcgatccattgcatccagagcacctgtccaagcgcccgtgcaccctaaacccagcacagcggtatagtccttctaacggcccaccgcagcctaccccaccgccgcattaccggctggaggacatagccatggctcaccattttagagatgcttaccgccacccagaccctcgcgagcttagagagcgccacagacccttggtggtacccggcagtcgccaggaggaggtgatcgaccataagctgaccgagagagagtgggctgaagaatggaaacacttaaacaacttgctaaattgcatcatggatatggtggaaaaaactcgccgctccctcaccgtacttaggaggtgccaggaagccgaccgggaagaactgaaccactgggcacgccggtacagcgacgctgaggatacaaagaagggacctgcccctgctgccgctagaccacgaagtagtagcgccggtcccgaaggaccccaactggacgttccaagggagttcctgcctaggactctcaccggctatgtgcctgaagacatttggaggaaagctgaggaggcggtgaacgaagtgaagaggcaggcgatgtctgaactacagaaggctgtgagcgacgcggagcggaaggctcacgagttgatcacgacagagcgggcgaaaatggaaagagctcttgccgaggctaagaggcaagcctccgaagacgcactcaccgttattaatcaacaggaggactcctctgaaagctgctggaactgcggccgtaaggcttccgaaacgtgtagtggctgcaacgccgcccgatactgtggctctttctgtcagcatcgggattgggaaaaacatcaccacgtctgtgggcagagtctccagggccccacagctgttgtcgcagatcctgttccaggtccccccgaggctgcgcatagcctgggtccgagcttgccggtgggcgcggcgtcgccgagcgaggcaggatcagccggcccctcccgaccagggtctcccagtccgcctggaccgttagataccgtgccaaggtag

SEQ ID NO: 113057 - DNA, 1704 bp, synthetic construct
  misc_feature 1..1704: note = Description of Artificial Sequence: Synthetic coding sequence
  source 1..1704: mol_type = other DNA
atgcccgactcccccgccgaggtcaagacacagccaagatcaacccctccgtcaatgccccccccacctccagccgcttcccagggagcgaccagaccaccatcttttaccccgcatacgctgatgaacggttcatcccattctcctaccgccataaatggggccccctgcaccccaaacgggtttagcaacggccccgccacatctagcacagcaagcttaagtacacaacatctgcctcccgcctgcggcgcgagacaattgagtaaactcaagaggtttctgacaaccctgcagcagttcggctctgacattagcccagagatcggagaaagagtgagaacactggtcttaggcctggtgaatagcactttgaccatcgaggagtttcacagtaagcttcaggaggctacaaactttccactgcgccccttcgtaataccctttctcaaagccaacttgcctttactgcagcgtgagctgctccactgcgcaaggctcgctaagcaaactcctgcccaatatttggcccagcatgagcaattgctcctcgacgcctcagcctcatcaccaattgatagtagtgaacttctgctagaggtgaacgagaacggcaaacggcggaccccggacagaactaaggagaatggatccgaccgggaccccctgcatcccgaacatctgagtaaacgaccctgtaccctgaaccctgcacagagatatagtcctagcaacgggccccctcagcctaccccaccaccgcattacagattagaggatatcgccatggcacaccatttcagggatgcatatcggcacccagatccaagggagctcagggagagacaccgacctcttgtggtgccgggcagcagacaggaagaggttatagatcacaaactaaccgagagagaatgggccgaggaatggaagcacctgaataatttgttaaactgcatcatggatatggttgagaagacaagacgctcactcactgttctgagacggtgccaggaagccgacagggaggagctcaaccattgggctaggcggtatagtgatgcagaagacactaagaagggccccgcgccagcagccgctagaccaagatctagtagtgcggggccggagggaccacagctcgatgtccctagagagttcctgcctcgtaccctgacgggatacgttcctgaagatatctggagaaaagcagaggaggccgtgaacgaggttaaaagacaggcaatgtccgagctgcagaaagctgtctccgatgctgagcgaaaagctcacgaattgatcacaaccgagcgagctaaaatggagcgagcccttgctgaggccaaaagacaggcctccgaggacgcccttaccgtgattaaccagcaggaagattcatcagagtcctgttggaactgcggccgaaaggctagcgagacttgttcaggctgtaacgccgcccggtactgcggctcattttgccagcatagggactgggagaagcatcaccacgtctgcggccaatcactgcagggtccgacagcagtcgtggccgacccagtgcctggtcctcccgaggctgcccattctctaggaccatctcttcctgtgggtgccgcaagtccatccgaggccgggtctgcaggacccagccgaccggggagtccaagtccgcccggaccactagacaccgtcccccggtag

SEQ ID NO: 113058 - DNA, 1848 bp, synthetic construct
  misc_feature 1..1848: note = Description of Artificial Sequence: Synthetic coding sequence
  source 1..1848: mol_type = other DNA
atgccagccagccgtttgagggacagagccgccagctctgcaagcggctctacatgcggctctatgtctcagactcaccccgtgctggagagtggcctactcgcctctgcagggtgctcggctccaaggggcccaaggaaggggggcccagccccagtcgaccggaaggccaaggcgtctgcaatgccagatagtcccgctgaggtcaagactcagccaagatctacccctccgtcgatgcctcccccaccaccagctgccagccagggcgctactcgcccaccaagctttaccccccacaccttaatgaacggcagctcacactccccgacagccattaatggggcaccgtgcacccccaatggattttcaaacggcccggccaccagtagtaccgcgagtttatccacacagcacctgcctccggcctgcggggccagacagctgtccaagctgaaacgattcttaacgacgctccagcagttcggcagcgatatttccccagagattggggaacgggtacgtacactggtgcttggcctggtgaattctacactgactatcgaggaattccattctaagctgcaggaagcgactaactttccgcttaggcccttcgtgatccccttcctcaaggccaatttgcctcttctccagagagagctgctgcattgcgcaagactcgcaaagcagactccagcccagtatttggctcagcacgagcagcttctgttggacgccagcgcatctagtccaatcgactcttccgaattgctactcgaggtcaatgagaacggcaaaaggcggaccccggatagaacaaaggagaacggatccgatcgggaccccctgcaccccgaaaggtactccccaagtaacggcccccctcagccaacccctcccccgcactataggttggaagacattgcgatggcacaccactttcgggacgcctatcggcaccctgatccgagagaattgcgggagcgccaccgaccactggtagttcccggatccaggcaagaggaggtgattgatcacaagctgacagaacgcgagtgggcagaagaatggaagcatttgaataacctcctaaactgtattatggatatggtggagaagaccaggcggagcctgaccgttctacggcggtgtcaggaagccgaccgcgaagagctgaaccattgggcaagacggtacagcgatgccgaggataccaaaaagggccccgctccggccgccgcacggccaagatcaagctccgcaggccccgaagggcctcagctggatgtgccccgagagtttctcccccggactctgactggctatgtgcccgaagacatctggcggaaagctgaggaggcggttaacgaagtaaagcgccaggccatgtcagagttgcagaaagcggtgagcgatgcggagcgaaaagctcatgagcttattacgacagaacgtgccaagatggagcgagcactggcagaagcgaagcggcaggcttcggaggacgccctcacagtaataaaccagcaggaagattcttctgagagctgttggaactgcggcagaaaagcttcagaaacctgctcaggctgcaatgctgcgaggtactgtggctccttctgtcagcacagggattgggagaaacaccaccatgtgtgcggccaatccctacaaggacctaccgcggttgtggcagaccccgtgcctggccccccggaggcagctcacagtctgggaccttctcttccagtgggtgctgctagtccttcggaggctggaagcgctggcccttccagacccggatctccttcccctccaggtccactggacaccgtaccccgatag

SEQ ID NO: 113059 - DNA, 1734 bp, synthetic construct
  misc_feature 1..1734: note = Description of Artificial Sequence: Synthetic coding sequence
  source 1..1734: mol_type = other DNA
atgcccgcctctcgccttagggacagggcagcttccagcgctagtggtagtacatgcgggtcaatgtcacaaacacacccagtgctggaatccgggttgctagcctcagcgggctgctcagcacctagagggcctaggaaaggcggaccagtgatgaatggttcatcgcattccccaactgccattaacggcgctccctgcacgcctaacggcttttctaacggccctgccacatcctcaaccgccagcctcagcactcaacacttgccgcccgcctgcggcgccagacagctcagcaagctcaaaaggttcttaaccaccctgcaacagtttggctcggatatctccccagagattggcgagagggttcgcacgctagtcctgggtctcgtcaactctaccctcacaatagaggaattccattccaagctgcaggaggccaccaatttccctttgcgccccttcgtcataccctttctaaaggcaaatctgcccctactccaacgagagcttctgcattgcgcccggcttgccaagcaaacccccgcccagtatctagcacagcacgagcagctgctgttggacgcttcggccagcagcccaattgattccagtgagctgttactggaagtgaacgagaacggcaaaagacggacccctgacagaaccaaagaaaacggttccgaccgagacccactgcatccagagcacctttccaagcgcccatgcaccctcaaccctgctcagcgctactctcctagcaacggaccaccccagcccaccccacccccccactaccgactagaggacattgctatggctcaccactttcgggatgcataccgacaccctgatcctagagagctgagggagagacataggccattagttgtacccgggagcagacaagaagaggtcattgatcataagctcaccgagagggagtgggccgaggagtggaagcacctgaataaccttttgaactgtatcatggatatggtagagaaaaccaggcgttcgctgaccgtcctccggcgctgtcaggaagcagaccgtgaggagcttaatcactgggcgaggaggtactctgacgcagaggataccaaaaagggccccgccccagccgctgctaggccccggagctcgtcggctgggccagaagggccccagctggacgtgcccagggaattcctgccacggactctcacaggctacgtgccagaagacatctggagaaaagccgaagaggcagttaatgaagtcaagcggcaggccatgtcagaactgcaaaaggccgtcagcgacgccgaacgcaaagctcacgagctcatcactactgagcgtgctaaaatggagagagccctggccgaggcgaagcgtcaggcctctgaagacgccctgaccgtgatcaaccagcaggaggattcctccgaatcgtgttggaactgcggtcgtaaggctagtgagacctgctccggatgcaatgccgccagatattgcggctcgttttgtcagcatcgggactgggaaaagcaccatcatgtgtgcggccagtccctccaaggtcccaccgccgtagtcgctgaccccgtgcctggcccgccagaggctgcacactcgctgggtccctccttgccagtgggggccgcctcccccagcgaggcgggctcagcaggcccttctagaccaggttctcctagcccaccaggacccttagacaccgtgcctaggtag

SEQ ID NO: 113060 - DNA, 558 bp, synthetic construct
  misc_feature 1..558: note = Description of Artificial Sequence: Synthetic coding sequence
  source 1..558: mol_type = other DNA
atggcagctcagaaagaccagcagaaagacgcagaggccgagggcctttcaggtaccaccctgttgcctaagctgatcccttccggagcaggtcgcgagtggctggagcggaggagagctaccatcaggccatggagcactttcgtggaccagcagagattcagccgacctcgcaatctgggggagctgtgtcagcgcctggtgcgtaatgtggagtattaccagtcaaactacgtgttcgtctttcttggtctgatcttgtactgtgtggttacttctcctatgttgttagtcgccctcgccgtgttctttggcgcctgctacatcctttacctgcgcaccttggaatcaaaattggtgctgttcgggagggaggtgtctccggcccaccagtacgctttagccggagggatctccttcccctttttttggttagctggggctggatccgcagttttttgggttttaggagccactctcgtggttataggctcacacgctgcattccaccagattgaggccgttgatggtgaggagttgcagatggagccggtgtag

SEQ ID NO: 113061 - DNA, 3147 bp, synthetic construct
  misc_feature 1..3147: note = Description of Artificial Sequence: Synthetic coding sequence
  source 1..3147: mol_type = other DNA
atgaaccgattccgcgtttctaagttccggcacactgaggcacgtccccccagacgggagtcatggatatctgacatcagggccggcaccgcccctagttgtagaaaccacataaagagctcttgtagtctgattgccttcaacagcgataggccaggtgtgttgggcatcgtgcccctgcagggacagggcgaggataagcgccgcgtggcgcacctcggatgtcattccgaccttgtgacagatttggatttctccccttttgacgactttttgctggctacaggctcagccgacaggaccgtgaaactttggcgtcttcctggccccggacaagccttgccctcggcacccggagtggtgctcggaccggaagacttgccggttgaggttctccagttccatcccaccagtgacggtatactggtgtccgcggctggaaccaccgttaaggtctgggacgcagctaagcagcaacccctgacagagctggctgcgcatggtgatctcgttcagagtgccgtgtggtccagagatggcgccctagttggcacagcctgcaaggacaagcagcttcggatttttgaccccagaactaagccacgagccagccagagcacacaagctcatgaaaattcccgagactctagactcgcgtggatgggtacatgggaacacctggtatccaccggcttcaaccaaatgagggaaagagaagtcaagctctgggataccaggtttttttcctccgcacttgcctccctcaccctcgacacgtcacttggctgtctcgtgccactcctggatccagactccggactcttagtactggccgggaagggagaacggcagctctattgctacgaggtggtcccacaacaaccagccctttctcctgttactcagtgcgtcttggagtcagtattgcgtggggcagcactcgtaccacggcaagccctagcagtcatgtcttgcgaggtcttgcgagtcctgcagctctccgatacagccatcgtcccgattgggtaccacgtgccccgaaaggccgttgaatttcatgaagacctcttcccggataccgccgggtgcgttcccgctactgatccacactcctggtgggctggagataatcagcaggtgcagaaggtgtccctgaatccagcctgcaggcctcatcctagcttcacctcgtgcctcgtgccccctgctgaacctctccccgacaccgctcagcctgccgtgatggagaccccagtgggggacgcagatgctagtgaggggttctcttctcctcctagcagcctaacaagcccttcaacaccatctagtctaggacctagtctgagcagcacctctggcattggaacaagtccatcactgcggtcactgcagagtctgttaggaccatctagcaaatttagacacgcccagggaacggtgctgcaccgggactctcacataactaacctcaagggcctcaatctgacgacgcccggagaatccgacggattttgcgccaacaagttgcgggtggccgtacccctgctgtcttccggcggacaggtggccgtacttgagctcagaaaacctggccggctgccggacaccgctcttccaactctgcagaacggagcagcggtgaccgacctcgcatgggatccattcgatccacacagactcgctgtggccggcgaagatgcacgcatccgcctgtggcgggtgccagctgaagggctcgaggaagtgctaactactcccgaaaccgtcctgactggacacaccgagaagatttgcagcttgcgattccaccctctagccgccaatgtgctggcttcgtcttcatatgatctcaccgtaaggatttgggacctacaagcaggcgcggatcgtctgaagctccagggacaccaggatcaaatcttcagcctagcctggtcacccgacggacagcagctggctactgtgtgcaaggatggcagagtcagggtgtaccgacctcgctccggacccgagccgctgcaggagggaccaggccccaaaggcgggcgcggcgcccggattgtgtgggtgtgcgacgggagatgccttctcgtttctggcttcgactcccaatccgaaaggcaactgcttctgtacgaggccgaagcccttgctggtggaccactggctgttctagggctggatgtcgcgccatcaacattgttgccttcgtatgacccggacaccggtcttgtcttgctgacaggaaaaggagacacgagggttttcctgtatgagttgctgcccgagagccccttcttcttggagtgtaactcattcacctcccctgatccacataaagggctagtgctccttccaaaaaccgagtgtgacgtgagagaggtcgagctcatgaggtgtttacgattaaggcaatcaagcctggagcccgttgccttccgcctccctagggttcgcaaggaatttttccaagacgacgtcttccccgatacagccgtgatttgggaacctgtcctcagcgcagaggcctggctgcagggcgcaaatggtcagccatggctgttgtccctgcagcccccagacatgagccccgtgtcccaggccccaagagaggcgccagctcgccgggcccccagtagcgcgcagtaccttgaggaaaagagtgatcagcagaagaaggaggagctgctcaacgctatggtggccaagctgggaaatagggaggaccctctgccacaggatagcttcgagggcgtcgacgaagacgagtgggccaaatacctcgcacaaattattgtgatgggagtgcaagtcgtaggccgcgcctttgctagggcattaaggcaggaattcgccgcaagcagagccgctgccgatgctaggggtcgggcaggacatcgtagcgccgccgccagcaatctgagcgggctatccctgcaggaggcccagcagattcttaatgtctccaagctcagtcccgaggaggtgcagaagaactacgagcacttgtttaaagtgaacgataaatcagtcggtggatctttctacttgcaaagcaaagtagtccgggccaaggagcggttggatgaggagctgaaaattcaggcacaagaggacagggagaagggccagatgcctcacacctag

SEQ ID NO: 113062 - DNA, 2778 bp, synthetic construct
  misc_feature 1..2778: note = Description of Artificial Sequence: Synthetic coding sequence
  source 1..2778: mol_type = other DNA
atgaatagattccgtgtgtcgaaatttcgccacaccgaagctagacctcctcgacgagagtcttggatcagcgacattagggcagggaccgctccatcctgccggaatcatatcaagagctcctgttctctgatagcgtttaattccgaccggccaggagtgctaggaattgtccccctgcaggggcaaggcgaagacaagcggagggtcgcacatctgggctgccactcggacctggtcaccgacctggatttctccccgtttgatgattttctgctggctacaggctccgccgatagaaccgtgaagttgtggcggcttcccggccctggccaagcactcccaagtgcccctggggtggttttaggccccgaggatttaccggtcgaggtgctgcagtttcaccccacctctgacggaattctagtcagtgctgccggtaccacagtgaaggtttgggatgccgctaagcagcaacccctcaccgaactggccgcgcatggagacttggtgcagtctgcagtgtggtcaagagacggggccctggtgggcacagcttgtaaggacaaacagctccgcatcttcgatccaagaacaaaaccgagggctagccagtccacccaggcacacgagaattcacgcgactcacggctggcgtggatgggtacttgggagcatctcgtcagcactggattcaaccagatgcgggagcgagaagtgaagctgtgggatactcgttttttttcctccgctctcgcaagtcttactctggatacctccctggggtgtctcgtgccccttctcgacccagactccggcctgctggtgctcgccggaaagggggaaaggcagctgtactgttatgaagtagtaccccagcaacctgccttgagccctgtgacccagtgcgtgctggagagtgtcctgaggggagccgccctggtgccaagacaggccctggctgtgatgtcatgtgaagtgctaagagtactgcagctctccgacaccgctattgtgcccataggctatcatgtccccagaaaggccgtggagttccacgaggatttatttccagacactgctggttgcgtccccgcgactgatccgcattcatggtgggctggggacaaccaacaggtccagaaagtctctttgaaccccgcgtgcaggccacaccccagctttacatcctgcctagttcctccagcagaaccacttcccgacacggcccagccagccgtgatggagacaccggtgggagatgcagatgctagtgaggggttctcttcccccccctcctccttaacctcacccagcactcccagcagcctcggccccagcctttcctccacctctggtatcggaacaagccctagcctccggtccctgcagtccctgctggggccctcttccaaattcagacacgcacagggtacagtgctgcatcgagactcacacatcaccaacttaaaggggctgaatctaaccacccccggagagtctgatggattttgcgcaaataagctcagagtggccgtccctttgttatccagcggggggcaggtggcggtgcttgaactgagaaagcctggacggctgcccgacactgcgttaccaacattacagaacggagcagcagtgactgatctcgcttgggaccccttcgacccacatcgcctcgcggtggcgggtgaggacgccagaatcaggttgtggagagtccctgccgagggactggaggaggttctcaccacaccagagacagtacttaccggacacaccgagaaaatttgcagtctgagattccaccctctcgccgcgaatgtccttgccagttcctcttacgatttgactgtgcgcatttgggacctgcaggccggggcggatagactgaagctgcaggggcaccaggaccagatcttctccctcgcttggtcccccgacgggcagcaattggccactgtatgtaaggacggaagggtcagagtctatagaccccggtccggccctgaacctctccaggaaggacctgggccaaagggtggccgtggagccaggatcgtatgggtgtgcgacggtcggtgtctactggttagtggctttgattcccagtctgaaagacagctgctgctgtacgaggctgaggcactggctggcgggcctctcgcagtcctgggtctggatgtggctcccagcacgttactgccttcctatgatccggatacaggattggtgctactgaccggtaaaggcgacacacgagtgttcctctatgagctgctgccagaatccccttttttcctcgagtgtaatagcttcactagtcctgatccccataaggggctggtgctcttgcccaagaccgaatgtgatgtacgggaggtggagctcatgcgatgtctgcgactccgacagtcgtctctggagcccgtggctttcagactgccacgcgtgcgcaaggaattctttcaggacgatgtatttcctgacaccgccgttatatgggaacctgttctgtctgctgaagcctggttacaaggcgcgaacggccagccctggttgctgtcgctccagccgccagacatgagccccgtctcccaggctcccagggaagctccagcgagaagagcccccagcagcgctcagtatctagaggagaaatccgaccaacaaaagaaggaagaactgctcaatgccatggtggccaaactgggcaaccgggaggaccccttgccgcaggattcctttgagggtgttgacgaagacgaatgggactag

SEQ ID NO: 113063 - DNA, 1104 bp, synthetic construct
  misc_feature 1..1104: note = Description of Artificial Sequence: Synthetic coding sequence
  source 1..1104: mol_type = other DNA
atgaaccggttcagggtgtctaaatttaggcacactgaggcccgaccaccaagacgggaggacaagcagctccgaatttttgatccgcgtacaaaacctagggcctcccaatcgacccaggctcacgaaaacagcagggattctcggctggcttggatgggcacatgggaacatttggtctccactggattcaatcagatgagggagcgggaagtcaagctttgggacactcgcttctttagtagcgccctggcatccctgacactagatacctcattgggctgtctggttcctctgctggacccggatagcgggctgctcgttttggccggaaagggcgagagacagctttattgctatgaggtggtcccccagcagcccgctctgagccccgtgacacagtgtgtcctggaaagcgtgctacggggcgccgccctggtaccaaggcaagctctggcggttatgtcgtgtgaggttttgcgtgtcctccagctgagcgatacagcaatcgtccccatcggttatcatgtgcctcggaaggccgtagagtttcatgaagatctgttccccgatacggctgggtgtgtgcctgccaccgacccacatagctggtgggcgggcgacaatcagcaggtgcagaaggtgtcactcaacccagcttgccggcctcatccatccttcacttcttgtcttgtgcctccggccgagccactgccagacaccgctcagcccgccgtgatggagaccccggtcggagatgctgatgctagcgaaggattctcatctcctcccagcagccttacatcaccaagcacaccttcatccttgggaccgtctttgtcctctacaagtgggattggcacctcacctagcttgcgctcactccagtccttgctgggcccttctagcaaattccgccatgctcaggggaccgtgcttcaccgtgattcacacatcacaaacctgaaagggctgaacctgaccacaccaggggagagcgatgggttctgtgctaataagctccgcgtggctgtgcctcttctctcttccgggggccaagttgcagtgcttgaaatgagggagaaaagacaccgagaagtgtag

SEQ ID NO: 113064 - DNA, 2523 bp, synthetic construct
  misc_feature 1..2523: note = Description of Artificial Sequence: Synthetic coding sequence
  source 1..2523: mol_type = other DNA
atgaatagattcagagtgagtaaatttaggcacaccgaagcgcggccgccaaggcgcgaaagctggattagtgacatcagagccggcactgctccaagttgtcggaaccatattaaatcgagctgttcattgattgcttttaattcagacagaccaggcgtgctcggcattgttcctcttcaagggcagggggaagataaaagacgcgtagcccacttgggatgccactccgagctcgcagctcatggagacctggtccaatcagccgtgtggtccagggatggagctctcgtgggcaccgcttgcaaggacaagcagttacggatatttgatcctcggaccaaaccccgcgcctctcagtccacccaggcccatgaaaactcaagagattccagacttgcctggatgggaacctgggaacatttggtgtccacaggctttaaccagatgagagagagagaagtaaagttatgggatacaagattctttagttcggcactcgcctccctgactctggacaccagtctggggtgcctggtgcccttattagacccagattccggcctactggtcctagctggaaagggggagaggcaactgtactgctacgaagtcgtcccacagcaacctgctctgagtccagtgacgcagtgtgtactggaatccgtcctgaggggtgcagcactagtgcccaggcaagccttggccgtgatgtcatgcgaggtgctgcgagtgctgcagctgagtgacacagctattgtacctataggttaccatgttccccggaaagccgtggagttccatgaagatctttttcccgacactgccgggtgtgtccctgcaacagatcctcactcgtggtgggccggtgataaccagcaggtacagaaagtgtcacttaacccagcgtgccgccctcaccctagcttcacttcctgtctagtgccccctgcagagcctcttcccgatactgcccaacccgccgtcatggagacccctgttggagatgcagacgcaagtgagggtttctccagcccaccaagtagcctcacgtcccctagcactcccagcagcctggggccatcactcagctccactagtggcattggaacgtccccgagcctgaggtccctgcagtcactgctgggcccgagcagcaaattccgccacgcgcaaggaacggtgttacacagggatagccatatcacaaacctgaagggcttgaatctgaccactcctggtgaatctgacgggttctgcgccaacaaactccgcgtggccgtgccgctactgagcagcggaggccaggtcgccgtactcgaactgcgcaaacccggtagactgcctgatacagctctgccaacccttcagaacggagctgcagtgactgacctcgcctgggaccccttcgatccccatcggctggccgtggcgggcgaggatgcccgaattcgactttggagagtcccagcagagggcctggaggaagtgcttaccactcctgaaactgtgctgacaggccatactgaaaagatctgctccctgcggtttcatcctctggccgccaacgttttagcctcgtctagctatgacttgaccgtgcgtatctgggacctgcaggctggggcagacagacttaaactgcagggccaccaggaccaaatcttctctttggcttggtccccggatggtcagcagttggctacagtgtgcaaagatggcagagtacgggtgtaccgcccgcgctctgggcccgaacccttgcaggaaggcccagggcccaagggggggaggggagctcgtatagtctgggtgtgtgatggtcggtgcctgctggtcagcggatttgactcccagtctgagaggcagcttctgttatacgaggccgaggcactggcaggaggacccttagcggtcctcggattggacgtcgcccccagtacccttttaccaagctatgaccccgatacagggctggtgctcttgacaggaaagggggacacccgtgtgtttctgtacgagctgctgcccgagtctcccttttttctcgagtgcaactcattcacaagccctgatcctcataagggcctcgtcctcctgcccaagacagagtgtgatgtccgggaggtagaactgatgcgatgccttcgtctccggcagtcaagcctggagccagtggccttccggttgccgagggtgaggaaagaattttttcaagatgatgtgttccccgacacagcagtgatctgggaacctgtgttgtctgctgaagcctggctgcagggcgctaacgggcagccatggctcctgagcctgcagccaccagacatgtcgcccgtgtcacaggcacctcgggaagctcccgccaggagggcaccttccagcgctcaatacctggaggagaaatccgaccaacagaaaaaggaggaactgctaaacgccatggtggccaagttgggtaacagggaggaccctctgccccaagatagtttcgaaggcgtggatgaagatgaatgggattag

SEQ ID NO: 113065 - DNA, 2118 bp, synthetic construct
  misc_feature 1..2118: note = Description of Artificial Sequence: Synthetic coding sequence
  source 1..2118: mol_type = other DNA
atgggcacctgggagcacctggtttctaccggcttcaaccaaatgcgggagcgtgaagttaaactgtgggatacccgattcttttcgtcggccctggcgagcttgaccctggatacctccctgggctgcctagttcctctactggaccctgatagcggcctcctggttctcgccggcaagggtgaaagacagctgtactgttacgaagtggtcccacaacagcctgcgctgagtcccgtgacccagtgtgtgctcgaaagcgtgctacggggagcggccctggtaccgcgccaggcattagctgttatgtcttgtgaagttctccgagttttgcagctgtccgacaccgccatcgtgcccattggttatcacgtaccccggaaggcagtggaattccacgaagatctgtttcccgatactgccggttgtgtcccggccacagatccacactcatggtgggctggtgataaccagcaggtgcagaaagtaagtctcaaccccgcctgcagaccacacccttcttttacaagctgcctggtgccacccgctgagccattaccagacaccgctcagcccgccgtgatggaaacgcctgttggcgatgccgatgctagcgaagggttttccagcccgcctagcagtcttacgagcccatcaacaccatcctcactgggcccatctctttcttcgaccagcggtattggtacaagtccttcactgcgatcccttcagagcctgttgggaccctccagcaagttccgacatgcccaggggaccgtcctgcacagagactcacatatcactaacttgaaaggtctaaaccttaccacccccggtgagtctgacggattctgcgccaacaagctgcgcgtggctgtacctttactcagtagtggagggcaagtggcagttcttgaactacggaaaccaggccgactgcccgatacagccctccctaccctccaaaacggcgccgccgtgactgaccttgcgtgggatccatttgacccacatcgcctggccgttgcgggagaggacgccagaatccggctgtggcgggtccctgctgagggccttgaagaggtgctcactacccccgagacagttttaactggccacaccgagaaaatttgtagcctgcgcttccatcccttggccgctaatgtcttagcatcttcatcttacgatctaacggtcagaatttgggaccttcaggccggcgccgatcggctcaagctgcagggtcatcaggaccagattttcagccttgcctggtcaccagatggccaacagcttgccacagtctgtaaagacggaagggtaagagtttatagacctcgctcagggcccgagcccctgcaagaaggtcctggtccaaaggggggccggggggccagaattgtgtgggtatgcgacgggcggtgtcttttggtgtccggatttgattctcagagcgagcggcaactgctgctatacgaagctgaggcgctggccggaggaccattggccgtccttggattagatgtagcgccaagcacgctacttccttcttacgaccccgacactggactggtgcttcttactggaaaaggagatactcgggttttcctgtacgaattgcttcccgaaagtccttttttcttggagtgcaattcattcacctcaccagatccacacaaaggtctggtcctcctaccaaaaaccgagtgcgatgtccgagaggtcgagctaatgagatgcctgaggctccgccagtcgagcctggaacccgtcgcttttagacttcctcgcgtccgtaaagaattcttccaggatgatgtgtttcccgataccgctgtgatctgggaaccggttctaagcgccgaagcctggttgcagggggctaacggtcagccgtggctgctcagcctgcaacccccagatatgagccctgtgagtcaggctccacgcgaggctcccgctagacgagcccccagcagtgcccagtacctcgaggagaaatctgatcagcagaagaaggaggaactgctcaacgccatggttgccaagctgggaaatagggaagatcccctgccccaagactcattcgagggtgtggatgaagatgaatgggattag

SEQ ID NO: 113066 - DNA, 1386 bp, synthetic construct
  misc_feature 1..1386: note = Description of Artificial Sequence: Synthetic coding sequence
  source 1..1386: mol_type = other DNA
atgagcagacaggtcgtcaggagctccaagttcaggcatgttttcggtcagcccgccaaggctgatcaatgctacgaagatgtgcgcgtgagccagacaacgtgggattcagggttctgcgcggtgaaccccaaatttgttgccttgatttgcgaggctagcggaggcggagcatttctcgtgctgcccttaggaaaaacaggccgtgtggataagaatgctccgacagtctgcggtcataccgctcccgtgcttgacatagcctggtgcccacacaatgataatgtgatcgccagtgggtctgaggattgcaccgttatggtgtgggagattcccgacggcggtctaatgttacccctgcgggaacccgtcgtgacgttagaagggcacacgaaaagagtggggattgttgcatggcacaccaccgctcagaacgtgctgctgtccgcaggttgtgataatgtgataatggtctgggatgtcggaaccggggccgcaatgttgaccctgggtcctgaggttcatcccgataccatttactccgtggattggagtagggatggcggccttatttgcacaagctgccgagacaaacgagtcaggatcatcgaacccaggaaggggaccgttgtggctgaaaaggacaggccacacgaaggcactagaccagtaagggcggtgttcgtatctgaaggtaagattctcaccaccggcttctctaggatgagcgagcgtcaagtggcattgtgggataccaagcatctggaggaacctctttcactacaggaactggatacttcaagtggcgtcctcctaccattttttgacccagatacaaacatcgtgtatctgtgcggaaaaggcgattcttccattcgatatttcgaaattacatccgaagcaccctttctgcattatctgtcaatgttcagtagtaaggagtcacagagggggatgggttacatgcctaagcggggcctcgaagtgaataagtgtgaaatcgcaaggttttataagttgcacgagcgccggtgcgaacccatagccatgactgtaccacggaagtcagacctatttcaggaagacctgtaccctcctacagctggcccagaccctgctctgaccgctgaagagtggctagggggtagggatgctggacctctgctgatttccctgaaggacggatacgtgcctcccaagtctcgcgaactgcgtgtgaaccgcggcctggacaccgggcggcgcagagcggctcctgaggcctctgggacccccagcagcgatgccgtttcaagactggaggaagagatgagaaaacttcaggccactgtccaggaattgcaaaagcgacttgataggctggaggagaccgtgcaagcaaaatag

SEQ ID NO: 113067 - DNA, 1443 bp, synthetic construct
  misc_feature 1..1443: note = Description of Artificial Sequence: Synthetic coding sequence
  source 1..1443: mol_type = other DNA
atgactgtgaccaagatgtcctggcgcccccagtatcgcagttcaaaattcaggaacgtgtatggcaaggtagcaaacagagagcactgttttgacgggatccctatcacaaagaacgtccacgacaatcacttttgtgctgttaacaccagattcctggcgatcgttacagagtcagcaggcggaggcagttttctagtgatacctctggagcaaacaggtagaatcgaaccaaattatcctaaagtgtgtggacaccagggaaatgttttagacattaagtggaatccctttatagacaacattatcgcgtcatgtagcgaggacaccagcgtaaggatttgggaaatccccgaaggcggcctgaagaggaatatgactgaagctctattggagctccatggtcattccaggcgagtgggattagtggaatggcatcccacaactaacaacatcttgtttagtgccggatatgattataaagttctcatctggaatctggatgtgggggagcccgttaagatgatagactgccacaccgatgtgatcctgtgcatgtctttcaacaccgatggcagtctccttacaaccacgtgtaaagacaaaaaactgagagttatcgagcctcgcagcggcagggtgctgcaggaggccaattgcaaaaaccaccgggttaaccgggtggtattcctcggcaatatgaagaggctcttaactacaggggtaagccgctggaatacgcgacaaattgcactgtgggatcaggaggacctgagcatgcccctgatcgaagaagagatcgatgggctgtccggtctgctttttccattttacgacgccgatacacacatgctgtatctcgccggcaagggcgacggcaatattcgctactatgaaatctctacagaaaaaccttatcttagctacctcatggagttcaggtcccccgcgccccagaaaggtttaggcgtgatgccaaaacacggtctggacgtctccgcttgcgaagtgttccggttctataagctggtgacactgaaaggcttgatcgagcctattagtatgatcgtaccacgaagatccgactcctaccaggaggatatctatcctatgaccccgggaaccgaaccagcactgaccccagacgaatggctcggtgggatcaaccgggatcccgtcctcatgtcactgaaagagggatataaaaagagttctaagatggtgtttaaggctccgatcaaggaaaagaaaagcgtcgtggtcaacgggattgatttgctggagaacgtgccgccaaggaccgaaaacgagctcttgagaatgttctttcgtcagcaggatgagatcaggagactgaaagaggagttggctcagaaggacattaggatccgccagctgcaactcgaactgaaaaacctccggaactcccccaagaactgctag

SEQ ID NO: 113068 - DNA, 1269 bp, synthetic construct
  misc_feature 1..1269: note = Description of Artificial Sequence: Synthetic coding sequence
  source 1..1269: mol_type = other DNA
atgttggatctggaggtggtgccggagagaagcctcgggaatgagcaatgggaatttaccctgggaatgcccctcgcccaggcagtagctatcctccagaagcattgtcggattataaagaacgtgcaggtgctttacagcgaacagagtcctctttcacacgacctcattctaaatctcactcaagacgggattaagctgatgtttgatgccttcaatcaacgcctcaaggtgattgaggtgtgtgatctgaccaaagtgaagcttaaatactgtggagtccacttcaactcccaggccatcgctccgacaattgagcagatcgaccagagcttcggagccacacacccaggcgtatacaactcggcggagcagctctttcatttaaactttcgcggtctgtcttttagcttccagctggactcttggactgaagctcctaaatacgagccaaacttcgcgcatggtctggcctcattgcagatccctcatggcgctaccgtgaaaaggatgtatatttatagcggaaactcgctacaggacacgaaggctcctatgatgcccctgtcctgctttcttggaaacgtctacgccgaatccgtagacgtactgcgggatggcacaggccccgcgggactaaggctccgactgctggccgctgggtgcggacccggcctcttggctgacgctaagatgcgtgtcttcgaacggtccgtctacttcggggactcatgtcaggatgtcttatctatgttagggtcgccgcacaaggtgttctacaagtccgaggacaagatgaagatccactccccgagtccgcataagcaggtgccgtctaagtgtaatgattacttctttaactattttacacttggagtcgacattctttttgacgccaacacccacaaggtgaaaaagttcgtgttgcacacgaattatccaggacattacaactttaatatctatcataggtgtgaatttaagatcccactggccattaagaaagagaatgcagacggccagacagaaacatgcactacttattctaaatgggataacatccaggagctgttaggtcatcctgtagaaaagcccgtggtgctacatcggagctccagcccaaacaatactaacccatttggatcgaccttctgctttggtttgcagcggatgatttttgaggttatgcagaacaaccatatagcttcagtcacgctctacggaccaccccgaccaggaagtcatctccggacagccgagctgccctag

SEQ ID NO: 113069 - DNA, 1470 bp, synthetic construct
  misc_feature 1..1470: note = Description of Artificial Sequence: Synthetic coding sequence
  source 1..1470: mol_type = other DNA
atgtctttcaggaaggtggttcgacaatcaaagtttcgacacgtcttcgggcaacccgtcaagaacgatcaatgttatgaggacatacgcgtttcaagggtgacgtgggacagtactttttgcgctgtgaaccccaagttcttggccgttatcgtggaagcatccggcgggggcgcattcctggttctcccactgtcaaaaacggggcggatcgacaaagcctatcccactgtctgtggacatacaggaccggtcctagatatcgactggtgtccccataatgatgaggttatagcatccggcagcgaggattgtaccgtgatggtttggcaaattcctgagaatggactgacctcgccactgacagaacctgtggtggtgcttgagggccataccaagagggtcggaattattgcctggcacccaactgcaaggaacgttctgttgtccgccgggtgcgataacgtcgttctcatctggaatgtcggaaccgccgaggaactctacagactggatagtctgcatcccgaccttatctacaatgtgagttggaatcataatggttccctattttgctccgcatgcaaagacaaaagcgtaaggattatcgacccacgccggggaaccctagtcgcagaacgagagaaggcacacgagggtgcccggcctatgcgggcgatatttcttgcagatgggaaagtgtttacgactggcttttccaggatgtctgaaaggcagctcgccctgtgggaccctgagaacctggaagaaccaatggcgcttcaagagctggactccagcaacggggcacttctgccgttttacgatcccgacacatcagtcgtttacgtgtgtgggaagggcgacagttctataaggtactttgagatcactgaagagccaccctatattcactttttgaatacgttcacatctaaggaaccacagaggggtatggggagtatgcccaagcgagggctggaggtgagcaaatgtgagattgctcgattttacaaattgcatgagcgcaaatgtgaacccattgtcatgaccgtacctcggaagtctgatctctttcaagatgatttgtatccggacaccgctggtcccgaggcggctttggaagctgaggaatgggtgtctgggcgggatgcagaccccatcctcatttctctgcgcgaggcctacgtgccatccaagcagcgagatctgaagatctctcgcagaaacgtcctcagcgattcacgtccggccatggcccctggaagctctcacctgggagcacctgcgagtaccaccactgccgccgatgcgacaccttcgggctccctcgctcgtgccggcgaggccgggaaactcgaggaggtgatgcaggagttgcgggcattgcgggcactagtcaaagagcagggggacaggatatgtcgcctcgaagagcagttgggccgcatggaaaacggagatgcgtag

SEQ ID NO: 113070 - DNA, 864 bp, synthetic construct
  misc_feature 1..864: note = Description of Artificial Sequence: Synthetic coding sequence
  source 1..864: mol_type = other DNA
tgcttcctcctcccccggggacgagacccagagccccctgaagctggagccgccgctccctgtgccccaggcgcaccggatatgagcttcagaaaggtggttaggcagagcaaatttagacatgtattcgggcaaccagttaaaaacgatcagtgttacgaggacatcagggttagtagagttacctgggatagtactttctgtgccgtgaaccctaaatttctcgctgtgattgtggaagccagcggaggtggcgcctttcttgtgcttcctctttctaagacaggcaggatcgacaaggcgtaccctactgtgtgtggtcacactgggcccgtgctagacatagactggtgcccccacaacgacgaggttatcgcttctggcagcgaggactgcaccgtaatggtatggcagatacccgaaaatgggctcacttctccactaacggaacccgtggtggtgttggagggacataccaagcgagtcggaatcatcgcatggcatccaactgcccgtaacgtgctgctatccgcaggttgtgacaacgtggtgttgatatggaatgttggtaccgctgaggagctgtaccgactcgattccttgcatcctgacctcatctacaatgtgtcttggaatcacaatggcagcctgttctgttccgcatgtaaagataagagtgtgagaataattgacccccgccgcggtacactagtggctgaaagagaaaaagctcatgagggagcgcgcccgatgcgggccatcttcttggccgatggaaaagttttcactaccggattctctaggatgagtgagagacagctcgctttatgggatcctggcgtcagaagattttgccttgcctag

SEQ ID NO: 113071 - DNA, 1470 bp, synthetic construct
  misc_feature 1..1470: note = Description of Artificial Sequence: Synthetic coding sequence
  source 1..1470: mol_type = other DNA
atgagctttcggaaggttgtgaggcagtccaagttcaggcatgtgtttgggcagcctgtgaagaatgatcaatgttacgaggacattcgggtcagtagggtgacatgggattctacattctgtgcagtgaaccccaagtttctagctgtaatcgtggaagcatccggaggtggggcgttcctggtcctgccattgtctaaaaccgggagaatcgacaaggcttatcccaccgtctgcggccacacaggcccagtactagacattgactggtgtccgcataatgacgaggttattgcgagcggaagcgaagactgtacggttatggtgtggcagatccccgaaaatggcctaacctcccccctaacggagcccgtggtggtgctggagggccacactaaaagggtggggataattgcgtggcacccgacagctcggaatgtcctactgagtgccggctgcgacaacgtggtgttgatatggaacgtgggcactgccgaggagctatatagattagactcactccaccccgacctgatctacaacgtaagttggaaccataacgggtctctgttttgttcggcatgtaaggacaagtctgtcagaattattgatcctcgacgcggcactctggtggccgaacgcgagaaggcgcatgaaggagccagacctatgcgggctattttcctggcagacggtaaggtctttacaacagggtttagccgcatgagtgagaggcagcttgcgctgtgggaccctgagaatctggaggagccgatggccctccaggaattggactcatcaaacggggctctccttcccttctacgatcctgacacctcagtagtgtatgtttgcggtaaaggcgactccagtataaggtactttgagattacggaagagcccccatatattcacttcctcaataccttcacatccaaagagcctcagcgcggcatgggatccatgccaaagcgcgggctggaggtgtctaaatgcgagatcgctcgcttttataagctccacgagaggaaatgtgagccaatcgttatgaccgtccctcgaaaatcagacttgtttcaggacgatctgtacccggataccgcaggaccggaagctgctttggaggcagaagagtgggtgtccggtagagacgctgaccctatactgatttcgttacgtgaagcatacgtaccatctaagcagcgtgatctcaagatttcgcgcagaaacgtgctgtccgatagcaggcccgctatggccccaggttccagtcatctgggcgctcctgcttccaccactactgcagcggatgccacaccatccgggtcactggccagggcaggcgaggctggtaaactcgaggaggttatgcaggagcttcgagctcttagggcactggttaaggagcagggggaccgcatttgcaggctggaagaacagctggggcggatggagaacggggacgcttag

SEQ ID NO: 113072 - DNA, 870 bp, synthetic construct
  misc_feature 1..870: note = Description of Artificial Sequence: Synthetic coding sequence
  source 1..870: mol_type = other DNA
atgagtttcagaaaggttgtcaggcagtcaaagttcagacacgtttttggacagcctgtcaaaaacgatcaatgttatgaggatatcagggtgagtcgcgtgacctgggattcaacattttgtgctgtcaatcctaagttcctggccgttattgtggaagcttcaggcggcggcgcctttctggtgctacctttatccaaaaccggccggatagacaaggcgtatcccaccgtatgcggccataccggaccagttctggacatcgactggtgtccgcacaatgacgaggtgatcgcaagtggtagtgaggattgcacagtaatggtgtggcagatccccgaaaacggcctcacaagcccgctaactgaacccgtagtcgtgctggaaggtcacaccaagagagtgggaatcatcgcatggcacccaactgcgaggaatgtactgcttagcgccggatgcgacaacgtggtgctgatttggaatgtgggaaccgcggaggagttataccggctagactccctccacccagatcttatttacaatgtatcttggaaccataacggcagtctattttgctccgcctgcaaggataagtccgtccgcatcatagaccctcggcggggcacactcgtggccgagcgcgaaaaagcgcacgaaggcgcccgcccaatgagggccatatttctagccgatggaaaggtgttcactaccgggtttagccgcatgagcgaaagacaactcgcgctgtgggaccccgtatccggacagcctgagggagcaaatcttcgcctaggaccacacccggggcccggccggcaagggtctccttggggcggactctggtttttagcctccctgcctgggacctag

SEQ ID NO: 113073 - DNA, 552 bp, synthetic construct
  misc_feature 1..552: note = Description of Artificial Sequence: Synthetic coding sequence
  source 1..552: mol_type = other DNA
atgtcttttagaaaggtggtcagacaaagcaagttcagacatgtatttgggcaacccgtcaagaacgatcaatgctatgaggatatcagagtcagtcgggtgacctgggatagcaccttctgtgccgttaacccgaagtttctggccgtgatcgtcgaagcctccggagggggcgcattcttagtgctgccgctttctaaaacgggccgcattgataaggcatacccgacagtctgtgggcatactgggccggtgttagacatcgactggtgccctcacaacgatgaggttattgcatcggggagcgaagactgtactgtcatggtgtggcagatcccagaaaacggtctgacctccccgctcaccgagccggtggtagttctcgaggggcatacaaaacgtgtaggcataatcgcttggcatcctacagctcggaatgtccttctctcagcgggcctgcacaggccccccttttgcgcgccccctccacacggacccttacacacttctcagcaaccactccagggaccgcatgacaagtgggagtcttag

SEQ ID NO: 113074 - DNA, 1425 bp, synthetic construct
  misc_feature 1..1425: note = Description of Artificial Sequence: Synthetic coding sequence
  source 1..1425: mol_type = other DNA
atgaggagggtcgtccgccagagcaaatttcggcacgttttcggccaggctgtaaagaatgaccagtgctatgatgatatcagagtctctcgtgtgacctgggactcaagtttctgtgcagtgaacccacggttcgtcgccatcattattgaggcatcgggaggaggcgccttcctggtcctgccactgcacaagaccggaagaattgacaagagttaccctaccgtgtgcgggcacactggtcccgttctggacattgactggtgcccacataacgatcaagttatcgcctctggaagtgaagattgtactgttatggtctggcagatccctgaaaatggactcacactctctctcacagagcctgtagtgattctggaagggcactctaaacgcgtgggcatcgtcgcctggcacccaaccgctcggaacgttctgctcagcgctggatgcgacaatgccattattatttggaatgttggaactggggaggccctgataaacctggatgacatgcatagtgatatgatctacaatgtttcatggaacaggaacggatccctcatttgcacagcaagcaaggacaaaaaggtgagggtgatcgatcctaggaagcaggaaatagtcgccgagaaggagaaggcgcacgagggcgctaggcctatgagggccatattccttgccgacggcaatgtttttacaaccgggttcagccgcatgtctgagagacagctggccctttggaaccccaagaatatgcaggagccaattgcacttcacgagatggatacttccaacggtgttcttttgccgttttatgatcctgatactagcatcatatacctctgtggaaagggagattcgagtatccgttacttcgaaattaccgatgagagcccatacgtgcactacctgaatacgttctccagtaaagagccacagcgtgggatgggctatatgccaaaacggggcctagacgtaaacaaatgcgagatagctcgtttctttaaattacacgaaaggaaatgcgaacccatcatcatgactgtccctcgaaaaagtgacctgttccaggacgacctctaccccgacacagccgggccggaagccgccctagaggccgaagagtggttcgaggggaaaaacgcggatccaatcctgatcagtctgaagcacggctacattcccggcaagaatcgtgatcttaaggtggtaaagaagaatattctcgattctaaacctaccgctaacaagaagtgtgatttgatcagtatccccaagaagaccactgatacagcctcagtgcagaatgaagccaagctggatgaaatcctaaaagagattaaaagtatcaaagataccatatgcaatcaggatgaaaggatctcaaagttagagcagcagatggccaagattgccgcttag

SEQ ID NO: 113075 - DNA, 1584 bp, synthetic construct
  misc_feature 1..1584: note = Description of Artificial Sequence: Synthetic coding sequence
  source 1..1584: mol_type = other DNA
atgtacggccccgggtcccagctggggaagtccggaaataactcctgggccaaggagcgtggttgctctatcgcctgtcaaggatctctcacctctgcaaggctacatgcgccatcgatcggcgaacggcctctgtcacacatgagatggaaggataccatgcgtcgggtcgttcggcagtccaagttccgacacgtgtttggccaagcagtcaaaaacgaccagtgctacgacgatattcgcgtgagccgcgtgacctgggatagcagtttttgcgccgtgaaccccaggttcgttgccatcattattgaagcatccggaggcggcgccttcttggtgctgcccctgcacaagaccggcaggattgataaatcctatcctactgtatgcggacatactgggcccgtgttggatatcgattggtgcccccataatgaccaagtgattgcatctggttcagaagattgtaccgttatggtttggcaaataccggagaacggcctaactctgagcctgaccgagccagttgtgatcctagaggggcattcaaagcgagtggggatcgtcgcctggcaccctaccgcgaggaatgtgctgctgagcgccggatgtgataatgccatcattatttggaatgttggcacaggcgaggctctgattaacctggacgacatgcactccgatatgatttataatgtatcctggaacagaaatggctctcttatatgtaccgccagcaaagataagaaagtgagagtgatcgaccctagaaagcaggaaatcgtggccgagaaggaaaaggcccacgagggagcgcgccctatgcgcgccatatttctggccgacggcaacgtttttactacggggttctcccggatgtccgaacggcagttagccctctggaaccccaagaatatgcaggagcccatcgcactccatgaaatggacacaagcaatggcgtcttgctcccgttttacgaccctgacacttctatcatttatttgtgcggcaagggcgactccagcatccgctacttcgaaatcacagatgagtctccatacgttcattatctgaacacattcagtagcaaggaaccacagcgagggatggggtacatgccaaagcggggcctcgatgttaataaatgcgaaatcgctagattcttcaagttgcacgaacggaaatgtgagcccatcatcatgacagtgcccagaaaatctgacctatttcaggatgacctgtatccagacaccgccgggcccgaagctgcactggaggctgaagaatggtttgaaggcaaaaacgccgatcccatcctgatttcactgaaacatgggtacattcccggtaaaaatagggacttgaaagttgtgaaaaagaacatactggatagtaaacctaccgccaataagaaatgtgacttgatctctataccgaagaaaaccaccgatacagcatcagtccagaacgaagctaagctcgacgagatcctgaaggagatcaaaagcatcaaggacacaatctgcaaccaggatgagcggatatctaagctcgaacaacagatggccaaaatcgctgcttag

SEQ ID NO: 113076 - DNA, 1425 bp, synthetic construct
  misc_feature 1..1425: note = Description of Artificial Sequence: Synthetic coding sequence
  source 1..1425: mol_type = other DNA
atgaggagggtggtgcgccaatcgaagttccgtcacgtctttggccaggctgtcaaaaacgaccagtgctacgatgatatccgggtcagtcgtgttacgtgggattcctcattttgcgctgtgaatccaaggttcgtcgctatcataattgaagcttctggcggcggcgctttcctggtgttgccactacacaagaccggccgtatcgacaaatcatacccaactgtgtgtggccatacaggtccagttctggatattgattggtgtccacacaacgaccaggttattgcttccggcagcgaagactgcacggtcatggtgtggcagattccagagaacggcctgacactttccttgaccgagccagtcgtaatcctcgaaggccactcaaaaagggtcggtatagtcgcttggcaccccacagcaaggaatgtcctcctgagcgcagggtgcgacaatgcgatcatcatttggaacgtggggactggggaagcactcatcaacctcgatgatatgcacagtgacatgatatacaacgtgagttggaaccggaatggctctctaatatgcaccgcaagcaaggacaagaaagtgcgggtgatagaccctcggaagcaggaaatcgtggccgagaaggagaaggctcatgagggcgcgagaccaatgcgtgccatctttctcgccgacggaaacgtcttcaccactggattctccagaatgagtgagcgacaacttgcgttgtggaaccctaagaatatgcaggaacccattgcattgcatgaaatggacaccagcaacggcgtccttctgccattctatgatcccgatacatcaatcatatacctgtgcggcaaaggcgacagtagtatacggtactttgagatcacagacgaatctccttacgtccattatttaaatactttctctagtaaagaacctcagcgcggcatgggctacatgcctaagagggggctcgatgtcaacaaatgcgagattgctcgcttcttcaaactgcatgagaggaagtgcgagccaattattatgacagtcccacgcaagtctgatctgttccaggacgatctctaccccgatactgcagggccagaggctgcgttggaagccgaagagtggttcgagggtaagaacgccgaccctatccttatctccctgaagcacggatacattcctgggaagaaccgggacctgaaagtggtcaagaagaacattttggacagcaaacccaccgccaataaaaaatgcgacctaatcagcattccgaagaagaccacagatacggccagcgttcagaatgaggcaaaactggacgaaatactgaaggagattaaaagcatcaaagacaccatatgcaatcaggacgagagaatcagcaaacttgagcagcaaatggcaaagatcgcagcctag

SEQ ID NO: 113077 - DNA, 489 bp, synthetic construct
  misc_feature 1..489: note = Description of Artificial Sequence: Synthetic coding sequence
  source 1..489: mol_type = other DNA
atgaggcgtgtcgtacgccagtctaaattccgacatgtgtttggccaagctgtaaagaatgatcagtgctacgacgatattagggttagccgagtcacctgggacagtagcttttgcgctgtgaatcccagatttgtggctattatcatcgaagcgagcggcggcggcgccttccttgttctacccctccacaaaaccgggcgcatagataaaagctaccctactgtctgtggccacacaggccctgtattggacatagattggtgcccgcacaatgatcaggttatcgcatcaggcagcgaagactgcaccgtgatggtgtggcagattcccgaaaatgggctcactttgagtcttacagaacccgtcgtgatcttagagggacacagcaaacgggtgggaatcgttgcttggcacccaaccgcccgcaatgttcttctgtccgccgggtgcgacaatgcaattattatatggaatgtagggacctag

SEQ ID NO: 113078 - DNA, 498 bp, synthetic construct
  misc_feature 1..498: note = Description of Artificial Sequence: Synthetic coding sequence
  source 1..498: mol_type = other DNA
tcgaaagagccacagcgtggtatgggatacatgccaaaaaggggccttgatgtcaacaagtgcgaaattgcacgcttctttaaactgcatgaacgcaagtgtgaaccaatcattatgacagttccaaggaagagtgacttgttccaggatgacctgtatccagatacagccggaccggaggccgcccttgaggcggaagaatggttcgaaggcaagaacgcagatcctattttgatttctctaaagcatggttacattccaggcaaaaatcgggatctgaaggtcgtaaagaagaatattctggatagcaaacctacagcaaataagaaatgcgacctcattagcattccgaaaaagaccactgataccgcatcagtccaaaacgaggctaagctggacgaaatcctgaaagagatcaaatccattaaagacaccatctgcaatcaggatgagaggatatccaagctggagcagcagatggcaaagatcgctgcttag

SEQ ID NO: 113079 - DNA, 546 bp, synthetic construct
  misc_feature 1..546: note = Description of Artificial Sequence: Synthetic coding sequence
  source 1..546: mol_type = other DNA
atgcgacgggtggtgcggcaatccaaatttcgtcatgtgttcggacaagccgtgaagaacgaccaatgttacgacgatatcagagtctctagggtgacctgggatagctccttttgtgctgttaatccgcgttttgtcgctatcataattgaggctagcgggggaggcgcattcctggtccttccactacacaagacaggaagaattgacaagtcctacccaactgtatgtgggcataccgggccagtattggacattgattggtgcccccataacgatcaggtgatcgccagcggatcggaagactgcactgtgatggtctggcagatccccgagaatggcctcactctgtcgcttacagagcccgtggtgatcctggaaggacattccaagagagtggggatcgtagcatggcatcccactgcgagaaacgtacttctctcagctggttgcgataatgcaatcattatttggaatgtgggaactggtgaagcactgatcaaccttgacgatatgcatagtgatatgatctacaacgtgagttag

SEQ ID NO: 113080 - DNA, 1443 bp, synthetic construct
  misc_feature 1..1443: note = Description of Artificial Sequence: Synthetic coding sequence
  source 1..1443: mol_type = other DNA
atgaggtggaaagatactatgcgcagagtcgtgcgacagagtaaattccgccacgtatttggacaggcagttaagaatgaccagtgttacgacgatattagggtgagccgggtgacatgggacagcagcttctgcgcggtcaaccctaggtttgtcgcgatcataatcgaagcctcaggcggcggcgcctttttagtgctaccattgcacaagactggaagaattgacaagtcttatccaactgtgtgtggccacactgggcccgttttggacatcgactggtgcccgcataacgatcaagtcattgcatctggatccgaggattgtaccgttatggtgtggcagatcccggaaaatggtttgacccttagtttgactgaacctgtcgtcatcctggaaggtcacagcaagcgggtgggaattgtggcgtggcaccctacagcaagaaacgtattgcttagcgcaggttgtgataacgcaatcatcatttggaacgtgggaaccggagaagcgctgataaaccttgatgatatgcacagcgatatgatctacaatgtcagctggaacaggaacggcagcctgatttgcacagcctctaaagacaaaaaagttagggtcatcgatccaagaaaacaggagatcgtggctgagaaggagaaagctcacgagggtgccaggccaatgcgcgcaatcttcctggctgacggcaatgtatttacaaccggattcagtagaatgtcagagcgccaactggctttatggaaccccaagaacatgcaggagccgatagccctgcatgaaatggatactagtaatggcgtcttgttgcccttttatgatccagacacatccatcatctacctgtgtggcaagggtgactcttccattaggtatttcgaaatcactgacgagtcaccctacgtgcactacctgaataccttcagctccaaggagccgcagaggggcatgggctacatgccgaagcgcggcctcgatgtaaataaatgcgaaattgccagattcttcaagctgcacgaaagaaagtgcgagcccataattatgacagttcccagaaaatcggacttgtttcaggacgatctgtaccccgatacagcagggcctgaggcagctttggaagcagaggagtggttcgagggcaaaaatgctgacccaatcctcatctctttgaagcatggttacattcccggcaaaaaccgagaccttaaagtggttaagaaaaacatattggatagtaaacccactgctaacaagaaatgtgatctcatcagcatacccaagaagaccacagatacagcaagcgtgcagaatgaagcaaagcttgacgaaatcttaaaagagattaaaagcatcaaggacacgatctgcaatcaagatgaacgcattagtaagctggaacagcagatggccaagattgccgcctag

SEQ ID NO: 113081 - DNA, 510 bp, synthetic construct
  misc_feature 1..510: note = Description of Artificial Sequence: Synthetic coding sequence
  source 1..510: mol_type = other DNA
atgcggagggtagttaggcagagcaagtttcgccatgtctttggtcaagctgtgaagaatgatcagtgttatgacgatattagggtctcgagagtgacttgggactcatctttttgcgcagtgaaccctaggttcgtggctattatcatcgaggcctccggaggaggagcgtttctggtactgcctttgcacaagaccggccgcattgataagtcctatcctactgtctgcggccacaccggtcccgtattagacatagattggtgcccacataacgaccaggtgatcgcctccggatccgaagactgtaccgtaatggtgtggcagatcccggagaatggcctgactctctctttgactgaaccggtggtcatcctggaaggtcactccaagagggtgggcatcgtggcttggcatcccaccgcgaggaatgtgttgctttcagctgggtgtgataatgcaatcatcatttggaatgtcggcacgggagaagccctgataaacctgtag

SEQ ID NO: 113082 - DNA, 456 bp, synthetic construct
  misc_feature 1..456: note = Description of Artificial Sequence: Synthetic coding sequence
  source 1..456: mol_type = other DNA
atgcgcagagtcgttcggcagagtaagtttaggcacgtcttcggtcaagccgttaagaatgaccagtgctacgatgacatcagagtgtcgcgtgtgacctgggactcatctttctgcgctgtgaacccgcggttcgtggccattataattgaggcaagcggcggcggcgcgttcctcgtgttaccccttcataagaccggcaggatagataagtcttatcccactgtgtgcgggcacacgggtcccgtgctggatattgattggtgcccacataatgaccaggtgatcgcctcaggtagcgaggattgtactgttatggtttggcagatccccgaaaacggcctgacattatcacttacggaaccagtggtgatccttgaaggccatagcaaaagagtgggtatagtggcatggcaccccacggcacggaatgttctactgtctgcaggggggtag

SEQ ID NO: 113083 - DNA, 492 bp, synthetic construct
  misc_feature 1..492: note = Description of Artificial Sequence: Synthetic coding sequence
  source 1..492: mol_type = other DNA
atgcgacgcgtcgtgcggcagtctaagtttaggcatgtgtttggacaggccgtgaagaatgatcagtgctacgatgacattagagtgagccgggtcacctgggactcctccttttgcgcggtgaatccacggttcgtggccattattatcgaggccagcggtggcggcgccttcctggtgctgcccctgcataagacaggcagaattgacaaaagctatcccaccgtctgtggccataccggaccagtacttgatatagattggtgtccgcataacgaccaggtgattgcctctggctccgaagactgcactgttatggtctggcagattccagaaaatgggctcaccctgagccttacagagcctgtggttatattggaaggccactccaaacgcgtgggaattgtggcctggcaccccacggcccgaaacgtgcttctgagcgcgggttgcgacaacgcaatcatcatctggaacgtgggcactggatag

SEQ ID NO: 113084 - DNA, 1578 bp, synthetic construct
  misc_feature 1..1578: note = Description of Artificial Sequence: Synthetic coding sequence
  source 1..1578: mol_type = other DNA
atgtcatggcacccccaatataggtcatctaagtttagacacgtgttcgggaaacccgcttccaaagagaattgttatgacagcgtccctataaccagaagtgtgcacgataaccatttttgtgccgttaatccccactttatcgcagtggtgactgagtgcgctggcggtggcgcttttcttgtgatcccacttcaccagactggaaaactggacccccattaccctaaagtctgcggccaccgcgggaacgtcctggatgtgaagtggaacccgttcgatgacttcgagatcgcatcttgttcagaagatgcgactattaagatctggtccatcccaaaacaactactgacacgcaacctgactgcctaccggaaggaattggttggccacgcgagacgcgtgggccttgtggagtggcatcccaccgctgcaaacatcctcttcagtgccggttatgactataaagtcatgatatggaatcttgacaccaaagagtcagttatcacttcaccaatgagcaccatttcctgtcatcaggatgtgatcctctcaatgagtttcaatacaaacgggtctctattggccaccacctgtaaggatcgaaagatccgcgtgatcgacccccgggccggaactgtgctgcaggaggcatcctataaaggacacagagcctctaaagtgttgtttctggggaatttaaaaaaacttatgagcacgggcacatcccgatggaacaacagacaggttgccctctgggatcaggataatctgtccgtgcccttaatggaggaggacctggacggcagttccggcgtgctgttccccttctatgacgctgatacgtctatgctgtatgtcgttgggaaaggcgacggaaacatccgctattatgaggtttccgcagataagccgcacctgtcttatcttaccgaatatcggagctataatcctcagaaaggtattggtgttatgcccaagagggggttggacgtcagctcctgcgagattttccgcttctacaagctgattactacaaagtcactgattgagcctatatccatgattgtgcctaggcggtctgagtcctatcaggaagatatctatcccccaaccgcgggtgctcagcccagcctgaccgcgcaagagtggttgtctggtatgaatagggatcctatcctggtgtccctcagaccagggtcagaattgcttcggccccatcctttacccgccgagagaccaatttttaactccatggctccagccagcccacgcctgctgaaccagactgagaaattggccgctgaggacggctggcgttcctcgtcactccttgaggaaaagatgccccgatgggcagccgaacaccgcctcgaagagaagaaaacctggctgactaacggatttgatgtattcgagtgtcctccacccaaaaccgaaaatgagctgcttcaaatgttctacaggcagcaagaagagatccgaagactgagagaactattaacgcagcgggaggtccaggccaaacagctcgagctcgaaatcaagaatcttcgaatggggtccgagcagttatag

SEQ ID NO: 113085 - DNA, 1578 bp, synthetic construct
  misc_feature 1..1578: note = Description of Artificial Sequence: Synthetic coding sequence
  source 1..1578: mol_type = other DNA
atgtcatggcatcctcagtaccgatccagtaaattcaggcacgtatttggaaagcccgcatcgaaagagaattgctacgattccgtgccaatcacacgctcagtccatgataaccacttttgcgcagtgaatccgcactttatcgcagtggtgaccgagtgcgcagggggcggcgccttcttagttataccactccaccaaacaggaaaattggatcctcactacccaaaggtctgcggccacaggggtaacgtcctagatgtcaaatggaacccgttcgacgactttgagatcgcaagctgttccgaagatgcaactatcaagatttggagcattcccaagcaacttctcacacgtaatcttacagcctatagaaaagagctggtaggtcacgcccggagagtggggctggtggagtggcatcctactgctgctaacatactattcagcgccggctacgattataaggtgatgatatggaacctggacaccaaagagagcgtgatcactagtcccatgtcaacgatctcatgccaccaagacgtcatcctgtctatgtcattcaataccaatggctccctgctggctacaacatgcaaagaccgtaaaatccgcgtcattgacccgagagcaggtactgttctccaggaggctagttacaagggtcaccgggcttctaaggtcctgttcctcgggaacctgaaaaagctcatgtcaactggtacttcccgctggaacaatagacaggttgccttgtgggatcaggataatctgtccgtgcccctgatggaggaggacctggacggctcctctggcgtattgttccctttctacgatgcagatacttccatgctttacgtggtcggaaagggggatggcaatattagatactatgaagtgtccgctgataagccgcatctctcgtatctcactgaataccgaagttacaacccacagaagggcataggcgtaatgcctaaacgcggcttggatgttagctcgtgtgaaatttttagattctataaactgatcactactaaaagcctaattgagcccatttctatgattgtgccccggaggtcagagagctatcaggaggacatctacccaccaacagctggagctcaaccctccttgaccgcacaggaatggctatccggcatgaaccgggatcccatcctggtctctttgcggccaggaagtgaacttctaagacctcaccctctccccgctgagaggcccatattcaacagcatggctcccgcatcacctcgactgctgaatcaaactgaaaagttggccgccgaggatggatggcgttcaagctcgttactcgaggagaaaatgcctaggtgggccgctgaacaccgtttggaggagaaaaagacttggcttacaaatgggttcgacgtgttcgaatgccccccgcccaagacagagaacgagcttttgcagatgttctataggcagcaagaggaaattcggcgtttaagagagttgctcacccaacgcgaagtgcaggccaaacagctcgagctcgaaattaagaacctcaggatggggagcgagcagctctag

SEQ ID NO: 113086 - DNA, 1443 bp, synthetic construct
  misc_feature 1..1443: note = Description of Artificial Sequence: Synthetic coding sequence
  source 1..1443: mol_type = other DNA
atgactgtcactaaaatgtcttggcgcccacagtacagatcaagtaagttcagaaatgtgtatgggaaggtcgccaaccgagaacactgtttcgacggcatacccataacgaaaaatgtccatgacaaccacttctgcgcagttaataccaggttcctggccatagtgaccgagagtgccggtggaggatcgtttctggtcatcccacttgagcagaccggaagaattgaaccgaactatcccaaagtctgcggacaccaaggcaacgtgctggacatcaagtggaaccctttcatcgataatataatagcttcctgtagcgaagatacctccgtcaggatctgggagatcccagaggggggcctgaagcggaatatgacagaggcattgctggaactgcatggtcatagccggagagtgggcctggtagaatggcaccctacaaccaataacattctcttctctgcagggtacgactataaggtcctcatatggaatctcgacgtgggcgaacccgtcaaaatgatcgactgccacaccgacgtgattctgtgcatgtcatttaataccgatggaagcctgctgactactacatgcaaggacaagaagttaagggtgatagaacctaggagtggacgggtactacaagaagccaattgcaagaatcatcgcgtgaaccgcgtggtgttcctggggaacatgaaaagactgctcaccactggagtgtccaggtggaacaccagacagattgcactgtgggatcaggaagacctgtcaatgcccctgatcgaagaggaaatcgacggacttagtgggctgctttttcccttttacgatgccgatactcatatgctctatctggctgggaaaggtgatggcaacattagatactatgagattagtaccgaaaagccttacctgtcatacctgatggagttccgatcccccgcgccccagaaggggctcggagttatgccaaaacatgggctcgacgttagtgcgtgcgaggtctttagattctacaagttagttactctaaaaggcttgatcgagccaatctccatgatcgtccctcggaggagtgacagctatcaggaggacatttaccccatgacgcccggtactgaacctgcattgacaccagatgagtggcttgggggcattaaccgggaccccgtattgatgagtctgaaggagggttacaaaaagtcctcaaagatggtctttaaagcccctattaaagaaaagaaaagtgtggtagtcaatggaatcgatctgcttgaaaacgtaccccctcgaaccgaaaacgaattattgagaatgttcttccggcagcaggatgagattcgcaggctgaaggaggagctggcgcagaaagatattcggatccgccagctgcaactggagcttaaaaatctcaggaacagcccaaagaactgctag

SEQ ID NO: 113087 - DNA, 1428 bp, synthetic construct
  misc_feature 1..1428: note = Description of Artificial Sequence: Synthetic coding sequence
  source 1..1428: mol_type = other DNA
atgtcttggcgtcctcagtatcgaagctcaaagttcagaaatgtgtacggcaaggttgccaacagagaacattgcttcgacggaatccccatcacgaaaaacgtgcacgacaatcacttctgtgcagtcaacactaggttcctcgcgatcgtcaccgaatccgcagggggggggagtttcctcgtcataccccttgagcagaccggacggatagagcctaattatcctaaggtttgtggacatcaggggaatgtccttgacatcaagtggaatccctttatcgataatattatcgcctcctgtagtgaggatacaagtgtccgaatctgggaaattcctgagggcggacttaagcgaaacatgaccgaagccctgttggaattgcacggccactcaagacgagtcgggttggtcgagtggcaccctactactaataatatcctgttctctgctggatacgactacaaggtcctgatttggaatctggatgttggagaacctgtaaaaatgatagactgccatacagacgtcattctatgcatgtcctttaataccgatgggtccctcttgacaaccacctgcaaggacaaaaagttgcgggtgatcgagccccgatcaggcagagtgcttcaggaggcgaattgtaaaaatcatagagttaacagagtggtgttcctgggcaacatgaaaaggctgctgacaacgggcgtctccaggtggaacacgagacagatagccctttgggaccaggaggacctgtccatgccattgatcgaagaggagatagacggacttagtgggctgctcttccctttctatgatgctgacacacacatgttatatcttgcaggtaagggcgatgggaacatacgttattacgagatatccaccgagaagccttatctatcctatttgatggaattcagatccccagctccacagaaagggctgggagttatgcctaagcacgggttagacgtgtcggcttgtgaggtgtttcgtttctataagctcgtcactctgaagggactcattgagccaatatcaatgatcgtcccacggcggtctgactcctatcaggaggacatttatccaatgacaccaggtaccgaacctgcgcttacacctgacgagtggctcggagggattaatagggaccccgtcttaatgtcactgaaggaagggtacaagaagtccagcaagatggtctttaaggctcccattaaggagaaaaaatccgtggtggtgaacgggattgatctcctagaaaacgtgcccccaaggaccgaaaacgagctgctgagaatgttcttcagacagcaggacgaaatacggcgactgaaggaagaattggcccaaaaggacatcagaatcagacagttacaactggagttgaagaacctgcgaaattcccctaagaactgctag

SEQ ID NO: 113088 - DNA, 1428 bp, synthetic construct
  misc_feature 1..1428: note = Description of Artificial Sequence: Synthetic coding sequence
  source 1..1428: mol_type = other DNA
atgagctggcgtccacaatatcggtctagcaagtttcgcaatgtatacgggaaggtggccaacagggagcattgtttcgacgggatccccattacaaaaaacgtgcatgataaccatttctgtgctgttaatactcggttcctcgccatagtgaccgagtctgccggaggcggatcttttcttgtgattcccctggaacagacaggcagaattgaacctaactaccccaaagtctgcggccatcagggtaatgtgctggatataaaatggaatccctttattgacaatatcattgcatcatgctcagaggacacatctgtaagaatctgggagatacctgaaggcggattgaaacgaaacatgacagaggccctcctggagcttcatgggcatagcaggcgcgtcggattagtggagtggcacccaactacaaacaacattcttttcagcgccggttatgactataaagtattgatttggaaccttgatgtgggggagcccgtgaagatgatcgattgtcacacggacgtgatactctgcatgtcttttaatacggacgggtctttgttaaccactacctgtaaagacaaaaaattgcgggtgatcgaacctagatccggccgcgtactgcaagaagccaattgcaaaaaccatcgggtgaatcgcgtcgtgtttctgggaaatatgaagcgcctccttaccacgggagtctcaaggtggaacaccaggcaaatagccctgtgggaccaggaagatctcagcatgcctctgattgaggaagaaatcgacggactgtccggccttctctttccattttacgatgccgacactcatatgttatacctggccggtaaaggagatgggaacattaggtactacgaaatctctacagaaaaaccttacctgtcctacctgatggagtttaggtcacccgccccacagaagggacttggggttatgcctaagcacggcctggacgtgtcggcctgtgaggtgttcagattctacaagctcgtaacactgaaagggctgattgaacctattagcatgatagtacctagacgctcagattcttaccaggaagatatatatccaatgacgcctggaaccgaaccagcgctgacacctgacgaatggctgggcggaattaaccgtgacccagtcttgatgagccttaaagaagggtataagaaatccagtaaaatggtgtttaaggcccctattaaagaaaagaaatcagtagtagtgaatggtattgaccttctggagaacgtccccccaaggacagagaatgagttgctcaggatgttctttcggcaacaggacgagattagaaggctaaaggaagagttagcgcagaaggatattcgcatccgccaactacagctcgaacttaaaaacctgcgtaatagtcccaagaactgctag

SEQ ID NO: 113089 - DNA, 4992 bp, synthetic construct
  misc_feature 1..4992: note = Description of Artificial Sequence: Synthetic coding sequence
  source 1..4992: mol_type = other DNA
atggccacagacggggccagctgcgagcccgatctgagccgcgcacccgaagatgcagcaggcgctgctgccgaagcagctaaaaaagagtttgatgtcgatactctttcaaagtccgaactgcgcatgttactgagcgtcatggagggcgaactcgaagctcgcgacctagtgatcgaggccctgagggcccggaggaaagaagtttttattcaggagagatatggaaggttcaatctgaatgatccttttctggcccttcaacgggactatgaggcaggagcaggggataaagaaaaaaaacccgtgtgcactaacccgctgtccatcctggaggcagtcatggcacactgcaaaaaaatgcaggagcggatgtccgcccagctcgcagctgctgaaagtcggcaaaaaaaactggaaatggaaaaactgcagctccaggccctggagcaagagcacaagaagctggcagcacgattagaggaggagcgagggaagaacaagcaggtggtgttgatgcttgtgaaggaatgcaaacagttatccgggaaagttattgaagaagcccagaaattagaagacgtcatggcgaaacttgaagaggaaaagaaaaaaaccaacgaacttgaggaggagctttctgccgaaaaacggaggtcaactgagatggaggcccagatggagaagcaattatccgaattcgatacagaaagagagcagctgcgggcaaagctgaaccgcgaggaagctcatacaactgacctcaaggaagaaattgacaagatgcggaagatgattgagcagctcaagcgcggctcagacagcaagccatcgctctctctgccccggaagacaaaggaccggcgcctggtctcaattagtgtaggcaccgaggggacagtgacaagaagtgtggcctgccagactgatctggtcacagagaatgctgaccatatgaaaaaacttccattgaccatgccagtgaagccttccaccggatcacccctggtgtcagctaacgctaaagggagtgtgtgcactagcgccacaatggctcgacctgggattgaccgacaggcgtcatatggggacttaattggagcctctgtccctgctttcccaccgccttccgcaaataaaatcgaagaaaacggcccatctactggcagcacccccgatccaactagttccacccctcctctcccatccaatgccgcccccccaacagcccagacccctgggatagcgccccagaattcccaggccccccccatgcactccctgcactccccatgcgccaacacctcacttcaccctggcctcaacccacggatccaggctgccaggtttcgatttcagggaaacgctaatgacccagaccagaatggtaatacaacccagtctcccccctcgagggatgtttctccaacgagccgagataatctcgtagccaagcagcttgccaggaatactgtgacacaggccctgagcaggtttacctctccccaagccggagccccctctcgccctggcgtaccgcctacaggggacgtcggcacacacccaccggttggacgtacatctctcaagacgcacggtgtagccagggtggaccgcggcaaccctcctccgatccctcccaaaaagccagggctgtcccaaaccccctcaccacctcatcctcaattaaaggtcattattgattccagcagagccagcaacactggtgctaaggtggataacaagaccgttgccagcactccttcttctctgccccagggcaatagagtcataaatgaagagaacttgcccaagtcgagcagcccacagctcccaccgaagccttctattgacctgacggtggcgcccgctggctgcgctgtctctgccctggccaccagtcaggtgggggcctggccggccgccacacccggactcaaccagccggcttgttccgactcatccttagtgataccaacaacaattgcattttgtagtagtatcaaccccgtctctgcttcctcctgccgcccgggggccagcgactcactcctggtgaccgcctccgggtggtccccgtctcttaccccacttctgatgagtggggggcccgctccactggccgggcgtccaacacttctccagcaggctgctgcccagggtaatgtgaccctgctgtctatgttactcaatgaagagggccttgacataaactatagttgcgaagacggccacagcgcactctacagcgccgccaaaaacggacataccgattgtgtgcgcctgctcctgtcagcagaggcccaggttaacgccgcagataaaaatgggtttaccccgctctgcgcggcagccgcacaggggcacttcgagtgcgtcgagctcctcatctcctacgatgccaacattaaccacgccgccgatggtggccagactccactgtatctggcctgcaagaacggcaataaagagtgtattaaactactgctggaggcaggtaccaacagatccgtgaaaaccaccgacggttggacacccgtgcacgccgccgtcgataccggaaatgtagacagccttaagctccttatgtatcaccgaatccctgctcatggaaactctttcaatgaggaggaatccgagagcagtgtgttcgacctcgatggcggtgaggagtccccagagggcattagcaagccagttgtccccgccgatctgattaatcatgccaaccgggaaggctggaccgctgcccatatagccgcctctaagggctttaaaaattgtctggagattctctgccggcatggtggcctggaacctgagaggcgagacaaatgcaataggaccgtgcatgatgtggccacagatgattgcaagcacctccttgagaaccttaatgccctgaagatcccgctgagaatctcagttggcgaaattgagccatcaaactatggtagcgacgacctggagtgcgagaacacaatttgtgctctgaacatccgtaagcagacatcatgggatgacttttctaaagccgtgtcccaggcactgactaaccactttcaagctattagttcggacggatggtggtctctagaagatgtcacgtgcaacaatacaacagactcgaatattggtctgagcgctcgaagcatccgcagcatcaccctgggcaacgtgccttggtctgtggggcagagcttcgcccagagcccctgggattttatgcgtaaaaacaaggccgaacacatcacagtgctgctgagtggtcctcaggaaggatgcctgtctagtgtcacctatgccagtatgatccccctgcaaatgatgcagaattacttgagactggtggagcagtatcataacgttattttccatggaccagagggcagcttgcaggactacattgtccaccagctcgctctgtgtttgaagcatagacagatggcggctggattctcttgcgaaattgtacgggctgaggtggatgccgggttttcaaaagagcagttactggaccttttcatctcttcagcttgtctcatacctgtaaagcagtcaccatctaagaagaaaattataatcattctggagaatcttgagaagtcaagcctttccgagttgctgagggactttctggctccactcgagaatcggtccaccgagtcaccttgtactttccagaaagggaacgggttgagtgagtgttactactttcatgagaactgctttcttatgggcaccatcgccaaagcctgtctccagggctcagatctgctcgtgcagcagcactttcgctgggtccagctcaggtgggatggcgagcccatgcaaggcctcttgcagcgattcttgagaaggaaggtggtgaacaaattcaaaggtcaggctcctagcccatgtgacccagtatgtaaaatcgttgattgggcactgagtgtttggcgacagctgaacagctgtctagcacgcctcgggactcccgaggcgctgctaggcccgaagtacttcctgagctgccctgttgtccccggccatgctcaggtaacggtgaagtggatgtcaaaattgtggaatggagttattgccccacgagtgcaggaggccatcctgtcccgcgctagtgtcaagaggcagcctggatttgggcagactacggcaaagaggcatcccagccaagggcagcaagccgtagtaaaagcggcactctcgatcctgctcaacaaagcggtgctccacggctgtcctttaccaagagctgagcttgaccagcacaccgctgacttcaagggcggttccttcccgctttcgatagtttcgtcctataatacctgtaacaagaagaagggagagtccggcgcgtggcgcaaggtaaacacatcaccacggagaaaaagtgggagattctccctcccaacatggaacaagcccgacctttccaccgagggtatgaagaacaagacaatctctcagcttaactgtaatcggaacgccagcctaagcaaacaaaaatccctcgagaacgacttatccttgactctcaatctggatcagaggctatctttgggatccgatgacgaagcggacttggtgaaggagctgcaatcgatgtgctctagcaaaagcgaaagcgacataagcaaaatcgccgattcccgagatgacctgcggatgtttgacagcagtgggaataaccccgttctgagcgccacaatcaacaatttgcgcatgcccgtgagtcaaaaggaggtctccccactctcttcccaccagacaactgagtgctcaaatagcaagagcaagacagaacttggtgtgtccagagtcaagagcttcttgcctgtgccacggagtaaagtcactcaatgctcacaaaacacaaagcgcagctcctcatcttccaatacgagacaaattgagatcaataataatagcaaggaggtaaactggaacctgcataagaatgaacatttggagaagcctaataaatag

SEQ ID NO: 113090 - DNA, 249 bp, synthetic construct
  misc_feature 1..249: note = Description of Artificial Sequence: Synthetic coding sequence
  source 1..249: mol_type = other DNA
atgtcggctacatggacacttagccctgaaccactcccaccaagcaccgggcctcccgtcggcgccggcctggatgccgagcagaggaccgtatttgctttcgtactgtgtctgctagtggtcctggtgttgctcatggtcagatgcgttcgcatcctcctcgatccttacagtaggatgcctgcctcaagctggactgatcacaaggaagctttggagagaggccagtttgattacgccctggtgtag

SEQ ID NO: 113091 - DNA, 969 bp, synthetic construct
  misc_feature 1..969: note = Description of Artificial Sequence: Synthetic coding sequence
  source 1..969: mol_type = other DNA
atgtcgccaaatttcaagctgcagtgtcattttatacttatctttctgactgcccttaggggggaatcgcgatatctcgagttacgggaggcggccgattacgatcccttcttactgtttagtgcaaatcttaaaagggagctagctggggagcagccatacaggagggccctgcggtgtttggatatgctgtctctacaagggcaatttacatttactgctgatcgacctcagttgcactgtgccgccttctttataagcgaacccgaggaatttatcaccattcattacgatcaggtgagtatcgactgtcaggggggagattttctgaaggtgttcgacggctggatactgaagggtgagaaattcccaagcagccaggaccacccactgcccagtgccgaacgttacatcgacttttgtgagagtggactgagtagaagatccattaggagcagtcagaacgtggctatgatcttcttccgagtgcacgagccaggcaatggattcaccctcactatcaagaccgacccaaatctgttcccttgtaatgtaatatctcagactccaaacggcaaattcactttggtcgtcccccaccagcacagaaattgctcattttctattatctatcctgttgtaattaagatcagcgatttaacattaggacatgtgaacggcctgcagctgaagaagtcttccgcagggtgtgaaggtatcggagatttcgtagaactgctggggggaaccggcttggaccccagcaaaatgaccccgctagccgatttgtgttatcccttccatggaccagcccaaatgaaggtgggctgcgacaacactgtcgtcaggatggtgtcttctgggaagcacgtcaatcgcgttaccttcgaatacagacagttggaaccatacgaactggaaaatcccaacggcaattcaattggagagttctgtcttagtggcctgtag

SEQ ID NO: 113092 - DNA, 723 bp, synthetic construct
  misc_feature 1..723: note = Description of Artificial Sequence: Synthetic coding sequence
  source 1..723: mol_type = other DNA
atgagtcccgaagtccaccagagcaacgttggctggtgtcgacttgttacagctgcctacaactactttcacgtgacaaatttcttttggatgtttggcgagggttgctatttgcataccgctattgttctcacgtattcgacagaccgacttcgaaaatggatgttcatttgtattggatggggcgtcccatttcccattatcgttgcatgggcaatcggaaagttgtactacgacaatgaaaagtgttggtttggcaaaaggccaggggtctatacagattacatatatcaaggaccaatgattctagtgttgttgatcaatttcattttcctgtttaatattgtccgcatacttatgactaaactccgggccagcaccacttctgaaaccatccagtaccggaaagctgtgaaagccacactcgtcctgctcccactgctggggatcacctatatgctttttttcgtcaatcccggcgaggatgaagtgtcacgggttgttttcatctattttaactcctttctagaatctttccaaggattttttgtgagtgtgttttattgcttcctgaatagcgaggtgcgcagcgctattagaaagcgatggcacagatggcaagataaacattcgatccgggccagggtggcgcgcgccatgtctatacccacatctccaacacgagtcagcttccactcaattaaacagagcaccgctgtctag

SEQ ID NO: 113093 - DNA, 1248 bp, synthetic construct
  misc_feature 1..1248: note = Description of Artificial Sequence: Synthetic coding sequence
  source 1..1248: mol_type = other DNA
atgggtggacacccccaactgaggctggtcaaggctctcctgctcctgggcctcaaccctgtgtccgcatctctccaggatcagcattgtgaatccctctctctggcctctaacatctctgggctccagtgtaatgccagcgtggacctgatcgggacttgttggccacggtccccagccgggcagctggttgtaaggccctgtcccgccttcttctatggggttagatacaacacaacaaataatggataccgagagtgtctggcgaatggcagttgggctgcccgagtgaactattctgaatgtcaggaaatcctgaacgaagagaagaagtcaaaagtgcattatcacgtggccgtgatcatcaactacctcggccactgcatcagtcttgtggccttgcttgtggcttttgtcctgtttttgcgtctgaggtctattagatgtctaagaaacattattcactggaatcttatttcagccttcatccttcgcaacgccacatggttcgtggtgcagctgactatgtcgccagaagtacaccaatctaacgtggggtggtgccgcttagttaccgccgcatacaactattttcacgttacaaacttcttttggatgttcggagaaggctgctacctacacactgccattgtgctcacttactcaaccgatcggcttagaaaatggatgtttatttgcattggctggggtgtgcctttccccatcatcgtagcttgggcgatcggcaaactgtattatgacaacgagaagtgttggttcggcaagcgccctggcgtgtatactgattacatttaccaaggacctatgatcttggtgctcctgattaactttatctttttgtttaatatcgtccggattctcatgaccaaactgagggccagcaccaccagcgagacgattcagtaccggaaggccgtcaaggccacactggttctgctgcctttgttgggaataacctacatgcttttttttgttaaccccggcgaggacgaggttagcagggtggtgttcatctactttaactctttcctggagtctttccaaggattcttcgtaagcgttttttattgttttttgaattccgaagtgcgatccgccattaggaaaaggtggcacaggtggcaagacaagcattccattagggcaagagttgcgcgtgcaatgagcatccctacctcccctacgagggtgagtttccacagcatcaagcagagcacagccgtgtag

SEQ ID NO: 113094 - DNA, 858 bp, synthetic construct
  misc_feature 1..858: note = Description of Artificial Sequence: Synthetic coding sequence
  source 1..858: mol_type = other DNA
atggtgagcgccacgattcctcagaaaaaatccaaggtccattatcatgtggccgttatcatcaactatttagggcattgcatatctttggtcgcgctgctggtggctttcgttctgttcctgcggctcagatcaatccggtgcctaagaaatataatacactggaatctgatctctgcttttatccttcgaaatgctacatggtttgtcgtccaattgaccatgtccccagaggtccaccagtctaatgtggggtggtgtcgattggtgactgcagcctacaactactttcacgttacaaacttcttttggatgttcggtgaaggatgctatctgcacacggccatcgtcctgacatactctacagacagactgagaaagtggatgtttatttgcatcggatggggcgtgccgtttccgattattgtggcctgggcgattggaaagctatactatgataacgagaagtgttggtttgggaagcgacctggcgtgtataccgactacatctaccaggggccaatgatcctggtcttattgatcaatttcatcttcctctttaacattgtgcgcatcttgatgacaaagctccgtgcctctaccactagcgagaccatccaatacagggccagcctgtgcctgtgttccacggtatctagcatcgtgagatctgtactaccctctggccgaggcggcactggcggaaggacctcaacaagaagtgtgcctgaatggccagtgccctgtccgtcaccacctccgcagcctgtctctgcctttaccgcttcctcctctccacaacagtcagagctggccggccatggggcagcacccaaagaactgtggctgggtggatag

SEQ ID NO: 113095 - DNA, 1206 bp, synthetic construct
  misc_feature 1..1206: note = Description of Artificial Sequence: Synthetic coding sequence
  source 1..1206: mol_type = other DNA
atggggggccatcctcagctgagactcgttaaagcgcttctcctgctggggttgaaccccgtgtctgcatctctgcaggatcaacattgtgaaagcctgagtttggcaagtaacatatctgggttgcagtgtaacgcctcagtcgatctgattggcacttgctggccccgctctcctgctggacaattggtggtaaggccatgtccagcctttttctacggagtccgctataacactaccaacaatggttatcgggagtgtttagccaacggctcttgggcggctagagtgaattattctgagtgccaggaaatattaaatgaagaaaaaaagagcaaagtccactatcacgtagctgtgatcattaactatctgggccattgtatatctctcgtagctttattggtggccttcgtgctattcctccgactccgctccatccgctgcctcagaaatatcatccactggaacttgataagcgccttcattctaaggaacgccacctggtttgttgttcagctgaccatgagtcctgaggtgcaccagtccaatgttggatggtgccgactggtgaccgcagcctataactattttcacgtgactaactttttctggatgttcggtgaagggtgctatctgcacacagccatcgtactgacctatagcaccgatcgtctgagaaagtggatgttcatctgcattggatggggtgtgcccttccccattattgtggcatgggcaatcggcaagctatactacgataatgaaaagtgttggtttggaaagaggcctggcgtttatactgattacatctaccaggggccgatgatacttgtgctcttaataaatttcatcttcctttttaatattgtgagaatcctcatgacgaaactgcgcgcttccactaccagtgagactattcagtatcgcaaagcagtgaaggcaaccctggtcctcttaccgttacttggcatcacatacatgctgttcttcgttaatcctggcgaagatgaagtaagtcgagtagtcttcatctacttcaattctttcctggaatctttccaggtacgttccgctatccggaagaggtggcaccgatggcaagataagcattccattcgagctagggtggcaagggcaatgagcattccaacatcccccacacgggtctcgtttcactccattaaacagagtaccgcggtgtag

SEQ ID NO: 113096 - DNA, 1128 bp, synthetic construct
  misc_feature 1..1128: note = Description of Artificial Sequence: Synthetic coding sequence
  source 1..1128: mol_type = other DNA
atgggggggcacccccagctcaggcttgtcaaggccctcttattgcttggtctaaacccagtgagcgccagcttacaggaccaacactgcgagagcctttccctggcatccaacatctccgacaacggatacagagagtgtttggctaatggttcctgggccgcgcgcgtgaactactcagagtgtcaggaaattctcaatgaagagaagaaatccaaagtccactaccatgtggcggtgatcattaactatctgggacattgtatttcacttgttgcccttttggttgcttttgtccttttcctgcgcctgaggtctatccggtgcttgcgaaatatcattcactggaatctgatatctgcttttattctgcggaacgcaacttggttcgtcgtacagttaaccatgtccccagaagtacaccaatctaatgtgggctggtgccgactggtgaccgctgcttacaattactttcacgttaccaactttttttggatgtttggggaaggctgctatcttcacactgctatcgttctgacctatagcacagatcgcctgagaaaatggatgtttatctgcattgggtggggcgtgccctttccgattatcgtggcctgggcaatcgggaagctctactatgataacgaaaagtgttggtttggcaagcgccctggcgtgtacactgattacatttaccaggggcctatgattttggttctgctgattaatttcatttttctgttcaatattgtgaggatcctgatgacaaaactgagagctagtaccaccagcgaaacgatccagtatagaaaggcagtgaaagccacacttgtactgctcccactgcttggaattacatacatgttatttttcgtcaaccccggcgaagatgaagtgagccgggtggttttcatctacttcaacagtttcttagaaagcttccaaggcttttttgtatccgtcttctattgcttcctgaactccgaggtgcgctccgccatcaggaaacgatggcatagatggcaagacaaacatagtatccgcgctcgggttgctcgggccatgtctattcccactagccctacccgggtgtcgttccattcaataaagcaatccaccgctgtgtag

SEQ ID NO: 113097 - DNA, 1335 bp, synthetic construct
  misc_feature 1..1335: note = Description of Artificial Sequence: Synthetic coding sequence
  source 1..1335: mol_type = other DNA
atgggtggacaccctcagctgagactcgtgaaggcccttctgctcctgggtcttaacccagtctctgcatcactccaggatcagcactgcgaatcgctctctcttgctagtaatatttccggcttacagtgcaacgcctcagttgacctcatcggcacctgttggccccgctcccctgctggtcagttggtcgtgaggccttgccctgctttcttctacggcgtgagatacaacacgactaataacggctaccgagagtgtctcgcgaacggtagctgggccgcacgcgttaactactccgagtgtcaggagatcctaaatgaggagaaaaaatctaaggtgcactaccacgtagccgttatcataaattacttgggccactgcatctccttggtggccctgctcgtggctttcgttctattcctcagactccgcccagggtgtactcattggggggatcaggccgatggcgcattggaggtgggtgcaccgtggtctggcgcaccttttcaagtgaggcgctcgattcggtgcttaagaaatattattcactggaatctcatatcggcgtttatactgcgcaacgccacatggttcgtcgttcaattgacaatgtctcccgaggtacaccagtccaatgtcggctggtgtcggctcgtgacagccgcgtataattattttcacgtcactaacttcttttggatgttcggtgaaggatgctaccttcataccgccatcgtgttgacctattctacagaccgtttacgcaaatggatgtttatctgcatcggatggggcgttccctttcctattattgtagcctgggccatcggtaagttgtactatgataacgagaagtgttggttcggcaagaggccgggagtatatacagactatatctatcagggacccatgatactggtgctgctgattaactttatctttcttttcaatatcgtgcgtattttgatgaccaagctacgcgcaagcactacctcagaaaccatccagtatcgcaaggctgttaaggcaaccctcgtgctcttacccctgctcggtatcacctatatgcttttttttgttaaccctggcgaggatgaggtcagccgtgtcgtcttcatttacttcaatagctttctagagagcttccaggggttttttgttagcgtcttttactgtttcctgaactccgaggtccgaagcgcaattaggaaacggtggcataggtggcaggacaaacacagcattagagctcgtgtcgccagggccatgagcataccaacttcccccacaagagtgtcttttcatagcatcaagcagagcacagccgtctag

SEQ ID NO: 113098 - DNA, 114 bp, synthetic construct
  misc_feature 1..114: note = Description of Artificial Sequence: Synthetic coding sequence
  source 1..114: mol_type = other DNA
gtctatacagactatatctacttcaattcatttcttgagtcatttcagggcttctttgtctctgtgttttattgttttctgaatagtgaggtccgttctgccatccgcaagtag

SEQ ID NO: 113099 - DNA, 1206 bp, synthetic construct
  misc_feature 1..1206: note = Description of Artificial Sequence: Synthetic coding sequence
  source 1..1206: mol_type = other DNA
atgggcggacatccccagcttaggctggtcaaagccctgctgctcctgggcctcaaccctgtgtctgcttccttacaggatcagcactgtgaatcactctcgctggcatccaatatcagcgggctgcagtgcaatgcttccgttgatttgatcggaacctgctggcccagaagcccagccgggcaactggtggtgcgaccctgccctgccttcttctatggcgttcggtataacactacaaacaacggatacagagagtgtctggccaatgggtcttgggctgcacgcgtaaattactcagagtgccaggagattttgaacgaggagaagaaaagtaaagtgcactatcatgtggctgtcattatcaactacctgggacactgtatctctctggtagccttgctagtagcattcgtccttttcctccggctgcgatcgatccgctgtttgcgaaacatcattcactggaatcttatttccgcctttatactgcgcaacgctacctggtttgtcgtacagctaaccatgtcacctgaggtgcatcagagcaatgttggctggtgccgcttagtcaccgctgcctacaactatttccatgtgaccaacttcttttggatgtttggggagggctgttacctgcacacagccatcgtcttaacctacagcacagatagactgcgcaagtggatgtttatctgtatcggatggggcgtgcccttccctatcatcgtagcctgggctattgggaaactgtactatgacaatgagaagtgttggtttggtaaacgtccaggggtctacactgattacatttatcagggacctatgattctggtgctcctaataaactttatattcctctttaatattgtgcgaatccttatgactaagcttagggcgagcaccactagcgaaacgattcagtatcggaaggctgtcaaagcaactttagtcctgctgccactcctgggcattacttacatgctctttttcgtcaaccccggggaggacgaagtttctcgggtggtctttatatattttaattctttcctggaaagtttccaggtacgttccgccatccgcaaaagatggcacagatggcaggacaagcacagcatcagggctagggtggcacgggccatgagcataccgacatctccaacacgggtcagcttccattccattaaacagtctactgccgtttag

SEQ ID NO: 113100 - DNA, 1194 bp, synthetic construct
  misc_feature 1..1194: note = Description of Artificial Sequence: Synthetic coding sequence
  source 1..1194: mol_type = other DNA
atgggccgcgaaccttggccagaagatagggatctaggctttccccaattgttttgccaggggccctattcctactgtaacacgacccttgatcagatcggaacctgttggccgaggagtgcagctggagcactcgtggaaaggccttgtcccgaatactttaacggagtgaaatacaatacaacgcgtaacgcctatcgggagtgcctggaaaatggaacctgggcctctaagataaattattctcagtgcgaacctattctggatgacaagcaacgcaagtatgacctccattaccgaattgcactcgtcgtgaactatcttggccactgcgtgagtgtggccgccctcgtcgccgcctttctgcttttcttggccttacgctcaatccgctgtctacgaaatgtaatccactggaatctcatcactaccttcatcctgagaaacgtcatgtggttccttctccagctggtggaccatgaagttcatgagtctaatgaagtatggtgccgctgcattaccaccatcttcaactactttgtggtgacgaattttttttggatgttcgtcgaaggatgctatctgcacacagccatagtgatgacctactccacagaacgcctgaggaaatgcttattcctgttcatcgggtggtgcatcccattccccataatcgtagcgtgggctatcgggaaactgtactacgaaaacgagcagtgttggtttggcaaggagcccggggatctcgtggattacatttaccagggaccgattattctggttttattgattaactttgtgtttctcttcaatatcgtacggatcctgatgacaaaactacgagcctctacgactagtgaaaccattcagtatagaaaagccgttaaggcaactctcgtactgctgcctctgttggggataacctacatgctgttctttgtcaacccaggggaggacgacctgtcccaaattatgtttatctatttcaactccttcctacagtccttccagggcttctttgtgtcagtattttactgtttcttcaacggcgaagtgagatctgctgttcggaaacgctggcacagatggcaggatcaccactccctgagagttccaatggcaagggccatgtcgatacctactagtcctacacgcatctcttttcactccatcaaacagacagctgcagtatag

SEQ ID NO: 113101 - DNA, 1317 bp, synthetic construct
  misc_feature 1..1317: note = Description of Artificial Sequence: Synthetic coding sequence
  source 1..1317: mol_type = other DNA
atgcggggccccagtggccctccagggctgctgtatgtgccgcacttgctcctgtgtttactttgtctcttgcctccccctctgcagtatgcagcaggtcaaagtcaaatgccaaaggatcagccactttgggcactgctcgaacagtactgccatacgattatgacgcttacgaacctcagcggaccctacagctattgtaatactaccctggaccagattggaacgtgctggccgcgcagcgcagctggcgcacttgtggagaggccctgtcctgaatatttcaatggcgtgaagtataatacaacacgcaatgcgtaccgtgaatgccttgagaatggtacctgggcctccaaaatcaattattcccagtgcgagcccatcctcgatgataagcagagaaaatatgacttgcattaccgcatcgcccttgtcgtgaattatctgggtcactgcgtgtccgtcgctgcgctggtggctgcattcctgctctttctggccctaagatcaatacggtgcttgcggaacgtcatccactggaatctgatcacgacattcatcctgaggaacgtaatgtggttcctcctccagcttgtggatcatgaggtccatgaaagcaacgaggtctggtgtcgatgtattacaaccatttttaattatttcgtggtgaccaattttttttggatgttcgtggaagggtgctatttacacaccgctatcgtgatgacctactcaaccgaaaggctacggaaatgccttttcctgtttataggctggtgcattcctttccccatcattgtggcctgggcgattggaaagctgtactatgagaacgaacaatgctggtttggcaaggagcctggcgacctagtagactatatctaccagggacctattatcctggtacttctcattaacttcgtttttctgttcaacatcgtaaggattttgatgacaaagcttcgcgcctctacaacttccgaaactatccaatataggaaggctgtaaaggccaccttagtgttgctgccactgctgggaatcacatatatgctgttcttcgtaaatcctggcgaagacgacctgtcccagataatgttcatttatttcaactctttcctacagtcttttcagggattcttcgtttctgtattttattgtttttttaacggcgaggttagatctgctgtcaggaagaggtggcaccgttggcaggatcatcattctctgcgagttcctatggctagggccatgagtatcccaacatcgcccacaaggatttcattccatagtataaaacaaacagccgccgtttag

SEQ ID NO: 113102 - DNA, 1236 bp, synthetic construct
  misc_feature 1..1236: note = Description of Artificial Sequence: Synthetic coding sequence
  source 1..1236: mol_type = other DNA
atggacgccgccttgctccattcattacttgaggccaactgctcattggccctagccgaggagctgttactcgatggctggggaccaccgctggacccagaaggaccatatagctattgcaatactactttagatcagatcggaacgtgttggccaagaagcgctgcaggggcgcttgttgagcgtccttgtcccgagtacttcaacggggtgaagtacaacactacccgcaatgcctaccgggagtgcctcgagaatggcacctgggcttcgaagataaactattcccagtgtgagccgatccttgatgacaagcagaggaagtacgatctgcactatcggatcgccttggtagtgaattaccttgggcattgcgtctctgtcgccgctttggttgccgcctttctgctgtttctggccctccgatcgatcaggtgtctccggaacgtgatccactggaatctgattacaactttcattctcaggaacgtcatgtggtttctgctgcagttggtggatcacgaagttcatgagtccaacgaagtgtggtgtagatgcattaccacaatcttcaattatttcgtggtgaccaatttcttttggatgtttgtcgaaggctgctacttgcatactgcgatagtaatgacttatagtacagaacgccttcggaaatgcctcttcctgtttatcgggtggtgcatccctttccccatcatcgtggcttgggctataggcaagctctattatgagaacgagcaatgttggttcggcaaggagccgggcgatctggtagactacatctaccagggccctattattctcgtgctgcttatcaattttgtcttcctcttcaacatagtgagaattttaatgaccaaactcagggcttccacaacctctgaaacaatccagtaccgtaaggcagtgaaggcaactctcgtcctcttaccactgcttggcatcacttacatgttgttctttgtcaaccctggcgaagacgacctgagtcagattatgttcatatattttaattcctttcttcaatcctttcagggcttcttcgtttccgtattctactgcttctttaatggagaggtgcgctccgcagtgcggaagcgttggcatagatggcaggatcaccactctctccgggtgcccatggcgagagccatgagcatacctactagccccacccggatctctttccacagcattaagcagacggccgctgtgtag

SEQ ID NO: 113103 - DNA, 1113 bp, synthetic construct
  misc_feature 1..1113: note = Description of Artificial Sequence: Synthetic coding sequence
  source 1..1113: mol_type = other DNA
atggatgcagcgcttctgcatagcctgctggaggctaattgtagcctggccctggcagaagagctattgctggatggttggggccccccactcgacccggaaggaccttatagttattgtaataccacactggaccagatcggcacttgctggccaagatccgctgccggcgctttagtggaacggccatgtcccgagtacttcaacggggtaaaatataacaccacacgtaacgcttaccgcgagtgtctggagaacgggacctgggcaagcaaaatcaactattctcagtgcgaacccattctggacgacaaacaacgcaaatatgatctgcattacaggatcgccctggtggtgaattacttggggcattgcgtctctgtggcagctctggtcgctgcctttttactgttccttgctctgcggtcgatcagatgcctgcggaacgtcatccactggaacttgatcaccacgtttattctccgaaatgtgatgtggtttctactgcagctggttgatcacgaagtccatgaatccaacgaggtgtggtgtaggtgtatcaccaccatcttcaactactttgtggtcacgaattttttctggatgtttgtagaggggtgctatctacacaccgcgatcgttatgacctactctaccgagagactgcgcaagtgtctattcctgttcatcggctggtgtatcccatttcctatcattgtggcctgggccatcggtaaactctattacgaaaacgaacagtgttggttcggaaaagaaccaggagacctagttgactatatttaccagggcccaatcattctggttctattaatcaacttcgtgtttctcttcaacattgtccggatcctcatgacaaaactgagagccagtacgacctctgaaactatccagtatcgcaaagccgtgaaggccactctggtgttactccccttgctggggatcacatacatgctgttcttcgtaaaccccggggaggatgatctgtcccagattatgtttatctatttcaatagtttcctacagtcgtttcagggatttttcgtatccgttttttactgtttctttaatggagaaggactggagccagtatag

SEQ ID NO: 113104 - DNA, 468 bp, synthetic construct
  misc_feature 1..468: note = Description of Artificial Sequence: Synthetic coding sequence
  source 1..468: mol_type = other DNA
atgtatcgacataagaactcctggagactgggactgaaataccccccttcctccaaggaggaaacacaggtccctaagaccctgatctctggactgcctggacggaaatcatccagtcgtgtaggtgagaagttgcagtcagcccacaagatgccgctgagtcccggacttctcctgctgttgttgtccggcgccacagcaacggccgctctgcctctagaaggagggcctaccggaagagacagcgaacacatgcaggaagccgcagggataagaaagtcctcactgttaacgttcttggcatggtggttcgagtggacaagccaggcctccgcaggaccgttgattggcgaagaagcacgcgaagttgcccggcgccaggaaggcgctcctccccagcaatccgcaaggcgggaccgaatgccgtgccggaacttcttttggaagaccttttcatcatgcaagtag

SEQ ID NO: 113105 - DNA, 318 bp, synthetic construct
  misc_feature 1..318: note = Description of Artificial Sequence: Synthetic coding sequence
  source 1..318: mol_type = other DNA
atgcctctgagtccaggcctgcttttgctgctcctcagtggcgccacagcgaccgccgccctgcctctcgaaggtgggcctactggcagggattcagagcatatgcaggaggcagccggcattagaaaatccagcctgttgacgtttttagcctggtggttcgaatggacctcacaggcaagcgccggacctctcatcggcgaagaggctcgcgaagtcgcccggcggcaggagggagctccaccacagcagagcgctagacgcgacaggatgccttgtagaaactttttttggaaaactttctcttcatgcaagtag

SEQ ID NO: 113106 - DNA, 1332 bp, synthetic construct
  misc_feature 1..1332: note = Description of Artificial Sequence: Synthetic coding sequence
  source 1..1332: mol_type = other DNA
atggcggcttcacctcacacactatctagtaggcttcttaccggctgcgttggaggatccgtgtggtaccttgaacgccgaaccatacaggatagcccccacaaattccttcatctgctgaggaatgtaaacaagcaatggatcactttccagcactttagtttcctgaagaggatgtatgtgacccaactcaatcgatcccacaatcaacaagtgcgtcccaaaccggagcccgtggcatccccatttctggaaaaaacaagcagtgggcaggcaaaggcggagatctatgaaatgaggccattgtcacccccttcccttagcctgtcacgaaaacccaacgaaaaagaacttatagaactggagcccgattcagtcatagaagattccatcgacgtgggcaaggagaccaaggaggagaaacgttggaaggaaatgaaactccaggtgtatgacctaccagggatattagcacgcctgtctaagatcaagctcacagcccttgtggtgagtaccacagcagctggctttgcactggcacccggtcccttcgactggccatgttttctgctcacaagcgttgggaccgggctcgctagctgcgccgcaaatagtatcaaccaattcttcgaagtgccattcgactctaatatgaatagaacaaaaaaccggccactagttcgcggccagattagtcccttgctggccgtttcctttgcgacctgttgtgccgtcccgggggtcgcaatcctaactctgggtgtcaatcccctgacaggagccctgggtcttttcaatattttcctgtatacatgctgctataccccactgaagcgtattagcatcgcaaacacgtgggttggggcagtggttggcgccattccgccagtgatgggctggactgcagccactgggagtttagatgcaggggccttcttgctgggaggcatcctgtattcatggcagtttccacactttaacgccctgagttggggcttacgggaggattattcccgtggcggatactgtatgatgtccgtgactcacccaggtctgtgcaggagggtcgccttgcgccactgtttagccctgcttgttctgtccgctgccgcccccgtcctggacatcactacttggacatttcccatcatggcgctgcctatcaatgcatatatcagctatctgggcttccggttttacgtcgacgcagatcggcggagctctagacgattatttttttgtagtctgtggcacttgccactgctactgctgcttatgcttacctgcaagaggccttccggggggggggacgcaggcccgccacctagctag

SEQ ID NO: 113107 - DNA, 399 bp, synthetic construct
  misc_feature 1..399: note = Description of Artificial Sequence: Synthetic coding sequence
  source 1..399: mol_type = other DNA
taacgcaatgtcaataagcagtggatcacctttcagcacttttcctttctgaagagaatgtacgtcactcagctcaatcgtagccataaccagcaggtccggcctaagccggaaccagtagcgagccccttccttgagaagacctcttctggtcaagctaaggctgaaatctacgagatgcggccactgagccctccttccttgtctttgagtaggaaacctaatgaaaaagaactaattgagctggaaccagactcagtgatcgaggattctattgacgttggcaaagagacaaaagaggaaaagcgttggaaggaaatgaaactgcaggtgtatgatctgcccggaatccttgctaggttatctaagattaaactcacaggaacattgttcttctag

SEQ ID NO: 113108 - DNA, 756 bp, synthetic construct
  misc_feature 1..756: note = Description of Artificial Sequence: Synthetic coding sequence
  source 1..756: mol_type = other DNA
atgatatgtcaggagttttggcttgattaccccaagtcaaatagtcaattttttgaggtgcctttcgattcaaacatgaatcgaaccaagaatcgcccactggtcagaggacagatctcacctctcctcgcagtgagcttcgcaacctgctgcgccgtccccggcgtcgccattcttacattaggcgttaatccacttaccggggccctgggcctttttaacatcttcttatatacctgctgctataccccattaaaaagaattagtattgccaatacttgggtcggcgcagtggtgggcgctatcccccccgtgatgggatggactgccgccactggctctttggacgcaggcgccttcctgctgggtgggatcctatattcttggcagttccctcacttcaatgctttgtcttggggcctccgggaagactacagccgcggaggctattgcatgatgtccgtgacgcacccggggttgtgtcgccgggtggcgctgaggcattgcctcgctctgctggtcctgtccgccgccgcccctgtgctagatataacaacctggacatttcctattatggctctgcctattaacgcctacataagttacctagggtttaggttttatgtggacgccgatcgccggagcagcagaagactcttcttttgcagcctttggcacctgcccttgctgctactgctaatgttgacctgtaaacgcccatccggcggaggggacgccggtccccccccctcttag

SEQ ID NO: 113109 - DNA, 681 bp, synthetic construct
  misc_feature 1..681: note = Description of Artificial Sequence: Synthetic coding sequence
  source 1..681: mol_type = other DNA
atgaataggaccaaaaatcgaccccttgtaagaggccagatatcaccattactggccgtgagcttcgcaacctgctgcgccgtacccggagtcgccatcttgaccttaggggtgaaccccttgacgggcgctctcgggctctttaacatttttctgtacacctgctgctacactcctctaaaacgcatctccattgccaatacatgggtaggagccgttgtgggagctatcccccctgtgatgggctggacggccgcaaccggcagcctggacgcaggcgcctttttgctgggcggtatcttgtattcttggcagttcccacatttcaatgcactctcttgggggttgagagaagactacagccgcgggggctactgtatgatgagcgttactcacccaggattatgcaggagggtggcattgcgtcactgcttagccttgttggtgctgtccgccgctgcaccggtcctcgacattaccacttggacctttccgatcatggctcttcctattaatgcgtacatctcttacttggggtttcgcttctatgtggacgccgaccgacgctccagcagaaggcttttcttttgttcactgtggcacctaccgttgctgctgctcttgatgctgacttgcaagcgcccaagtggcgggggcgacgctggcccgccgccaagctag

SEQ ID NO: 113110 - DNA, 831 bp, synthetic construct
  misc_feature 1..831: note = Description of Artificial Sequence: Synthetic coding sequence
  source 1..831: mol_type = other DNA
atggggggactctggcgacctgggtggcgatgcgtgcccttttgcgggtggaggtggattcatcccggaagtccaacccgggctgcggagcgcgttgaaccatttctaagacctgagtggagcgggactggtggcgccgagcgaggcctcaggtggttgggaacatggaagcgttgctcactgagagcaagacatccagccctgcagccccctagaaggcccaagtccagcaaccctttcactcgggcgcaggaggaggaaaggcgccggcagaataagacaacattgacttacgtggcggcagtcgccgtagggatgctgggcgcgtcttatgctgccgtcccactgtaccggctttactgtcagactacagggcttggcggctccgccgtcgcgggccacgcatccgacaagattgagaacatggtcccagtcaaagaccgaattatcaaaatctctttcaacgcagacgtgcacgcctccctacagtggaacttccggcctcagcaaaccgagatttatgttgtgcccggcgagaccgctctggccttctatagagcaaagaaccctacagacaagcctgtgatcgggattagcacatacaatattgtgcccttcgaggcgggtcaatatttcaataagatccagtgtttttgctttgaggaacagcggctcaatcctcaggaagaggtggacatgccagtctttttctatattgatcccgagtttgctgaggatcctaggatgatcaaggtggacctgattacactgtcgtataccttcttcgaggcaaaagaaggccacaaactccccgttcccggctacaattag

SEQ ID NO: 113111 - DNA, 1233 bp, synthetic construct
  misc_feature 1..1233: note = Description of Artificial Sequence: Synthetic coding sequence
  source 1..1233: mol_type = other DNA
atgcaacggctcctattcccaccgctgagggcactgaagggtcgacaatacctgcccctcctcgcaccacgggccgctccacgggcacagtgcgattgtatcagaaggccacttagacctggacagtactccactatctcagaggttgctctgcagtcgggcaggggcactgtatccctgccttcaaaagccgccgaacgcgtggtggggcgctggctgctcgtctgtagtggcaccgtggccggcgccgtgatcctgggcggggttactagactgaccgagtccggtttgagcatggttgactggcatctcatcaaggaaatgaagccccctacctcccaggaggaatgggaagccgagttccaaagataccagcagttcccagagttcaagatcctgaatcatgacatgactctcacagagtttaagtttatctggtacatggaatactctcaccggatgtggggacggcttgtgggtctcgtgtatatcctcccagccgcttatttctggagaaaaggctggttgagcagggggatgaaggggcgagtcttggctctctgcggactggtctgtttccagggcctactggggtggtatatggtaaagtccggactggaggaaaaatctgattctcatgacattccccgcgtgagtcagtaccgtcttgcagcgcatctcggcagcgccttagtgctgtactgcgcaagcctttggactagcctttccctgctgctgccacctcacaagctgccggagacgcatcagttgttgcagctgaggcgcttcgcacacggcacagcagggctcgtgtttctcactgccctttccggcgcttttgtggccggcctggacgcaggactggtttacaatagttttccgaagatgggcgagtcatggatcccagaggacctgtttaccttctcccccatcctcaggaatgtcttcgaaaatcccactatggttcagtttgaccaccgcatcctcgggatcacgtcagtgactgcaatcacagtattatactttttgtctaggagaataccactgcctagacggacaaaaatggcggccgtcaccctactagcactagcctacacgcaggtcggactcggaatttctaccctgctcatgtacgtgccaacaccgcttgcggctacacatcagtctggtagtctcgcactgctgaccggcgcactttggcttatgaacgaactacggagagtccctaagtag

SEQ ID NO: 113112 - DNA, 1167 bp, synthetic construct
  misc_feature 1..1167: note = Description of Artificial Sequence: Synthetic coding sequence
  source 1..1167: mol_type = other DNA
atgcagcggctgctgtttcctcccctgcgggccctgaaaggaaggcagtatctgcccctgttggctccgcgcgctgcacctagagcgcagtgtgattgtattcgccggcccctacgcccaggacagtactccacaatctctgaagtggcattacagagtggcaggggcacggtctctctgccatctaaagcagctgagcgcgtcgtcgggcgttggcttctggtctgttcaggcactgtcgctggcgctgtgatccttggcggcgtcactcgattaactgagtccgggctgagcatggtggactggcacctgatcaaagaaatgaagccgcccacctcacaagaagaatgggaggccgaattccagagataccagcagttccccgagtttaaaattctgaaccatgatatgacgcttactgaatttaagtttatttggtatatggaatattcccacagaatgtggggccgactggtaggcttggtgtatattcttcctgctgcttacttctggcgtaagggctggctctcccgggggatgaaggggagagtcctagccctctgtgggcttgtgtgtttccaaggcctcctcggttggtatatggtgaagtctgggctagaggaaaagtctgactctcacgacattccccgcgtgagccagtaccggctggcagcccatctcggttcggcacttgtcctctattgtgcttcactgtggacctctctgtctctgctcctgccccctcataaattaccagagactcaccagctcctgcaactccggcgtttcgcacatggtaccgccggccttgtgttcctcaccgctctgagcggggcattcgtagctggtctagacgccgggctagtttacaacagctttccgaagatgggcgaatcgtggatccctgaggacttattcaccttctcaccgatcttgcggaacgtgtttgagaaccctacgatggtccagttcgaccataggatcttgggcatcacttcggtgaccgcaattacagtgctgtatttcctgagcaggaggatccccctacctcgcagaacaaagatggctgccgtgactctgctggctctggcctacacccaaggcccagttctgtttaatttcactttcaaaatatctgacttggacgaaggtattcggaatatctag

SEQ ID NO: 113113 - DNA, 192 bp, synthetic construct
  misc_feature 1..192: note = Description of Artificial Sequence: Synthetic coding sequence
  source 1..192: mol_type = other DNA
atgcccggcctggtggacagcaatcctgccccccctgaatcacaggaaaagaagcctttaaagccctgttgtgcctgccccgaaaccaagaaagcccgagatgcctgcattattgagaagggagaagagcattgtggccaccttattgaagcacacaaggagtgcatgagggcgctgggattcaagatttag

SEQ ID NO: 113114 - DNA, 192 bp, synthetic construct
  misc_feature 1..192: note = Description of Artificial Sequence: Synthetic coding sequence
  source 1..192: mol_type = other DNA
atgccaggccttgtggactctaatcctgccccccctgaaagtcaagaaaagaagcctttgaagccgtgttgcgcctgtccggagactaaaaaagcaagggacgcttgcattatcgagaaaggggaagagcactgtggacatcttatcgaggctcacaaagaatgtatgcgagcgctgggttttaaaatatag

SEQ ID NO: 113115 - DNA, 297 bp, synthetic construct
  misc_feature 1..297: note = Description of Artificial Sequence: Synthetic coding sequence
  source 1..297: mol_type = other DNA
atgcctgggttggtggattccaatcctgccccacccgagtctcaggagaagaagcctctgaaaccctgctgtgcatgtcctgaaactaagaaggcccgtgacgcctggttccggggacgggtgtcggtggacctgtcaagatccctggtgcctggtaatgatggggagagaggggagcgccaagctagcactacccactcctttttacagataataattgagaagggggaagagcactgtggacatctcatagaggcccacaaggaatgtatgcgcgctttgggatttaagatttag

SEQ ID NO: 113116 - DNA, 192 bp, synthetic construct
  misc_feature 1..192: note = Description of Artificial Sequence: Synthetic coding sequence
  source 1..192: mol_type = other DNA
atgcccggtctggtggactcaaatccggctccacctgagagccaggaaaaaaagcccctgaagccctgctgcgcttgccctgaaaccaagaaggcccgcgacgcttgcataattgagaagggtgaggaacactgcggccacctgatcgaggcgcataaggagtgtatgagagctttgggattcaaaatctag

SEQ ID NO: 113117 - DNA, 1098 bp, synthetic construct
  misc_feature 1..1098: note = Description of Artificial Sequence: Synthetic coding sequence
  source 1..1098: mol_type = other DNA
atggcacttcttctgtgcttcgttctcctttgtggcgtggtggatttcgcgaggtccctcagcatcacgactcctgaagagatgatagagaaggccaagggagagaccgcttatctgccttgtaagtttaccttgagccccgaggaccaaggaccccttgatatagagtggctgattagtcccgcagataaccagaaagtggatcaggttatcatactttacagtggcgacaagatctacgacgactattatcccgatctgaaaggtcgcgttcacttcacgtccaatgatttgaagtccggggacgcgagcatcaatgtgaccaatttgcaactgtctgatatcggaacgtatcagtgtaaagtgaagaaggcgcccggtgttgccaacaagaaaatccatctcgtggtcctggtgaagccttctggcgccagatgttacgttgacggctctgaagaaatcggaagcgactttaaaattaaatgcgaaccgaaggagggaagcctgcctctacagtacgagtggcagaagttgtcagacagccagaagatgcctacctcctggctggctgagatgaccagctcagtgattagcgtcaagaacgccagctctgagtactccggaacatactcttgtaccgtccgaaatcgggttggaagcgaccagtgcctgctccggcttaatgtcgtcccccccagcaacaaagctggtctgatcgccggggctatcatcgggacgcttttggccctggctctaatcgggttaattattttctgctgccggaagaaaaggagggaggaaaagtacgaaaaagaggtgcatcacgacatcagggaggatgtgcctcctccgaaatcacggacttcgaccgccagatcctatatcggatcaaaccattcaagcctcggatcgatgtcccctagcaacatggagggatactcaaaaacacaatataaccaggtcccatctgaagattttgagagaaccccacagagcccaacactgccccctgcaaaagttgccgcccccaacttaagcagaatgggcgccatccccgtgatgattccagctcagtccaaggacgggtcaatcgtgtag

SEQ ID NO: 113118 - DNA, 975 bp, synthetic construct
  misc_feature 1..975: note = Description of Artificial Sequence: Synthetic coding sequence
  source 1..975: mol_type = other DNA
atggcgctccttctgtgttttgtgctcctatgcggggtggtcgacttcgctaggtccctatccatcactactcctgaggaaatgatcgagaaagccaagggcgaaacagcttacctcccttgcaaatttacgctgagtccagaagaccaggggccattggatattgaatggctcatatcacctgccgataatcaaaaagtcgatcaggtgataatactgtactccggagacaaaatatacgacgactactaccccgacctcaaggggcgtgtgcactttacgtctaatgacctgaagtctggagacgccagcatcaacgtgacaaatcttcaattgagcgatattggtacatatcaatgcaaagtgaaaaaggcccccggggtcgccaacaaaaaaatacacctggtcgtcctggtcaagcccagcggggctcgctgctatgtggacggtagcgaggaaataggctcagactttaagattaaatgtgaacccaaagaaggctccttgcctctccagtacgagtggcagaaactttcagactctcagaagatgcccaccagctggttagctgcctctaacaaggctgggctgatcgcaggagccataatcggaacacttctcgccctcgccttaattggcttaatcattttttgttgcaggaagaaaaggagagaggagaagtacgaaaaggaagttcaccacgatatacgggaggatgttcctccccctaaatccaggacctccactgccaggtcgtacatcggctcgaatcattcaagccttggaagcatgtctccgtccaacatggaaggctactcaaaaacacagtataatcaagtcccatcagaggactttgaacggactccgcagtccccaaccctaccgccagctaaggtggccgcacctaatctctctcggatgggagcaattcctgtcatgattccggcgcaatccaaggacgggagtatcgtctag

SEQ ID NO: 113119 - DNA, 603 bp, synthetic construct
  misc_feature 1..603: note = Description of Artificial Sequence: Synthetic coding sequence
  source 1..603: mol_type = other DNA
atggccttgctgctctgcttcgtactgctgtgtggcgttgtggattttgcccggagtctctccatcacaactcccgaagagatgatcgagaaagctaagggtgagacagcctacctgccatgcaaatttaccctgagtcccgaggaccagggtcctctggatattgaatggcttatctctccagccgacaatcaaaaagtggaccaggttatcatcttgtactcaggagataagatctatgatgactattatcccgatttgaaggggagggtgcatttcacctctaacgatctgaaatcgggagacgctagcatcaacgtgaccaacctccagctgtctgacattggcacctaccagtgcaaggtgaagaaggcaccaggagtcgccaataagaagattcatttggtcgttttgggtaaaatgtgtcatttgcagcgggccgtacgacctctgccggaagccaccagtgccgtaattatccatccttggggtccctgcctgttgccgacttggaaagacattccccgcttatccatcacaaagtatcaggtgaaaaccctgaacgccctgctgagggtccgcctgtcccaccttttgaggtag

SEQ ID NO: 113120 - DNA, 759 bp, synthetic construct
  misc_feature 1..759: note = Description of Artificial Sequence: Synthetic coding sequence
  source 1..759: mol_type = other DNA
atggccctacttttatgtttcgtcctgctttgtggggttgttgactttgctcgctccctctccattaccactccggaggagatgatagagaaggcgaagggtgagacagcctacctgccctgtaaattcaccctttctccagaagatcaaggtcctctggacatcgaatggttgataagtcccgccgacaaccagaaggtggatcaagtgataatcctgtacagtggggacaagatttacgatgattactatcccgatttgaaagggagagttcactttacctcaaatgaccttaagtctggtgatgcttctattaatgtcactaatctgcagctctcggatatcggcacctaccaatgcaaggtaaagaaggcgcccggggtagcaaataaaaaaatccacctcgtggtcctggtcaaaccctctggcgctaggtgctatgtcgatggctcagaagagatcggctccgatttcaaaattaagtgtgagcctaaggaagggagtctccctctccagtatgagtggcaaaagctttcagacagccaaaagatgccaacctcttggctggccggcaaaatgtgccacctccagcgagcagtgcggcctttgccagaagcaacctctgccgtgatcatccatccttggggcccttgtctcttgcctacctggaaagatatcccacgcttgagtattactaagtaccaggtgaagacactcaacgccctgctgagagtccgactgagccatcttcttcgctag

SEQ ID NO: 113121 - DNA, 1059 bp, synthetic construct
  misc_feature 1..1059: note = Description of Artificial Sequence: Synthetic coding sequence
  source 1..1059: mol_type = other DNA
atggcccttctgctctgtttcgtgctgctgtgcggagtggtggattttgcccggtcactaagcatcacgactccagaagagatgatcgagaaggccaagggtgagacagcatacctgccatgcaagtttaccttgtcccccgaggatcagggcccgttagatatcgagtggttgatctccccggctgataaccaaaaagtggatcaggtgattatcctttatagcggtgataagatttatgacgactactatcctgatctcaagggtagggtgcattttacatcaaacgacctgaaatccggtgatgcctctattaacgtgacaaacctgcagctttcggacattggcacttaccagtgtaaggtcaaaaaggcccctggcgttgccaacaaaaagatacatcttgtagtccttgtgaagccctcaggggcccggtgctatgtggatggatcagaggagatcggttccgactttaagattaaatgcgagccgaaggagggctcgttgccactgcagtacgaatggcaaaagttgtccgattcccagaagatgccgacctcttggttggccgagatgacctccagtgtgatatcagtaaagaacgcctcaagcgagtactccggtacatattcatgcaccgtccgcaaccgcgtcggctcagatcagtgtctgttacgcctgaacgttgtgccaccttccaataaggctgggctgatcgcaggcgcgattattggcacactcctggcgctggcacttataggcctgataattttctgttgcaggaagaaacgacgggaggagaaatatgagaaagaagtccatcatgatatcagggaggacgttccgcctcccaaatccaggaccagcactgccaggagctacattggctctaaccacagctcccttgggagcatgtcgccctcgaatatggaaggttacagcaagacacagtacaatcaggtcccaagtgaggatttcgagcgcacaccgcagtctcccactctgccacccgccaaattcaagtacccttacaaaactgatggtatcaccgttgtgtag

SEQ ID NO: 113122 - DNA, 270 bp, synthetic construct
  misc_feature 1..270: note = Description of Artificial Sequence: Synthetic coding sequence
  source 1..270: mol_type = other DNA
atggcgctgctgctgtgttttgtcctgttgtgcggagtggttgacttcgccaggagtcttagcattacaactcctgaggaaatgatagagaaggcgaaaggggagaccgcttatctgccatgcaagtttactctcagcccagaggaccagggccctctggatattgagtggctgatttctcctgctgacaaccagaaggtcgatcaagtcggcaggtgcgctacatcaaaagagccttacgtgcattgtcaaaaactacatcggcagtag

SEQ ID NO: 113123 - DNA, 900 bp, synthetic construct
  misc_feature 1..900: note = Description of Artificial Sequence: Synthetic coding sequence
  source 1..900: mol_type = other DNA
atggaagagttcgattccgaagacttctctacatcggaggaagatgaggattatgtgccttcagggggcgaatacagtgaggatgacgtgaatgagctggtaaaagaggatgaagtagacggggaggagcagacccagaaaacccagggaaagaaacgtaaggctcagtccattccagcaagaaagcgccgtcagggcggactgtccctagaggaggaggaagaagaggatgcaaactcagagtccgagggaagctcgtcagaggaggaagatgacgctgccgaacaggagaaaggaatcggaagcgaagatgcaagaaaaaagaaagaggatgaactctgggcaagcttcttaaacgacgtgggacccaaaagtaaagtgccaccatcaacacaggtgaaaaagggtgaggagacagaggaaacctcatcttctaaactgctggtgaaagccgaggaactggaaaaaccgaaagaaaccgagaaggtgaagataacgaaggtatttgactttgctggcgaagaggtgcgtgttaccaaagaagtggatgcaacaagcaaggaggccaagtcttttttcaaacagaacgagaaggaaaaaccacaggccaacgttccaagtgcgctgccctctctgccggcaggcagtggattgaaacgctccagcggcatgagcagtctactgggcaagattggcgcgaagaaacagaagatgagcacccttgaaaaatcgaagttagattgggaatcatttaaggaagaggaggggattggcgaggagctcgctatccataatagagggaaagaggggtatattgagcgaaaagccttcctggaccgggttgatcaccggcagttcgaaattgagagagacttacgactgtccaaaatgaagccatag

SEQ ID NO: 113124 - DNA, 675 bp, synthetic construct
  misc_feature 1..675: note = Description of Artificial Sequence: Synthetic coding sequence
  source 1..675: mol_type = other DNA
atggagaagttattatgcttccttgtcctcacttcacttagccacgcatttggccagacagacatgtccagaaaggctttcgtattccctaaggagtctgacacatcttacgtcagcttaaaagctcctctcacaaaaccactgaaggcattcactgtttgcctgcatttttacaccgagctctctagtacccgcgggtactctatcttttcctacgctactaaaaggcaagacaatgagatcctgatcttctggagcaaagatattgggtattccttcacagtgggcgggtccgagattctgttcgaggtgccggaggttacagtggcgccggtgcacatttgcacctcctgggaaagtgcctccggcattgtagagttctgggtcgatgggaagcccagggtgaggaaatcattgaaaaagggctacaccgtgggcgccgaggcgtccattattttggggcaggagcaggactctttcggtgggaatttcgagggctcacaatcgctggtgggtgacattggaaacgtcaatatgtgggattttgtcctatcgcccgatgagattaacaccatttatctcgggggcccttttagcccgaacgtgctgaactggcgggctttaaagtacgaggtacagggcgaggtcttcactaaaccacagctctggccttag

SEQ ID NO: 113125 - DNA, 309 bp, synthetic construct
  misc_feature 1..309: note = Description of Artificial Sequence: Synthetic coding sequence
  source 1..309: mol_type = other DNA
atggagaaactcctttgttttctcgttcttacaagcctgagccatgcattcgggcaaactgacatgtcccgcaaagcgtttgtgtttcctaaagagtctgacaccagttacgtcagcctaaaggctccccttaccaagccccttaaggcctttacagtttgcctgcacttctacaccgagttaagcagcactcacgaaattaataccatttacctgggtggccccttctctccaaatgtgctgaactggagggccttaaagtacgaggtccagggcgaagtattcacaaagcctcagctgtggccgtag

SEQ ID NO: 113126 - DNA, 309 bp, synthetic construct
  misc_feature 1..309: note = Description of Artificial Sequence: Synthetic coding sequence
  source 1..309: mol_type = other DNA
atggaaaagctgctgtgtttcctggtgcttacgtccttgagccacgcattcggacagacagacatgagtaggaaggcgttcgttttccccaaggagtcagacacctcatacgtctcactgaaagctcctctcactaagccactcaaggccttcaccgtgtgcctgcatttttataccgaactgagcagcactcatgagatcaacaccatatacctggggggtcccttcagccctaatgtgctcaactggagagccctgaagtacgaggtccagggcgaagtgtttacaaagccacaactgtggccatag

SEQ ID NO: 113127 - DNA, 309 bp, synthetic construct
  misc_feature 1..309: note = Description of Artificial Sequence: Synthetic coding sequence
  source 1..309: mol_type = other DNA
atggagaaactactgtgctttctggtgctgactagcctgagccacgcatttggccagaccgacatgtcgcgtaaggcgtttgttttccctaaggaatctgatacaagttatgtgtcactcaaggctcccttaacaaaacccctcaaagctttcaccgtgtgtttacacttctacaccgagttaagtagcacccacgagatcaatactatctatctgggcggaccgtttagcccaaatgttcttaattggcgggctctaaaatacgaggtccagggagaagtgttcactaaaccgcagctgtggccttag

SEQ ID NO: 113128 - DNA, 276 bp, synthetic construct
  misc_feature 1..276: note = Description of Artificial Sequence: Synthetic coding sequence
  source 1..276: mol_type = other DNA
atggaaaagttgctttgctttctggttcttacctctttgagccacgcctttggacagactgacatgagcagaaaggctttcgtctttcccaaagaatctgacacctcatatgtgtccctgaaagcacccctgacaaaaccattaaaagcttttacggtttgtctccatttctatacagaacttagtagcacccggggcccaaacgttctgaactggcgtgcgctgaaatacgaagtacaaggggaggtgttcaccaagccacagctgtggccctag

SEQ ID NO: 113129 - DNA, 141 bp, synthetic construct
  misc_feature 1..141: note = Description of Artificial Sequence: Synthetic coding sequence
  source 1..141: mol_type = other DNA
atgtgggatttcgtcctgagcccagacgagattaatactatttacctgggcggtccattcagtcccaatgttctgaattggagagcattaaaatatgaagtccaaggtgaagtgtttacgaaaccgcaactctggccctag

SEQ ID NO: 113130 - DNA, 1146 bp, synthetic construct
  misc_feature 1..1146: note = Description of Artificial Sequence: Synthetic coding sequence
  source 1..1146: mol_type = other DNA
atgcctttttccaactcccacaacgccctgaagttgagattccctgcagaagacgaattccccgacttgtccgctcacaataaccacatggccaaggtcctgacgcccgaactgtacgctgaacttagggccaagtcaacgcccagtgggttcaccctggatgacgtgatccagactggcgtggacaatcccggacatccctacattatgaccgtaggctgtgtcgccggagatgaggagtcttatgaggtttttaaagatctctttgatcctataattgaggacagacatggaggatataaaccgtcggacgagcacaaaaccgacctgaatccagataatctgcaggggggggatgatctagaccctaactatgtgctgtcaagccgtgtcagaacaggacggagtattaggggattctgtctgccacctcactgtagtagaggtgagcgacgcgcaatcgagaagttagctgtagaggctctgtcaagccttgacggagaccttgctgggagatactacgcactcaagagcatgaccgaagccgagcagcaacagctgatcgacgatcatttcctgttcgacaagccagtctctccgctgctactggcatctggaatggccagagattggcccgacgccagaggaatctggcacaacgacaataaaactttcctggtttgggtgaacgaggaagatcatctccgagttatttcaatgcagaagggtggaaacatgaaggaggtgttcactcgattttgcaccggattgacacagatcgaaacactgtttaagtctaaagactacgagttcatgtggaatccccatttaggatatatcctgacatgcccgtctaacctggggacaggcctccgtgcaggggtccatatcaaactcccaaatctgggtaagcacgagaaattttcagaggtactgaaaagacttcgacttcagaaacgggggacagggggcgtcgacactgccgccgtggggggggtgttcgacgtgtccaacgccgatagactggggttcagtgaggtggaactcgtgcagatggttgtggacggggtgaaactgcttattgaaatggagcaaaggctcgagcagggccaagccatagacgatctcatgcccgcccaaaaatag

SEQ ID NO: 113131 - DNA, 1041 bp, synthetic construct
  misc_feature 1..1041: note = Description of Artificial Sequence: Synthetic coding sequence
  source 1..1041: mol_type = other DNA
atgcccttttccaactctcacaacgcactgaagctgaggttcccagcagaggacgagttccccgacttatccgcgcataacaatcacatggcaaaggtgctcacgccagagttatacgccgagctccgcgcaaaaagcaccccatctggtttcacactcgatgacgtgattcagacaggtgttgacaacccggggcacccctacattatgacggtcggatgtgtagcaggcgacgaggaatcctacgaggtatttaaagacctcttcgatcccatcatcgaggatcgccatggcggttacaagccttcagacgagcacaagactgacctcaatcccccccgcggcgctccccgtattgagaagttggctgtcgaagctctatccagcctggatggagacctggcaggacgctactatgctctgaagagtatgacagaagccgagcagcagcaactcatcgatgaccatttcctgtttgacaagcctgtttcacccctcctcctggcatccggcatggcccgggattggccagacgcgcgcggtatatggcacaacgacaacaagacctttctcgtgtgggtgaacgaagaggatcatctgagagtcatctccatgcagaaagggggtaacatgaaggaggtgttcacaagattctgcaccgggctgacccagatcgagacactctttaagagcaaggactacgagttcatgtggaatccacatcttggctacatactgacctgcccctccaatttgggcacagggcttagggccggtgtccacattaaacttcccaatttaggcaaacacgaaaaattttcagaggtgctcaaaaggcttaggctgcaaaaacgggggactggtggggtcgacaccgctgctgtcggtggggtgttcgacgtgtccaatgccgacagactagggttctccgaagtggagctcgtgcagatggtggttgacggcgttaagctgctcatcgagatggagcagcggctagaacagggccaggctatagatgacctgatgcctgcccagaagtag

SEQ ID NO: 113132 - DNA, 654 bp, synthetic construct
  misc_feature 1..654: note = Description of Artificial Sequence: Synthetic coding sequence
  source 1..654: mol_type = other DNA
atgcccttttctaattctcataacgcgcttaagctccgctttccagccgaagacgagttcccagacctgagcgcacataacaaccacatggccaaagtcctcacaccggaactatatgctgaactgcgcgctaagagtaccccgtctggatttactctagacgatgttattcaaactggcgtagacaaccctggccatccatacattatgacagtgggctgcgttgctggagatgaggaaagttacgaggtgtttaaggacttatttgaccccattattgaagacagacacggtggatataaaccctccgacgaacacaaaactgacttgaacccagataatcttcagggtggggatgatctcgacccaaactacgtactgagctcacgcgtaagaacgggcaggtccattcgcggattttgcctaccccctcattgcagtcgtggggagcgcagggcgattgagaaactcgctgtggaggccctatcttcactggacggggacctggcagggcggtattacgccctgaagtcaatgaccgaagctgagcaacagcagctcatcgacgatcacttcctgtttgataaaccagttagcccactgctgctcgctagcggaatggcccgtgattggcctgacgcaagagggatctag

SEQ ID NO: 113133 - DNA, 447 bp, synthetic construct
  misc_feature 1..447: note = Description of Artificial Sequence: Synthetic coding sequence
  source 1..447: mol_type = other DNA
atggcggggccattttccagattgctgagcgctcggccagggctgcgtcttcttgccctagccggcgccgggtcacttgcagcaggtttcctgctgcgtccagagccagtcagagctgcatcagagaggcggcgtctgtacccaccatctgctgagtaccctgatctgcgaaaacacaacaattgtatggcctcccatctcactcccgctgtctatgccagactgtgtgacaaaaccacacctactggctggaccctggaccagtgcatccaaacaggggtcgataaccctggtcatccctttattaagactgtgggcatggtggcgggcgatgaagagacatacgaagtcttcgctgatcttttcgatccagttattcaggaacggcacaacgggtatgaccctcggactatgaaacacaccactgacctggatgcctccaagtag

SEQ ID NO: 113134 - DNA, 1254 bp, synthetic construct
  misc_feature 1..1254: note = Description of Artificial Sequence: Synthetic coding sequence
  source 1..1254: mol_type = other DNA
atggcgggccccttcagccgtctgttatctgcacgcccgggattgcggcttctcgcattagcaggggctggctcactggctgccggatttctcctcaggccagaaccagtccgggccgcgtccgagcgcagaaggttgtatcccccaagtgccgaatatcccgacctgcgcaaacacaataattgcatggccagccacctgaccccagcagtatatgctcgcctgtgtgataagaccactcccacaggctggaccctcgatcagtgcattcagacaggcgtggacaatccagggcaccccttcataaaaacagtcgggatggtagcaggagacgaggaaacgtacgaggtcttcgccgacttgttcgatccagtgatacaggaacgtcacaacggctacgacccaaggaccatgaagcacaccaccgatctcgacgcctccaaaatccggtccgggtacttcgacgagcgctacgtgctgagttcccgggttcggaccgggcggagcattcgaggcctgtccctgccacccgcatgcacgcgtgccgagcgccgcgaagtagaaagggtggtggtggatgcattgagtggtctgaagggggatttggcgggccggtattaccggctctcagaaatgacagaggccgagcagcaacaattaatcgacgatcacttcctatttgataaacccgtctctccccttttgactgcagcaggcatggccagggattggccagatgcccgcgggatctggcataataatgagaaatcatttctaatatgggtgaacgaggaggatcacacaagggtcataagcatggagaagggtggcaatatgaaacgagtgtttgagagattttgtcgaggtctgaaggaggtggaaaggctgattcaggaacgcgggtgggagttcatgtggaatgagaggttgggatacattctgacttgccctagcaacctgggcactggtctacgggccggagttcatattaagctccccctgctctccaaggactcccggtttccgaagattcttgagaacttgcgtctccagaaaaggggaactgggggggtagatacggccgctaccgggggagtgttcgacatcagcaatctggatcgcctagggaagagcgaagttgaactcgtgcagctggttattgacggtgtgaactatctgatcgattgtgaaagaaggctggagcgcggccaggacatccggattcccaccccagtgattcacacaaaacattag

SEQ ID NO: 113135 - DNA, 1347 bp, synthetic construct
  misc_feature 1..1347: note = Description of Artificial Sequence: Synthetic coding sequence
  source 1..1347: mol_type = other DNA
atggctggtcctttctctcgacttctgtcggcacgcccagggctccgactattggccctggccggagcaggctcactcgccgcaggcttcctcctccgacccgaaccagtgagggccgctagcgaacggcgtcggctctatccaccaagccagacgtggccaacagggcaactcccaggcaactgcaccagatctcgtcgcctgtgccctccatcgatggtgacaggttacccattaccgtcagccgaatatcctgacctgcggaagcataacaattgcatggcttcccatctaactcccgccgtgtatgcccggctgtgtgataaaactacaccaacggggtggacgctggaccagtgtattcagacgggagtcgataatcccggacatccattcataaagactgttggcatggtcgcaggcgatgaggaaacatatgaggtgttcgccgatttgttcgaccccgttatccaggaacgccacaacggctatgacccaaggacaatgaagcatacaacagatcttgacgcctccaaaattcggtccggctacttcgacgagaggtatgtgttaagctcaagagtaaggaccggcagatcgatacgaggccttagcttgcctccggcgtgcacaagggcggagcgccgcgaagtggagcgcgtggtggttgatgctctcagcggcctgaagggggatttagcaggtagatattaccggctgtccgagatgacagaagccgagcagcaacagctgatagatgaccactttttgtttgataagcccgtgtcacctctgttaacagccgctggtatggcaagagactggccagatgcccgggggatatggcataataacgaaaagtcctttcttatatgggtgaacgaggaagaccacacaagggtgatatcaatggaaaagggaggcaatatgaagagagtttttgagaggttctgccggggccttaaggaggtggagaggttgatccaggagcgaggttgggaattcatgtggaatgagaggctagggtatatccttacatgcccaagcaacctcggaacaggactccgggctggagtacatattaaactgccactgctctctaaggattcccgctttcctaaaattcttgagaatctgaggctgcagaagcgggggactggtggcgtcgataccgccgccaccgggggcgtcttcgacatcagcaacctagacagactcggaaaatccgaggtcgagcttgtccagttagtgattgatggtgttaattaccttatcgattgtgagcgaaggctggaacgaggacaggacatccgcattccaaccccggtaatccacacaaagcactag

SEQ ID NO: 113136 - DNA, 1254 bp, synthetic construct
  misc_feature 1..1254: note = Description of Artificial Sequence: Synthetic coding sequence
  source 1..1254: mol_type = other DNA
atggccggcccattttctcggctcctgtccgcgcgcccaggacttaggttactcgcactcgcaggagcaggctccctggcggctggcttcctgcttaggccagagccagtcagagcggctagcgagagacgccgactctacccaccttctgccgagtaccccgacttgaggaaacataacaattgcatggcctcacatctcacccccgctgtttacgcacgactgtgcgataagacaaccccgacaggctggacccttgatcagtgcatccagacgggagtggacaaccctggacaccctttcatcaaaacggtgggcatggttgctggtgatgaggaaacatacgaagtttttgctgatctgtttgatccagtgattcaggaacggcacaatgggtatgatcccagaaccatgaaacacaccaccgacctggatgccagtaaaattagaagcggctactttgacgagcgttacgtgctgtctagccgagttcggacaggaaggtccattagaggtctcagcctgccaccagcctgtacgcgggcggaacggcgcgaagtagagcgcgttgtggtggatgctcttagcggactgaagggcgatttggcaggccgctattatcgcctatcggagatgacagaggcggagcagcaacagttaattgatgaccattttctcttcgacaaaccagtatctcctctgctgacagcagcgggaatggcaagagattggccagatgcccgcgggatctggcataacaacgagaagtccttcctgatctgggtaaatgaggaggaccataccagggttatttccatggagaaagggggtaatatgaaaagggtattcgaacggttctgtagggggctgaaagaagtggagaggcttatccaggagcgcggctgggagtttatgtggaatgagagattgggctacattctgacgtgcccctctaatctgggtacaggtctgagggccggggtacatatcaaacttcctctgctgtccaaggattcccgctttcctaagattctcgagaatctgcgcctgcagaaacggggaaccggcggggtagacacagccgcaaccggcggagtgttcgacatctcaaatcttgataggctcggcaaatccgaggtggaattagtacagctcgtaattgacggcgtgaattatctgatcgattgcgagcgtaggcttgaaaggggacaggacatcaggataccgacccctgtcatccatacaaagcactag

SEQ ID NO: 113137 - DNA, 765 bp, synthetic construct
  misc_feature 1..765: note = Description of Artificial Sequence: Synthetic coding sequence
  source 1..765: mol_type = other DNA
atggctgggcccttcagcagactgctgtcagctcggcccgggctgcggttactggccctggcaggtgctggaagtcttgctgcagggttcttgctgaggcctgaacccgtccgggccgcatccgaacggagaagattgtatccgcctagtgctgaatatcctgatctcagaaaacacaacaactgcatggcttcgcacctcactcccgctgtctatgcccggctttgcgacaagactacccctactggttggacattagaccagtgtatccagacaggggtggacaacccgggccacccttttatcaaaaccgtgggcatggttgccggggatgaggaaacatacgaagtgttcgcagacctgttcgatcctgtaatccgagggttatccttgccccctgcctgcaccagggccgaacgtagggaagtggagcgggtggtggtggacgcattgtccggcctgaagggagatttagctgggagatactatcgtttgtcggaaatgacagaggccgaacagcaacagcttatagatgatcatttcctgtttgataaaccagtgagccctctcttgaccgctgctggaatggcgagagactggcctgacgcaagaggcatttggcataacaatgagaaatccttcctcatttgggtgaatgaagaggatcacaccagagtgatttcaatggagaaaggcggaaatatgaaacgtgtcttcgaacgtttttgccggggcttgaaggaggtcgtagtggggatcaagtag

SEQ ID NO: 113138 - DNA, 1254 bp, synthetic construct
  misc_feature 1..1254: note = Description of Artificial Sequence: Synthetic coding sequence
  source 1..1254: mol_type = other DNA
atggcggggccattttctaggcttcttagtgctcgcccaggactaaggctgcttgcgctggccggtgccgggagtctggctgcagggttcttgttacgtccagaacctgtgagggccgcatccgagcgacggcgtctgtatccacccagcgccgagtatcccgacctgcggaagcataacaattgcatggccagccacctcactcctgccgtgtatgcccggctgtgcgataagactaccccgacaggatggactctcgaccagtgcatccagaccggggtggacaacccagggcaccctttcatcaagacagtgggcatggtggcaggcgacgaagaaacttatgaggtcttcgcagacctgttcgacccagtaatacaggagagacataatggatatgacccccggactatgaaacatacaactgacctcgacgcttctaagattagaagcgggtatttcgatgagaggtatgttctcagctccagggtgcgaactggtcgctcaatccggggattatctctgcctcctgcctgcactagggccgaaagacgcgaggtggaacgagtggtcgttgacgcgctcagcgggcttaagggcgaccttgcaggccgatactaccggcttagtgagatgaccgaagcagagcagcaacaactgattgatgatcatttcctattcgacaagccagtttccccactgctgactgctgcaggaatggcaagggattggcccgacgctagaggcatatggcacaataacgagaagtcatttctgatatgggtgaatgaagaggaccacacacgggttatcagcatggagaaagggggaaacatgaagcgagtgttcgaaagattttgcagaggactgaaggaggtggagcggctcatccaggagcgggggtgggagtttatgtggaacgagcggctcggatacatactgacgtgccctagcaatctgggtaccggcctgagggcaggagtccatatcaagcttccactactcagtaaagactcccgcttcccgaaaattctggaaaacttgcggttacaaaaacggggaacggggggcgttgacactgctgcaacgggtggggtatttgacatctccaaccttgataggctgggtaagagcgaggtagagctggtgcagctggtgattgacggagtcaactatttaattgattgtgaacggagactagaacgcggacaggatatccggatccctacacccgtgatacacactaaacactag

SEQ ID NO: 113139 - DNA, 441 bp, synthetic construct
  misc_feature 1..441: note = Description of Artificial Sequence: Synthetic coding sequence
  source 1..441: mol_type = other DNA
atgccagtcaaggtgaggacaggcagatcaataagggggctttcactccctccagcttgtacccgggccgagcgccgggaagtggagcgggtggtggttgatgctctttctggactgaagggagatctcgccgggcgatattataggcttagtgagatgaccgaagcagagcagcagcagctcattgacgatcattttctgtttgataaaccggtgtcacccctgttaactgccgccggaatggctagagactggcctgacgctcgggggatctggcataacaatgagaaatcctttttgatatgggtcaacgaagaggatcatactcgggtgataagtatggagaaaggaggaaacatgaaaagggtcttcgaaagattttgcaggggactgaaggaggtaagagaggattgcgtcggggagctcggtggcagaacctag

SEQ ID NO: 113140 - DNA, 507 bp, synthetic construct
  misc_feature 1..507: note = Description of Artificial Sequence: Synthetic coding sequence
  source 1..507: mol_type = other DNA
atgaaacatacgaccgacctcgatgccagcaaaatcaggagtgggtacttcgacgaaaggtacgttttatccagcagagtgcgaaccggacggagtatcagaggactcagtcttccgccagcctgcactagagctgagagaagagaggtagaaagagtggtggtggatgcactgagcggactgaagggggacttggctggcaggtattatcgcctgtcagaaatgacagaggccgagcagcagcagctgattgatgaccattttctgttcgacaagccagttagccccttgttgacagccgctgggatggctcgcgactggcccgatgctcgcggcatttggcataacaatgaaaagagttttctgatttgggtaaacgaggaggatcacacgagagtgatctcaatggagaagggcggcaatatgaaacgcgtgttcgagagattctgtagagggcttaaggaggtgagagaggattacgtgggcgagcttgggggacgtacctag

SEQ ID NO: 113141 - DNA, 312 bp, synthetic construct
  misc_feature 1..312: note = Description of Artificial Sequence: Synthetic coding sequence
  source 1..312: mol_type = other DNA
atggctgggcccttttctcgtctgctaagtgccagaccaggtctgcgcttgcttgctctagcaggagccggctccctggcagccggtttccttctaagacccgaaccagtgagagccgccagcgaaaggagacggttgtaccctcctagtgccgaatacccagacctgcgcaaacacaacaactgcatggcttcccatctcacccccgccgtttatgctcggctgtgtgacaagacgacccccaccggatggacactggaccagtgtatccagaccggggttgataatcctggccatcccttcataaagtag

SEQ ID NO: 113142 - DNA, 390 bp, synthetic construct
  misc_feature 1..390: note = Description of Artificial Sequence: Synthetic coding sequence
  source 1..390: mol_type = other DNA
atggccggacccttcagtaggttacttagcgccaggccaggcttacggctgctagccctagctggagccgggagccttgctgcagggtttcttctgaggccggaacccgtaagggcagcctcagaacgcagaagattgtaccctccttccgccgagtacccagatctcaggaaacacaacaactgcatggcatctcatctcacaccagccgtctacgctaggctgtgcgataagaccactccaaccggttggactttggaccaatgtattcagacaggagtcgacaaccctgggcacccctttattaagactgtgggtatggtggccggagatgaggaaacatatgaagtgtttgcagatctctttgacccagttatccaggagcggtag

SEQ ID NO: 113143 - DNA, 1017 bp, synthetic construct
  misc_feature 1..1017: note = Description of Artificial Sequence: Synthetic coding sequence
  source 1..1017: mol_type = other DNA
atggccgggcccttctcccggctcctgtctgcccggcccgggctgagactcctcgccctggccggggctggttccctggccgcgggcttctgttccgaccgcaatctgtatgagttacccgttaatgacggaggctgtataccacgagagcaaagccagacctggcccacaggacagctgcccggtaattgcaccaggagtcgaaggctgtgtccaccatcaatggtgactggataccctctaccaagcgccgagtaccctgatctacgtaagcacaacaattgtatggcctctcacctaacgccagcagtgtatgctcgcctctgtgataaaacgactcctacagggtggacactagaccagtgtatccagacaggtgtggataatccaggacatccattcataaaaacagtggggatggttgccggagacgaggagacttatgaagtgtttgctgacttgtttgatcctgtaatccaggaacgtcacaacgggtatgaccctcggaccatgaagcacactacagacctggacgcatctaaaatcagaagcggctactttgatgagcggtacgtgctgtctagtcgagtgcggaccggcagatcaatcaggggcctgtccttacccccggcctgcacccgggccgaaagacgggaggtcgagcgtgtagttgttgacgcactgtccggacttaaaggtgatctagctgggcgctattaccgcctctccgagatgaccgaggccgagcagcagcagttgattgacgatcatttcctgttcgacaagccggtgtccccgctgttgaccgccgcagggatggcccgcgactggcctgatgccaggggcatctggcataataacgagaaatcttttctcatttgggttaacgaggaggaccacactagggtgatctccatggaaaaaggggggaacatgaaacgcgtgtttgaacgattttgtagaggcctcaaggaggtgcgagaggactatgtgggtgagctgggcggtaggacctag

SEQ ID NO: 113144 - DNA, 1254 bp, synthetic construct
  misc_feature 1..1254: note = Description of Artificial Sequence: Synthetic coding sequence
  source 1..1254: mol_type = other DNA
atggccggcccattctcacgcttgctgagcgcaaggcctggattaagacttctggcactggctggtgccgggtcactggcagctggattcttgctgaggcctgagccggtgagggcagcgagtgaacggcggcgtttgtatccgccctccgccgaataccctgatctgaggaagcacaacaactgtatggccagtcatctgactcctgctgtctatgcacgcttatgtgataaaaccaccccaacaggctggactctggaccagtgtatccaaacaggcgtggataatcccggccatccattcattaaaaccgttggaatggttgccggggatgaggaaacttacgaagtttttgccgatctatttgaccccgtgattcaagaaagacacaatggttatgacccacgcactatgaagcatactaccgatctagacgcctcgaagataaggtcgggctacttcgatgagcgatatgtgcttagctctagggttaggacaggccggagcatccggggactgtccctcccacctgcttgcaccagggcagagagaagggaggtcgaacgtgtggttgtcgacgcgttatctggcctaaaaggcgatcttgccggtagatactaccgactctctgaaatgacagaggctgaacagcagcaattaatcgacgaccacttcctgttcgacaagcctgtcagccccctgttgacagctgccggaatggcacgtgactggccagatgctcggggcatctggcataacaatgaaaaatcgtttctcatttgggttaacgaggaagaccacacaagagtaataagtatggagaagggaggtaacatgaaaagagtcttcgagagattctgccgtgggctgaaagaggttgaacgccttatccaagaaagggggtgggagtttatgtggaatgagcgcctgggctatattctaacatgtccgtctaacttaggcacaggccttcgagctggagttcacatcaagctcccgttgctctcaaaagactctaggttcccaaagattttggaaaatctgaggctacagaaacgcgggacaggcggcgtggacaccgctgctaccggcggggtcttcgatatatcaaatcttgacaggctgggcaagagcgaagttgagctggtacagttggtgatagatggcgtcaattatctcatcgactgtgaaaggcggctagaacgtggccaggacataaggatacctacacctgtgatccatactaaacactag

SEQ ID NO: 113145 - DNA, 774 bp, synthetic construct
  misc_feature 1..774: note = Description of Artificial Sequence: Synthetic coding sequence
  source 1..774: mol_type = other DNA
atggttacaggctaccccctgcctagtgcggagtacccagacctgcggaagcacaacaactgtatggcatcccatctcacacctgccgtctatgcaagattgtgcgataaaacaactcctacaggatggaccttggaccagtgtatccagaccggcgttgataacccaggccatccattcatcaagaccgtggggatggtcgccggagacgaggagacctacgaggtgtttgccgatctgttcgaccccgtcatccaggagagacataacggatacgatccaagaactatgaaacataccactgatctggacgcgtctaagatacgatctggttatttcgacgagaggtacgtgcttagctctcgcgtgcggactggaaggagtattcgcggattgagcttgccacctgcgtgcacaagagccgagcggcgtgaagtggaacgggtcgtggtggacgcattatcagggctgaagggggacctcgctggacgatactacagactttcggagatgacagaagctgagcagcaacaactgattgatgatcactttctgttcgacaagccagtctctcccttgctgaccgccgcaggcatggcccgggactggccggatgcccgaggtatctggcacaataacgagaagagtttccttatttgggtgaatgaggaagatcacactcgggtgattagcatggagaaagggggtaacatgaagcgggtgtttgaaagattttgcagaggccttaaggaagtggtcgtgggcatcaagtag

SEQ ID NO: 113146 - DNA, 726 bp, synthetic construct
  misc_feature 1..726: note = Description of Artificial Sequence: Synthetic coding sequence
  source 1..726: mol_type = other DNA
atggcgggcccttttagtagactgctgagcgctaggcccggcctgagattgttagcactggccggcgcaggttccttagctgcgggcttcctgctgcggccagagccagtacgcgctgcttctgaaaggaggaggctgtaccctccgagtgccgagtatccggacctccgtaagcacaacaactgtatggcgagccatttaaccccggcagtttatgcacggctgtgtgacaaaacaacaccaaccggatggacgctggatcaatgcatccagacaggggtggacaaccctggccatccttttatcaaaacagtcgggatggtcgccggggacgaagagacgtacgaagtgtttgctgatctgttcgatccagttatccaggagcgccataacggttacgacccacgtactatgaaacacaccacagacttggacgcttccaagatccgttccggctacttcgatgaacgttatgtactgtccagccgcgtccgcactggcagaagtatcagaggcttgtctctgcctcctgcatgcacacgggcggagaggcgcgaggtcgagcgggtagtcgtggatgctctctcgggcctcaaaggtgatctcgccggccgctactacaggttgagcgaaatgacagaggccgaacaacagcagctgattgatgaccactttttgtttgacaagccagtttccccactactcaccgctgctggaatggcctag

SEQ ID NO: 113147 - DNA, 1260 bp, synthetic construct
  misc_feature 1..1260: note = Description of Artificial Sequence: Synthetic coding sequence
  source 1..1260: mol_type = other DNA
atggcatccattttttccaagctattgaccggcaggaacgcaagtctgctttttgcaacgatgggcacttcagtgttgaccactggttacctgctgaacaggcaaaaggtgtgcgccgaggtaagggaacagcccagactgtttcctccgtctgctgattatccagaccttcgtaaacacaataactgtatggcagaatgcctgacacctgccatctacgccaaactgagaaacaaggtcactccaaacgggtacaccctggaccaatgcatccagacgggtgtagacaatcccggtcatccgttcataaagactgtaggaatggtggctggagacgaagagagttatgaagtgtttgcggatttgtttgaccctgttattaaactgcgtcataacggatacgacccccgcgtcatgaagcacaccaccgatctggacgccagtaaaattacacagggacagttcgatgagcattatgtgctgagctctcgcgtgaggaccggccggtcaatccgagggctgtctttgccccccgcgtgcacccgcgcggaaagacgggaggtcgagaatgtggccattacagcattggaagggctaaagggtgacctagctggaaggtactataaattgagcgaaatgacagagcaggatcagcagcgcctgatcgatgatcacttcctttttgacaagcccgtctcccccctgcttacctgtgctggcatggcacgggactggccagatgcccggggaatctggcacaactacgacaaaactttcttgatttggattaacgaggaagaccacacccgcgtgatcagcatggagaaaggtggtaatatgaaaagagtctttgagcggttctgtcgtgggttgaaggaggtggagcgcctaatacaggaacggggttgggagttcatgtggaacgagcggctcgggtacatcctgacatgcccgagtaacctgggtaccggactgcgcgccggtgtacatgtgagaatcccaaagctgtctaaggatcctcgattttccaaaatattagagaacctaagactccagaagagaggtacaggcggcgtcgatacagctgcagtagccgacgtgtatgacatctccaatatcgaccgcattgggagatcggaggtggagctggttcagatcgtgattgatggcgtgaattaccttgtcgactgtgaaaagaagctggagcggggacaagacatcaaggttcctccgccattaccccagtttggaaaaaagtag

SEQ ID NO: 113148 - DNA, 1260 bp, synthetic construct
  misc_feature 1..1260: note = Description of Artificial Sequence: Synthetic coding sequence
  source 1..1260: mol_type = other DNA
atggcgtctatattctctaagctgctgaccggcagaaatgccagccttctattcgccactatgggcacctcggtcctcaccactgggtatctattgaacaggcagaaggtctgcgctgaggtgcgcgaacaaccacgtctctttcctccctcagccgactaccctgaccttagaaaacataacaactgcatggccgaatgccttactccagcaatttacgccaagcttcggaacaaagtgactcctaacggatataccttagaccagtgtattcaaaccggggtggacaacccagggcatccgttcatcaagacagtgggaatggtggctggtgacgaggagagctacgaggtgttcgccgacttattcgatccagtgataaagttgcgtcacaacggctacgacccaagagttatgaaacatacaacagacctcgacgcttccaaaatcacccagggccagtttgatgagcactacgtgctttctagccgggtacgtacgggtagaagtatcaggggtctgtctttgcccccggcttgtacgcgagccgagcgccgcgaagtggagaacgtggcaataaccgccctggaggggctcaagggagaccttgcaggacgctattacaaattgtctgagatgacagaacaggatcagcagcggctgattgacgaccactttctcttcgacaagcccgtttctcctctgctgacatgtgccggtatggcccgggactggccggacgcgcgaggaatctggcacaactacgacaagacttttttgatttggataaacgaagaagatcacacacgagtgatttcaatggagaagggcggcaatatgaaacgggttttcgagcggttctgcagaggactcaaggaagtcgagagactgatccaagaacggggatgggagtttatgtggaatgagaggttaggctacatcttgacttgcccctccaatttaggaacagggctgcgggccggcgtccacgttcgaatacccaagctcagtaaggacccaagattctccaaaattctggagaatctccggctgcagaaaaggggcaccggtggagtggatacggccgctgttgccgacgtgtacgacatttctaatatcgaccggatcggcaggtcggaggtcgagttagtccagatcgtgattgatggcgtcaactaccttgttgactgcgaaaagaaactcgagcggggacaagacattaaagttccaccccccctgccacagttcggcaaaaagtag

SEQ ID NO: 113149 - DNA, 1260 bp, synthetic construct
  misc_feature 1..1260: note = Description of Artificial Sequence: Synthetic coding sequence
  source 1..1260: mol_type = other DNA
atggcctcaatcttctctaaattactaactggaaggaatgcaagtcttcttttcgccaccatggggacctccgtgctaaccaccggttacctgctcaatcggcagaaagtgtgcgcagaagtccgggaacagcccagactcttccccccttctgcagactacccagacctgcgaaaacacaataactgtatggcagagtgccttacacccgctatttatgccaagctgcggaacaaggtgacacctaacggatacactctggaccagtgtatccagactggggtggacaaccccgggcacccattcatcaaaactgtggggatggtggctggcgatgaggagtcttacgaagtgtttgcggacctgtttgatccagtaatcaagctgagacacaatggctatgacccccgggtgatgaaacacaccaccgatttagacgcctcaaagattactcagggacaattcgacgagcattacgtcctgagttcaagggtgaggaccggtcggagcatcaggggcttgtctctgccccccgcttgtacccgcgcagaacgtagggaggtggagaatgtggccattaccgcactggagggcctgaaaggtgacctggccggtcgatattataagcttagcgaaatgaccgagcaggaccaacaaaggctgatcgacgaccacttcttattcgacaagcccgtgtctcctctgcttacctgcgcgggcatggcccgggattggcctgatgcaagagggatctggcacaactacgataagaccttcctcatatggatcaatgaggaggaccacactcgcgtaattagtatggaaaagggagggaacatgaagcgtgtgttcgaacggttctgtcgcggtctcaaggaagtagagcgcctaatccaagaacgtgggtgggagttcatgtggaacgaaaggctgggatacatactaacttgtccctctaacctcggtactgggctgagggccggggtccacgtgagaatcccaaaactgagcaaagatccacgcttctcgaaaatcttagagaatctgcggctccagaagcggggaacgggaggagttgacaccgccgcggttgccgacgtgtatgatatctccaatatagaccgcattgggcgtagtgaagtggagttggtgcagattgtcattgatggcgttaattacttggtagactgtgagaagaagcttgaacggggccaggatattaaagtaccacctccgctgccccaatttggcaaaaaatag

SEQ ID NO: 113150 - DNA, 513 bp, synthetic construct
  misc_feature 1..513: note = Description of Artificial Sequence: Synthetic coding sequence
  source 1..513: mol_type = other DNA
atggccagcattttctccaagctgctcacagggaggaatgcttcgcttctgttcgccacaatgggtacctcagtgctaaccactgggtacttgctcaatcgccagaaagtgtgtgctgaagtcagggagcaacctagactctttccgccctccgccgactacccagacctcaggaagcacaacaattgtatggctgagtgtctgacaccggccatttacgctaagctgagaaacaaggtgactccgaatggatatactctagatcagtgtatacagacgggcgtggataatccggggcatcccttcatcaaaacagtggggatggttgcaggagacgaagagagctacgaggtgttcgctgacctattcgatcccgttatcaagctgcgtcacaatggctatgatcctagggtgatgaagcacaccacagatttggatgcttctaaaattacccaggggcagttcgacgagcattacgtcctaagttcacgcgtgagaaccggccgcagttag

SEQ ID NO: 113151 - DNA, 1098 bp, synthetic construct
  misc_feature 1..1098: note = Description of Artificial Sequence: Synthetic coding sequence
  source 1..1098: mol_type = other DNA
atgggagttcctcgcccgcaaccttgggccctggggttgctgctgttcctgctgccagggtccctcggagctgagagtcacctgtcattactttatcaccttacagccgtcagctcccccgcaccaggcacccccgctttttgggtcagcggatggctcgggcctcaacagtatctgtcctataacagcctccgtggcgaagccgagccatgcggagcttgggtctgggagaatcaggtttcctggtactgggaaaaggaaacaaccgatttacgcattaaagagaagctgttcttagaagcgttcaaagcgctgggaggaaaagggccctatactttacagggcctcctggggtgtgaacttggaccagacaatacttccgtgccaactgccaagtttgccctgaacggggaggagtttatgaacttcgatctcaaacaaggcacatggggcggggactggccggaggctctagctatatctcagcgttggcaacagcaggataaagccgcaaacaaagaattgaccttcctcctgttctcatgcccacaccgcttgcgagaacacctcgagcgcgggcgcggaaatttagagtggaaagagccacctagcatgcgactgaaggcacgcccgagctctcccggatttagtgtgcttacgtgctcggcctttagtttctaccctcccgagctccaactacgatttctaaggaatgggttggcagccggtactggccaaggagatttcggccctaactctgacggcagtttccacgcctctagttccctcaccgttaagagtggagacgaacaccactactgctgtattgtgcagcacgctgggctcgcacagcctctccgtgtggagttggagagcccagccaaaagttccgtgctcgtggtaggaattgtcatcggggtcctcctgttgacagctgctgccgttgggggggccctgctttggcggcggatgcggtctgggcttccagcaccctggatctccctgagaggagacgataccggagttttactcccaacgcccggggaggcgcaagacgccgacctgaaggatgtcaacgttattcctgctactgcctag

SEQ ID NO: 113152 - DNA, 7329 bp, synthetic construct
  misc_feature 1..7329: note = Description of Artificial Sequence: Synthetic coding sequence
  source 1..7329: mol_type = other DNA
atggccgagaaccttcttgatggtccccccaacccaaagcgagccaaattgtcctcccctggcttcagtgctaacgacagcaccgatttcggttctctatttgacctggagaatgatctaccggatgagctgatcccaaatggaggagaactcggacttttgaacagcggaaacctggtccccgatgccgcctctaagcacaagcagctgagcgagctacttaggggcggatcagggagttcaatcaatcccggcatcgggaatgtgagtgcaagctcccctgtgcagcagggccttggaggtcaagcccaaggccaaccgaacagtgccaacatggcatccttgagcgctatggggaaatccccactcagccagggcgacagctcagccccttctctgcccaagcaggctgctagcactagtggccccactccagcagcctcccaggcgctgaaccctcaagcccagaaacaggttggtttggccacatctagccccgctaccagtcaaacgggcccaggcatctgcatgaacgcgaatttcaaccagacccacccggggctgctgaattcaaacagcggccacagcctgatcaaccaggcgagtcagggccaagcacaagtgatgaatggcagcctaggcgccgctggccgaggacggggtgccgggatgccgtatccaactcccgccatgcaaggggcctccagcagtgttctcgctgagaccttgacacaagtgtctcctcaaatgacagggcatgctgggctgaatacagcacaagccgggggtatggctaagatggggattacaggtaacaccagcccattcggacagccattctctcaagctggcggccagcccatgggcgccaccggcgtaaacccacagttagccagcaaacagagtatggtaaactcactgcccacctttcccaccgatatcaagaacacgtctgttaccaatgtccccaatatgtctcaaatgcaaaccagtgttggaatcgtgcccacccaggcaatcgctacaggaccaactgcagatcccgaaaaaaggaaacttattcagcaacagctcgttctgttactgcatgcgcataagtgccagaggagggaacaggccaatggcgaggtcagagcttgttctctccctcactgtcgcactatgaagaatgtgctgaatcatatgacacattgccaggctggaaaggcttgccaggttgcccactgcgcttcatcccgccagattatttcccactggaagaattgcacaaggcacgactgcccagtgtgtctgcccctgaagaacgcatcggataaacggaatcagcaaaccatactgggatcgcctgccagcggcatccagaacacaatcggaagcgtaggtaccgggcagcagaacgccacttcgctcagcaaccccaaccccattgatcctagtagcatgcagcgcgcctacgccgccctcggtctaccttacatgaaccagccacagactcagctccagcctcaggtcccagggcagcagcctgctcagccccaaacacaccagcaaatgcgcaccctgaatcctttgggtaataacccaatgaacatacccgctggagggatcacgactgaccagcagcccccaaatctgatctccgagagtgctcttcccacaagcctgggagcaacgaatcccctgatgaatgatggcagtaatagcggcaatataggtactctgagtacaatacctaccgcagcgcccccatctagtaccggggtgcggaagggctggcatgagcacgtcacccaggatctcaggtctcacctcgtacataaactggttcaggccatattccctacgcccgatcctgccgccttgaaggaccggaggatggagaatctcgttgcctacgccaaaaaggtggagggcgacatgtatgagtcagccaactcccgcgacgagtactatcacctcctggcagaaaagatctataaaatccaaaaagaactggaagagaaacggaggagtcggttgcacaaacagggtattctggggaatcagcccgccctaccagcaccaggcgcccagcctccggtgataccgcaggcacagccggtacgccctcctaacgggcccctgagtctgccggtgaatagaatgcaagtgagtcagggcatgaattcctttaatcccatgagcctgggcaatgtacaactgccacaggcgcccatgggaccacgtgcagccagcccaatgaatcactctgttcagatgaatagcatgggctccgtcccaggaatggctatttcaccatccaggatgccccaaccaccaaacatgatgggcgcccacacaaacaacatgatggcgcaggcaccagcccagtcacagtttctgcctcagaatcagttcccaagcagctctggcgcaatgtccgtcggcatgggtcagcctcccgctcagaccggggtcagccagggacaagtcccgggtgccgccctgcccaaccccctaaatatgctagggccccaagcctcccaactgccttgccccccagttactcagtctcccctgcaccctaccccccctcccgcgtctacagctgccggcatgccctctctgcagcatacgaccccccctgggatgaccccacctcagcccgcagcacctactcagcccagcacacctgtctcctcatctggacagacccctacgcccacaccaggctcagtcccctctgcaactcagactcagagcacgccaacggtgcaagccgccgctcaggctcaggtaacaccccagcctcaaactccggtgcagccgccttctgtggctactcctcagtctagccagcagcagcccactcccgtgcacgcgcaacctccaggtacacccttaagtcaggccgctgcaagtatcgataacagagttccaactccatcatccgtggctagcgccgaaaccaacagccaacagcccggaccagacgttccggttctggagatgaagactgaaacgcaggcggaagacacagaaccagatcctggtgagagcaagggcgagccccgctccgagatgatggaagaggatctgcagggggcatcacaagttaaggaagagactgatatcgctgaacagaaatcggagcccatggaagtggatgagaagaagcctgaagtgaaggtggaggtgaaggaagaagaagaaagctccagtaacgggactgcttctcaatccacttctccttcccagcccagaaagaagatattcaagcctgaagaacttaggcaggcgctgatgcctactttggaagccttataccgccaggatccggaaagcctcccatttaggcaaccagtggatcctcagctgctaggaatcccagattattttgacatagtgaagaatcctatggacctttcaactattaagagaaaactcgacacaggtcagtatcaggagccctggcaatacgtggacgatgtgtggctcatgtttaataacgcttggctatacaacaggaaaaccagtagggtgtacaagttttgcagcaagctggccgaggtgttcgagcaggagattgatccagtcatgcaatcactgggttactgctgtggccgcaagtacgagttctccccacagactctctgttgctacgggaagcagctgtgcaccataccacgcgacgcggcctactactcataccaaaaccgctaccacttttgtgagaagtgcttcaccgagattcagggtgaaaatgtcaccctgggagacgatccatctcaacctcagactacaatcagcaaggatcagtttgaaaaaaaaaagaatgacacacttgatccagagccttttgtggattgtaaagagtgcggccgtaagatgcaccagatctgtgtgcttcattatgacattatctggcctagtggcttcgtttgcgataattgtctgaagaaaaccggccggccccgcaaagagaataagttctctgcaaagaggctacagacaaccagattaggtaaccatcttgaagaccgcgttaataagtttttacgcagacagaaccatcctgaagctggggaggtcttcgtgcgggtcgtggcaagctctgataagacggtggaggtcaaaccaggaatgaaatctaggttcgttgacagcggggaaatgagcgaaagctttccttatcgcaccaaggcactctttgcttttgaggagatcgacggcgtggacgtgtgcttcttcggcatgcacgttcaggaatatggatccgattgccctccccccaatactcggcgggtgtacattagttacctggacagcatccacttcttccgcccgcgatgcctgcgaacagcggtgtatcatgaaattcttatcggctatctcgagtacgtaaaaaagctcggatatgtgacaggacatatctgggcttgtccgccctccgagggggacgattatatctttcactgtcaccctcctgaccagaagatccccaaaccgaagaggttgcaggaatggtacaagaaaatgttagataaggccttcgctgaaaggatcattcatgattataaggatatcttcaaacaggctacagaagataggcttacatcagcaaaggaactgccttacttcgaaggtgatttctggcccaacgttctggaagagagtataaaggagctggagcaggaagaagaggagaggaagaaggaggagtcgacagccgcctccgaaacgactgagggctctcagggcgacagcaagaatgcaaaaaaaaagaacaacaagaaaactaataagaataagagctctatttcacgggccaataagaaaaagccgtcaatgcccaacgtgtccaacgacctgtcccagaagctttacgccacgatggaaaaacataaggaggtattttttgttattcacctgcacgccggcccagtgattaacaccctcccccccatcgtggaccctgaccctctccttagttgcgacctcatggacggacgggacgcgttcttgaccctagcccgggataaacactgggagttttcttcccttagaaggtccaagtggtctactctgtgcatgttggttgaactccatacacagggccaggaccgatttgtctacacatgcaacgagtgcaaacaccacgtcgaaaccaggtggcactgtacagtctgcgaagactacgacctgtgcattaactgctataacacaaagtcccatgcacacaaaatggtcaagtggggcctgggcctagatgacgagggaagctcacagggcgagcctcagtcaaagagcccccaggaaagtcggcggttatctatccagcgttgcattcagtctttggtgcatgcgtgccaatgtagaaacgccaactgtagcctcccgtcgtgtcagaaaatgaagagggtggtgcaacacactaaggggtgcaaaagaaagaccaacggtggatgtcccgtgtgtaaacagctcattgcgctgtgttgttaccacgctaagcattgccaggagaataaatgccccgttcccttctgtctgaacattaagcacaaactgcggcagcagcagattcaacatagactgcaacaagcccaacttatgcgacgtaggatggccaccatgaacacgcgcaatgtgccacagcagtccttgccaagccccacatccgccccacctggaactccaacacagcagccatcgacccctcagaccccccagccccctgcacagcctcagccttcccctgtttccatgagtcctgctggctttccctccgtggcccgcacccagccgccaactacagtgtctacaggcaagcctacctctcaagtcccagccccaccacctcccgctcagccaccaccggccgcagtcgaagccgctcggcagatcgagcgtgaggcccagcaacagcagcatctataccgggtcaacattaataactcaatgcctccagggcgtaccggcatgggcacacccgggagccagatggctcctgtgagtctcaatgtccctaggcccaatcaagtgagcggcccagtaatgcctagcatgccaccaggacagtggcagcaggcacctttgcctcagcagcagccaatgccgggactaccacgccctgtcattagtatgcaggcccaggcagcagtggcagggccccggatgcctagcgttcagccccctagaagcattagcccttctgccttgcaagacctgctccggaccctgaagtctccctcatctccacaacagcagcagcaggtgctgaacatcttgaagtcgaacccgcaactcatggccgccttcatcaagcaaaggaccgctaagtacgtggccaaccagcctggcatgcagccccagccaggactacagtcccagccagggatgcaaccacagcccgggatgcaccaacagccctcactccaaaacctgaatgctatgcaggccggcgtacccagaccaggcgtacccccccagcagcaggccatgggaggattgaatcctcagggacaagcgctgaacattatgaatccagggcacaaccccaatatggcttccatgaatcctcagtatcgcgaaatgcttcggcggcagcttctgcaacagcagcagcaacaacagcagcagcagcagcagcaacagcagcagcagcagggcagtgctggcatggccggagggatggctgggcatggccaatttcagcagccccagggacctggtggctaccccccggccatgcaacaacagcagcggatgcagcagcatcttcccctgcagggaagttcaatgggacagatggccgctcaaatgggacagcttgggcagatgggccagccgggccttggggccgacagtacaccgaacatccagcaggcccttcagcagcggatacttcaacagcagcagatgaaacagcagataggctcacccgggcaaccaaatccaatgtccccccagcagcacatgctgtcgggacaaccgcaagcaagccatctgcctggtcagcagattgctactagtttatccaatcaggtaaggtctcccgccccagtacagtctcctcggccacagtcacagcctcctcactcatcaccctccccccggatccagcctcagcctagcccgcaccacgtgtccccacagaccgggagcccgcaccccggactcgctgttactatggcatcctctattgatcagggtcatctgggtaaccctgagcaaagcgccatgctgccacagttaaacaccccatcccgctctgcattaagctctgaactttcactagtgggtgataccactggcgacaccctggaaaagttcgtagagggtttgtag

SEQ ID NO: 113153 - DNA, 2934 bp, synthetic construct
  misc_feature 1..2934: note = Description of Artificial Sequence: Synthetic coding sequence
  source 1..2934: mol_type = other DNA
atgcatgtgcaggaatacggctctgattgtcccccgccaaacacaagacgcgtgtatatctcttaccttgactctattcacttcttcaggcccaggtgccttcgcactgccgtgtaccacgaaattttaatcggctatcttgaatacgtgaaaaagctaggctacgtcactggccacatctgggcttgtcccccctccgagggcgatgactatatcttccactgtcatcctccagaccagaaaatcccaaagccaaaaagactgcaggagtggtataaaaagatgctggacaaggcctttgctgaaagaatcatccatgattataaagatatcttcaaacaggccactgaggataggctgacatccgccaaggagctgccttacttcgaaggcgatttctggcctaatgtgctcgaagaaagtatcaaggaactcgagcaggaggaggaagagaggaagaaagaggaaagtacagcagcctctgagaccacagaagtgttcttcgttatacatttgcatgccggtccagtgattaatacactccccccaattgttgatccggaccctctgctatcttgtgacctgatggacggacgcgacgcttttctgaccctggcccgcgacaagcattgggagtttagcagtttaagaaggtctaagtggtcgaccctgtgtatgcttgtagagctgcatactcaaggccaagacagatttgtgtatacatgcaacgagtgtaagcatcatgtggaaacacgatggcactgcactgtttgtgaggattacgacctatgcattaactgctataacacaaaatcacacgcccacaagatggtcaagtggggactcggactagatgacgaggggtctagtcagggcgaacctcagtcgaagagtccacaggagagccgaagattatctattcaacggtgcattcagtccctagtgcatgcctgccagtgccgtaacgcaaattgttcactgccgtcctgccaaaagatgaaacgtgtcgtccaacacactaaaggctgtaaaaggaaaacaaacggcggatgcccggtctgcaaacagctgatagccttgtgttgctatcatgcaaagcactgccaagaaaacaaatgtcctgtgccgttctgcctgaatatcaaacacaagcttagacagcagcagattcaacacaggcttcaacaggcccagctgatgaggcgtcggatggctacgatgaatacccgcaacgtcccacagcagagcctgccttctcccacaagtgcacctcctggaacgcctacccaacagccttccacaccccaaacacctcagccccccgcccagcctcagccatctccagtgagcatgtcccctgccggcttccctagcgtggctagaacacagccccctacaacggtgagtacgggcaaaccgacgagccaggttcccgcccctccccccccagcccaacccccccccgctgctgtagaggctgctcggcagattgagcgggaggcgcagcagcagcagcatctgtacagggtgaatatcaacaactccatgcctcccggccgtaccggcatggggacccccggttcacaaatggcacctgtatcccttaacgtgcctaggcccaaccaggtgagcggccccgtgatgcctagtatgccaccaggccaatggcagcaggccccgctgcctcaacagcagccaatgcccggactaccacggcccgtgattagcatgcaggcacaggctgccgtcgccggcccccggatgccgtctgtgcaacccccgagatccatcagtccttccgccctgcaggatttgctcaggactctgaagtctccatcctcacctcaacaacagcagcaggtcctcaatattctgaaatccaatccacagcttatggcagcattcatcaagcagaggacagctaagtatgtggcgaatcagcctgggatgcagccacaaccaggactgcagtcccagccagggatgcagcctcagccgggcatgcaccagcagccctccttgcaaaacttgaacgccatgcaggccggcgtacccagacccggcgtacccccccagcagcaggcaatgggaggccttaaccctcaagggcaggccctcaacattatgaatcccgggcataaccctaacatggcgagcatgaacccacagtatagggaaatgcttagaagacagctgctccaacagcaacagcagcagcagcagcagcagcaacagcagcagcagcagcaacaaggaagcgcgggaatggccggaggaatggccgggcatggtcaattccaacagccccagggacctggtggctacccccctgcgatgcagcagcagcagaggatgcaacagcacctgccattacagggtagctcaatgggacaaatggcagcacagatgggccagttagggcaaatgggccagcccggtttgggtgccgacagcaccccaaatattcagcaggcactccagcagcggattctgcagcagcaacagatgaagcagcagattggatcccctggacaacctaaccctatgagtccccagcaacatatgctgagtggccagccccaggcgagccatctccctgggcagcaaattgctacaagcctatccaaccaggtaaggtccccagcacccgttcagtcaccccgcccacagagccagccaccgcactcctcccctagccctagaattcaacctcaaccaagtccgcatcacgtcagcccacagaccggtagcccacaccccggccttgccgtgactatggcaagctcaatcgatcagggtcacctcgggaacccggaacaaagtgccatgctgccacagctgaataccccttctagaagtgctttatcttcagagctaagcctcgtgggcgacactacaggcgacacactggaaaaattcgttgagggtttatag

SEQ ID NO: 113154 - DNA, 7215 bp, synthetic construct
  misc_feature 1..7215: note = Description of Artificial Sequence: Synthetic coding sequence
  source 1..7215: mol_type = other DNA
atggccgagaacctgctcgacggcccgccaaacccaaaaagggccaaactctcatcccccgggttctctgctaacgactccaccgacttcggtagtctgtttgatcttgagaatgatctccccgatgagcttatccctaatggaggggagttgggcctcctgaattccggtaaccttgtgccagacgcagcctctaaacacaagcaactcagtgaactgctgcggggtggcagtggttcaagcataaatcccggaatcggaaacgtgagtgcatccagccccgttcagcagggcctcggcggccaggcgcaagggcagccaaattctgctaatatggcgtctttgtcagctatgggcaagtcgcctctgtctcagggagattcctccgccccctctctgcctaaacaggcagcttccacttcgggtccgacacctgcagcctctcaagccctaaatccgcaagcccagaagcaggttggtctggctacaagctcccccgccacatcacagacgggtcccgggatctgtatgaatgccaatttcaaccagacccatccgggactcctgaatagcaatagcggccactcactaattaaccaggcctcacagggccaggcccaggtgatgaacggttctttaggcgccgcgggccgcggccgaggggcaggaatgccttatcctacccctgctatgcagggcgcgagcagctctgtcctggcggagacgcttactcaggtttctccacagatgacagggcacgcaggcctgaatacagctcaagctggaggcatggcaaagatgggtatcaccgggaatacatcaccctttggccagccgttcagccaagctggtggtcagccaatgggggctaccggagtgaatccacaactggcgtccaaacagtccatggttaatagcctgccgaccttccccaccgatatcaagaacacctcagtcaccaatgtgcccaatatgtcccaaatgcagaccagtgtggggattgtgccaacgcaggctatcgcaaccgggcccactgccgatccggaaaagcgaaaactcatccagcaacaactggttctgctcctgcacgcacacaagtgccagagaagggaacaggccaacggtgaggtgcgggcatgttctcttccacactgccgaactatgaaaaacgtactgaatcacatgactcattgccaggccggaaaagcctgtcaggctatcctgggtagtcctgcctcagggatacagaacaccatcggctcggtggggacaggccaacagaacgccacgtcactgtccaatccaaacccaattgatccaagctctatgcagcgcgcctatgctgccttaggtctcccttacatgaatcaacctcagacacagctgcagcctcaagtacccggacagcaaccagctcagccgcagacccaccagcagatgcgtacactgaatccactggggaacaatccgatgaatatacctgcaggtggcatcaccacggatcagcagcctccaaacttaatttccgagtccgcgctgccaacaagcctgggcgccactaaccccctgatgaacgatggctctaacagtggcaacatcgggaccttatctaccattcccactgccgctcctccatcatccaccggggttcggaaagggtggcatgagcacgtcacacaggacctccgcagtcacctggtacacaaactggttcaggcgatcttccctacgcctgaccctgctgctctgaaggacaggcgcatggagaacctggtggcatacgccaagaaggtcgaaggcgatatgtatgaaagcgctaacagccgggacgaatactatcacctcctggcggaaaagatttacaagatccaaaaggagttggaggagaaacgtcgaagcagattgcataagcagggcatcctcggaaatcagcccgcattgcctgccccaggcgctcagccacctgtgattccccaagcccagcccgtaaggcccccaaatggacctctttctctgcccgtcaaccggatgcaagtctcccagggaatgaattcgttcaatccaatgtccctcgggaacgtacagctgccacaggcgcctatgggcccacgggccgctagtccaatgaaccacagcgtacaaatgaatagcatgggctctgtccctggcatggcgatctcaccttctcgtatgcctcagcctcccaacatgatgggcgcccataccaacaatatgatggctcaagcaccagctcaatcccagttcctaccccagaatcagtttcctagctcaagtggggccatgtcagtcggaatgggccagccacctgcccagacaggagtcagccagggtcaggtgcccggagctgctctacccaaccccctgaatatgctggggccccaggcttcccaactcccttgtccccctgtgacacagtcccctcttcacccgacgcctccaccagcctctacagccgcagggatgccgagtctgcagcacaccacacctcccgggatgacacccccacagccagccgcccccacccagccgtccacccctgtcagctcctcaggccagacgcccactcccactccaggaagtgtgccatccgccactcagacccagagcaccccgaccgtccaagccgcagcgcaggctcaggtgacaccccaaccacaaaccccagttcagcctccgtcagtggcaacccctcaatctagccagcagcaacctactcctgtgcatgcacagccaccggggacacctctgagccaggccgctgcatcaatcgacaatcgagtaccgacaccctctagtgtggcctctgccgagactaatagtcagcagcccgggcctgatgtgcccgtgctagagatgaagaccgaaacccaggccgaggacacagagcctgatcctggagagtccaagggcgaaccccgttccgagatgatggaggaggacctgcagggcgctagccaggtcaaggaggagacagatatcgccgagcagaagtcggaacccatggaggtagatgagaagaagccagaggtgaaggtcgaggtgaaagaagaagaggagtctagttccaacggcactgcttctcagtcaacaagtccgagtcaaccccggaagaaaatttttaagccagaagagctcagacaggccctgatgccgacgctcgaagctctgtataggcaggatcctgaatctctgccctttcgacaacccgtggatcctcagcttcttggcatcccagactacttcgacattgttaagaaccctatggacctgtccacaataaaaaggaaattagataccggccagtatcaggagccctggcagtacgtggacgatgtgtggcttatgttcaacaatgcctggctctacaatcgcaaaacctccagggtgtacaaattctgttcaaaattagcagaggtgttcgaacaagagattgaccctgtcatgcaaagtcttgggtattgctgcgggaggaaatacgagttctccccacagaccctgtgctgttatggtaaacaactgtgcaccatcccaagagatgctgcttactattcctaccagaaccgttatcatttctgcgagaagtgctttacagagattcagggcgagaacgttactctaggtgacgatccgtcgcaaccgcagacgaccatctccaaggatcagttcgagaagaagaagaatgatacactggaccctgaaccctttgttgattgtaaggaatgtgggcgaaagatgcatcaaatctgcgtcctgcattatgatatcatctggccctcaggttttgtgtgtgacaactgtttgaaaaagacaggccggccccggaaagagaataaatttagcgccaaaagactgcagaccactcgcctgggcaaccatctcgaagaccgggtgaataaattcttgcgccggcagaaccatcctgaagctggggaagttttcgtccgcgtcgttgcctcaagcgacaaaactgtcgaggtcaagccagggatgaaatcccgcttcgtggactccggcgaaatgtcggagtccttcccataccgcaccaaagcgcttttcgccttcgaagagattgatggcgtggacgtgtgttttttcggtatgcacgttcaagaatatggcagcgattgcccgccccccaatacgaggcgtgtctacatctcatacctggacagcatccatttctttcgacctcggtgccttaggacggcagtgtaccacgaaattctgatcgggtaccttgaatacgtcaagaagctggggtatgttactggtcatatatgggcatgcccacctagtgaaggcgacgactacatctttcactgccacccccccgaccagaagatccccaagcccaagcggcttcaggagtggtataagaagatgctggataaagcatttgccgagcgtatcatacatgactataaggatatctttaaacaggcaaccgaagaccggctgacctcggctaaggagcttccatatttcgaaggcgatttttggccaaatgtacttgaagaaagcattaaagagctggagcaggaagaggaggaaagaaagaaagaagagtccaccgcggcctccgagaccacggagggatcacagggtgatagtaagaatgctaagaagaagaataacaaaaagacaaacaaaaacaagtcaagcatcagcagagcaaataagaagaaaccatcaatgcccaacgtgagcaacgacctctcacagaagctttatgctaccatggagaagcacaaagaagtgttcttcgtcatacacctccacgctggaccagttattaacacactccctcccatagtagatccagaccctctcctgtcgtgcgatctcatggatggtagagacgcattcctgacattggctcgcgacaaacattgggagttcagtagcctaaggcgctcaaaatggtcaaccttgtgtatgttggtagagttgcacacacaggggcaggatcggtttgtttacacttgcaacgaatgtaaacaccacgtcgaaacacgctggcattgcaccgtttgtgaagactatgacctatgtattaactgttacaataccaagtcacacgctcataaaatggtcaaatggggacttggcctcgatgacgaaggatcctcgcagggcgaaccccagtctaaatctcctcaagaaagccggagattatccatccaaaggtgtatccagtccctcgttcatgcctgtcagtgtagaaatgctaattgctctctgccttcgtgccaaaaaatgaaacgtgtcgttcaacacactaagggctgcaaacgcaagaccaacggtggatgccccgtgtgcaaacagttgattgccttgtgttgctaccacgctaagcattgccaggaaaataaatgcccggtgccgttctgtttgaatattaagcacaagctccgacagcagcagattcaacatcggctgcagcaggcccaactcatgaggagacgcatggcaacaatgaatacccgcaatgtgcctcaacaatccctgccaagtccgacaagcgccccaccaggcactccaactcagcagccctctaccccgcagacacctcaacccccagctcaaccgcaaccgtccccggtgtccatgtctcctgcaggcttccccagcgtagccaggacccaaccgccgaccactgtgagtaccggtaagcccacctctcaggtacccgctcccccacccccagcacagcccccaccagctgccgtggaggccgctcgtcagatcgagagagaggctcagcagcagcagcacctgtatcgagtcaatattaataacagcatgcctcccgggcgcactggcatgggaactcctggttcgcagatggcccctgtgagcctgaacgtacctaggcccaatcaggtctccggacccgtcatgccttccatgcccccaggccagtggcagcaagcaccgctaccccagcagcagcctatgcctggcctgcccaggcctgtcattagcatgcaggcacaggcagccgtcgccgggcctcgcatgcctagcgtgcagccacctcgcagcatttccccaagcgccctccaggatcttttgcgcaccttgaagtcaccctcttccccgcaacaacagcaacaagtgttgaacattttgaagagtaatcctcaattgatggccgcatttatcaagcagaggaccgccaagtacgttgctaatcagcccgggatgcaacctcagccagggcttcagtcacagcccgggatgcagccacagccgggtatgcaccagcagccctctcttcagaatttaaacgccatgcaagcaggcgtgcctcgcccgggtgtgcctcctcaacagcaagcgatgggcggactgaacccccaggggcaggctttgaatataatgaacccaggacacaacccaaacatggcaagtatgaatccacagtacagggagatgcttaggcgtcaactcctccagcagcagcagcaacagcaacagcagcagcagcagcagcagcagcagcagcagggaagcgccggcatggccggcggtatggctgggcatggccagtttcagcagccacagggaccaggtggctatccacctgcgatgcaacagcaacagagaatgcagcagcatctaccactgcaggggtcatcaatgggtcaaatggccgcccagatgggccaattgggccaaatgggtcagcctggcctgggcgccgattctactccgaacatacagcaggcacttcagcaaaggatcctccagcaacagcaaatgaaacagcagataggctctcctggacaaccaaatcccatgtccccccagcagcatatgctttccggccagcctcaagcaagccatctgccaggacaacagatagccacatccctcagtaaccaagtgcgctccccagcccctgtgcagtcgcctcgaccccagtcacagccccctcactcctctccttctccacgaatacagccccagccaagtccccaccacgtctccccccagacgggcagtccacaccccggactcgcggtgacaatggcgtctagcatcgaccagggccatctaggaaaccccgagcaaagtgcaatgctgccacagctcaataccccttcaaggagcgccctgagctcagagctgagcctggtgggtgacacaaccggtgatacactggaaaaatttgttgagggtctgtag

SEQ ID NO: 113155 - DNA, 7419 bp, synthetic construct
  misc_feature 1..7419: note = Description of Artificial Sequence: Synthetic coding sequence
  source 1..7419: mol_type = other DNA
ctccgaggcgctgttgccgtggccgagatctggccacctcctcctcccccaggattgagacctccctccccaagcgcccccgccaggcccctggctgctcgggcccgctcatcaccttcccagcccgcagggccacctactcctgttagagcgctcgcgggtcctgccgctcgcgctagagggtgcttccgggagcaggtgaaaatggccgagaatttgctggatgggccccccaaccctaaaagagctaagctgtcctccccaggcttcagcgccaatgattccacagacttcgggtctctgttcgatctcgaaaacgatctgcccgacgagctgatcccaaacggcggtgaactggggctgctcaattcaggcaacctagtacctgacgccgcctcaaagcacaagcagctgtctgaacttcttcgggggggatcgggatcttcaatcaacccgggcatcggtaacgtgagcgcaagcagcccagttcagcaaggcttggggggccaggcgcagggtcaacctaattccgccaacatggcctccctgagtgccatgggaaagtctcccctgtcccaaggcgactcctctgctcctagtctaccaaagcaggcagcttctacaagtggtcccactcctgctgcgtcacaggctctgaacccgcaagcccagaagcaggtgggactggccacatcctccccagccacatctcagaccggcccgggtatttgtatgaacgctaacttcaaccaaactcatcccggtttactgaatagcaactcaggacactctcttatcaaccaagcttcccaggggcaagctcaggtgatgaatgggtctctgggcgcagctggccggggcagaggggccgggatgccttatcccactccagctatgcagggcgctagctcctccgtgctggcggaaaccctaactcaagtctcacctcaaatgactgggcacgctggcctcaacacagcacaggccggcggtatggcgaaaatggggatcacaggcaacacaagccctttcggtcagccttttagccaggctgggggtcagccaatgggagctacaggagtcaatccccagctggcaagcaaacagagcatggtaaatagcctgcccaccttccccactgacataaagaacacatctgtgaccaatgtgcctaatatgtcccagatgcagacatctgtcggaatcgtgccaacgcaggccattgccacaggccctactgccgaccctgagaagcgcaaacttatccagcaacagctcgtcttgctactgcacgctcataaatgtcaacgcagagagcaagccaatggtgaggtgcgggcatgttccctgccccactgcagaacaatgaaaaatgtgctcaatcatatgacccattgccaagccggcaaagcctgccaggccattctagggtcccccgcttcaggtattcagaacacaattggcagcgtcggcaccggccagcaaaacgcaacatccctctcgaatcctaacccaatcgacccgtcttccatgcagcgcgcctatgctgccctcgggctcccttacatgaatcagccccagacacagttgcaaccccaagtgccgggccagcaacccgcccagccccagacgcaccagcagatgagaaccctcaaccccctcggtaacaacccaatgaacatcccagcaggggggatcaccactgaccagcaacctccaaatctgatctctgagagtgcgctgccaacgagtctcggcgctacaaatcccctgatgaatgacgggtcaaatagtgggaatattggaaccctgagcactatccccactgccgcgcccccaagctccacaggagtgagaaaagggtggcacgaacatgtgacacaggatctgcgctctcacctggtgcacaagctcgtgcaggctatttttcctacccccgaccctgccgccctgaaggacagaagaatggaaaatctggtagcgtacgctaagaaggtggaaggtgacatgtatgagtcagccaatagtagagatgaatattaccacctgttggccgagaaaatctataagatacaaaaggagctagaagaaaagaggcgctctaggctacacaagcagggaatcctgggcaaccagccggccctaccagcccccggcgcccaacctccggtgatcccacaggcgcagccagtgcgtccacccaacggccctctctcactgcccgtaaatcgaatgcaggtttcgcagggaatgaacagctttaatccaatgagcctaggcaatgttcagttgccacaggcccccatggggcctagggccgcctcgccgatgaaccactccgtgcaaatgaattccatggggagtgtgccaggcatggccatcagccccagccggatgccacagccacccaacatgatgggcgcccacaccaacaacatgatggctcaggcacccgctcagagtcagttccttccccaaaatcaattcccgtcaagcagcggagccatgagcgtggggatgggacagccccctgcccagacgggcgtttcccagggccaggtccccggcgcggcccttccaaaccctctcaacatgcttgggcctcaggcaagccaactgccctgccctccagtgactcagtcgccactgcatcccaccccccctcccgctagcacagctgcagggatgccctccttacaacacactacccctcccggaatgaccccaccccagccagcagccccaacacaacccagtacacctgtttcctctagcggccaaacaccgactcccacacctggctcggtcccgagtgccacccagacccagtcaacgccgactgttcaagcagccgcacaggcacaagtgactccccaaccccagacaccagttcaacccccatcggtcgctactccgcagtccagtcagcaacagcccacccctgttcacgcgcagcctccagggaccccgctgtcccaggctgccgcatcaatagataaccgggtgcccacaccctctagcgttgcctctgcagaaaccaacagccaacagccaggacccgacgttcctgtattggaaatgaaaaccgaaacacaggccgaggatactgagcccgatcctggggagtcaaaaggtgaaccaagatccgaaatgatggaagaagatctgcagggcgccagtcaggttaaggaagagaccgacattgccgagcagaaaagtgagcctatggaggtggatgaaaaaaaacctgaggttaaagtcgaggtgaaagaggaagaagagtcatcttcaaatggcaccgcctcgcagtctacatcgccctctcagccaagaaagaagatctttaaacctgaggagctccgccaggctctgatgccaactctggaagcactgtacaggcaggacccagaatccctgccatttcgtcaacctgtggacccgcagttgttaggtattcccgattactttgatatcgttaaaaatcctatggatctctctactataaaacgaaaactagataccggacagtatcaagaaccatggcaatatgtggatgatgtgtggctcatgtttaacaatgcatggctttataacaggaaaacaagccgagtgtacaaattttgctctaagctggcagaggttttcgagcaggaaattgacccagtgatgcagtcactcggctactgctgtgggcgaaagtatgagtttagcccgcagaccctgtgctgctacgggaagcagctgtgtacgatcccgcgcgacgctgcctattatagctatcagaatcgctaccacttctgcgagaagtgcttcactgagatacaaggagagaacgtgacactgggagacgatccttctcagcctcagaccaccatctccaaagaccagtttgaaaagaaaaagaacgatactttagatccagagccgtttgtggactgtaaggagtgcggacggaagatgcaccagatctgcgtgttacattacgatattatctggcctagcgggttcgtgtgcgataattgcctgaaaaaaacaggcaggcctcgtaaggagaataaattttctgccaaaaggctgcagactactaggctgggaaaccatctggaagatagggtgaacaagttcctccggaggcaaaaccacccggaagcaggtgaagtgtttgtgcgcgtggtggcgtctagcgataagacggtcgaagtgaaaccaggcatgaaatctcggttcgtggactcaggggagatgtctgagagttttccataccgtactaaagctctttttgcctttgaggagattgacggtgtggatgtatgcttcttcggaatgcacgtgcaggagtatggtagcgattgtccaccaccaaatacacgccgagtatacatttcatatctggattctatccacttcttccgccccagatgccttcgcacggctgtataccacgagatcctcataggatacctagagtacgtcaagaagctcggctacgtcacaggccatatctgggcatgtcctccttctgagggcgacgactacatctttcactgtcatccacccgaccagaaaatcccaaaaccgaaaaggcttcaagaatggtataagaaaatgctagataaagcctttgcagagaggatcattcatgattacaaagacatatttaagcaagccacagaggaccgccttacatctgccaaagagctgccatactttgagggagacttctggcctaatgtgctggaggagagcatcaaggagcttgaacaagaagaggaggagaggaagaaggaagagtcaacagctgcatcagaaaccaccgaggggtcacagggagatagcaagaatgccaagaaaaaaaataacaaaaagaccaacaaaaataagagtagtatatctcgagcgaacaagaagaagccatcaatgcctaatgtctctaatgacctcagtcaaaagctttatgctactatggaaaagcacaaagaagtgttttttgtgatacatttgcacgccggtcctgttattaacactttaccccctatcgtggacccagacccgcttctgtcttgtgatctgatggacggccgggatgcttttctgactttggctcgagacaagcactgggaattttcctcccttcggagatccaaatggtcgacactgtgtatgctcgtggagctgcacactcagggccaggatagattcgtatatacctgtaacgaatgtaaacatcacgttgaaactcgatggcactgcacggtctgcgaggactatgatctgtgcattaactgctacaacactaagagtcacgcacacaagatggttaagtgggggctaggtctggatgatgagggaagcagtcagggcgagccgcaatctaaatctcctcaggagtcccggcgcctgagcatccagagatgcatacagagtttggtgcatgcatgtcaatgtcggaacgccaactgtagcctaccatcttgtcagaaaatgaagagggttgtccagcacacaaaaggatgtaagcgaaagacgaatggaggttgtcccgtgtgtaagcagttgatcgcactttgttgctatcatgcaaaacattgtcaggagaataagtgcccagtgcctttttgcttgaacattaagcataaactcaggcagcaacaaattcagcaccggctgcagcaggcgcagcttatgcgcagacggatggctaccatgaataccaggaatgtgccgcagcagagccttccgagccccacgtcggcaccccctgggaccccgacacagcagccaagtacaccacagacgccacaaccccccgcccagccccagccgtcgcccgtgtcaatgtctcccgcaggctttcctagcgtcgccaggacacagccgcccaccacagtgtccacagggaaacctactagtcaggtccccgctcccccacccccagcccagccacctcccgcagccgttgaagccgctagacagattgagagagaggcccagcagcaacagcacctttatagagtcaacataaacaattccatgccacctggacggactggcatgggaacaccgggcagccagatggcccccgtcagtcttaacgtgccccggcccaaccaggtcagcggacctgtgatgccctccatgccgcccggtcaatggcagcaggcaccccttccacaacaacagccaatgcctggacttcctaggcccgtcatctcaatgcaggctcaggccgcagttgccgggccgcgcatgccaagtgtccaaccaccgagaagcattagcccatctgccctacaggacctcctgcggactctgaaaagcccaagcagcccacaacagcagcaacaggtgctgaacatcctgaaatccaatccccagctgatggccgcttttatcaagcaacgcacggcaaaatacgtggcaaatcagccaggcatgcagccacagcccggcctgcagtcacagccaggcatgcagcctcaacctggaatgcaccagcagccaagcctgcagaatctgaatgctatgcaggccggggtgccaagaccgggcgtacctcctcagcaacaggcaatgggaggcttaaatccccagggacaggctctgaacattatgaaccctgggcacaacccaaacatggcctcaatgaacccgcagtatagggagatgttgcgtagacagctcctgcaacagcagcagcaacaacagcagcagcaacagcaacagcagcagcagcagcagggaagcgccgggatggcaggtggaatggccgggcacggacagttccagcagccacagggtccaggagggtatcctcctgccatgcagcagcagcagaggatgcagcagcatctcccacttcagggatcgagcatgggacagatggccgcacagatgggacagttgggccaaatgggacaacccgggctgggtgccgactcaacccccaacattcaacaggccttacagcagcgaatacttcagcagcagcaaatgaagcaacaaatcggctcacctggtcagcccaaccccatgagccctcagcaacatatgctgagtggacagccccaagcttcacatctccctggacagcaaatcgctacaagcctgtctaaccaggtgagatcccctgccccggtgcagtcacccaggcctcagtcccagcctccacattcctcacccagtcccaggatccagccccaaccgtctcctcaccatgtatcccctcaaaccggctcaccacaccccggactggctgtcacaatggcgtcatccatcgatcaaggccatctgggaaatcccgaacaaagcgccatgctccctcagcttaatactcccagcaggagtgcgctttcgtctgagctttcgctggtcggcgatactacgggagatacgctggagaagtttgtggaaggcctttag

SEQ ID NO: 113156 - DNA, 1782 bp, synthetic construct
  misc_feature 1..1782: note = Description of Artificial Sequence: Synthetic coding sequence
  source 1..1782: mol_type = other DNA
atggccacatccaataacccccgtaagttttcagaaaaaatagctcttcacaatcagaagcaagcagaagaaacagccgcattcgaggaggttatgaaagacctgagtctcacccgtgcagccaggctccagcttcagaagagccagtatctgcagctaggcccatctagaggccagtattatggcggctccttgcctaatgtgaaccagattggatctgggaccatggacctgcctttccaaactcctttccagagttctggactcgacactagcagaactactcgccaccatggcctggtggaccgcgtgtacagagagagaggccgcctgggttcgccacataggaggccgttaagtgtggacaaacacgggaggcaggccgatagctgtccttatggcacaatgtatctgtcgcctccagctgacacatcgtggcgccgcaccaacagtgattcagcactgcaccagagcaccatgacccccacacagccagagtctttctcgagcgggtctcaggacgttcaccaaaaacgcgtgctgctattaactgtgcccgggatggaggagacgacgagcgaagccgacaagaacttatccaaacaggcttgggacaccaagaaaaccggatctaggcctaagagctgcgaggtgccgggcatcaatatttttccaagcgccgatcaagagaataccaccgcactcattcccgctacccacaatactgggggcagcctgcccgaccttacgaacatacacttcccatccccattaccaacaccactcgaccccgaggagcctacattcccggccctctccagtagctcttcaacaggcaacctggccgctaacctgacacatctgggcatcgggggtgcgggtcagggcatgagcactccgggttcaagcccccagcacaggcctgccggcgtttcccccttgtccctgtcaacggaagctcgacgtcagcaagctagtccgactctgagtccactttccccaataacacaggccgttgccatggacgccctgtcactcgaacaacagctgccatacgctttcttcactcaggctgggagccagcagccaccaccacagccacagccccctccccctccgcctccagccagccaacagcctcctccaccacccccaccccaggcaccagtacggctaccacctggaggtcctttgctgccgtctgcgtcgctgacgcgcggaccacagccaccacccctcgctgtcactgtcccatcgtctctccctcagagcccccctgaaaacccaggacagccctcaatgggcattgacattgcgtcggcacctgcgctgcagcaatataggaccagtgccggaagccctgcaaaccaaagccctactagcccagtatctaaccaagggttttccccaggatccagtccacagctggagcagttcaacatgatggaaaacgctattagctcaagctcgctatactctcctggctccacccttaactactcccaggctgcgatgatggggttaacaggctctcatggctctcttccagattcccagcagctcggctacgccagccatagtggaataccgaatattatcctgacagttaccggagaatccccaccatccctatccaaagagctaacgtcccacagagggcacttacccgatgggccccctgtgtccgggcacgctggaacactgcctctaagccggccagacggcgcctccccagcccgcggtaggccgtgctcagtccccaggcagcggccctctctgtag

SEQ ID NO: 113157 - DNA, 1905 bp, synthetic construct
  misc_feature 1..1905: note = Description of Artificial Sequence: Synthetic coding sequence
  source 1..1905: mol_type = other DNA
atggcaacttccaacaatcccaggaaattctccgagaagattgctttacataatcagaaacaggccgaggagaccgcagccttcgaggaagtgatgaaggacctgtctttgaccagagcagctcgcttgcagctgcagaagtcacagtacctacagctggggccgtcacggggccaatactacggggggtccctccccaacgtgaatcagatcgggagcggtacaatggacctgccatttcaaacgccctttcagagctcaggtctggatacatcacgcactaccaggcaccacggactcgttgacagggtgtacagggaacgtgggcgcctggggtctcctcatcggagacccttaagtgtcgacaagcatggccggcaggctgattcttgcccatacggcactatgtatctttcacctccggccgacacctcttggagacggactaatagcgactcagccctgcatcagagcacaatgacacctacgcagcctgagtcgttttcttccggcagccaggacgttcatcaaaaaagggtcctacttctcactgtgcccggcatggaggagactaccagtgaggctgataagaatttgtcaaagcaggcctgggacactaagaaaaccggctcacgtcccaagagctgcgaggtcccaggaattaatatattcccaagcgccgatcaagagaacactacagccttgattccagctacacataatacaggtggctcccttcctgacctaactaacattcacttcccctcacctctgccaacacccttagaccctgaggaacccacattccccgctctgtcttcttcttcaagcacaggcaacctggccgccaacctaactcaccttggcattggcggcgctgggcaaggcatgtctacacctggctcttccccccaacataggcccgccggtgtgagccccctcagcctgtcaacagaggctcgcaggcaacaggcctccccgaccttgagtcctttgtccccaattacccaagccgtggccatggatgctctcagtctcgaacagcagttgccatacgcgtttttcacccaagccggaagccagcagcctccacctcagccacagcctcccccaccaccaccacccgcttcccagcaacccccccctccccccccgccccaagcccccgtgcgcctcccacctggcggtccgcttcttccttccgcgtccctcacaagaggcccacaacccccccctctggccgttaccgtccctagctctcttcctcagtctccacccgagaaccctggccaaccgagcatggggatcgacatagcgagtgcccccgctctgcagcagtacaggacctccgcaggttcccccgccaatcaatcccccacctcccctgtgtcgaaccagggcttttcaccagggtcctcaccacaacatacatcaactttgggttcagtcttcggggacgcttactacgagcagcaaatggccgctcgccaggccaatgctctgtcccatcagctggagcagttcaacatgatggaaaacgcaattagttcatccagcctttactcacctggctcaaccctgaactacagtcaggcggcaatgatgggtctgactgggagtcacggcagcctgcctgactctcagcagctggggtacgccagccatagcgggataccaaacattattctcaccgtgactggagagtcaccacctagtctcagcaaggaactaacgagttctctggccggagtgggcgacgtcagtttcgatagtgacagtcagttccccctggacgagttgaagattgatcctctaaccctcgacgggttgcacatgctgaatgacccagacatggtcctggcagatccagccactgaggacacatttcgcatggacaggttatag

SEQ ID NO: 113158 - DNA, 1953 bp, synthetic construct
  misc_feature 1..1953: note = Description of Artificial Sequence: Synthetic coding sequence
  source 1..1953: mol_type = other DNA
atggccacctccaacaacccccggaagttttcggagaaaatcgctttgcataatcaaaagcaagcagaagaaactgcagcttttgaagaggttatgaaggatcttagcctgactagggctgcccgcctacagctgcaaaaatcccagtatctccagctgggccccagcagaggtcaatattacggcggctcacttccaaatgtgaaccagataggaagcggcaccatggatctccctttccagcccagcggttttctcggagaagcactggcggccgcgccggtctcactcaccccctttcagtcctcaggtctggacaccagtcggaccactcgccaccacggtcttgtcgatcgcgtttacagagagcggggccgcctcgggtccccccataggcggcctctgtccgtggataaacacggcagacaggccgatagctgcccctatggaactatgtatctgtcacctccagccgatacctcttggcgccgaactaatagcgactcagccctacatcagtccaccatgacgccaacacagcccgaatcttttagctctggaagccaggatgttcaccagaaacgagtactgttgctcacggtgcccggcatggaagagacaaccagcgaggccgacaagaacctgagcaagcaagcatgggatacgaagaagactgggtcccgcccaaagtcatgtgaagtacctgggattaatatcttcccaagcgcggatcaggaaaataccaccgccttgatacctgctacacacaacactggaggtagcctccccgacctgacgaatattcattttccaagcccccttccgaccccgctagatcccgaggagccaacctttcccgcccttagcagttcatcttccactggtaacctcgctgctaatctcacgcatcttggaattggcggcgccgggcagggcatgtctactcccggctcttccccccaacacagaccagccggcgtgtcgccgctgagcctgagtacggaggcccgtaggcagcaagcttcgcctacactctcccctctgtcaccaattacccaggctgttgctatggacgctctgtccctcgagcaacagctgccttacgcctttttcacacaagcaggcagccagcagcccccaccacagcctcagccaccacctccacccccccctgctagccagcagcctcctcctcctccacccccacaggcccccgtcagattgcccccgggcggcccattgttaccatccgccagcttgacgaggggcccccagccaccccctctggctgtgaccgtgccctctagtctgccgcagtctcccccagagaatcctgggcagccttccatgggcatagatatcgccagcgcccctgccctgcaacagtacaggacttccgcaggaagtcccgccaaccagagcccaacatcccctgtgagcaatcaaggctttagccctggaagttccccccagcatacgagcaccctcggcagcgtttttggagatgcttactatgagcagcagatggccgcacgacaggcaaatgctctgagccaccagctggagcagtttaacatgatggagaacgccattagtagctcttccctctactcacctgggtctactcttaactactcgcaggcagccatgatgggtcttactggtagtcatggatcattgcctgactcccagcaactgggatacgcgtcccactcaggaatcccaaacatcatactcactgtcaccggcgaatcccctccaagcctcagcaaagagctgacaagttctcttgcaggcgtcggcgatgtgagcttcgattcagactcccagtttcccttggatgaactgaagatcgacccactgacacttgacggcctgcacatgttgaacgatccagatatggtcctggctgaccccgctaccgaggatacgtttcggatggatagactgtag

SEQ ID NO: 113159 - DNA, 2082 bp, synthetic construct
  misc_feature 1..2082: note = Description of Artificial Sequence: Synthetic coding sequence
  source 1..2082: mol_type = other DNA
atggctacatctggcgccaatggccccggaagcgccacagcttctgccagcaaccctagaaagttcagcgagaagattgcgctacagaagcagcgtcaggctgaggaaactgccgcttttgaagaggtcatgatggacatcggttctaccagactgcaggcccagaaactgcggctggcctatactaggagctctcactacggtggcagtctgcccaacgtgaatcaaatcggctctggattggccgaatttcagtcccccctgcattctcctttagattcttcacgctcgacacggcatcatgggctggtggagcgggtacagcgggatccaaggagaatggttagccctctccgacgctataccagacacatcgattctagcccatattctcccgcatatcttagccctcctccagagtcttcttggaggcggactatggcatggggaaactttccggcggagaaaggacagttatttcgcctgccttctgctctgaatcgcacttcatcagactccgccctacataccagcgtcatgaatccctccccacaggatacctacccaggccctactcccccaagtatcctgccaagtcgcagggggggtattctcgacggcgagatggatcccaaagtccctgcaattgaggaaaacctcctggacgataagcacctgttaaaaccatgggatgcaaagaagctttcttcctcctcctccagacctcgctcttgcgaagtgccaggcattaacatttttccgtcaccggatcagccagcaaatgtacctgtcttacctccagcaatgaatactggcggctctctgcccgatcttactaacttgcattttccccctccactacctacaccacttgaccctgaagagacggcatacccgtcgttgtcagggggaaatagcaccagcaacttgacgcataccatgacccatcttggaatttcacgaggcatggggcttgggcctggttacgacgcccccggcctgcattctccactgtcacaccctagcctacagagctcattgtctaatcctaacctgcaggctagcctctcgagcccccagcctcagcttcaggggagccactcccatccatcactccccgcttcatcgctggcccgccatgttctacctacaacctctcttggtcacccctctctctctgcacccgcactgtcctcatcatcaagttcgtcttctacttcctcacccgtgctgggggcgcccagctaccctgcgtccaccccgggcgcctcgcctcaccatagaagggttccgctgagcccactgagtttgctcgccgggccggcagatgcccggagaagccaacaacagctgccgaagcaattttcaccaactatgagtcccaccttatcatctattacccaaggagtgccactcgacacaagcaaattgtctaccgatcagaggctgccaccctacccctactcttccccctccttagtgctccctactcagccccacacgcccaaaagtttgcaacagccagggcttccatctcagagctgctcagttcaaagctccggcgggcaaccacccgggcggcagtctcattatggcaccccctatcctcccgggccttcgggacacggccaacaaagctaccatcggccaatgagtgatttcaatcttgggaatctggaacagttctcaatggaaagcccatctgcctctttggtcctcgatcccccaggcttttctgaaggccctggttttctcggtggagaagggcctatgggtggccctcaggacccccacactttcaatcatcagaacctaacgcactgcagccggcatggcagcgggcccaacatcatcctcacaggagacagttcacctggtttctcaaaagaaatcgccgctgccctggctggagtgcccggttttgaagtgtccgccgctggcctggaactgggtctcggccttgaggatgaactgaggatggagccccttggcctggagggcctgaatatgctgagcgatccctgcgctttgttgcccgacccagctgtcgaggaaagctttcgctctgacagactacagtag

SEQ ID NO: 113160 - DNA, 1860 bp, synthetic construct
  misc_feature 1..1860: note = Description of Artificial Sequence: Synthetic coding sequence
  source 1..1860: mol_type = other DNA
atggcagcgtcaccaggaagcggctctgctaacccccgcaaattcagcgagaaaattgccctccatacccagcggcaagcagaagaaacaagggccttcgagcagcttatgaccgaccttactctgtcaagggtacagtttcagaagcttcaacagcttcgactgacccaatatcatgggggcagcctacccaatgtgtcccaactacgaagctccgcaagtgagtttcaacctagtttccatcaggccgacaacgtccgaggaactcgccatcacgggttggtagaacgccccagcaggaatcgctttcacccactccatcgcagatcgggagacaaaccgggccgtcagtttgacggctccgcttttggcgccaattattcaagtcagccactggacgagtcatggccacggcagcagcccccctggaaggatgagaagcatcctgggtttcggcttacttcagcactaaatcgcaccaacagcgactcagccttgcacaccagcgccctgagcactaagcctcaagatccgtacggtgggggcggtcagtccgcatggcccgccccctatatggggttctgcgatggcgagaataatgggcatggtgaggtggcctcgttccctggccccctaaaggaagaaaatctgctgaatgttcctaagcccttgcccaaacagctctgggagactaaggaaattcagtcactgtcaggtcgtccccgatcttgcgatgtggggggtggcaatgcgttcccacataacgggcagaatctggggctgagcccattcctgggtacactcaacacaggaggaagcctgcccgacctgaccaatttacattacagtacacctctcccagcatctctcgacaccaccgatcaccacttcggaagtatgagtgttggaaactcagtgaataatatcccagccgctatgacacacttgggaataaggtcctcttctggcctgcagagctcgcgctctaacccttcaatccaggccaccctgaacaagacagtgctgtcatcctcacttaataaccacccacagacaagcgtgccaaatgcttcagcactgcacccatccctcaggctcttttctctgtctaaccctagtctctcgacaactaatctgtccggcccctcccgcagaaggcaaccgcccgtttcccccctgacgctgagccctgggcccgaagcgcaccaaggattttcccggcaactgtctagtacctcaccattagcaccgtaccctacctctcagatggtttctagcgataggtctcagctctctttcttgccaacagaagcgcaggcacaagtgtccccaccccccccctacccagccccacaggaactgacgcagccgctgctccagcaacccagggcccctgaggccccggcccagcaaccgcaagcagcttcctcactgccgcagagtgattttcagcttctgcctgctcaggggagctccttgaccaacttctttccagatgttggtttcgaccagcagagcatgcggcctggacctgcctttccccagcaggttccactggtccagcaggggtcccgggagctccaggatagttttcatttgcggccatccccctactccaactgtggctctcttcctaacacaattttacccgaagactcatccacctctctttttaaggacctgaatagtgccctcgccggactgccagaagtatctctgaatgtggataccccatttccgcttgaggaggagctccagattgaaccactttccctggatgggttaaacatgctctcagacagttccatgggcctgctagaccccagcgtcgaagagactttcagggcagatcggctatag

SEQ ID NO: 113161 - DNA, 1857 bp, synthetic construct
  misc_feature 1..1857: note = Description of Artificial Sequence: Synthetic coding sequence
  source 1..1857: mol_type = other DNA
atggcagcgtcaccggggtccggatctgctaaccctaggaagttttctgagaagatcgccctgcacacgcaacggcaagcagaggagactagagcctttgaacagctcatgactgacctgacattgagtagggttcagttccagaaactccagcagctcaggctcacccagtatcacgggggctccctccccaacgttagccaattaagaagctcagccagcgaatttcagccctcctttcaccaagctgataacgttagaggaactcgccaccatggacttgtggagcggccctcgagaaacaggttccatccactgcatagacgctctggggacaaaccagggagacaatttgatgggtctgcctttggcgccaattattcttctcagccacttgacgagtcttggccgaggcagcagccaccatggaaggacgaaaagcacccggggttccggttaactagcgccctgaatagaaccaatagcgatagcgcactccacacgtcggcattgtcaacgaaacctcaggatccatacggaggtggtggacagtccgcctggcccgccccttacatgggcttctgtgacggggaaaataatggtcatggcgaggtggcctcttttccgggtcccctgaaggaggagaatctgctcaatgtacccaaacctctccccaagcagctgtgggagacgaaggaaatccagtccctctccgggaggccacggtcgtgtgacgtgggtggaggcaatgcgtttccccataatgggcagaacctgggactttcccccttcctcggaacgttaaacacgggggggagtctgcctgatcttacaaacctgcactatagcaccccgctccctgcttctctggacaccaccgaccaccatttcggcagcatgagcgtggggaatagcgtgaacaatatccctgccgctatgacccacctcggcattcggagcagcagcggtttacaatcttctcgctcaaacccgtctattcaggcaactctaaacaagaccgtactctcttccagcctgaataatcacccgcagaccagcgttccaaatgccagcgcacttcatccttccctccggctgttttcgctcagtaacccaagcctcagtacgactaacctgtccggccctagtcgcaggcgccagcctcctgtgtcgcccttgacccttagccccggcccggaagcacaccagggttttagccggcagttgagcagcacgtctccgctggccccatatccaacgagtcaaatggtgtcctctgatagatcccagttaagcttcctccccactgaagcccaggcgcaggtgtcccctccgcctccctatcctgcaccacaggagcttacccagcctctcctgcagcagccgagagctcccgaggcccctgctcagcagccacaggcagcgagctctttgccacagagtgactttcagttgctgccagcacaaggctcgtctctgacaaatttttttccggacgttgggtttgatcaacagagcatgcgtcccggccctgcctttccccaacaggtgccgctggtccaacaaggttctagggagctgcaagattcctttcacttaagacctagcccctacagtaactgtggctctctccctaataccatcctcccagattcctcaacaagcctgtttaaagacttgaattcggccctcgctggcttgccggaggtgtcactgaacgtcgatacacccttccccttggaagaggaactgcagattgagcctctgagccttgacggtttgaatatgctgtcggactctagcatgggactgctcgaccctagcgtggaggaaacattccgcgccgatagattgtag

SEQ ID NO: 113162 - DNA, 1749 bp, synthetic construct
  misc_feature 1..1749: note = Description of Artificial Sequence: Synthetic coding sequence
  source 1..1749: mol_type = other DNA
atgacggacctgactctgagtcgcgtacagttccagaaattgcagcagctgcggctcactcagtatcatggcggaagcctgcccaatgtgagccaactgagatcaagcgcttccgagtttcaaccttcctttcatcaggccgataacgtgagaggcacgcgccaccacgggctggtggaacgtccgtcccggaatagatttcaccccctccatagaagatctggagataaaccaggtagacagtttgacggttcagctttcggcgccaactacagctctcagccgttggacgagtcttggccccggcagcagcctccctggaaggacgaaaaacatcctggctttcgcctgacaagcgccttaaatagaactaacagcgacagcgcactccacacttctgctctgagcaccaaaccacaggacccatacggtggaggaggacagtcagcttggccagccccctatatgggattttgcgatggcgagaataacggccacggggaagtcgcaagcttcccaggcccactgaaagaggagaatctgctcaatgtgcccaagcccctgccaaagcaattatgggagacaaaagagatccaaagcctgtctggtcgtccacgcagctgcgatgtgggaggtggtaacgccttcccccataatggacagaacctaggactgtccccttttctggggacgctgaataccggtggatcactgccagatcttacaaatctgcactacagcacacctctacctgcgtccctggacacgacggaccaccactttggctctatgtcagtgggaaattcagtgaacaacatccccgccgcaatgacacacctgggcatcagaagttcaagtggcctgcaaagctcacggagcaaccctagcatacaggcaaccctgaataaaacagtgctcagtagttctctaaataaccaccctcagacatcagtgccaaatgccagcgcactgcacccatcattgcgcttattttccctgtccaatcctagcttgtcaactacaaatctcagcgggccatccagacgtagacagccccctgtgtcccccctcaccctgtcccccggacccgaggctcaccagggattcagtaggcagttgtctagcacttcacccctagccccatacccgacaagtcagatggtatcatccgacaggtctcagctgtcattcttgcctactgaagcccaagcgcaagtctctcctcctcccccatatccagccccgcaggagctaacgcagcctctgcttcagcagccacgggccccagaagcaccagctcagcagccccaggcagcctccagcctcccacaaagcgactttcaattgctgccggcgcagggaagcagtctgacaaacttcttcccggacgtcggcttcgaccagcagtcgatgcggccgggaccagccttcccccaacaagtgcccctggtacaacagggtagcagggaactacaagactcttttcacctcaggccgtctccatattctaactgcggctccctgcctaatacaattctgccagacagttccactagtctgtttaaggatctcaacagcgccctcgctggactaccagaagtatcactcaacgtggatactccctttcccctcgaggaggaactgcagattgagcccttgagtcttgatggccttaatatgctgtctgactcaagcatggggctgctggatccatccgtggaggagaccttccgggctgatagactatag

SEQ ID NO: 113163 - DNA, 672 bp, synthetic construct
  misc_feature 1..672: note = Description of Artificial Sequence: Synthetic coding sequence
  source 1..672: mol_type = other DNA
atgacctggagacatcatgttagactgttattcaccgtcagccttgcattgcagataatcaatctgggcaattcctaccagagagagaagcacaatggcgggagagaggaggtgacaaaggtggcgacacagaagcaccgccagagcccattaaactggacctctagccatttcggggaggtgactgggagcgctgaggggtggggaccggaagagccattgccctactcaagagcatttggggaaggagcatccgctcgtccacggtgctgtcggaacgggggaacgtgcgtcttaggatcattctgtgtttgtcctgcgcactttacagggagatactgtgagcacgaccaaaggaggagcgaatgtggcgcactggaacacggagcttggactctgcgtgcttgccacctctgtagatgcatttttggggcgttgcattgcctgcccctgcagactcctgaccgctgtgatcctaaggatttcttggccagccacgcccacggtccttccgcaggcggggcacccagcctgcttctccttctgccatgtgccttattgcacagactgctgcgccccgacgctcctgcccacccaagatccctggtgccctcagtgctacagcgggagcgcagaccctgcggcaggcccggcctggggcaccgcttatag

SEQ ID NO: 113164 - DNA, 2511 bp, synthetic construct
  misc_feature 1..2511: note = Description of Artificial Sequence: Synthetic coding sequence
  source 1..2511: mol_type = other DNA
atgactgccacagtcgagaacctgacctttcagaaagatacattagggaacgctgttgacaagaatcggcgtcacgggtccacagagcccctagtgcttgcttggagctctcagtttcggagactcacgtgggggtgcgccctggatgcccttcacaggtccccttgcgtggcggcctcccagcacggggtcacacacctcatcaggagcagtaggacaccccactcaacaagatgccgtaaagaggatgcacagcccggacatcatgggaacggtgccgcgtcagtaactgctcaagctcgtggacagcgttcagtgcttcaggtgccattacccgttcctcggtcatgtctcttttccgaaagtttcgtggtgtccgtttctagccagagtcgcttcctggctagtgtccccggaaccggggtgcaacggtctaccgccgctgatatggccgccagcacagctgcgggcaagcagaggattccaaaggtggcaaaggtgaaaaataaggcccccgcagaagttcaaatcaccgctgagcagttgttacgtgaggccaaggagcgcgagttagaactcttgcccccacccccccagcagaaaatcaccgatgaggaagagttgaacgattataagctacgcaaacgaaagacatttgaagacaacatcagaaagaatcgcactgtgatctctaactggattaagtatgcacagtgggaagaatccctgaaggagattcaacgggctagaagcatctatgagagggctctggatgtcgattaccggaatatcaccttgtggctgaagtatgcggagatggagatgaagaaccgccaggtcaatcatgctagaaatatctgggatagggcaattaccacgctgcctcgtgtgaatcaattctggtacaaatatacctatatggaagagatgctgggaaatgtagccggagccaggcaggtattcgaaagatggatggagtggcagcccgaagagcaagcctggcatagctacatcaatttcgagctgagatataaggaggtggacagagcccggacgatttatgagcggtttgtgttggtccatcccgatgtgaaaaactggattaagtatgctcgcttcgaagagaagcacgcatatttcgcgcatgctagaaaagtgtatgaaagggcagtggagttcttcggcgatgagcacatggatgaacacttgtacgtcgccttcgccaagttcgaagagaatcagaaagagtttgagcgtgtcagagttatttataagtacgccctcgaccgtatctctaagcaagatgctcaggagttgtttaagaattacaccatctttgaaaagaaatttggagatagacggggcattgaggacatcattgtctcaaagcgccgctttcagtatgaagaagaggtgaaggccaacccccacaattacgatgcctggttcgattacctgaggttagtggagtctgacgctgaggccgaagctgtgcgtgaggtgtacgagagagcaatcgcgaacgtgccccctatccaggagaagcgccattggaagcggtacatttacctgtggattaactacgccctgtatgaggagctagaagctaaagaccccgaacgtacccgacaggtgtatcaagcatctctggagctgataccccataagaagttcaccttcgcgaagatgtggatcctgtacgctcagttcgagatccggcagaaaaatctgagccttgctaggcgggccttgggaacttccattggcaagtgtccgaagaacaaactgttcaaggtgtatatcgaactagagctccaactgagggagttcgacagatgccgcaagctttacgagaagttcctcgaattcgggcccgagaactgtacatcctggataaaattcgcggaactcgaaacgattttgggagacatagatagggctcgcgccatttatgaattagccatttctcaaccacgtctggacatgcctgaggtgctgtggaaatcctacattgactttgaaatcgagcaggaggaaactgagcgaacccggaacttgtaccgccgcctgctgcagaggacacagcatgtaaaggtatggatcagctttgctcaattcgaactctccagtggtaaggagggatccttgaccaaatgccggcaaatttatgaagaagccaacaagactatgcggaactgcgaagagaaggaggaacgcctcatgctccttgagtcatggagaagctttgaggaagaatttgggaccgctagtgataaagagcgcgtggataagctgatgccagagaaggtgaagaagcggagaaaggtgcagacagacgatggctccgacgcgggctgggaggaatactttgattacatcttccctgaggacgcagcgaatcagcctaatctgaagctccttgccatggccaaattatggaagaaacagcagcaggagaaggaagatgccgagcaccatcctgatgaggatgtagacgagagtgaatcttag

SEQ ID NO: 113165 - DNA, 2547 bp, synthetic construct
  misc_feature 1..2547: note = Description of Artificial Sequence: Synthetic coding sequence
  source 1..2547: mol_type = other DNA
atgaccgcaaccgttgagaatttgacatttcagaaggataccctgggcaacgcggtcgataaaaacacatcccgtctcgaacttcgtagttattccctggccggacggcacggctctaccgagcctcttgtgctggcttggtcatcccagtttcggagactgacctgggggtgtgcactagatgcccttcaccgctctccatgtgtggcagcctcccagcatggcgttacccatctgattagaagttctagaactcctcactccacgcgctgcaggaaagaggacgcacagccagggcaccacggcaatggcgcagccagcgtgacggctcaggccagggggcagcgtagtgtgctacaggtgcctttacctgtgcctagatcttgtcttttctctgaatccttcgttgtatccgtgagttcacagagccgatttctggcctcggtgcctggcaccggtgtacagagaagtaccgccgccgatatggccgcctctaccgctgcaggaaagcaacggattccaaaagtcgccaaggtgaaaaacaaggcacccgccgaggtgcagataactgctgaacagctgctacgcgaagcaaaggagagggagctggaactgctgcctccccccccccagcaaaaaataaccgatgaagaggaattgaatgactataaactccggaagaggaagacgttcgaagacaacattagaaaaaataggacggtgatctccaactggatcaagtatgcccaatgggaggagagcctgaaggaaatccaacgcgcacgtagtatttacgagcgggctttagatgtggactaccggaatatcacattgtggttaaagtacgccgagatggaaatgaagaacagacaggtgaaccatgcacgaaatatttgggaccgggcaatcacgacattacctcgggtgaaccagttttggtacaagtacacatacatggaggagatgctcggcaacgtggctggggcacggcaggttttcgagagatggatggaatggcagcctgaagagcaagcgtggcatagttacattaacttcgagcttcgatataaagaagttgatcgggctcggactatatacgaacggtttgtgctggtacaccccgatgtgaagaactggatcaaatacgcccgcttcgaggagaagcacgcctatttcgcccacgccagaaaggtttatgaaagagccgtggagttttttggagatgaacatatggacgagcacctgtatgttgctttcgcaaaatttgaggagaatcaaaaagaattcgaaagggtaagggtcatctataagtacgccctcgacagaatctcaaaacaggacgctcaggagctctttaagaactacacaattttcgaaaaaaaattcggggaccgaaggggaatcgaggacatcatagtgtcgaagaggcggttccaatacgaggaggaagtgaaggccaatccgcacaattacgacgcctggttcgattacctgcgcttagtggaatccgacgcggaagcagaagcggtgcgagaggtctacgaacgagccattgctaacgtccccccaatccaagaaaagcggcactggaaacgctacatttacctgtggattaactacgccctttatgaggagcttgaagccaaggacccagagcggaccaggcaggtgtaccaagccagcttagaactgataccacacaaaaaattcacatttgctaagatgtggattctctatgcccagttcgagatccgacagaagaatctgtctctggctcgtagggcgctcggaaccagcatcgggaagtgtccgaaaaataagctctttaaagtgtatatcgaattggagttacaactaagggagttcgacaggtgcaggaagctgtacgagaaattcttggaattcggtccggaaaattgtacaagctggattaagttcgccgagctagaaaccatcctcggcgatattgatcgcgcgagagcaatatacgaactcgctatctcacagcctagactcgatatgcccgaggtgctctggaaatcctacatcgattttgaaatcgagcaggaagagaccgagcggactcgaaacctttacagaagacttcttcagaggactcagcacgtgaaagtttggatcagcttcgcccagtttgagctgagttccggaaaggaaggttccctcaccaaatgcaggcagatctatgaggaggccaataagactatgcgaaactgcgaagagaaggaggaacggttgatgttgcttgagagctggcggtccttcgaagaagagttcggtacggcaagcgacaaggaacgggtcgacaagctgatgccagaaaaggtgaagaaaagaaggaaggttcagactgacgacgggagcgacgcggggtgggaggaatatttcgattacattttccccgaagatgccgctaaccagccgaatttgaagctcttggccatggctaaactatggaaaaaacaacaacaggagaaagaggacgcagaacaccacccagatgaggacgtcgatgagtcagagtcctag

SEQ ID NO: 113166 - DNA, 7026 bp, synthetic construct
  misc_feature 1..7026: note = Description of Artificial Sequence: Synthetic coding sequence
  source 1..7026: mol_type = other DNA
atgaaaaatatatactgcctgattccaaagctcgtcaatttcgctaccctcggttgcctttggatatccgtggtccaatgcaccgtgctcaatagctgcctcaagtcctgcgtgactaacttagggcagcagctggatctggggaccccacacaacctttcagagccttgtatccagggttgtcacttctggaattctgttgaccagaaaaactgtgctctgaaatgtaatgatacatacgcgactgtgtgcgaaagggaatcctgtgaagttgggtgctcaagtgccgaaggtgcgtacgaagaagaagtcctggagaacgccgacctgccaacggccccgtttgcgtcttctattgggtcacacaatatgacactccgctggaagagcgccaatttcagcggtgtgaagtacattatccagtggaagtacgctcagcttctggggtcctggacttatacgaagacagtgagtcgcccatcatacgtggtcaagcctctccatcctttcaccgagtatatcttccgagtggtttggattttcacagcacaactgcagctgtattctcctccctcaccttcctacaggacccacccccacggagtacctgagactgccccgctcattcggaatatcgagagctcttctcctgacaccgtggaagtgtcctgggatccccctcaatttcctggcggccccattctaggctacaacctgcggttaattagcaagaatcagaagcttgatgcaggaacccaacggaccagctttcaattctacagtacattgcccaataccatttaccggttcagcatagcggcagtgaatgaagtgggcgagggccctgaagctgaaagcagcattaccacatcgagttccgccgtgcagcaagaggaacagtggctatttttatcaaggaagacctctctccgcaaaagaagccttaaacacctggtggacgaggcacactgcttacgtctggatgcaatatatcacaacatcaccggtattagtgtcgatgttcaccagcagatcgtgtacttctccgagggcaccctcatttgggccaaaaaggccgccaacatgtctgacgtttcggatctgcgcatcttctacagaggatctggattgattagctctatttccatagattggctgtaccaacgcatgtacttcataatggatgaacttgtttgcgtctgcgacctggagaattgttctaatatagaagagatcacaccacctagtatctccgccccccagaaaattgttgcggactcctacaacgggtacgtcttttatctcctgagagacgggatatatcgagccgatttacctgtgcccagcggtagatgtgcagaagctgtccgaatcgtcgagagttgtacccttaaggatttcgccatcaagccgcaggccaagcggataatctacttcaatgataccgcccaggttttcatgagtactttcctggatgggtctgcgtcccacctgatacttccaaggataccatttgctgatgtcaaaagttttgcttgcgaaaacaatgattttttggtgaccgatgggaaggtcatctttcagcaggacgctctgagcttcaatgaattcatcgtgggatgtgatctgtcacacattgaagaatttggctttggaaacttggtgatcttcgggagcagttcgcagttacacccacttcctggcagaccccaggaattgtccgtgctctttggctctcaccaggctctcgttcagtggaaacctccagctctggctattggagcaagtccttctgcttggcaaaattggacatacgaagtgaaagtgtccacgcaggacccacccgaggtgacacatattttcctgaacatttccggtacaatgctgaacgtccccgaactccagtctgctatgaaatataaagtttcagtcagggccagcagtcccaagaggcccggaccttggtctgagccttctgtagggaccacactcgtgcccgctagcgagccccccttcatcatggccgtgaaggaagatggactttggagcaaacccctcaattccttcggaccaggggaatttctgtcatcagacataggcaacgtttcggacatggattggtacaataacagcctgtattattctgataccaagggtgacgtgttcgtgtggttactgaacggaaccgatatttcagagaactaccacctgccgagcattgctggggctggggctctggcttttgagtggttggggcatttcctctactgggctggaaaaacttatgtcatccagagacagagcgtgcttaccgggcacactgacatagtgactcatgtgaaacttttagtgaatgacatggtggtggatagcgtagggggctacctttactggaccaccctgtactcagtggagtcgacaagactaaacggagaatcaagcctggtccttcagacccagccatggtttagcggaaagaaggtgatcgccttgaccttagatttgtcagatggcctgctctactggcttgtgcaggattcgcagtgcattcacctttacactgcggtgctgcgcggacagtctactggcgacacaactatcacagagttcgcggcatggtccacctctgagatctcacagaacgctctaatgtattactccggacgactgttctggataaacggcttccgtatcataactacccaagagatcgggcagaagacttcggttagtgtgctagagcctgcacgcttcaatcagtttacaatcattcagacatccttaaagcctcttccaggcaatttctcgttcaccccaaaagttatccctgacagtgtccaagagtcttcgtttaggatcgagggcaacgcatccagcttccagatcttgtggaatggcccccctgcggtggattggggtgtggttttctactctgtggaattcagtgcccactcaaaattcctcgcttcagagcagcattcgctgcctgtattcacagtggaagggttggaaccttacgccttgttcaacttgtctgtgaccccatacacctattgggggaaaggcccaaagactagcctttctttgcgggcgcctgaaaccgtgccctcagctcctgaaaacccccgtatctttatcttgccaagcggtaaatgctgtaacaaaaatgaggtcgtagtggagttccggtggaataagccgaaacacgagaacggagtattgacgaagtttgagatcttctacaatatttccaatcagtcaatcactaataaaacctgcgaggactggatcgccgtcaatgttactccctctgttatgtcctttcagcttgaaggtatgtcgcctaggtgcttcatcgcttttcaggtccgcgcctttacatctaaaggaccaggcccctacgcagacgtggtaaagagtactacatccgaaattaatccattcccacatttaattacgctgctgggcaacaagattgtctttctggacatggatcagaatcaggtcgtctggactttttctgctgagcgcgttatcagcgccgtctgctatacagccgataacgaaatgggctattatgctgagggggacagcctgttcctattgcatctgcacaaccggtcctccagcgagctctttcaggatagtctcgtctttgatatcaccgtgattacaattgactggatatctcgccatttatacttcgcactgaaggagagtcagaacggcatgcaagtgtttgacgtggatttggaacacaaagtcaagtatcctagggaggtgaaaatccacaatagaaactccacaattataagtttttcagtatatcccctcctctcaaggctgtattggaccgaggtaagcaatttcggatatcagatgttctattatagtattatctctcatacgctgcaccgcatactgcaacctacggctaccaatcagcaaaacaaaaggaatcagtgctcttgtaatgtgacggaattcgaacttagcggtgccatggcaatcgatacctctaatctggagaaacctctcatatatttcgctaaggctcaggagatatgggccatggacctggaaggttgtcaatgctggcgcgtcatcacagtccctgctatgctcgggaagacattggtctctctcacggtggacggtgacttgatttactggattatcaccgcaaaagactctacccagatctatcaggctaagaagggcaatggagccatcgtgtctcaggtgaaagcactgcgaagtagacacattctggcttatagtagcgtgatgcagccctttccagacaaagctttcctgtcgcttgctagtgatacagtggagcctacgatattaaatgctacgaacactagtctgactattagactcccgctggctaaaactaacctcacgtggtacggcatcacctccccaaccccaacgtacctggtgtactacgccgaagtgaatgacaggaagaacagtagcgatttgaagtaccgaatcctcgaatttcaggacagtattgccctgatagaggatctgcaacctttttctacttatatgattcagatagccgtcaaaaactactactctgatccgcttgaacatctcccccctggaaaggaaatctggggcaaaaccaagaacggagtgcccgaggccgtgcagttgattaacaccactgttcgctcagatacttcactcattattagttggagggagagccataaacccaacggaccaaaagagtctgtgagatatcaacttgccattagccacctggctctcatccctgagaccccccttaggcagtctgaatttccaaatggacggcttacactactggtcacacgcctgtctggagggaacatttatgtgctgaaggtactcgcttgtcattcagaagagatgtggtgtaccgagagtcatcctgtgacagtagaaatgtttaacacgcccgaaaagccgtattctttagtgccagaaaacacatctttgcagtttaactggaaagcccccctgaatgtgaatctgattcgtttctgggtggagctgcagaaatggaagtacaacgagttttaccatgtaaaaacctcctgtagccagggccccgcttatgtgtgtaacattaccaatcttcagccctatacttcgtataacgttcgcgtcgtcgtagtctataaaacaggcgagaactcaacttccctgcccgagtccttcaagacaaaggctggggtgcccaataagccaggcataccaaaattgctggagggttcaaagaattcaatccaatgggaaaaagccgaggacaatgggtgtcgtatcacatattatatccttgagatccggaagtctacaagcaacaacctacagaaccaaaatcttcggtggaagatgacttttaatggttcttgctcctccgtatgtacgtggaagtcaaagaacttgaagggaatctttcaattcagagtggttgctgcaaataacctgggtttcggcgagtactccggcatctccgagaatatcattctggtaggcgatgatttctggatcccagagaccagcttcattctgacaataattgtaggaatctttctcgttgtgaccatccctcttactttcgtgtggcacagaaggctgaaaaatcagaagtcggccaaggaaggtgtcaccgtgctcattaacgaagataaggaactcgctgagctgcgaggcctggccgccggtgtggggctggccaatgcctgttatgcaattcacactcttcccacacaagaagagattgaaaatcttccagctttccccagagagaagctgaccctgaggctgttgctggggtctggggccttcggtgaagtctacgagggcaccgcagtggacatactcggcgtgggaagcggtgaaatcaaggtggccgtgaagaccttgaaaaaaggaagtaccgatcaggaaaagattgagttcctcaaagaggctcacctaatgagcaaattcaaccatcctaacatcttgaaacagttgggcgtttgcctccttaacgaaccacagtatattatcttggaattaatggaggggggcgacctgctgacgtatctccggaaggctagaatggccacgttttatggaccactgcttactctcgttgacctggtggatctgtgtgtggatatcagtaagggttgcgtgtacttagagagaatgcacttcattcaccgagatcttgctgctagaaattgccttgtaagcgtcaaagactataccagccctcggatcgttaagatcggagatttcggcctggccagggacatctataagaatgactactacaggaagcgaggagagggattgttacctgtgcggtggatggcccctgagagcttgatggacgggatattcaccacccaatctgacgtctggagcttcggcatccttatttgggagatacttacacttgggcatcagccttaccccgctcacagcaacctagatgtcctgaactatgtgcagactggcggacgcctggagcccccgcggaactgtcctgatgacctttggaatctgatgacacagtgctgggcacaggagcctgaccaacgtccgacgttccaccgcattcaggatcagctccaacttttccgcaactttttcttgaactctatctacaagtcaagggacgaagctaacaacagcggcgtgatcaacgagagcttcgagggagaagatggtgatgttatttgtcttaactccgacgatatcatgccggtggcacttatggagacaaagaatcgagaaggcttaaactacatggtgctggccactgagtgtgggcagggtgaagaaaagagcgaggggccactcggaagccaagaatccgaaagctgcggtctgcggaaggaagaaaaggagccccatgcagacaaagacttctgtcaggaaaagcaggtggcatactgtccctccgggaaaccggagggattgaactacgcatgcctaacacattcgggttacggcgacggaagcgattag

SEQ ID NO: 113167 - DNA, 7044 bp, synthetic construct
  misc_feature 1..7044: note = Description of Artificial Sequence: Synthetic coding sequence
  source 1..7044: mol_type = other DNA
atgaaaaatatttattgtctgataccaaaactcgtcaatttcgcgacactcggctgtctctggatttcagtcgtccagtgtacagtgcttaacagctgccttaagtcttgcgtgactaaccttgggcagcaactggacctggggacaccacacaacctctccgaaccgtgtatccagggctgccacttctggaattctgtagatcagaaaaattgtgcactgaaatgtcgggaatcttgcgaagttggatgctcttccgcggagggggcttacgaagaggaagttttagaaaatgcagacctacccacggctccttttgcgtcctcgattggtagccacaatatgacactaagatggaaatcagccaattttagcggggtgaaatacatcatccagtggaaatacgctcagttactgggctcttggacatacactaaaacggtgtcccgaccttcgtacgtcgtaaagccactacacccgttcacagagtacatctttcgggttgtctggatattcacagcccagttgcaactgtactcaccccccagcccaagttacaggactcatccgcatggggtacctgaaacggcccctcttattcgaaacatcgagtctagcagcccagatacagtcgaagtgtcatgggatcccccacagtttcctggtgggccaattcttgggtataaccttagacttatcagtaaaaaccaaaagttggacgccggtacccagcgaacctcgtttcaattttacagcactttgcccaatactatttaccgcttcagcattgctgccgtcaatgaggtgggcgagggaccagaggcagaaagctccattactacctcttctagtgctgtccagcaagaggaacagtggctgtttttaagtcggaagacttctttgcgaaagagatctttgaagcatctggtggacgaggcgcactgcctcaggcttgatgcgatctaccacaatatcaccggaatcagcgttgacgtgcaccagcagatcgtatatttcagcgagggaacactgatttgggccaagaaagcagcaaacatgtccgacgtcagtgatctccgcatcttctacagagggagcggcttaatcagtagcatctcaattgattggctgtatcagcggatgtactttatcatggacgaactcgtgtgcgtatgcgacctggaaaactgttctaacatcgaggaaattacaccacccagtatctccgccccacagaagattgtcgccgactcctataacggctacgttttctacctcctacgcgacggtatctaccgagccgacctgcctgtcccctccgggcggtgcgcggaagccgttagaatcgtggaatcatgcacccttaaggacttcgccatcaagccacaggccaagcgcatcatttattttaatgacacggcgcaggtgttcatgagtaccttcctagatggctctgcttcccatcttatacttcccaggataccattcgcggacgtcaagtcttttgcatgcgaaaacaatgatttcctcgtgacagacgggaaggtgatcttccagcaggacgccctaagcttcaacgagtttatagtggggtgtgatctgagccatatagaagagttcgggtttggaaatcttgttatatttgggtcttcatctcagctgcaccctctgccaggaaggccacaggaactcagcgtgctcttcggctcacaccaggccttggtccagtggaaaccccctgctctggccataggcgcaaatgtgattcttatctcggatatcatcgaattgtttgagctgggccccagcgcatggcagaattggacctacgaggtcaaggtaagtacacaggacccgccggaggtgacacacatttttctaaatatctccggcacaatgctgaacgtgcccgaattgcagtcagctatgaaatataaggtcagtgtcagagcttcaagccctaagaggcccggaccatggagcgaacctagtgttgggaccactttggtgccagcatccgagcccccttttatcatggccgtcaaggaagatgggctctggagcaaacctctgaactccttcggcccgggcgaatttttgagtagcgacatcggaaacgtgtcagatatggattggtacaacaattccctgtactacagtgacacaaagggagatgtcttcgtgtggttactcaacggtacagacattagcgagaattaccacctgccaagtatcgccggagcaggcgcactcgcgttcgagtggttgggccacttcctttattgggctgggaagacttacgttattcagagacagtcagtcttgactggccacacggatatcgtgactcacgtgaaactgttggtaaacgatatggtggtggactctgttggaggctatctgtactggacaacgctgtactccgtggagtcaacaagactgaatggtgaaagctccctggttctgcagactcagccctggttttcagggaagaaggttattgccctaactctggatttaagtgacggcttgttatattggcttgtccaggacagccagtgcattcacttgtacacagccgtgttgcgtggccagagcacaggcgatactactatcaccgagttcgcagcatggtcaacatcagagatatctcaaaatgccctgatgtactacagcggacggctcttttggattaatggatttagaattattaccacccaggagattggacaaaaaacctccgtgtctgttctggaacctgcccggttcaatcagtttactatcattcagaccagtctgaagcctctccctggaaacttctcattcacccctaaggtgatccctgacagtgtgcaagagagttccttccgcatcgagggtaatgcctcctcttttcagatcctgtggaatggtccccctgccgtggattggggcgtagtcttctattccgtggagttcagtgctcactcaaaatttctggcttccgagcagcacagtttgccagtttttaccgttgaaggtctcgaaccctacgccctcttcaacctgagcgtaaccccatatacttattggggcaagggtccgaagacctccctctctcttcgcgcccccgagactgtgccaagcgcgccggaaaaccctcggattttcattctgcctagcgggaaatgttgcaataaaaatgaagtggtcgtcgagttcaggtggaataaaccaaagcatgagaacggggttctaaccaagttcgagatattctacaacatatccaatcagagcattactaataaaacctgtgaggattggatagcagtaaatgtgaccccgtctgtgatgtcctttcagctggaggggatgtcaccccggtgcttcattgcattccaggtgagagcatttacatcaaagggtcccggaccttacgcagacgtcgtgaagagtactacatcagaaataaaccctttcccccacctgatcaccttgcttggaaataaaatcgtctttttggacatggaccaaaaccaggtcgtgtggactttcagcgcagagcgggtgatttcagcagtttgctatacagccgacaacgagatgggatattatgctgagggtgacagccttttcctgttgcatctgcataacaggagctcctccgagttattccaagacagtcttgtattcgatataactgtaatcacaatcgactggatatccagacacctatatttcgccttgaaagaatctcagaatgggatgcaggttttcgatgtggatttagagcacaaggtcaaatatccacgcgaggtgaagatacacaataggaactcaactattatctcattttcagtgtatcctctcctgtcccggctgtactggactgaggtgtctaacttcggataccagatgttttactacagtataatttcacacaccctacataggatacttcagcccacagccactaatcaacagaataagcgtaatcagtgcagctgtaacgtgaccgagttcgagttaagcggagccatggccattgatacgtccaatctcgaaaagcccctcatttactttgcgaaggcccaagaaatctgggcgatggacttggagggatgtcaatgttggagagtaatcaccgtccctgcaatgcttgctggtaagacactcgtgtctctcacagtcgatggcgatctgatctattggataatcacggccaaggactctacgcagatctaccaggctaaaaaaggcaacggagccatcgtctcacaagtcaaagccctgaggagcaggcatatattggcttactcaagtgtgatgcaacctttccccgataaggcctttcttagtcttgcctcagacacagtggaaccaactattctgaatgcgaccaataccagcctcactatccggctacctttggcaaaaacgaacctgacatggtatggaataacatccccaacccctacctatctggtgtattatgccgaggtgaatgaccgaaagaactcttctgacctgaagtatagaattcttgagtttcaggactcaattgcactgattgaggatctgcaaccttttagtacatatatgatacagattgcagttaagaactactactctgaccccttggagcacttgcctccgggaaaagagatctggggcaaaacgaaaaacggcgtccctgaggcagtgcaactgattaacaccactgtcaggtcggatacatcacttataatctcatggagagagtcacacaagcctaacggccccaaggaatccgtccgctatcaacttgcgatatctcatttggctttaatccctgaaacacccctgaggcagtcagagtttccaaatggcaggttgacgctcctggtcaccagattgtccggaggcaatatttacgtcctcaaggtattagcctgtcattccgaggagatgtggtgcactgaatcacatcctgtgactgttgagatgttcaacactccagaaaagccatattccctggtacccgagaacacatccctccagttcaactggaaagcacctctaaatgtcaatctaattaggttttgggtggagttgcagaagtggaaatacaatgaattttatcacgtgaaaactagttgttcccaaggcccagcatacgtgtgtaacatcactaacctacagccttacacatcttataacgtgagagtggtcgtcgtgtacaaaacaggggagaacagtaccagtctccccgagtcctttaagactaaagcgggagtcccaaataagcctggcatccccaagttactcgaagggagtaagaatagtattcaatgggaaaaggctgaggataatggatgtcgaatcacctattacatcctagagattaggaaaagcacatctaacaaccttcagaatcagaatctgaggtggaagatgacgtttaacggttcctgttccagtgtgtgcacatggaagtcaaagaatctcaaagggattttccaattccgggtggtcgccgctaataatctcggcttcggggagtacagcggaatctctgagaatataattcttgtgggggatgatttctggattccagagacgtctttcattctgaccataattgtcggcatttttcttgttgtgacaataccgttgaccttcgtttggcataggcgactgaaaaaccagaagtctgctaaggaaggcgtcacggtgttgatcaacgaggataaggaactggcagaactgcgaggcctagcagcaggcgtgggactcgctaacgcatgttatgcaatccacacgctgccaacccaggaggagatcgagaatctgccagcttttcctagggaaaaacttactcttaggctgctgctcgggtctggcgcattcggggaggtgtatgaaggaactgcggtggatatactaggcgtgggatccggagaaataaaagtggccgtcaagaccctgaaaaaggggagtacagatcaggagaaaatagagtttctgaaagaggcacacttgatgtcaaaatttaaccaccccaatatcctcaagcagctcggggtttgtttgctgaacgaaccccagtacattattctcgaactcatggaggggggtgacctacttacttatctgaggaaagctagaatggcaacattctacgggccgctcctcactctcgtcgatctcgttgatctgtgtgtggacatcagtaaaggctgtgtgtacctcgaacgaatgcatttcatccatagggacctggccgcgagaaactgcctggtctcagtgaaggactataccagcccccgaatcgtcaaaattggcgattttgggctggccagggatatctataaaaacgattactacaggaaaagaggcgaggggctcctcccagtacgatggatggccccagagagtctgatggatgggatattcactacccaatctgatgtgtggtcttttggaattctgatctgggaaattctgacccttggacatcagccatatccagcgcatagcaacttggacgtgcttaactacgtgcagacgggcggccgcctggagcccccccgaaattgtcctgatgatctctggaacctaatgactcagtgttgggctcaggagcccgaccaacggccaacctttcacagaattcaggatcagctgcagctattccgcaacttttttctgaactcaatctataagtcccgtgatgaggctaacaactctggcgtgatcaatgagagttttgagggagaagacggagacgtcatctgcctcaatagcgacgacatcatgcccgttgctctgatggagaccaagaatagagagggactgaactatatggtcttggcaacagagtgcggccagggcgaagagaagagcgagggaccccttggctcgcaggagagtgagagctgcggcctaagaaaggaggagaaagaaccccacgcagacaaagacttctgtcaggagaaacaagtggcctattgtccgtcgggcaaacctgaaggcctgaattatgcttgccttacccactctggctatggtgacgggagcgactag

SEQ ID NO: 113168 - DNA, 294 bp, synthetic construct
  misc_feature 1..294: note = Description of Artificial Sequence: Synthetic coding sequence
  source 1..294: mol_type = other DNA
tggaagtataatgaattttatcacgtgaagacatcctgcagccaagggccggcttacgtgtgtaatatcaccaacctccagccttatacgagttacaatgtgcgggtggtggtcgtatataaaaccggtgaaaatagcacgagtctgcctgagtcttttaagaccaaagccggcgtccctaacaagcctgggatccccaaacttctggagggatctaagaactcaatccaatgggagaaggctgaggataacggatgtcgaatcacttactatatactggaaattagagactag

SEQ ID NO: 113169 - DNA, 2025 bp, synthetic construct
  misc_feature 1..2025: note = Description of Artificial Sequence: Synthetic coding sequence
  source 1..2025: mol_type = other DNA
atgaccagcaacggggtggccttgttaaatttttacaatatgccgagtaccccgtcttttgtggggtgccttcaggacattaaaatagattggaaccacatcacactcgagaatatctctagcggctcgagcttgaacgttaaggcaggatgtgtgagaaaggattggtgcgagagtcaaccttgtcaaagcaggggccgctgcatcaacctttggctgagctatcagtgcgactgccaccggccctatgagggcccaaattgtttacgggaatacgtggctggaagatttgggcaagacgactccaccggatacgtcatatttaccctggacgagtcctacggtgatacaatctctttgtcaatgtttgtccgcacattgcaaccttcaggcctgttattagcactggagaattcaacttaccagtacattcgggtgtggctggagagaggacggctagcgatgctgacacctaacagccccaagttagtggttaagttcgtcctgaacgacggtaacgttcacctgatatccctcaagattaagccatacaagatcgagctgtatcagtctagccaaaatctcgggtttatatctgcctcgacatggaaaattgagaaaggggatgtgatttacattggaggcttgccagataagcaagagaccgaactgaatggggggtttttcaagggatgcatccaggacgtgaggctcaacaaccaaaacttggagttttttccaaaccctaccaacaacgccagcctcaatccagttctagtgaatgtgacccaagggtgtgcaggcgataacagttgcaagagtaacccttgccataacggtggtgtgtgtcatagccgatgggacgatttttcttgcagttgtcctgctctgacttccggaaaggcatgtgaggaagtgcagtggtgcgggttctcgccttgcccgcatggtgctcagtgccagcccgtactccagggctttgagtgtatcgccaatgccgtctttaatggccagtccggtcagatcctctttcggtcaaatggtaacataacccgggagttgaccaatattactttcggatttagaactagagatgctaatgtgataatcctgcatgctgaaaaggaacccgagttcttaaacatctctattcaggactctcggctctttttccagttgcagagcgggaattctttttacatgctcagcctaacatcactccagtctgtcaacgatggaacctggcatgaagtgacgttgtcaatgactgaccccctttcacaaacctctcgctggcaaatggaagtagacaacgagacaccctttgttaccagtactattgccacggggtccctcaacttcctgaaggacaacaccgacatttatgtcggcgatcgggcaatcgataacatcaaaggcctgcaaggatgcctttctaccatcgaaataggtggcatttatctctcctactttgaaaatgtccacggcttcattaacaagccccaagaggaacagttcctaaagattagcactaacagtgttgttacagggtgtctacagctgaatgtctgcaacagcaatccatgccttcatggggggaactgcgaggatatttattctagttaccattgctcttgtcctcttgggtggagtggaaagcattgtgagttgaacatagatgagtgcttctccaatccgtgtatccacggcaattgctcagaccgagtggcggcataccattgtacttgcgaacctggctacacaggggtgaattgtgaggtagatattgataattgccagagccatcagtgcgccaatggagctacctgcatttcacatacaaacggttacagctgtctgtgcttcggcaatttcaccggtaagttttgccgccagagcagacttccatccacagtctgcgggaacgaaaaaaccaacttgacgtgctacaacggaggcaattgtacagaatttcagactgagttgaaatgtatgtgtcggccagggtttacaggagagtggtag

SEQ ID NO: 113170 - DNA, 4221 bp, synthetic construct
  misc_feature 1..4221: note = Description of Artificial Sequence: Synthetic coding sequence
  source 1..4221: mol_type = other DNA
atggcgctgaaaaacataaactacctgctgattttctacctttccttttcgctgctcatctatatcaagaattctttctgcaataagaacaacactaggtgtctatcaaattcttgccagaacaattctacctgtaaagacttctctaaagacaatgactgctcttgctctgacactgcaaataacctcgataaagattgcgataatatgaaggatccttgcttttctaacccatgccaggggagcgcaacatgtgtgaatacccctggcgagcgcagttttctttgcaagtgtcctccgggctatagtgggactatttgtgagactactataggaagctgcgggaagaacagctgccagcacggtggcatatgccaccaggaccctatttatccagtatgtatctgtcccgctggctacgcaggacggttttgtgagatcgaccacgacgagtgcgcctcaagtccttgccagaacggagcagtgtgtcaggacggaatcgatggctacagttgcttctgcgtgcctggttaccagggtaggcactgtgacctggaggttgatgagtgtgcaagcgacccttgcaaaaacgaggccacctgtctgaacgagattggacggtatacgtgcatatgtcctcataattacagtggcgtgaattgcgaactggaaatagatgagtgctggagtcaaccgtgcctgaacggggctacctgccaggacgctctgggagcttacttctgtgactgcgctcctggcttcctcggcgatcattgtgaactaaacactgacgaatgcgctagccagccctgtctgcacggaggtctgtgtgttgacggcgagaaccggtactcttgcaattgtactggaagcggctttaccggcacgcattgtgaaacactgatgcccttgtgctggtccaaaccgtgccacaataacgctacttgcgaggattccgtggacaattacacttgccactgctggcctgggtacacaggtgcccagtgtgaaattgacctcaacgagtgcaattctaatccctgtcagagcaacggagaatgcgtggaactttcttccgagaagcagtacgggcgcatcactggactaccatccagctttagctatcacgaggcatccgggtacgtatgtatttgtcaaccaggcttcactggaatccattgcgaagaggatgtgaacgagtgtagcagtaacccctgccagaatgggggaacgtgcgagaatctccccggaaactatacatgtcactgccctttcgataacctcagccggaccttttatggtgggagagattgttccgatatccttttggggtgtacccaccagcagtgcttgaacaacggcacctgtatacctcactttcaggacggacagcatgggtttagctgcctatgcccctcaggctacaccggaagcttgtgcgagattgcgaccaccctttcctttgagggggacgggttcctttgggtaaaatcgggcagcgtcacgactaagggctcagtgtgcaacattgctctgcggttccaaacagtgcagcccatggcactgcttcttttccggtcaaatcgcgacgtatttgtcaagctggaactattgtcgggctacatccacttgagcattcaagttaataaccagagtaaagtccttttgttcatctcacataatactagtgacggtgaatggcacttcgttgaggtcatattcgcagaagcagtgacccttacgcttatcgacgactcgtgtaaggaaaaatgtattgccaaggccccaaccccattggaatccgaccaatcgatctgcgctttccagaacagcttcctagggggccttccggtggggatgacaagtaatggagtggccctgctgaacttctacaatatgcccagcactccctcctttgttggatgcctgcaggacatcaagattgattggaaccacataactctcgagaatattagctctgggtcaagccttaatgtgaaggcgggatgcgtgaggaaagactggtgcgaaagtcagccttgccagagccggggtcgctgtatcaacctatggttatcatatcagtgcgattgtcatcgtccatatgagggccctaattgcctgcgagaatatgtggctggcagatttggccaggacgactcaactggctacgtgatctttactttggatgagtcctacggagacacaatctccttatcaatgtttgtccgcaccctgcagccatcaggcctgttactggcactcgagaacagcacctatcagtatatacgggtctggctagagcgggggcgactggcaatgctgacacccaatagtccgaagctagtggtgaaattcgtgcttaacgatggaaacgtgcaccttatctcattgaagataaagccctacaaaattgagttgtaccaaagcagccagaaccttgggttcatttcagcaagcacctggaagattgaaaaaggtgatgtgatatacattggaggtttacccgacaaacaggagaccgagttgaatggaggcttcttcaaagggtgcattcaagacgtccgccttaacaatcagaacctggaattcttccctaatcccacgaacaatgcatctcttaacccggtgcttgtgaacgtgacgcagggatgcgctggggacaattcctgcaaaagcaacccttgccacaatggtggcgtctgtcactccaggtgggatgacttcagctgcagttgcccggcattaacaagtggaaaggcttgcgaggaagtgcaatggtgtggctttagcccatgtccgcatggagcacagtgtcagcctgtcctgcagggctttgaatgcatcgccaatgcggtgttcaacggccagtctggacagatcttgttccggtcaaatggcaacattactagggaacttacaaacattaccttcggttttagaacccgcgacgcaaacgtgatcatcttgcacgcggaaaaggaacctgagttcctgaatatctctattcaggattcacggctgttcttccagctgcagtctggtaattccttttacatgctcagtttgactagtcttcaatctgtcaacgatgggacctggcacgaagttaccctctcaatgacagaccctctttcccagaccagtcgttggcagatggaagttgacaatgagacccccttcgtgacaagcaccatcgcgacggggagtctcaactttctgaaggataacaccgacatctatgtgggcgaccgtgccatcgataacattaagggcctccagggttgcctgtcaactatcgaaattggcggtatatatctcagctatttcgaaaacgtccatggtttcattaataaacctcaggaggagcagtttctgaagatcagtaccaatagtgtcgtgaccggatgcctccagctgaatgtatgcaactcaaacccctgcctgcatggaggcaactgtgaagacatctacagtagctatcactgcagctgtccacttggctggagcggtaaacactgtgagctgaatattgacgagtgtttctctaacccatgcatccacggcaactgcagcgacagagtggcagcatatcactgtacatgtgagccaggttatactggtgtgaactgtgaggtggacatcgataattgccagagtcatcagtgtgctaacggcgctacttgcatttctcacactaacgggtactcatgcctctgttttgggaactttaccgggaaattttgtagacagtcgaggctcccctccacagtatgcggaaacgagaagaccaatttaacctgttacaatggtggaaactgtaccgagtttcagactgagctaaagtgcatgtgtagaccgggattcaccggcgaatggtgcgaaaaagatatagacgagtgtgcatcggacccctgcgtcaacggaggcctgtgtcaagacctgttgaataagtttcaatgtctgtgcgatgtggcgttcgccggagagaggtgcgaggtggacctggctgatgatttgatctccgatatttttaccaccattggctcagtcactgttgctctcctgctcatactcctgctcgccatcgtagctagcgtggtgacgtcaaacaagagagcaacccaaggtacgtactctccctctcggcaggagaaagaagggtcccgtgtggaaatgtggaatctcatgcctcctcccgccatggaaaggttgatttag

SEQ ID NO: 113171 - DNA, 2826 bp, synthetic construct
  misc_feature 1..2826: note = Description of Artificial Sequence: Synthetic coding sequence
  source 1..2826: mol_type = other DNA
atgatccggaactctctctgtcagccatcccgctgtcttgacgggtatttgtttttcaataggaaaatgttcggcgctcgcacccacggttttcacatcctgatggccatgctcatcggtatccactgtgaagaggacgtgaacgaatgcagcagcaatccctgtcagaatggaggcacatgcgaaaacctcccggggaattacacatgccactgtcctttcgacaatcttagtcgaaccttttacgggggcagggattgctcagatatactcctgggctgcacccaccaacaatgcctaaataatgggacgtgcatcccccactttcaagatggccagcacgggtttagctgcctctgccctagcggttacactggcagtctgtgcgagatcgcaactactctcagttttgaaggggatgggttcctctgggtcaagtcaggaagcgttaccaccaagggaagcgtttgtaacatcgcgctgcggttccaaacagtgcagccgatggccctcttgctttttcgctccaacagagacgtttttgtgaagctggagctactctccggatatatccatctgtctattcaggttaataaccagagtaaggttcttctgtttatttcacacaacactagcgacggagagtggcactttgttgaggttatctttgcagaagctgtcactctgactttgatagatgatagctgcaaggaaaaatgtatcgctaaggctccaacccccttagaatctgaccagagcatctgcgcctttcagaactctttcctcggaggattgcctgttggcatgacctctaatggggtggcactgctgaacttttacaatatgccaagcacaccgtctttcgtgggatgcctgcaggacatcaagattgactggaatcatatcactttggaaaatatctcctctggctccagtcttaacgttaaagctgggtgtgtccggaaggactggtgcgagtcacagccctgtcagtcacggggacgctgcatcaacctgtggttaagctatcagtgcgattgccatagaccttacgaaggccccaattgcctgagggaatatgttgcaggacgattcggacaggacgacagcaccgggtacgtaatttttactttggacgaaagctacggcgacacaatctcactgagcatgttcgtgaggacactccagccaagtggcctcttactggccttagaaaattctacatatcagtacattagagtttggctagaacggggacggcttgcaatgttgacaccgaattcaccaaagcttgttgtcaagtttgtgctgaacgatgggaacgtgcatctgatttccctcaagatcaagccctataagatcgaactgtaccagagcagtcagaacctgggattcatctccgcatccacctggaaaatagaaaaaggtgacgtcatctacatcggcggtctgcccgataagcaggaaaccgaattgaacgggggcttcttcaagggctgtatccaggatgtgaggctgaacaatcagaacctggagttttttcccaacccaaccaataacgcttctcttaatccggtgctcgtgaatgtcacacagggctgcgccggagataacagctgcaaatcaaatccctgccacaacggcggggtctgtcatagtcgctgggacgatttttcctgttcctgtcctgccctgacaagcggaaaagcttgtgaggaggtccagtggtgcggattctcgccgtgtccgcatggcgctcaatgccagccggtcttgcaggggtttgagtgcatcgctaatgccgtgtttaacgggcagtctggacagattctatttcgctccaatggaaacattacgcgtgaactcacaaacatcacttttggtttccgcactagagatgcaaatgtcatcatcctgcacgccgaaaaggagcccgagttcttgaacattagcatccaggacagtagattgttctttcagttgcaaagtgggaatagtttctacatgttgtcgctgacctccctgcagtcggtaaatgatggcacttggcacgaggtgacactgtccatgactgaccccttgtctcaaacgagtaggtggcaaatggaggtggataacgagactccattcgtgacaagtaccatcgcgaccggctctctgaacttcctgaaagacaataccgacatctatgttggggacagggcaatcgacaacatcaagggtttacagggatgcctgagcacaattgagataggcggcatctatctatcgtactttgaaaatgtgcatggcttcattaataagcctcaggaagagcagttcttaaagatctctaccaactccgtggtaactgggtgcttgcagctaaacgtgtgcaatagcaacccatgccttcacggagggaactgcgaagatatttacagttcgtaccactgtagttgccctcttgggtggtccggaaagcactgcgaactgaacatcgacgagtgcttctccaatccctgtatccacgggaactgctcagatagggtggctgcatatcactgcacatgcgagccgggctacaccggcgtgaactgcgaggtcgatatcgataactgccagtctcatcagtgcgccaacggcgctacatgcatctcccataccaatgggtacagctgcctgtgcttcggtaacttcaccggaaaattctgtaggcagagtcgtctccctagtacagtgtgtggcaatgagaagacaaacctgacttgttacaacggcgggaattgcaccgagttccagactgagttgaagtgcatgtgtcggcctgggttcacaggtgagtag

SEQ ID NO: 113172 - DNA, 129 bp, synthetic construct
  misc_feature 1..129: note = Description of Artificial Sequence: Synthetic coding sequence
  source 1..129: mol_type = other DNA
gagaaagatatcgatgaatgcgcaagtgacccctgcgtgaacggaggtctttgtcaagacctcctcaataaatttcagtgtctgtgcgatgtcgcctttgctggggaacgttgtgaagtagactattag

SEQ ID NO: 113173 - DNA, 4149 bp, synthetic construct
  misc_feature 1..4149: note = Description of Artificial Sequence: Synthetic coding sequence
  source 1..4149: mol_type = other DNA
atgaaagatccctgcttttccaacccttgtcagggctctgctacctgtgtgaataccccgggagaacggagcttcctgtgtaaatgtccacctggctacagcggcacaatttgcgaaacaacaattggcagttgtggaaaaaattcgtgccagcatggaggaatttgccaccaggaccccatttaccccgtctgcatctgccctgccggctatgctggtcggttctgcgaaatcgaccacgatgagtgcgccagtagcccatgtcaaaacggagctgtgtgtcaggacggcatcgatggatattcatgcttttgcgtgccaggttatcagggccgccactgcgacctggaggttgacgagtgtgcaagtgatccctgtaaaaatgaagctacatgtcttaacgagatcggtcggtacacatgtatatgcccgcacaactacagtggggtgaattgtgagctggaaatcgatgagtgttggagtcagccttgcctgaacggagctacctgccaagatgctctgggagcatacttttgtgattgtgcaccaggcttcctgggagatcattgtgagctgaacacagacgagtgcgcctcccagccgtgcctgcatggcgggttgtgcgtcgatggggagaaccggtactcttgcaactgcacagggtccgggtttacaggaacccactgcgagactctgatgcccctttgttggtcgaagccctgtcataacaatgcgacatgtgaggactcagtcgataattatacatgtcattgctggcctggatataccggagcccagtgcgagatcgacctcaatgagtgtaatagtaatccctgccaaagcaacggcgagtgtgtggaactctcatcggaaaagcaatatggaaggatcactggcctcccatccagcttctcctaccacgaagctagcgggtacgtatgtatttgccagccagggtttaccgggattcattgtgaggaagacgtgaatgagtgcagcagcaatccttgtcagaatgggggtacatgcgagaatcttcccgggaattatacatgccactgcccttttgacaacctgtcccggaccttttacggaggtcgggactgttctgacattctgttggggtgcactcatcaacaatgtttgaacaacggaacatgcattccgcacttccaggacgggcagcacggtttctcctgtttgtgtccttctgggtacactggcagcctgtgcgaaatcgccacaactctcagcttcgagggagacggttttctatgggtcaaaagcggaagcgtgaccaccaagggctctgtgtgcaacatcgctctcagattccaaaccgtgcaacctatggcactgctcctgttccggagtaatcgagatgtgttcgtgaaactcgaattactgagcggctatattcatctgagcatccaggttaacaatcaatcaaaggtgttacttttcattagccacaacacatcggatggagagtggcatttcgtggaggtgatctttgcagaggcggtgacccttacgctcatagacgattcctgcaaggagaagtgcattgccaaagctcctacaccattggagtccgaccagagtatctgcgcctttcagaatagctttctgggtgggctgcccgtggggatgacctcgaacggcgtagctctattgaacttttataacatgccttcaactccttcttttgtgggatgcctccaagacattaaaattgactggaaccacattacactcgagaacatcagttccggctcatctctcaatgttaaagcaggatgtgtccggaaagactggtgcgaatcacagccgtgccagagccgcggaagatgcataaacctgtggctgtcatatcagtgcgactgccaccgtccatatgagggtccgaactgcttgagggagtacgtggccggcaggttcggtcaggatgattccacaggctatgtcatttttaccctcgacgagagttatggggataccataagtctgtccatgttcgttcggaccctgcagccgtctgggcttttattggctctcgaaaacagcacataccagtacattagggtgtggctggaacgagggcgactcgcaatgctaacacccaacagccccaaactcgtggtaaagttcgtgcttaatgacgggaatgtgcacctgatctcattgaagataaaaccctacaaaattgaactgtatcagtcttcccagaatttgggcttcatcagtgcctctacttggaaaatagagaaaggagacgtgatttacattggtggcctccccgataagcaggaaacagaacttaacggaggcttcttcaagggatgtatacaagacgttaggttaaacaatcaaaatctagagtttttccctaatccaaccaataacgcaagtctcaatccggtgctagttaatgttacccaagggtgcgccggcgataatagttgtaagcgccagaccaacgttggccgcgcccttactgaactcggaagccgcggtccgaaataccaggtctcactgttccggttttgtgtaggaagctgggcaaccggcaacaccttcttcctctctagcataaagcctggatccaatccttgccataatggcggagtgtgccattcaagatgggacgatttctcctgcagctgtccagctcttacttccgggaaggcatgcgaggaggtccaatggtgtggcttttcaccttgcccgcatggggcccagtgtcagcctgtccttcagggttttgagtgcatcgcaaacgccgtctttaatggccagtccgggcagatcctgttcaggagcaacggtaacataactcgggaactcacgaacatcactttcggcttcagaaccagagacgcaaacgttattattctgcacgctgagaaggagccagaatttttaaacattagtatccaggatagtcgacttttcttccaactgcagtctggcaattcattctacatgttatctttgacctccctgcagtctgtcaatgacggcacttggcatgaggtgaccctgagcatgaccgacccgttatcacagacttctaggtggcaaatggaagtcgataatgagacaccatttgtgaccagcaccatagcaaccgggagtcttaacttccttaaggataatacagacatctacgtgggggaccgagccattgataatatcaagggtcttcagggatgcctcagtacaatcgagataggaggtatctacctctcttatttcgagaacgtgcacggtttcataaataagccacaagaggagcaatttctgaaaattagcaccaattctgttgtcaccggctgtctgcagcttaacgtttgcaattctaacccttgtttacacggaggtaattgcgaggatatttattctagctaccactgctcttgtcccctcggatggagtggaaagcactgtgaactgaatatcgacgaatgttttagcaatccatgcatccacgggaactgtagcgatcgcgtggcggcctatcactgcacatgtgagcccgggtatactggggtgaattgcgaggtggacattgataattgtcaatcccaccaatgtgcgaatggggcgacctgcatttcgcatactaatggctattcatgcttgtgcttcgggaacttcaccggaaaattctgccggcaatccagactaccttctactgtttgcgggaatgaaaaaacaaacctgacttgctacaatggaggaaattgtaccgaattccaaactgaactcaagtgcatgtgccggccgggattcaccggcgagtggtgtgaaaaagatatcgacgagtgcgcttcagacccttgtgtaaacgggggactgtgtcaggaccttttgaataagttccagtgcttgtgtgacgtggcttttgccggggagcgatgtgaggtagatctcgctgatgatctgattagcgacatatttactaccattgggagcgtgactgtcgcactcctacttatactcttgctcgcaatcgtagccagtgtggtgacttctaataagcgggcgacgcagggtacctatagcccttcccgccaggagaaggaagggtctagggtcgagatgtggaatctcatgccgcctcctgccatggagcggctcatctag

SEQ ID NO: 113174 - DNA, 2613 bp, synthetic construct
  misc_feature 1..2613: note = Description of Artificial Sequence: Synthetic coding sequence
  source 1..2613: mol_type = other DNA
atggctctgaagaatatcaactatttactcattttttacctgtcgttttctctgctgatttatattaagaatagtttttgtaataagaacaacaccaggtgcttgtcaaattcttgccagaacaactctacctgtaaggattttagtaaagacaacgactgtagttgttccgatactgcaaacaatctagacaaagattgtgacaatatgaaggatccatgctttagcaacccttgtcagggatcagctacttgcgttaacacgcccggagaacgcagtttcctttgcaagtgtccccccggatattctggaaccatttgtgaaacaacgattggcagctgtggtaagaacagctgtcagcacggcggcatatgtcaccaggatcccatatacccagtgtgtatttgtccagctggatacgccggcagattttgtgagatcgatcacgacgagtgtgcatcaagcccatgtcagaatggagccgtctgtcaggacggcattgatggctatagctgtttttgcgtcccaggctatcagggcaggcactgcgatttggaggttgatgagtgtgcatccgatccatgcaagaatgaagctacatgtctcaatgaaatcggccgttacacctgtatctgcccacataattactctggggtgaactgtgagcttgagattgacgagtgctggtctcaaccctgcctgaatggagcaacatgccaggacgcactcggagcatacttttgcgactgcgctcctggattccttggggaccactgtgagttgaatactgatgaatgcgccagccagccctgtcttcacggggggctgtgcgtggacggagagaatcggtactcttgtaactgtacgggaagtggttttaccgggacccattgcgaaaccttgatgccactgtgctggtctaaaccttgccataataacgccacatgcgaggacagcgtggataattatacttgccactgttggcccgggtatacgggcgcccagtgtgagatagaccttaatgagtgcaattctaatccctgccagagcaacggggagtgtgtggagttgtcatccgagaagcagtacggcaggattacaggcctaccaagctctttctcttatcacgaggcaagtggttacgtctgcatttgtcaacccggctttacaggtattcactgcgaggaggatgtgaatgagtgttcaagcaacccctgccagaacggggggacttgcgaaaatctgcccggtaactatacatgccactgtccgttcgacaacctctcccgcaccttctacggcggaagggactgcagtgacatcctgcttgggtgcacacaccagcagtgcctgaataacggaacatgcattccccatttccaagatggacaacatggattcagctgtctgtgcccatccggatacacagggtccctatgtgaaatagccacaacactgagtttcgagggagatggattcctctgggttaaatcgggaagcgttactacgaagggatcagtctgcaatatagccctgcgttttcaaacagtccagcctatggccctgctgctgtttcggtccaaccgtgacgtgtttgtcaagttagaactcttgtcgggctacatccatctgagtattcaggtgaataaccagtccaaagtgctactctttatcagccataatacaagcgacggggagtggcacttcgttgaagtcatctttgcggaggctgttacccttacactcattgatgattcgtgtaaggaaaagtgtatcgccaaagctcctaccccgctggagtccgaccagagcatctgcgcgttccagaatagctttctaggtgggctacctgtggggatgacgtcaaatggtgtggctttgttgaatttctacaacatgccttctactccaagcttcgtgggatgcctgcaggacataaagattgattggaaccatattacgcttgaaaatatctcttctggctccagtctaaacgtgaaggccggatgcgtgcgtaaagattggtgcgagtcccagccttgtcaatcccgtgggagatgcattaatttgtggttatcctaccaatgtgattgccacagaccctatgagggccccaactgcctgagggggaaattttgtcggcagtctagattgccttcaaccgtgtgcggtaacgagaaaacgaatttgacctgttataacggcggcaactgcaccgagttccagactgaactcaaatgcatgtgccggccaggctttactggggaatggtgtgagaaagatatcgacgaatgtgctagtgacccttgtgtgaatggtggtctctgtcaggacctcctgaataaatttcagtgtctctgcgatgtagcttttgctggtgaaagatgcgaggttgatttggccgatgacctgatatcagacatcttcacgaccattggctccgtgaccgtcgccttactgctaattctcttgttggctatcgtcgccagcgtggtgactagcaacaagcgcgccacccaaggtacctattcaccttcgaggcaggagaaagagggtagcagggttgagatgtggaatctcatgccgccccccgccatggagcgtttgatctag

SEQ ID NO: 113175 - DNA, 882 bp, synthetic construct
  misc_feature 1..882: note = Description of Artificial Sequence: Synthetic coding sequence
  source 1..882: mol_type = other DNA
atgccattatgctggtctaaaccctgtcacaataatgcaacatgcgaagacagtgttgataactatacttgccactgttggcccgggtatacaggagctcagtgtgagatagacctaaatgaatgcaattctaatccgtgccagtcaaatggcgagtgcgtcgaactgtcttcagaaaaacaatatggaagaattacgggcctgccaagcagcttctcttaccacgaggcaagtggttacgtgtgtatctgtcagccgggcttcacgggcatacattgtgaggaagatgtgaatgagtgctctagcaacccttgccagaatggcggcacatgcgagaacctgccagggaattatacgtgccactgtccattcgacaacttaagcaggacgttctatggggggcgagactgtagcgacattctgctgggctgtacccatcaacagtgcctcaacaacgggacctgcattccccatttccaagacgggcagcacggttttagttgtctttgtccttctggctatacgggtagtctctgtgaaattgctacaacactgagcttcgagggggacgggttcctgtgggtcaagagcgggtccgtcaccaccaaaggctccgtatgcaacatagctctgcgcttccagaccgtgcagccaatggccctcctgttatttcgttccaatcgcgacgttttcgtgaagcttgagctcctgagcggctacatccatttatctatccaagttaacaaccaatcaaaggtgctcttgtttatctcacacaacacctctgacggtgagtggcattttgttgaggcagtttctaaaacactgaagctgatcggtattacgttaccgtggcgcacatctagactggcccaccactag

SEQ ID NO: 113176 - DNA, 2664 bp, synthetic construct
  misc_feature 1..2664: note = Description of Artificial Sequence: Synthetic coding sequence
  source 1..2664: mol_type = other DNA
atggctctgcttcttttccgctcgaaccgcgacgtgtttgtgaagctcgaactgctttctggctatattcatctgtcaatccaggttaataatcaatctaaagtgcttctcttcattagtcacaataccagtgacggagagtggcattttgtagaagtgatcttcgcagaggcagtgaccttgaccctcattgatgactcctgtaaagagaaatgcattgcaaaagcaccaacaccattggagagcgaccagtccatctgcgcttttcaaaactcctttctgggtgggctacctgtgggcatgacctcgaacggcgtggccctactgaatttctacaatatgccctctacacctagtttcgtaggctgtctgcaggacatcaagatcgattggaaccacataaccctcgaaaatatcagctccggatcatcattgaatgttaaagctggttgcgtacggaaagactggtgtgagtcacaaccatgtcaaagccgtggtagatgtatcaatctgtggctgtcctaccagtgcgattgccatagaccttatgaggggcctaattgcctgagggagtacgttgccggtcgcttcggacaggatgattcaacaggatatgttatctttacactggacgaatcctacggcgataccatttcactctccatgtttgttcggaccctgcagccaagtgggctgctcctagctcttgaaaattccacttaccagtatatcagggtgtggcttgagcgaggacggctcgctatgctcacccctaacagtcctaagctggtcgtgaaattcgtactcaatgatgggaacgtacacttgattagtctgaagatcaagccctataagattgagttgtaccagtctagccagaatctaggcttcattagtgcgagtacatggaaaatcgaaaaaggggatgtgatctacattggggggctacccgataaacaggagaccgaattgaatggcggcttttttaagggctgcattcaggatgtgcgcctcaataaccagaacttagagtttttcccaaaccctacaaacaatgcttccttgaaccctgtactggtgaatgttacgcagggttgcgccggcgacaattcatgtaaaagcaatccatgccacaacgggggagtttgccactctagatgggacgactttagctgctcctgccccgcactgacctccgggaaggcttgcgaggaggtgcagtggtgcggtttcagcccctgccctcatggagctcagtgccagccagttttacagggctttgagtgcatcgcaaatgcagtttttaatggccagtccggtcagatcctgttcaggtctaacggaaacataacccgcgagttgaccaacattacattcggttttcgtacccgagacgccaacgttattattctgcatgctgagaaagaacccgagttcctgaatattagcatccaggacagcagacttttttttcagcttcagtcaggcaacagcttttatatgctctccttaacatcactccagtccgtcaacgatggtacttggcacgaagttactttatccatgacagatcctctgtcccagacttcccgctggcagatggaagtggataatgagaccccctttgtgacatccacaattgcaacaggcagcctgaactttctgaaagataacaccgatatctacgtcggcgacagagccattgataacatcaaggggttgcaggggtgcctgtccactatagagatagggggcatctacttgtcatacttcgagaatgtgcatggtttcatcaataaaccacaggaggaacagttcctgaaaatatccactaattcagtcgtgaccggctgcctgcagctgaacgtgtgcaatagcaacccttgtctgcacggcggtaactgcgaggatatctattcgtcctaccattgttcatgccccctggggtggagcggcaagcactgcgagctgaatattgacgagtgtttctccaatccctgcattcatggcaattgttctgatagggtggccgcttatcactgcacctgcgagcctggctacaccggggtcaattgtgaagtggacatcgataattgtcaatctcatcaatgcgctaacggtgccacatgtattagccatacaaacggctattcctgtctctgctttggtaattttaccgggaaattctgtagacaatccagactgccgagcaccgtgtgcggtaatgagaagaccaacctcacctgctataacggtggcaattgcactgaatttcagaccgaactgaaatgtatgtgccgaccaggattcacgggggaatggtgcgagaaggatattgatgagtgcgcctccgacccgtgcgttaacgggggcttgtgtcaggacttgctgaacaagttccagtgcttatgcgacgtagccttcgccggtgaacgatgcgaggtggacctcgctgatgacctgattagcgacatctttacgactatcggtagcgtgaccgtcgcactgctgttgatcctgctgctggcgatcgtcgctagcgtggttaccagcaataaacgcgcaacacagggcacgtatagtccctccagacaggagaaggaaggttctagggtggagatgtggaacctcatgcccccgcctgccatggaacgactaatttag

SEQ ID NO: 113177 - DNA, 3885 bp, synthetic construct
  misc_feature 1..3885: note = Description of Artificial Sequence: Synthetic coding sequence
  source 1..3885: mol_type = other DNA
atggcgctcaagaacataaactacttgttgattttttatctgagctttagtttgttaatttatatcaagaacagcttctgcaacaagaacaacacccgctgtctgtctaacagctgccaaaacaactcgacctgtaaagatttcagtaaagacaacgactgctcatgctccgacaccgccaataaccttgataaggattgtgacaatatgaaagacccttgctttagcaacccttgccagggctcggcgacatgcgtgaatacacctggggaacggtccttcctttgcaagtgtcctcctggatattccgggacaatctgcgaaaccacaattggctcgtgcggcaagaattcttgtcagcatggggggatctgccaccaggatcctatctaccccgtttgcatctgcccagcgggctacgccggtcggttctgcgagattgatcacgacgaatgcgctagcagcccatgccagaatggtgctgtctgccaggacgggattgatggctacagctgcttctgtgtgcctggttaccagggacgccactgtgatctcgaggtggacgaatgtgctagtgacccgtgtaagaacgaagccacgtgcctgaacgagatcgggaggtatacatgtatttgcccacataactactcaggctatactggcgcccaatgtgagatcgacctgaacgagtgtaatagcaacccttgtcagtctaacggagagtgtgtggagctgtccagcgaaaagcagtacggacgtattaccggcctgcctagctcatttagctaccatgaagcaagtggatatgtgtgcatatgccagccaggattcaccggtatccactgtgaagaagacgtcaacgagtgctcctccaacccttgccaaaacgggggcacctgcgaaaaccttcccgggaactacacctgccattgcccgttcgataatttaagcaggacattttatggggggcgagattgttcggatatcttgctcggttgtacacaccagcagtgcttgaacaacggaacgtgcatcccacattttcaggatggacagcacggtttctcatgcctctgcccatctggttataccggatccctatgtgaaattgccactaccctttcttttgagggagacgggttcctttgggttaaaagtggcagcgttaccaccaaagggtccgtgtgcaacattgcactgaggttccagaccgttcaaccaatggctctcttactctttcgcagcaaccgggacgtattcgtaaaactggagttgttgtcgggatatattcacctaagcattcaggttaataatcagtccaaagtcctccttttcatctcccacaatactagtgatggtgagtggcattttgtggaggtcattttcgctgaggctgtcaccctcacactcatcgatgacagttgtaaggaaaagtgcattgccaaagctcctactcctctcgagtcagaccagtccatatgtgcctttcagaatagctttctcggcgggctgcccgtaggtatgacgtcaaacggagtcgctttgttaaacttttacaacatgccctcaaccccctcatttgtcggttgcttgcaggatatcaagatagactggaaccacattactctcgaaaacatctcaagtggcagctctcttaacgtcaaagcaggttgcgtgcgcaaggattggtgcgagagccagccatgccagtctagaggtagatgtattaatctctggctgtcttatcagtgcgattgccaccggccttatgaaggcccaaattgtttgagggaatacgtggccggtaggtttggccaggacgattcaaccgggtacgtgatcttcacactggatgaaagctatggagataccatttcactgtccatgtttgtccgaacccttcagccatctggtcttctattagccttggagaattcaacataccagtacattagggtgtggctcgaaaggggaaggctcgctatgctaactcccaattcgccaaaactggtggttaagttcgttctaaatgacggaaatgtacacttaatcagtcttaagatcaagccctataagatcgagttgtatcagtcttctcagaatctcggcttcatcagcgccagtacctggaagatagagaagggggacgtgatatacatcggaggccttccggataagcaggagactgagctgaacggggggttttttaaaggctgcatccaggatgtccgtctaaacaatcagaatttggaattctttcctaaccctactaacaatgcttctttgaatccggttctggtcaacgtcactcagggctgtgccggcgacaacagctgtaaaagcaatccttgccacaacgggggcgtctgtcacagtcgttgggacgactttagttgttcctgtccagctctgacctccggtaaggcttgcgaagaagtgcagtggtgcggcttctcgccgtgcccacacggcgcccagtgtcaacctgtcctgcagggatttgaatgtatcgctaatgcggttttcaatgggcagtctggccagatcttatttaggtccaacggaaatatcacccgcgagctgactaatataacttttgggttccggactagagacgcaaacgtcattattcttcatgcggaaaaggaaccggaattcctgaatatctccattcaggactcaaggttgtttttccagctgcagtctggcaattctttctatatgttgtccttgacctctctgcagtccgtgaatgatgggacctggcatgaagtgacactgtctatgacagacccactgtcccagaccagccggtggcagatggaggtagacaatgagaccccgtttgtgactagcactattgcgactggttcactgaactttctgaaagataacactgacatttacgtgggagaccgagccatcgataacattaagggcttgcaggggtgcctaagcacaatagaaatcggaggaatttatctctcttatttcgagaacgtgcacgggtttataaataagccgcaggaagaacagttcctgaaaatctcaacgaattctgttgtgaccggctgcttgcagctaaacgtttgtaattccaacccctgtctgcacggaggcaattgcgaggacatatatagctcctatcattgttcttgccccctgggctggagcggcaaacactgcgagcttaacattgatgagtgcttctctaacccctgtatccatgggaattgcagcgatagagttgctgcctatcattgcacctgcgagcctggttatactggagtgaattgcgaggtggacatcgacaactgccaatctcatcagtgcgcaaatggcgcgacatgcatcagccatacaaatggatacagttgcctttgtttcggaaactttactggtaaattctgtcgccaaagtagattgccctcaacagtttgtgggaatgagaagacgaaccttacctgctacaacggggggaactgtaccgaattccagaccgagctgaagtgtatgtgccggcccggtttcactggcgagtggtgtgagaaggacattgacgagtgcgccagcgatccctgcgtcaatggtggcctgtgccaggatctgctgaataagttccagtgtttgtgcgacgtggcatttgccggtgagaggtgcgaggtcgacctggcggacgacctcatcagcgacatcttcacaactattggaagcgttactgtcgctctactgctcatcttgctgctggctatcgtggcgtcagttgtgactagcaacaagcgggcgacacaaggcacatactcaccttctaggcaggaaaaggagggcagccgcgtcgagatgtggaatctgatgccccctcccgcaatggagcgactgatctag

SEQ ID NO: 113178 - DNA, 3531 bp, synthetic construct
  misc_feature 1..3531: note = Description of Artificial Sequence: Synthetic coding sequence
  source 1..3531: mol_type = other DNA
atggccctcgcacgtcccggcacacctgacccccaggccctggcgtcggtactcttgctccttctgtgggccccggctctgagcctgctcgctggaaccgtgccaagcgagccaccttccgcatgcgcaagcgacccatgtgctcctggcaccgagtgtcaagctacagagtccggaggatacacctgtgggccgatggaaccaaggggatgtgctactcagccctgccaccacggggctctgtgcgtgccacagggccctgacccgaccgggttcagatgctattgcgtccctggattccagggcccccgatgcgagctggatatcgacgaatgcgcgagcaggccctgccatcacggggctacttgccgtaatcttgcagaccgatacgagtgtcattgccccctgggttacgcaggcgtcacctgcgaaatggaagtggacgagtgcgcctctgctccatgtctgcacggaggctcatgcttggatggagtcggatcattccggtgcgtctgcgcacccggctatgggggaacaaggtgccagctggatctcgacgaatgtcaatcacagccatgcgctcacggcggaacatgccatgacctggtcaatggttttcgctgcgattgcgccggcaccgggtacgagggaactcactgtgagcgcgaggtattggagtgtgcctcggccccctgtgagcataacgctagctgccttgagggtctgggctcatttagatgcctgtgctggccagggtacagtggggagttgtgtgaggttgacgaggacgagtgtgccagcagcccatgccagcacggcggacggtgtcttcagcggtcggacccagcactctacggaggggtccaagccgccttccctggcgcattctctttcagacatgctgccggttttttatgtcactgtccccctggattcgaaggcgccgactgtggagttgaggtcgacgaatgtgcatccaggccctgtctgaatggaggacactgtcaggatttgccgaacggattccaatgccactgccctgatgggtacgcaggtccgacctgtgaggaagatgttgatgagtgtctgtctgatccctgcctgcatggtggaacctgctccgatactgtggccggttacatttgtcgctgtcctgagacctggggaggcagggactgttccgtgcagctcactgggtgccagggtcatacttgcccccttgccgcaacgtgcattcctatctttgagtccggggtgcactcttatgtgtgccattgtccacctgggacacatggcccattctgtggccaaaacaccaccttttccgtgatggccggtagccccatacaggccagcgttccagctggcggacccttaggcctggcgctgcggttcaggactacccttcccgcgggtacattagctaccagaaatgatacaaaggagagccttgaacttgccttagtggccgccacactgcaggccacgctctggtcctacagcactacagttctggtgctgcggttgccagacttagccctgaatgacggtcattggcaccaagtcgaagttgtgctccatctcgccactttagagctccgcttgtggcacgaaggatgccccgctcgcctgtgcgttgcttccggccccgtggcccttgcctccaccgcttcagccactccgctccccgccggaatcagcagcgctcagctcggggatgcaaccttcgccgggtgcctgcaggacgtgagagtggatggccacttacttttaccagaggacctgggcgaaaacgtcctcctcggctgcgaaaggcgtgagcaatgccggcctctgccatgcgtgcatggagggtcctgcgtggacttgtggacccattttcggtgcgactgcgcacgcccccaccggggacccacttgtgcagacgaaataccagcagctacgtttgggttgggtggtgccccttcttcagcctcgttccttctgcaagagttaccgggcccaaatctgacggttagtttcctgctaagaacaagagagagtgccggccttctcctacaatttgcgaacgactctgccgcaggcctgaccgtgttcttatcagaaggtagaatcagggctgaagttcctgggagtcctgcggtcgttcttcccggtcgttgggacgatggactgagacatcttgtcatgcttagctttggcccagatcagctccaagatcttggccaacacgtacacgttgggggacgcctgttggcagccgactcccagccatggggtgggccatttagaggttgcctgcaagacttacggctggatggctgtcacctgccttttttccctctccccctagacaattcctctcagccctcggagctcgggggtcgtcagagttggaacctaactgctggctgcgtgtccgaggatatgtgtagtcctgatccttgttttaatggtgggacatgcttggtcacttggaacgacttccactgtacgtgcccggctaacttcaccggcccaacttgcgcccaacagctttggtgtccgggacaaccatgccttccccctgctacctgtgaggaagtacccgacgggttcgtgtgcgtggcagaggctacatttagagaaggaccacctgctgccttctctgggcataatgcctcctccggtcgcctcctgggagggctatccctggcgtttcgaacccgtgactcggaagcttggctgctccgggccgctgccggcgccctggaaggtgtgtggctagcggtcaggaatggttccttggctggcggcgtgaggggtggccatgggctgccgggtgccgtgctgccgattcccggcccaagagttgcggacggagcttggcaccgagtgaggctggccatggaacgtcctgccgccacaacaagtcggtggctgctatggttggacggcgctgcaacccctgtggctctgcggggtctcgccagtgatctcggttttttacagggacccggtgcagtgcggattctgttggcagaaaattttactggttgtctcggcagggtcgcattaggaggactgcctctccccctggcgcgcccgaggccaggagccgctccaggcgcccgggagcatttcgcctcctggcccggaaccccagctcccatcctcggatgtaggggcgccccagtgtgtgcaccgtctccctgtctccacgacggagcctgccgcgacctcttcgacgcctttgcgtgcgcatgcggacccggatgggaaggcccccgttgtgaagcccatgtcgacccgtgtcactccgccccctgcgccagaggcaggtgccacactcatccagacgggcgctttgaatgtagatgtccaccaggtttcggcggcccaaggtgtcggtgggacggttgggcaggcggctgggctgcaaacgccccatggggctacggcggtgcggagaagtctgctcgctcagtggatgaaagcttacccttccctggccctcatgtcctgatctgcgacatgaggcgcactgtgtag

SEQ ID NO: 113179 - DNA, 2862 bp, synthetic construct
  misc_feature 1..2862: note = Description of Artificial Sequence: Synthetic coding sequence
  source 1..2862: mol_type = other DNA
atggccatggaacccggtgccctctggacatttctgggacacctgtggttgttagccggcccaacctgtgaggaggacgtcgacgagtgtctgtctgacccctgcttgcacggaggcacctgcagcgacaccgtggcaggttatatatgtaggtgtcccgagacgtggggcggccgtgattgtagtgtgcagctcactggatgccagggacacacctgcccacttgctgccacttgtatccctatattcgagagcggagtgcatagctacgtttgccattgcccaccagggacacatggacccttttgcggacagaacaccacattctctgtcatggccggatcccccatccaagcttcagttccagccggaggacccttgggcctggcactgcggttcagaaccactctcccagctggcacactggcaactcgaaacgacacaaaggaatctctggagcttgccctggtggcagccaccctgcaggcgactctctggtcctactctaccacagtcctggtccttagactcccagatcttgcgctgaatgacggccattggcatcaagttgaggttgtgctgcatctagccacacttgaacttcgcctgtggcacgaaggttgtcccgctaggctttgcgtagcttctggacctgtagctctcgccagcaccgcgtccgccacaccccttcccgcggggatctcgtccgctcagctgggcgacgccaccttcgcaggctgcttgcaggacgtgcgagttgacggtcacttgctcctgcccgaagatctgggcgagaacgtgctcctggggtgcgagcgtcgcgagcagtgccgtcccctcccgtgcgtacacggtggaagttgcgtcgacctgtggacacattttagatgcgactgcgctagaccccatcgcggccccacctgcgcagacgaaatcccggctgctacctttggcttaggcggcgcaccttccagtgcatccttcctcctccaggagctgcccggaccaaaccttacagtgtcttttctcctgcgaactcgcgaatcagccgggctgcttctccaattcgctaatgattcagccgcggggctcaccgtctttctttctgagggtaggatccgcgctgaggttccaggaagccccgcagttgtgctgccaggcaggtgggacgacgggttgagacacctcgtgatgcttagctttggaccagatcagctgcaggaccttggccaacacgttcacgttggtggccggctcctcgcagccgattcccaaccatggggaggcccattcaggggctgtttgcaggatctgcgcctggacggctgccacctgcccttttttccactgcccctggataatagttcccagccttccgaattaggaggcaggcagtcctggaatttaacagcaggttgtgtgagtgaagacatgtgcagtcccgatccctgctttaacggcggaacatgtctggtgacctggaacgatttccactgcacctgtccggccaacttcactggcccaacatgtgcccagcagttgtggtgccccggccagccttgcctcccaccggccacttgtgaggaagtccctgatggcttcgtctgcgtggccgaggccaccttccgggagggaccaccagccgcatttagcggccacaatgcctctagcggacgtctgctggggggattaagcttagcgtttaggacccgggatagtgaagcatggctgctgcgtgctgccgcgggggctctggagggggtttggctcgcagtcaggaacgggtcactcgccggaggagtacgtggtggacacgggctcccaggagctgtgcttcctattccgggtccaagggttgctgacggagcctggcatagggtgagactagctatggagaggcctgccgccacaacaagccggtggttgctatggctcgatggagcggctacgcccgtggcattgcgcggcctggcatccgatctcgggtttctgcaggggccgggagctgtgcgaatattgctcgccgagaattttaccggatgcctaggccgtgtggcattaggcggcttgccccttccacttgctagaccgagaccaggagctgcacccggcgcacgggagcactttgcaagctggccgggaacacccgctccgatactcggatgcagaggcgcccccgtttgcgcacctagcccgtgtcttcacgatggagcatgtagggatctcttcgatgcgtttgcgtgcgcttgcggccccggctgggaaggtcccaggtgcgaggcacacgtagatccctgccactccgccccctgtgcaagaggtagatgccacactcacccagacggacgattcgagtgtaggtgcccacctggcttcggcgggcccagatgccgcctgccagtcccctcaaaagaatgctcgctgaacgtgacctgcttggatggcagcccctgcgagggggggagcccggccgcaaattgctcatgtctagagggccttgcgggtcaaaggtgccaagtcccaactttgccctgtgaagccaacccgtgtctgaatggaggtacctgccgcgcagcgggaggcgtctcagaatgtatctgtaatgcacgcttttctgggcaattttgcgaagtggcaaagggattgcctctcccactgccctttcctctactcgaggtcgccgtccctgcagcatgtgcttgcctcttacttttactactcggcctgctgagcgggatattagccgcccgcaaacggcgccagagcgaggggacttactccccctcccagcaggaagtggctggagctcgacttgagatggatagtgtgctgaaggtcccccccgaagaacgtctcatctag

SEQ ID NO: 113180 - DNA, 3858 bp, synthetic construct
  misc_feature 1..3858: note = Description of Artificial Sequence: Synthetic coding sequence
  source 1..3858: mol_type = other DNA
atggctctggcccgtcctgggacccccgacccccaagcgctggcttccgttctccttttacttttgtgggctcccgccctctcactgctggctggcacagtgccctccgagcccccgagcgcatgcgctagtgatccctgtgcaccaggaactgagtgtcaggctacagaaagcggcggatatacgtgtggtccaatggagccaagaggttgtgcaacacagccctgtcaccatggggccttgtgtgtgccgcaaggccccgacccaaccggatttcggtgctactgcgtcccaggctttcaaggtccaagatgcgaacttgatatcgacgagtgtgcttcccgcccatgccaccacggagcaacctgccggaacttggccgatcgctatgagtgccattgtcccttgggctatgcgggagttacatgcgagatggaagttgacgagtgtgcatctgctccatgtctacatggcggctcatgcttagacggcgtgggcagctttcggtgtgtatgcgctccggggtacggggggacacggtgtcagctggacctggatgaatgtcagagccaaccttgcgcgcatggaggtacatgccacgacctggtcaatggattccgatgtgactgcgccggtactgggtacgaagggactcactgtgaacgcgaggtgttagaatgcgcaagcgctccttgtgaacacaatgctagttgcctggagggcctgggtagctttcgatgcttgtgctggccgggctactccggtgagctttgcgaagtggacgaggacgaatgcgcgtcttccccatgccagcatggcgggagatgcctgcagcgttccgaccctgccctgtacggaggtgtacaggcagcttttcccggtgccttctcttttaggcacgcagcaggattcctgtgtcactgcccccctgggttcgaaggagccgactgtggtgtcgaggtcgacgagtgcgcgtctagaccatgtctcaatggcggccattgtcaggatcttcccaacggatttcaatgccattgtcccgacggatatgccgggccaacctgtgaggaagatgttgacgagtgtctttccgatccctgcctgcacggagggacctgcagcgacacagtggccgggtacatttgcagatgtccagagacatggggaggtcgggattgctccgtccagctcaccgggtgtcaggggcatacctgtccccttgcagcaacatgcataccaatcttcgagtcaggagtccacagttacgtctgccactgccccccaggaactcatggaccattttgcggccagaatacgaccttctctgtgatggccggtagtcctattcaagcttcggtcccggccggggggccgctaggcctagccttgcggtttcgaacaactctgcccgccgggaccctggcaaccagaaacgacacaaaagaaagccttgagcttgccctcgtcgcggcaactctgcaagcgaccctctggagttatagtactaccgtactggtactccgactgccagacctggccttgaatgatggacattggcatcaggtggaggttgtgctccatctagcgactttggaacttcggttatggcacgaaggatgtccggccaggttgtgtgtggcatctggcccagttgccttggcgagcaccgctagcgctacacccctccccgccggaattagttccgcccagttaggagatgctacttttgcaggttgcctacaggacgtccgggtggatggccatctgctgctgcccgaggacctgggggagaatgtgctgctgggctgcgaaagacgcgaacaatgcaggccactgccttgcgtgcatggcggcagttgtgttgatttatggacgcacttccggtgcgactgcgcgagaccccatcgcggtccgacatgcgcagacgaaattcctgctgccaccttcgggttgggcggggcgccaagttccgcctcgtttttactgcaggagcttcccggccctaacctgaccgtgtcctttttactgcgtactcgtgagtctgcaggtctgctgctccagttcgctaacgatagcgccgccggtttgactgtctttctgtccgagggcagaatcagagccgaagttccaggtagcccagccgtagttctgcccggcagatgggacgacggcctccggcatctggtcatgctgtcatttgggcctgaccagctccaggatctggggcaacacgtccatgtgggaggccgtttacttgccgccgacagccagccctggggcggccccttccggggttgcctccaggatttaagactggatggctgccatctgcccttctttcctctgcctcttgacaattctagtcagccatctgagctgggaggccggcagtcctggaatctgaccgctgggtgtgtgtccgaggatatgtgtagccctgatccatgttttaatggcgggacttgtctcgttacctggaatgacttccactgtacctgtcccgcaaattttacaggcccaacctgcgcccaacagctctggtgtcctgggcagccgtgtctcccaccagccacgtgcgaagaagtgcctgatgggtttgtgtgcgtggcagaggccacctttcgagagggcccccctgccgctttctctggacataatgccagcagtggaagacttctgggcggactttccttggccttcagaacacgagactcagaagcctggctgcttcgcgccgccgcgggagctctggaaggggtctggctggcggttcgcaatggctctctcgccggaggagttaggggggggcacggcctgccaggagctgtgcttcctattccaggcccacgggtcgctgatggggcctggcatcgggttcgcctcgccatggaacggcctgctgcaacaaccagccgctggcttttgtggctggatggagccgccacacccgtggcactacgtggtctggcatctgacctcggctttttgcagggacccggcgctgtacggatcctactggcagaaaacttcaccggttgcctggggcgagttgcactgggagggcttcccttgccgctggcgcggcctagacccggtgcagcccccggtgcacgcgagcacttcgcttcttggccaggtacacctgcaccaattctaggctgtcgtggagctcccgtttgcgcccccagcccatgtctgcacgacggcgcatgcagagacctgttcgacgccttcgcttgtgcttgtggccccgggtgggagggccctcgctgcgaggcccatgtcgacccctgccacagtgccccttgtgcccgtggccgatgtcacacacatccagacggaaggttcgagtgccgatgcccccccgggtttggtggcccccggtgccgtttacccgtcccctccaaggaatgttccctgaatgtgacgtgtttggatggctcaccatgtgagggcgggtctcctgctgctaattgttcgtgcctcgaggggcttgctggtcagcgctgtcaggttcctaccctgccctgtgaggccaatccctgcctgaatggcggcacgtgtagagccgcaggtggtgtgtccgaatgcatctgtaatgcaagattctccgggcaattttgtgaagtggcaaagggactccctctcccactgccgttcccgctgctggaagtggccgtgccggctgcttgcgcatgtctgctgctgctactgttggggctgctatccggcatcttggcagccaggaagcggcggcaatccgagggcacctattcgccctcacaacaggaggttgcaggggctcgcctggagatggattcggttctcaaggtgccacccgaagaaaggttaatatag

SEQ ID NO: 113181 - DNA, 363 bp, synthetic construct
  misc_feature 1..363: note = Description of Artificial Sequence: Synthetic coding sequence
  source 1..363: mol_type = other DNA
atggcaaatcccggtctcggccttctgctggccttaggactcccattcctactcgcgcgctggggcagagcatggggacagatccagacaacctccgccaacgaaaactccaccgtgttgccctctagcacctcaagctcatcagacggaaacctccggcctgaggccatcaccgccatcattgtggtgttctccctcctcgccgccttgcttctggcagttgggctggccctcctggtgcgaaaattacgagagaagaggcagacagagggcacgtaccggccttccagcgaggagcaagtaggggcacgcgttcctcccacccccaacctgaaattgccccctgaagagcgattgatctag

SEQ ID NO: 113182 - DNA, 372 bp, synthetic construct
  misc_feature 1..372: note = Description of Artificial Sequence: Synthetic coding sequence
  source 1..372: mol_type = other DNA
atggccaatcccgggctgggcctcctgttagctttagggttgccgttcctgctcgcacggtggggcagggcatggggacaaatccagacgactagcgcaaatgaaaacagcaccgtgctgcctagctctacaagtagtagcagcgatggcaatctgagaccagaggctatcacggccatcatagtggtgttcagcctgcttgctgcactcctgctcgccgtgggcttggctctcttggtccgcaagttgcgggagaagcgtcagacagagggcacctaccgaccgtccagcgaggagcagttcagccacgccgccgaggcaagagccccccaagactccaaagaaaccgttcagggatgcctgcccatttag

SEQ ID NO: 113183 - DNA, 363 bp, synthetic construct
  misc_feature 1..363: note = Description of Artificial Sequence: Synthetic coding sequence
  source 1..363: mol_type = other DNA
atggctaatcccggactgggcctgctgctggcgttgggacttccatttctcttggcgcggtggggccgcgcgtggggtcagatacagacaacctccgcgaacgagaattctacagtactaccgagtagcacctcttccagctcggacgggaaccttcgtccggaggccatcacagctattatcgtggtgttcagcctgctcgctgcgctcctgttagccgttggcctcgccctgctggtccgcaagctgagggagaagcggcagactgaggggacatacaggccttcttccgaggaacaggttggcgctagagtcccacccacgccaaatttgaagctgcctcccgaagaacgcctgatttag

SEQ ID NO: 113184 - DNA, 1599 bp, synthetic construct
  misc_feature 1..1599: note = Description of Artificial Sequence: Synthetic coding sequence
  source 1..1599: mol_type = other DNA
atgccagcccctcccgggcgtacccacacatggtttctgttacagagtctcgaagatttggacaccagcctcagaaagttgaacagtcgactatttgtagtgagggggcaacccgctgacgtttttccccgcctgttcaaggagtggggagtcacgagactcacatttgaatatgacagcgagcccttcgggaaggagcgcgatgccgctattatgaaaatggccaaagaggccggtgtcgaagtggtgactgaaaacagccacaccctctatgacctggaccgcattattgaactgaatgggcaaaagccccctctgacatacaagcgtttccaggctattatctcccggatggaactcccaaagaaaccagtggggctggtgaccagccagcaaatggagtcatgtcgggcagaaatacaggagaatcacgatgagacgtatggcgtcccaagcttagaggagcttgggttcccgacagagggactgggcccggctgtttggcaaggcggagagacagaggctctggctcggcttgacaagcacctggagcgcaaggcttgggttgccaattatgagaggcccaggatgaatgcaaactccttacttgcaagtcctacaggcctgagcccatacctgagattcggttgtttaagctgcagacttttttactaccggttatgggatttgtataagaaggtcaagcggaattctacccctccgctgtcacttttcggccagcttctgtggagggagtttttctacaccgcagcaaccaacaatccccgttttgaccgaatggaaggtaatcccatttgcatacagattccatgggatcggaatccggaagccctcgctaaatgggctgaggggaagacagggttcccatggatcgacgcaatcatgacccagctgcgtcaggagggttggatccaccacctcgctaggcacgccgtggcctgcttcctgacaaggggagacctgtgggtaagttgggaaagtggtgtgcgcgtcttcgatgaactcctattagatgcagacttttcggtgaacgcgggctcgtggatgtggttgagctgcagcgccttcttccagcaattttttcactgctactgtcccgtgggcttcggtagacgcaccgacccaagtggcgattatatcaggagatacctccccaaacttaaagcctttccgtcccgctacatctacgaaccatggaacgccccagagtccatccagaaggctgctaagtgtatcatcggggtggactaccctcgccccattgttaaccacgcagaaacgtctcggctcaatatagagcggatgaagcagatctaccagcagttgtctagataccgcgggttgtgtttgctcgcctctgttccatcctgcgtcgaagacctgtcccaccctgtggccgagccttcgtcatcacaggccggctcaatgtcttcagccgggcctagacccttgccttctgggcccgcatctccaaagcgtaagctcgaggctgctgaggagccccctggcgaggagctgagtaaaagagccagggtggctgaactccctacacccgagttgccaagcaaggatgcctag

SEQ ID NO: 113185 - DNA, 1845 bp, synthetic construct
  misc_feature 1..1845: note = Description of Artificial Sequence: Synthetic coding sequence
  source 1..1845: mol_type = other DNA
atgggcggagtacatgtggcctacagaggcggcgcaggcgttgccggtgcagtgtggaccgtgatggcggctaccgtggctacagccgccgctgttgccccggcccctgctcccgggaccgactccgcctcctcagttcattggttccgcaaaggcctccgactgcatgacaatcctgccctgctggccgccgttaggggcgccaggtgtgtcagatgtgtctatattctggacccgtggttcgccgcctcttcgtccgtgggaataaatcgttggcggtttctcctacagtctctggaagacctcgataccagtcttagaaagctaaacagccgactcttcgtcgtgagagggcagccagccgatgtctttccaagacttttcaaggagtggggggttacccggcttacttttgagtacgactctgagccattcggcaaggaaagggacgccgccataatgaagatggcaaaagaagccggagtagaagtggtcaccgaaaacagtcacaccctgtacgatctggacaggatcatcgagctcaacggacagaagccgccacttacctataaaagattccaggccataattagcagaatggaactcccaaagaagcctgttggcctggtcacctcccagcagatggagtcctgtagagcagagatccaggaaaaccacgatgaaacttacggagtccccagtctggaagaactgggcttcccgaccgaaggtctgggcccggctgtttggcagggaggcgagactgaggcgttagcccgcctcgataagcacctcgaacgcaaagcatgggtggcgaactacgaacgaccccggatgaacgcaaatagccttctggcaagtccaaccgggctgtctccttatctgagatttggctgcttaagttgccgtctcttctactacaggttgtgggatctttataagaaagtgaaacgtaacagcaccccgccattaagtctttttggccagctgttatggagagagtttttctacaccgcggccaccaacaacccccgctttgatcgaatggaaggcaaccctatttgtatccagatcccttgggacagaaatcctgaagctctagccaagtgggctgaagggaagacgggatttccatggatcgatgctatcatgactcagctgaggcaggaaggatggattcatcatctcgcccgccatgctgtggcctgttttctcacccgtggagatctttgggtctcgtgggagtcaggcgttagagtgtttgatgaactgcttctcgatgcagacttcagtgttaatgccggttcgtggatgtggttgagctgtagcgcattctttcagcaatttttccactgctactgccccgtcggctttgggcgacgcacagacccctccggagactatatcaggcgctacctcccaaaactgaaggcttttccatcacgctacatctatgagccatggaacgcccccgagtccatccagaaagccgctaagtgtatcattggcgtggactatccaaggcccatcgttaaccacgccgagacctccagactgaatattgagagaatgaagcagatctatcaacagcttagccggtatagaggtctgtgcctgctggcatcggtgccctcctgcgtcgaagacctgtcacaccctgtagcggagcccagcagtagccaggcggggtcaatgagctcggccggccccagacctctgcccagcggacctgccagcccgaaaagaaagctggaggcagcagaggagccccctggtgaggagttgagcaagagagcacgcgtcgcagaattgcccacccctgaactacccagcaaagatgcctag

SEQ ID NO: 113186 - DNA, 522 bp, synthetic construct
  misc_feature 1..522: note = Description of Artificial Sequence: Synthetic coding sequence
  source 1..522: mol_type = other DNA
atggatgtgacaattcaacatccctggtttaagagaactttggggcctttttaccccagtagactcttcgaccagtttttcggggagggacttttcgagtatgacttgctcccattcctctctagcaccatttctccatactatcgccaaagcctttttcgcactgtcctagattctggcatctctgaggttcgatcagaccgtgataagttcgtgatctttttggacgttaagcactttagccctgaggaccttactgttaaggttcaagatgacttcgtggaaattcacgggaaacacaacgagagacaggacgatcatggctatatttccagggagttccatagaaggtacaggttgccctctaatgtggaccaatcggccctctcctgcagtctaagcgccgacggaatgctgacgttctgcgggcccaagatccaaactggcttggacgctacccatgccgagcgggcgattccggtttcacgagaagagaagcctaccagcgccccttcaagctag

SEQ ID NO: 113187 - DNA, 570 bp, synthetic construct
  misc_feature 1..570: note = Description of Artificial Sequence: Synthetic coding sequence
  source 1..570: mol_type = other DNA
atggctctggtgagaggtggttggctttggagacaatcctctattcttcggagatggaaaagaaactggttcgccctgtggttggatggcactctcggatactaccatgacgagaccgcacaggacgaggaagatagggtgctgatccatttcaacgtgcgggacattaaaatcggcccggagtgccatgatgtgcagcccccagaagggcgtagtcgtgacggactgttgacagtgaatctgcgcgaaggtgggagactccatctctgtgccgaaacaaaagacgacgcactggcctggaaaacagccctcttagaggccaacagcacaccagtaagggtgtatagcccctaccaggattattacgaggtggtgcctcctaatgctcacgaggcaacctacgtaagatcttactacggtcccccctacgcaggaccaggagtcactcatgtgatcgttcgtgaagacccatgttactctgccggagcacccctagcaatgggaatgctcgcaggcgctgctaccggagcagcactgggatcattgatgtggagcccatgttggttttag

SEQ ID NO: 113188 - DNA, 528 bp, synthetic construct
  misc_feature 1..528: note = Description of Artificial Sequence: Synthetic coding sequence
  source 1..528: mol_type = other DNA
atggacatcgctatccaccatccatggattcgccggcctttcttcccttttcattcccctagtagactgtttgatcagttttttggcgaacacttattagaaagcgacctttttcctacgtctaccagcctatcaccattctacctccgacctcctagcttcttgcgtgcccctagttggtttgatacggggttgagcgagatgcgactggaaaaagacagattttctgtgaatctcgacgtgaaacacttttcccctgaagagctgaaggtcaaggtgctcggcgacgtgattgaggtgcacgggaaacatgaagagcgccaggacgagcatggatttatctctcgcgagttccatcggaagtacaggattcccgcagatgtcgaccctttgaccattacatccagcctgtccagcgacggagtgctgactgtaaatggcccaagaaagcaggtgagcggaccggagcgcacaatcccaatcacacgggaggaaaagcctgcggtaaccgctgctccgaagaagtag

SEQ ID NO: 113189 - DNA, 525 bp, synthetic construct
  misc_feature 1..525: note = Description of Artificial Sequence: Synthetic coding sequence
  source 1..525: mol_type = other DNA
atggatatcgccatacaccacccctggatccgccggccattcttcccttttcactcacccagcagactctttgaccagtttttcggggaacatctgctggagagcgatctgtttccaactagcacgtccctaagtccattttatctaagaccgccgtcattcctgcgggcaccgagttggtttgacacaggcctgtctgagatgaggctggaaaaagaccggttttctgtgaacctcgatgtcaagcatttttcccctgaagaactcaaggtcaaggtcctcggcgacgtcatcgaggtccacggcaaacacgaagagagacaagacgaacatggatttatcagcagagagttccatagaaagtatcgaattcccgcagacgtagatccactcacaattacttcttccctctctagtgatggcgtcctaactgttaacggccccagaaagcaggtatctgggcctgagagaactatccccataactagagaggagaagcctgccgtgactgccgctccgaagtag

SEQ ID NO: 113190 - DNA, 528 bp, synthetic construct
  misc_feature 1..528: note = Description of Artificial Sequence: Synthetic coding sequence
  source 1..528: mol_type = other DNA
atggatattgctatccatcatccttggattcggaggcctttctttccgtttcatagcccctctcggctcttcgaccaattcttcggagagcacctgctggagagcgacctgttccccactagcaccagcctctctcccttctatcttcggccccctagctttctcagagctcccagttggtttgatacaggactgagtgaaatgaggctagaaaaagatcgcttcagtgtcaatctcgatgtgaagcatttcagccctgaagaactcaaggtgaaggtcctgggagacgtgattgaggtccacggtaaacatgaggagaggcaggatgagcatggctttattagccgggagtttcaccgaaaataccgtatccccgcggatgtcgatccccttactattacaagctcactgtctagcgatggagtgctgaccgtcaatggccccaggaagcaggtcagcggcccggagaggacaataccaatcacacgagaggagaaacccgccgttaccgccgcaccgaagaaatag

SEQ ID NO: 113191 - DNA, 234 bp, synthetic construct
  misc_feature 1..234: note = Description of Artificial Sequence: Synthetic coding sequence
  source 1..234: mol_type = other DNA
atggacatcgcgattcatcatccctggattaggcgtcctttcttcccattccactctcccagtaggctgttcgaccagttctttggagagcatctgctggagtctgatctgttcccaacatctacctctctaagccccttctaccttaggccaccgtcatttctacgggcgcccagttggttcgacactggactatctgaaatgcgcctggagaaggaccgtttctcagtgtag

SEQ ID NO: 113192 - DNA, 393 bp, synthetic construct
  misc_feature 1..393: note = Description of Artificial Sequence: Synthetic coding sequence
  source 1..393: mol_type = other DNA
atggacatcgccattcatcacccttggatcaggcgaccgttcttccccttccacagtcccagcaggctgttcgatcagttttttggcgagcacctcttagagtctgatctctttccaacgagcacgtctctgagcccattttacctgcgaccgccatcgttcctgcgcgcaccaagttggtttgacactgggctttccgaaatgagactcgaaaaggaccgattctccgttaacttggatgtgaagcatttctcccccgaggagctgaaggttaaagtgctcggcgatgtgatagaggtgcacggtaaacacgaggaaaggcaggatgaacatggctttatctcccgtgaattccatcgaaaatatagaattccagctgacgtagacccttag

SEQ ID NO: 113193 - DNA, 528 bp, synthetic construct
  misc_feature 1..528: note = Description of Artificial Sequence: Synthetic coding sequence
  source 1..528: mol_type = other DNA
atggatattgccattcaccacccctggatccgaagacctttctttcccttccactctccttcccgcctgtttgaccagttcttcggagaacacttgctggagagtgatcttttccccacatcaacgagtctgtccccattctacctgaggcctccatcgtttctgagagctccgagctggtttgatacgggcctgtccgagatgcgactggaaaaagacaggttttccgtcaacttggacgtaaaacatttttcaccagaagagctgaaagtgaaggtgctcggcgatgtcatcgaagtccatggaaaacacgaggaacggcaggatgagcacggctttataagccgagagtttcacaggaaatacagaatccccgcagatgtcgatcctctgacaatcacctccagcctgtccagtgatggtgtcctcactgtgaacggccctagaaagcaggttagtggtcccgagcggactatcccaataaccagggaagaaaaaccagcggtgaccgctgcccctaagaaatag

SEQ ID NO: 113194 - DNA, 528 bp, synthetic construct
  misc_feature 1..528: note = Description of Artificial Sequence: Synthetic coding sequence
  source 1..528: mol_type = other DNA
atggacatcgcaatccatcatccgtggatcaggcgaccgtttttcccctttcacagcccaagtcggttattcgaccagttctttggtgagcatctgttagaaagtgatctttttcctacttctacttccttgagccccttctatttgcggccaccgagctttcttcgtgctccatcttggtttgatactggactgtctgaaatgagactagagaaggatcgtttttccgtgaacctggatgtaaaacacttcagtcctgaggagctgaaagtgaaggttctgggggatgtgattgaggtacacggaaaacatgaagaaagacaggatgaacacggttttatcagtagagagttccatcggaagtatagaattccagccgacgtggatcctcttacaattacctcatccctttccagcgatggagtccttaccgtaaacgggccccgcaaacaggtttccgggcccgaacggactatacctattacgcgggaggagaagcccgccgtgaccgccgctcccaagaaatag

SEQ ID NO: 113195 - DNA, 210 bp, synthetic construct
  misc_feature 1..210: note = Description of Artificial Sequence: Synthetic coding sequence
  source 1..210: mol_type = other DNA
atggacatcgccattcatcatccatggattagaaggccgttctttccatttcactcaccgtctaggctgttcgaccagtttttcggagagcatcttctggagagtgacctgttccccaccagcactagcctatccccgttttacctaaggccgccaagctttctgcgggccccttcatggttcgatacggggctttccgagatgcgatag

SEQ ID NO: 113196 - DNA, 2148 bp, synthetic construct
  misc_feature 1..2148: note = Description of Artificial Sequence: Synthetic coding sequence
  source 1..2148: mol_type = other DNA
atgcaccttctgcccgccttagccggggttcttgccacactggttttggcccagccctgcgaaggaaccgaccccgcgagcccaggagccgtcgagacatcagtgctgcgagactgcatagccgaggccaaacttctggtcgatgccgcctataactggacccagaagtccatcaagcagcggttgcgctccgggtctgcgtctcccatggatttgctgtcctactttaaacagcccgtggctgccaccaggactgttgtccgagcggcagactatatgcacgtagctctgggactactcgaggagaagctgcagccccagcgcagtggaccatttaacgtgacagatgtgttaaccgaaccacagttgcggttgttgagtcaggccagcggttgcgcactgagagaccaggcagagagatgttctgacaagtatagaactattacggggcggtgcaataacaagcgacgccctctgctgggcgccagcaaccaggccctcgctcgctggctgcccgcagaatatgaagatggcctctctctcccattcggatggacaccgtcccgaaggcgtaacgggttcctgctaccattggttcgtgcggtgtctaaccagatagttagatttcctaatgaacgtttgaccagtgaccgaggtagggcactcatgtttatgcagtggggccaattcatcgaccatgacctggacttctcccctgaatcccccgctagggtagcctttacggctggcgttgactgtgagaggacgtgtgctcaactgccaccatgcttccctattaaaataccacccaatgatccaaggatcaaaaatcagcgtgactgcattccgttttttaggagcgctccaagttgcccacagaacaagaatagggtcagaaaccagattaacgcgctcacttcttttgttgacgcatccatggtgtatgggtcagaggtttctctaagcctccggctgcgcaatcggacgaattatttaggactgttggccataaatcaaaggttccaggataacgggagggctctgctaccgttcgataatctccatgatgatccttgcctattaaccaatagatcagccaggattccgtgttttcttgccggggacaccaggtccaccgaaactcccaagctagccgcgatgcacactctgtttatgagagagcacaacaggctagccaccgagttacgcagactaaacccccgctggaacggcgacaagctgtacaacgaggcccgtaagatcatgggggccatggttcaaatcataacttacagggactttctgccattggtcctaggaaaggccagggccagaagaactcttgggcattatcgtggttactgctccaatgtagatcctcgggtggcaaacgtgttcacacttgcgtttcgatttggtcacaccatgcttcagccatttatgtttagattggacagccaatacagagcatccgctccaaacagccatgtgccattgagctccgcgttttttgcatcctggaggatcgtctatgaagggggcatcgatcccatcctgagaggcctgatggccacaccagccaagctgaacaggcaagacgcaatgctcgtggacgagctccgggatcgactcttcagacaagttcgaaggatcggattagacttagccgcgctcaatatgcagcggtctagggatcatggcctgcctggatataatgcctggaggcgattttgcggactgagtcagcctcgcaatctagcccagctgtctcgcgtgctgaaaaaccaggaccttgcaagaaaatttctgaatctgtacggcacaccagacaacatagacatctggatcggggcaattgccgagcctctccttcccggcgcccgagtcggtcctctgttagcatgccttttcgagaaccaattccggcgtgctagggatggagacagattttggtggcagaaaagaggggtattcacgaaaaggcagaggaaagcgctgagccgtatatcattatctaggatcatatgtgacaatacaggtatcactacagtgtcgcgggatatcttcagagcgaacatatatccacgggggttcgtgaattgcagccgaatcccccgcttaaacctaagcgcttggcggggcacttag

SEQ ID NO: 113197 - DNA, 594 bp, synthetic construct
  misc_feature 1..594: note = Description of Artificial Sequence: Synthetic coding sequence
  source 1..594: mol_type = other DNA
atgtcttcagctccagccccaggacccgcacccgcctctcttactctgtgggacgaggaagattttcagggtaggcgctgccgtctgctctctgactgcgcgaatgtctgtgagagaggaggattaccacgtgttcgcagtgtcaaggtggaaaatggcgtgtgggtggctttcgaatatcctgatttccaaggacagcagtttatactggaaaagggagactacccacgctggtccgcctggagcggaagctcatcgcataattccaatcagcttttgtctttcaggcccgtcctgtgcgcgaaccacaacgatagtcgggtaaccctgttcgaaggggataattttcagggctgtaagtttgacctggtcgatgattacccatctcttccttcaatgggctgggcttcaaaggacgtcggctcgctcaaggtcagttctggggcctgggtcgcctatcagtaccctggctaccggggataccagtatgttctggagcgcgatcgccacagcggggagttctgcacctatggagagctcgggacccaagcacacaccggacagttacaaagcatacgtagggttcagcattag

SEQ ID NO: 113198 - DNA, 594 bp, synthetic construct
  misc_feature 1..594: note = Description of Artificial Sequence: Synthetic coding sequence
  source 1..594: mol_type = other DNA
atgtcatccgctccagcccccggacccgccccggcgtcgctaaccctgtgggacgaggaggacttccaggggcgcagatgtaggctgctgtcagattgtgcaaatgtttgcgagcggggtggcctccccagagtccgctccgtgaaagtggagaatggagtgtgggtcgcctttgaataccctgactttcaggggcagcagttcattctcgaaaaaggtgactacccgagatggtcggcttggtcggggagttcctcccacaatagcaatcagttactgagttttaggccagtgctgtgtgccaaccataacgacagtcgagtcaccctgttcgagggagataacttccaaggatgcaagtttgacctggtagacgattacccctccctaccttctatggggtgggcgtcaaaagatgtgggttcattgaaggtcagttctggcgcatgggtggcataccagtaccccggctatagaggttaccagtatgtgctggaacgcgacagacactcaggagagttttgtacttacggcgaactgggcacccaggcacacacagggcaactgcaaagcattaggagagttcaacactag

SEQ ID NO: 113199 - DNA, 390 bp, synthetic construct
  misc_feature 1..390: note = Description of Artificial Sequence: Synthetic coding sequence
  source 1..390: mol_type = other DNA
atgtcctcagcaccagctcccggccccgccccggcaagtcttaccctgtgggacgaagaagattttcagggacgccgatgcaggcttctgagcgactgcgctaatgtctgtgagagaggcggtctccctcgggtgcgcagtgtcaaagtggagaatggcgtgtgggtggccttcgaataccccgacttccagggccagcagtttatcctcgagaaaggagattatccgcgatggagcgcctggagcggctctagcagtcataattcgaatcagcttcttagctttcggccggtgctgtgtgcgaatcacaacgatagcagggtgacactatttgagggagacaactttcagggatgtaagtttgatctggtggatgattacccttcctag

SEQ ID NO: 113200 - DNA, 591 bp, synthetic construct
  misc_feature 1..591: note = Description of Artificial Sequence: Synthetic coding sequence
  source 1..591: mol_type = other DNA
atgactctacaatgcaccaaatccgccgggccttggaaaatggtagtgtgggacgaagacggattccagggccggcggcacgagttcacagccgagtgcccatcagtgctcgagcttggatttgagactgtccgtagcctcaaggtgctcagcggcgcctgggtcggatttgagcacgcggggttccaggggcaacaatacatactcgagcgtggtgagtacccatcctgggacgcgtgggggggaaataccgcctatccggcagagcggctgacaagcttcaggcctgccgcgtgtgccaatcatcgcgattctcgcctaaccatctttgagcaggaaaacttcctagggaaaaaaggcgagttatccgatgattacccttcactgcaggccatggggtgggaagggaatgaggttggaagtttccacgtgcacagcggcgcctgggtgtgttctcagttcccgggatacagagggttccagtatgttctcgagtgtgatcaccatagcggcgattacaagcattttagagagtggggatcacatgcacccactttccaagtgcagtcaattcgccgtattcaacaatag

SEQ ID NO: 113201 - DNA, 1614 bp, synthetic construct
  misc_feature 1..1614: note = Description of Artificial Sequence: Synthetic coding sequence
  source 1..1614: mol_type = other DNA
atggagcgagtgaacgacgcctcatgcggcccaagtgggtgctatacctaccaggtgtcccgccattctacagaaatgctccataacttgaaccagcagcggaaaaacgggggaaggttctgtgacgtgttactgagagtcggcgacgaaagcttccccgctcacagggccgtcttggctgcctgctcagagtactttgagtccgtcttttccgcccagctgggcgacgggggggcagccgatggggggcctgctgacgtcggaggcgcgacagctgcccccggtgggggcgccggaggaagtcgcgagctcgagatgcacacaatttcaagcaaagttttcggcgatattttggactttgcctacacaagccgaatcgtcgtacggctagagagcttccccgagctaatgaccgcagcaaagttcctactgatgagaagcgtcatagaaatctgtcaggaagtcattaagcagtccaatgtgcagattctagtacctcccgctagagcagatattatgttatttcgtccgccggggaccagcgacctcggttttcctctggatatgacgaatggagccgccctggccgccaacagcaacggcatcgccggctccatgcaacctgaggaggaagcggccagagccgccggggccgcaatcgccggtcaagcttctttgcccgtccttccaggcgtcgacagactgcctatggtggccgggccactttctccccagctcctgactagccccttcccatcagttgcatcaagcgctccacccctgacgggcaaacgcggacgtggaagacctcgaaaagcaaacctgttagacagcatgtttgggagcccaggaggacttcgtgaggccgggatcctgccatgcggcctgtgcggaaaggtcttcacggatgctaatagactgcgacagcacgaagcacagcacggggtcaccagcctgcaactgggctacatagaccttccaccaccccggctcggagaaaatggtcttcctattagcgaagatcccgatggcccaaggaaacgatcacgtacgcggaagcaggtggcctgtgagatctgcggcaagatctttcgggatgtatatcatctgaatagacataagttatctcactctggcgagaaaccttactcatgccccgtctgtggactgagatttaaacgcaaagatcggatgtcatatcatgtcagaagtcatgacgggagcgtgggcaagccgtatatatgccagtcctgcggaaagggtttctcgcgccctgaccatctgaacgggcatatcaaacaagttcacacttcggagcgaccccataagtgtcaggtatgggtgggctcttcctccggtctccctcctttagaacccctcccttctgatctcccaagctgggacttcgcccaaccagccttgtggcgctcaagccatagcgtgcctgatacagctttttccttatcattgaagaaatctttccccgcgctggaaaatctgggtcccgcgcacagctctaatactctgttttgccccgcaccgccaggatatctgcgacagggttggaccactccggaaggctcccgcgcctttactcagtggcccgtgggctag

SEQ ID NO: 113202 - DNA, 618 bp, synthetic construct
  misc_feature 1..618: note = Description of Artificial Sequence: Synthetic coding sequence
  source 1..618: mol_type = other DNA
atggcatcagatcatcagacccaagcaggaaagcctcagtccctcaatccaaagattatcatattcgaacaggagaatttccaggggcattctcatgagctcaacggaccatgtcccaacctgaaggagacaggggtggagaaggccggttctgtcctggtccaggcaggcccatgggtgggatatgaacaggccaattgcaagggtgagcagttcgtgttcgaaaagggagaatatcccagatgggacagttggacaagttctagacgtaccgacagcctctcctcgctgaggcctattaaagtggattcccaggagcacaagattatattgtatgaaaacccgaacttcaccggcaagaagatggaaatcattgacgacgacgtgccatcttttcacgcgcatgggtatcaagagaaagtttcctcagtcagagtgcagagcggaacatgggtgggataccagtaccccggctacaggggcctccaatacctgctagagaaaggtgattataaggacagtagcgactttggtgcaccgcatccgcaggtacagtccgtcaggaggatacgtgacatgcaatggcatcagcgcggagcttttcacccttctaactag

SEQ ID NO: 113203 - DNA, 1284 bp, synthetic construct
  misc_feature 1..1284: note = Description of Artificial Sequence: Synthetic coding sequence
  source 1..1284: mol_type = other DNA
atgaggcaccttggtgctttcctgttcctgctgggagtgctcggtgcacttaccgaaatgtgcgaaatccctgaaatggatagccacctggtggaaaaactgggccaacacctacttccatggatggatagattgagtctggagcatctcaatcctagcatttatgtcggtcttcgattgagtagtctacaggctgggactaaggaggacctatatctccattcacttaaacttggttatcagcagtgcctgctcgggagtgcgttctcggaggatgacggagactgccagggcaagccatcaatggggcagcttgccctgtaccttctggcccttcgagctaattgcgaattcgtgcgcggacataaaggggataggctcgtttcccagctgaagtggttcctggaggacgagaagcgtgccataggacatgaccataagggccatccccacacaagttattatcagtacgggcttgggatccttgccctctgtcttcatcagaagcgagtccacgactccgttgtggacaagctgctgtatgctgttgaaccgtttcaccaaggccaccacagcgtggataccgctgccatggccggcctggcattcacatgtctgaaaagatccaattttaaccccggaaggaggcagagaattactatggccatacgaaccgtaagggaagaaattcttaaagcccagactcctgagggacatttcggtaacgtgtattcaacgcccctggccctgcagtttcttatgacttctcctatgaggggagctgaacttggcacggcttgcttgaaagctagggttgcgttgttagcgtcgctgcaggacggcgcctttcagaacgctctcatgattagccaattacttcctgtcctcaaccacaagacatatatcgatttgatctttcccgactgtctggctccaagagttatgttggaacccgcggctgagacaatcccccagacacaggaaatcatctctgtgacgctgcaggtcctcagtttgttaccaccctatagacagtctatctccgttctggcaggttcaaccgtggaagatgtgctgaagaaggcccatgagctgggtgggttcacctacgagacccaggcctcactatctggcccctatttaacaagcgttatgggtaaagctgccggggagcgcgagttttggcagctgttgagagatcctaatactccactcctccagggtatcgctgactatcgacccaaggatggagagaccatagagctgcgcttggtgtcctggtag

SEQ ID NO: 113204 - DNA, 525 bp, synthetic construct
  misc_feature 1..525: note = Description of Artificial Sequence: Synthetic coding sequence
  source 1..525: mol_type = other DNA
atgggtaaaataaccttctatgaagatcgggacttccagggaaggtgctacaattgtatctccgactgcccaaatctgcgcgtgtacttttctagatgtaactcaatacgggttgactcaggatgttggatgctttacgagcggcctaattaccagggacaccagtacttcctgagacgtggcaagtaccccgattaccaacactggatggggctctctgactccgtccagtcatgtcgaatcatccctcacacatcttcacataaactccgactttatgagcgggatgattataggggcctgatgtcagagcttacggatgattgcgcctgtgtgccagaactctttcgattacctgagatttactcactgcacgtgctggagggctgctgggttctctacgaaatgcccaattatcgggggaggcagtacttgcttagacccggagattaccggaggtaccacgactggggcggggctgatgctaaggtagggtcactgcgccgagtcacagatctgtactag

SEQ ID NO: 113205 - DNA, 528 bp, synthetic construct
  misc_feature 1..528: note = Description of Artificial Sequence: Synthetic coding sequence
  source 1..528: mol_type = other DNA
atgggcaagattacattttacgaggatcgggcatttcagggccggtcttatgaatgcactactgattgtcctaaccttcaaccatattttagcaggtgtaattccatcagggtggaaagtgggtgctggatgatctacgaacgccccaattaccaaggacaccagtattttctcaggcggggcgagtacccagactaccagcagtggatggggctgtccgacagtatccggtcctgctgcctgataccaccacactcgggggcataccgtatgaagatttatgacagagatgagctcagaggtcagatgtcagagctgaccgatgattgcatcagcgttcaggacaggtttcacctgaccgagattcatagcctcaacgttctggagggatcttggatcctgtatgagatgccgaattacagaggacgacaatatctgttacggcccggagaataccgacgtttcctagactggggggcacccaatgctaaggtgggctcactcaggcgcgtgatggacctctattag

SEQ ID NO: 113206 - DNA, 525 bp, synthetic construct
  misc_feature 1..525: note = Description of Artificial Sequence: Synthetic coding sequence
  source 1..525: mol_type = other DNA
atggggaagataaccttctacgaggaccgagcctttcaggggcggtcatatgagacaaccaccgactgtccaaatctgcaaccctacttttcaagatgtaatagtatccgagtcgagagcggatgttggatgctttatgaacgacctaactaccagggacaacagtacttgttgagacggggcgagtatcccgattatcagcaatggatggggttgagtgacagcattcgctcatgttgtctgatacctcagaccgtcagtcacaggctgagactgtacgaaagggaagaccataaaggcctaatgatggagctgtcagaagattgccctagcattcaagaccggtttcacctgagtgaaatccggtccctgcatgtgctggaaggatgctgggtgttatatgaactgcctaactacagaggaagacagtaccttttgcgcccacaggaataccggcgctgccaagactggggcgccatggatgcgaaggctgggagtctgaggagggtggtggatctttactag

SEQ ID NO: 113207 - DNA, 525 bp, synthetic construct
  misc_feature 1..525: note = Description of Artificial Sequence: Synthetic coding sequence
  source 1..525: mol_type = other DNA
atgggcaaaatcactctctacgaagacagaggctttcagggacgacattatgaatgcagctccgatcaccccaatctgcagccatacttgtcacggtgcaacagcgcgagagtggactctggttgctggatgctgtacgagcagcctaattatagtgggctccagtattttctgcgccgcggggactatgcagatcatcagcaatggatgggattgtctgactcagtgagatcatgccgcctgatcccgcactccgggagtcacagaataaggctctatgagcgagaagattatcggggacagatgattgagtttaccgaggactgtagttgccttcaggacagattccgcttcaacgagattcacagtttaaatgttcttgagggctcatgggtgctgtatgaactgtcaaactacagaggaaggcagtacctcctgatgcccggcgactaccgacggtaccaagactggggtgcgacaaacgccagggtagggtccctccgacgcgttattgatttttcctag

SEQ ID NO: 113208 - DNA, 537 bp, synthetic construct
  misc_feature 1..537: note = Description of Artificial Sequence: Synthetic coding sequence
  source 1..537: mol_type = other DNA
atgagcaagaccggcacaaagatcactttttacgaagacaaaaattttcagggccgccggtacgattgtgactgtgactgcgctgatttccacacgtacctgtctagatgcaattccatcaaagtcgaaggtggtacatgggccgtttacgagcggccaaattttgcaggatacatgtacatcctgcctcagggggagtatccagaatatcagcgatggatgggtcttaacgacaggctttcttcctgtcgcgcggtccatcttccctccggcgggcaatataagatacagatcttcgagaagggagacttctccgggcaaatgtacgaaaccacagaggactgcccctcgattatggagcaatttcacatgagagagatccacagttgtaaagtcctggagggggtgtggatattttatgaactgcctaactatagaggacgacagtatcttttagataaaaaggaatataggaaacccattgattggggagccgcttctcctgccgttcagtcttttaggcgaatcgtggagtag

SEQ ID NO: 113209 - DNA, 537 bp, synthetic construct
  misc_feature 1..537: note = Description of Artificial Sequence: Synthetic coding sequence
  source 1..537: mol_type = other DNA
atgagcaaaactggcactaaaatcactttctatgaagacaagaacttccagggacgacgctacgattgtgactgtgattgcgcggatttccacacatatctatcccggtgcaattccattaaagtggaaggagggacttgggccgtgtatgagaggccaaacttcgccggatatatgtacatactgccccagggagagtatccagaataccaaagatggatgggactgaacgaccgactcagctcatgccgcgccgttcacttgccatcagggggacagtacaagattcagatttttgagaagggagacttctcggggcaaatgtatgagacaactgaggattgcccaagcattatggagcagttccacatgcgtgaaatccacagttgtaaagtgttagaaggggtgtggattttttatgagctgccaaactaccgggggcgacaatatcttctcgacaagaaagagtatcgtaagcccatcgattggggcgctgccagcccagccgtccagtccttccgcagaatcgttgaatag

SEQ ID NO: 113210 - DNA, 960 bp, synthetic construct
  misc_feature 1..960: note = Description of Artificial Sequence: Synthetic coding sequence
  source 1..960: mol_type = other DNA
atggcctcatcagccgcaggttgcgtggtgattgtgggcagcggagtcattggacgatcttgggctatgctcttcgccagcggcggcttccaagttaagctgtatgatatcgagcagcaacagattcgcaatgctcttgagaatattagaaaagagatgaaactactggagcaggcaggaagtctgaaaggaagtttgagcgttgaagaacagctttccctgatttccggctgtccgaatatccaagaggccgttgagggggcgatgcatatccaggagtgcgttcccgaggacctggagctgaagaagaaaatcttcgcccagctcgacagtatcatcgatgatcgcgtcatcttatcctcatcaacctcttgcttaatgcccagcaaactgttcgcggggctggttcacgtcaaacagtgcatcgtggctcaccccgtcaatcccccatattatatccctcttgttgagctggtgccccaccctgagactgcacctaccaccgtcgatcgcactcatgccctcatgaaaaagatagggcaatgcccaatgcgcgtccagaaagaagtagctggcttcgttctaaaccggctgcagtacgccattattagtgaggcctggcgattagtagaagaaggaatagtgagtcccagcgacctcgatctggtcatgtctgaggggttgggtatgcgttacgcctttatcggtcccctcgaaacaatgcatcttaatgccgagggtatgctgtcttactgcgaccggtactctgaggggattaaacatgttctacagacctttggaccaatacccgagtttagcagagccactgcggaaaaggtcaatcaggacatgtgcatgaaggtgcctgatgatcctgagcacctggcagcaaggcggcaatggcgggatgagtgcctgatgcgcctcgctaagctgaagtcgcaagtgcagccgcagtag

SEQ ID NO: 113211 - DNA, 2346 bp, synthetic construct
  misc_feature 1..2346: note = Description of Artificial Sequence: Synthetic coding sequence
  source 1..2346: mol_type = other DNA
atggctaaaacacccagcgaccatttgctttccacccttgaggagctggttccttatgacttcgaaaaattcaagtttaagcttcagaatacgagtgtgcagaaggaacatagccgaattccccggtcccagatccagagagctagaccagtaaaaatggcaaccttgctggtaacctattacggtgaggaatatgccgttcagctaactctccaggtgctgcgagctatcaaccagcggttgttggcggaagagctgcatagggctgctatccaggaatattcaacccaggagaatggcaccgatgactcagcagccagctcttcccttggggagaataagcctcgaagtctaaaaacaccggatcatcccgagggaaatgaaggtaacgggcctaggccctacggtggcggcgcggcctccctgcgttgcagtcagcctgaagcgggtcgtgggctgagcagaaaaccactgagcaagagaagggagaaagccagtgaagggctagatgctcaggggaaaccaagaactagaagcccggccctgcctggtggaaggagtccaggcccttgccgcgccctggaaggtggacaggcagaggtcagattacgaagaaatgcatcttcagccgggagactgcaagggttggccggcggggcacctggtcagaaggaatgccggcctttcgaggtgtatcttccttcaggtaaaatgaggccaagatctctcgaggtgacgatcagcacaggcgagaaggcaccagccaaccccgagatcctcttgacattggaggagaagactgccgctaatctcgacagcgcaactgaacccagagcaaggcccactcctgacggtggcgcgagtgctgacctgaaggagggacccgggaaccccgaacactctgtgactgggagaccccccgatactgccgcttcacccagatgccacgcccaggagggagaccccgtggatggtacatgcgtgagggacagctgtagtttccccgaagcggtatccggccaccctcaagccagtggttctagatcccccggatgcccgagatgccaggactcacacgagaggaagagccccggctcactgtcaccccaacctttgccccagtgtaagaggcacctaaaacaggtgcagctcctattttgcgaagatcacgacgagcctatctgtctgatctgttctctgagtcaagaacaccaggggcaccgggtccgacctattgaggaggtcgccctagagcacaaaaaaaaaatccagaagcagctagaacacctgaaaaagctgcggaaaagtggcgaggagcaacgtagttatggagaagaaaaagcagtctcttttctcaaacagaccgaggccttgaagcagcgggtgcagcggaagctggaacaagtctactatttcttggaacagcaggagcatttctttgtcgcatcattagaagacgtgggacagatggttggacagatcagaaaggcatatgatactcgagtaagtcaggacattgctctgttggacgctctgatcggggagttagaggctaaggagtgtcagagcgagtgggagcttctgcaggacatcggcgacatcctgcaccgggctaaaaccgtgccagtgcctgagaagtggacaaccccacaggagatcaagcagaagattcagctccttcaccagaagagtgagttcgtagaaaagtccaccaagtatttcagcgaaaccctgcggagcgaaatggagatgttcaatgtgccagaactcatcggtgcacaagcacacgccgtgaacgtgattctggatgccgaaaccgcctatccaaaccttattttctcggatgatctcaaaagtgtgcggttggggaacaagtgggagcgactccctgatggtccccagagattcgattcgtgcattatcgtattgggctcgccttccttcctcagcggcaggcgctactgggaagttgaggtaggagacaaaacagcctggatcctcggagcttgtaaaacgtccatttcccgaaagggaaatatgaccctgtcacccgaaaacgggtactgggtggtgatcatgatgaaggaaaacgaatatcaggcctcttctgtgccccccactagactcttaataaaagagccccctaagagagtaggtatctttgtggactaccgggtgggctccatttccttctacaatgtgacggctcggagtcatatttataccttcgccagttgttccttttccggccctttgcagcccatcttctcacccggaacccgggacggagggaagaacaccgctccattgacaatttgcccggtcggcggccagggaccagactag

SEQ ID NO: 113212 - DNA, 945 bp, synthetic construct
  misc_feature 1..945: note = Description of Artificial Sequence: Synthetic coding sequence
  source 1..945: mol_type = other DNA
atgagtcgggttccagcatttctgtccgcggcagaagtggaggagcatctacggagttcttccctccttatcccacccctcgagacagccctggctaatttttccagcggccccgaaggcggtgttatgcaaccggttcggacagtagttccggttaccaaacatcgtgggtatcttggcgtgatgccagcctactctgctgccgaggacgccctgaccacgaagctggtgaccttttatgaagaccggggtattacaagtgtggtccccagccatcaggccactgtgcttctgtttgagcctagtaacggaacccttctggcagtgatggatggaaacgtgataaccgccaagagaacagctgccgtatccgccatcgcaaccaagttcctgaaaccaccttctagcgaagtcctgtgcatcctgggtgcgggagtacaggcatactcccactatgaaatcttcactgagcagttctccttcaaggaggttaggatttggaaccggacaaaagaaaacgccgaaaagttcgcggacactgtgcagggtgaggtcagagtgtgcagttccgtccaggaggccgtcgcgggtgccgatgtcatcatcactgtgacgttggcgaccgaacctattttatttggcgagtgggtgaagcccggcgctcatatcaacgcagtcggagcaagccgccccgactggcgcgagcttgacgatgaattgatgaaagaggcagttctgtatgtggactcacaggaggcagccctcaaggagtctggcgatgtgttgcttagtggagccgaaatattcgccgaactgggagaagtaattaagggtgtgaagcctgctcactgtgagaaaacaacagtgtttaaatccctggggatggctgtggaagacacagtagccgcaaaacttatttatgatagttggagctcaggaaaatag

SEQ ID NO: 113213 - DNA, 819 bp, synthetic construct
  misc_feature 1..819: note = Description of Artificial Sequence: Synthetic coding sequence
  source 1..819: mol_type = other DNA
atgcagcctgtgaggacagttgtgcccgtcactaaacaccgcggatacctcggagtgatgcctgcgtacagcgccgccgaggatgccctgactaccaagctcgtcacattctacgaagatcgtggcatcacttctgttgtgccctctcaccaagcaacggtgcttctgtttgaaccatctaacggaaccctgctggcggttatggacggaaatgttattaccgccaagcggacagcggccgtcagcgcaattgctactaaattcctcaagccacccagtagcgaagtcttgtgtatcctgggtgccggggtacaggcttatagccactacgaaatttttactgagcagttcagttttaaggaagtgcgaatctggaatcgaaccaaggaaaatgctgaaaaatttgctgatacagtccaaggagaggtgagagtttgtagctctgttcaagaagccgtggctggggcagatgtgatcatcaccgtgaccttggccacggaaccaatattgttcggcgaatgggttaagccaggagcccacattaatgcagtaggagccagtcgccccgactggagagagctggacgacgagcttatgaaagaggctgtcctttatgtcgactctcaggaggctgccctcaaggagtcaggggatgttctcctgtccggggctgagattttcgccgagctgggcgaggtgatcaaaggtgttaaacccgctcattgcgaaaaaactaccgttttcaagtctttaggcatggccgtggaagatacagtggccgctaaattgatttacgattcctggagttctggaaagtag

SEQ ID NO: 113214 - DNA, 945 bp, synthetic construct
  misc_feature 1..945: note = Description of Artificial Sequence: Synthetic coding sequence
  source 1..945: mol_type = other DNA
atgagtcgggtgccagcgttcttgagtgcagccgaagtggaggagcaccttagaagttcgagccttctcatcccgcctctcgagacagccttggctaatttcagctctggtccagagggcggcgtgatgcagcccgttaggactgtcgtgcccgtgactaagcaccgaggctacttgggggtgatgccggcctactcagcggctgaagatgcattaaccaccaaactcgtcacgttctacgaagaccggggaattacctctgttgttccgtcacatcaagccactgttctgttatttgagccatccaatgggacgctgcttgctgttatggatgggaatgttataacagccaagagaaccgccgcagtcagtgctattgcaacaaaattcctgaaacctccttccagcgaggtcttgtgtatcctgggggcaggtgttcaggcctactcccactatgagatctttactgaacagttctcctttaaagaggtacgtatatggaaccgtacaaaggagaatgccgaaaagtttgccgacactgtgcagggcgaagtgagagtgtgctcgagcgtgcaggaagcggtggccggtgccgacgtgatcattactgtgaccctggcaactgagcctatcctcttcggcgagtgggtgaaacccggtgcacatatcaatgccgttggcgcatcacgacccgattggcgggagctggatgatgaattgatgaaggaggcagttctgtatgtagactcacaagaggctgcgctgaaagagagcggcgatgtcctgctttcaggtgcagaaattttcgccgagctgggagaggtcatcaaaggcgtgaaacctgcccactgcgagaaaacaacggtttttaaatcgcttggcatggccgttgaagataccgtggccgcaaagttaatttacgactcgtggtcaagcggcaaatag

SEQ ID NO: 113215 - DNA, 990 bp, synthetic construct
  misc_feature 1..990: note = Description of Artificial Sequence: Synthetic coding sequence
  source 1..990: mol_type = other DNA
atggcgacagggcagaagttaatgcgggcagtgagggtattcgagttcggaggccccgaagtgctgaagctcagatccgacatagcggtcccgattcctaaagatcaccaggtcctgatcaaggttcatgcctgtggagttaatcccgttgagacatatatacgttccgggacatactctaggaagcccctgcttccctatacccccggttcggatgtcgctggagtgatagaagccgtgggggataatgcgtcggcatttaaaaaaggcgatcgggtgttcacatcatccactatatctggcggttatgctgagtatgctctcgccgccgatcacaccgtgtacaagctcccagagaagcttgacttcaagcaaggagcagccattgggattccctatttcaccgcatacagagcgcttatccattcagcctgtgtgaaggccggggagtctgtgttggttcatggcgcatctggaggtgtgggattagccgcctgccagatcgctagagcatatgggttgaaaatcctaggcacagccgggacggaggaggggcagaaaattgtgctgcaaaacggagcgcacgaggtgttcaaccatagagaggtgaactatatcgacaaaattaagaagtacgtgggcgagaaaggcatagacatcatcatcgaaatgctcgccaacgtcaatctgtcgaaagacctgtctctcctgtcacacggtggccgggtgattgtagtgggctctcggggcaccatcgagatcaatccaagggacactatggctaaggagtccagtatcattggagtgacactgttctcatccactaaagaagaattccagcagtatgcggccgctctgcaggccggcatggaaatagggtggttgaagcccgtcattggcagccagtacccactggaaaaggtcgccgaggcccacgaaaatatcattcatggttccggggccactggaaaaatgatcttgctgctgtag

SEQ ID NO: 113216 - DNA, 732 bp, synthetic construct
  misc_feature 1..732: note = Description of Artificial Sequence: Synthetic coding sequence
  source 1..732: mol_type = other DNA
atggcaacaggccagaagctcatgcgcgccgtgcgggtcttcgagttcggtggcccagaagtgctgaagctaaggtcagatattgctgtgcctataccaaaggatcatcaggtcctgatcaaagtccatgcctgcggagtgaacccagtcgagacgtatattcgcagtggtacctactccagaaagcccctcttgccctacactcccgggtcagacgttgcaggggtcattgaagccgtcggggacaatgcttcagctttcaaaaaaggagatcgtgtcttcacatcatccacgatatcaggggggtatgcagaatatgcccttgccgctgaccacaccgtgtacaaactcccagagaagctggatttcaaacagggtgctgccattggcattccctacttcaccgcgtaccgcgctctgatccactctgcatgcgtgaaggctggagagtcagtcctcgtacatggcgcctcaggaggggtcgggctcgcagcttgccagatcgcccgtgcgtacgggttaaaaattctgggtactgccgggaccgaggaggggcaaaagattgttctgcagaacggggcacatgaggtcttcaaccaccgcgaggtgaattacattgacaagatcaaaaagtacgtgggcgaaaagggaatagacatcattatagaaatgctggctaacgtcaacttatcaaaagatctgtctttgctgagccatgggggaagagtgtag

SEQ ID NO: 113217 - DNA, 888 bp, synthetic construct
  misc_feature 1..888: note = Description of Artificial Sequence: Synthetic coding sequence
  source 1..888: mol_type = other DNA
atggccacgggtcagaagctaatgagagccgtgcgcgtctttgagtttggcggacctgaagttctgaagttgagaagcgatattgccgtgccaattcctaaggatcaccaggtcctcatcaaggtgcatgcctgtggggtgaaccctgtagaaacctatatccgctctgggacttattcacggaagccactgcttccttacactccgggatccgacgtcgctggggtcattgaagccgtgggcgataatgcttccgcctttaagaagggtgatcgcgttttcacttcaagtactatctccggaggctacgccgagtacgcattggcagcagaccacactgtgtacaagttaccagagaagttggacttcaaacaaggagccgcaataggcatcccatacttcaccgcttaccgagctctcatccactccgcctgtgtcaaggccggggagagtgtgttagttcacggggccagcgggggcgtgggcctggctgcctgtcagattgcccgcgcatacgggttgaagatcctaggtacagccggcaccgaagaggggcagaaaatcgtcctgcagaacggtgcacacgaagttttcaaccacagggaagttaattacattgacaagatcaaagttgtcggttcgaggggcaccatcgagataaaccctagggataccatggctaaagagtccagcattatcggcgtgaccttgttcagttctactaaagaagagtttcaacagtacgctgccgctttacaggccgggatggagattggctggctcaaacctgtcatcggaagccagtacccactcgaaaaggtggcggaggctcacgagaatatcatccatggatcaggcgcaacgggcaagatgattctgcttttgtag

SEQ ID NO: 113218 - DNA, 579 bp, synthetic construct
  misc_feature 1..579: note = Description of Artificial Sequence: Synthetic coding sequence
  source 1..579: mol_type = other DNA
atgcacctgttatctagtgcctgtgtcaaggcgggagaatccgtgctcgtgcacggtgcctctggcggagtcggtctagccgcttgccagatcgctcgcgcttatggtttgaaaatactcggcacggccggcacagaagaaggacagaagattgttttgcagaacggggcccacgaggtctttaatcatagagaagtcaattacattgataagatcaagaaatacgtgggggagaagggaatcgatataattatcgagatgctggctaatgtgaacctcagcaaggatctctctctgctcagccatgggggccgggtgatcgttgtggggtcgcgcggaacgattgaaataaatcctcgagatacaatggctaaggagtctagcatcattggcgtgactctgttcagtagcacaaaagaagaattccagcaatatgcagctgcactgcaggctggcatggagatcggatggttgaagccggtgatcggttcccagtatccattggaaaaagtggctgaggctcatgaaaacataatccatggcagtggagccaccggcaagatgatactgctcctttag

SEQ ID NO: 113219 - DNA, 990 bp, synthetic construct
  misc_feature 1..990: note = Description of Artificial Sequence: Synthetic coding sequence
  source 1..990: mol_type = other DNA
atggcgactggacagaagctgatgcgcgcagtaagagtgtttgaattcggaggtccagaagtactgaagctccgtagtgacatcgcagtgccaatccccaaagaccatcaggttctaattaaggtgcatgcatgcggcgtcaaccctgtcgagacatacattcggagtggcacctattccagaaagcctttgctcccttacacccccgggtccgacgtagccggggtgatcgaagctgtgggagataatgcaagtgcatttaagaagggggaccgggtattcacctccagcaccatatccggtggatacgctgagtatgccctggccgccgaccacacagtgtacaaactccctgagaaactcgatttcaaacagggtgcggcgatcggcatcccgtactttactgcctaccgcgcgctaattcactcagcgtgtgtcaaggccggcgagtccgtcctagtccacggagcctcaggcggtgtaggcctcgccgcctgtcagatcgcacgcgcatatggcctgaagattcttggaactgccgggacggaggaaggacagaagatcgtgctgcagaatggggcacatgaggtgttcaatcatcgcgaagtaaattatattgataagattaagaagtacgtaggtgagaaggggatcgacattatcatcgaaatgcttgcgaatgtgaatttatcaaaagacctgtctctgctgagccatggtggacgagtcatagtggtaggtagcagaggcaccattgagatcaatcccagggacaccatggccaaagagtcgagtatcattggtgtgaccttgtttagcagtactaaagaggaattccagcagtatgctgctgccctccaggcagggatggagatcggttggctcaagccagtgatcggaagtcagtaccccttggagaaggtggcggaagctcacgaaaacataatccatggcagtggggccaccggtaagatgatactgctgctttag

SEQ ID NO: 113220 - DNA, 621 bp, synthetic construct
  misc_feature 1..621: note = Description of Artificial Sequence: Synthetic coding sequence
  source 1..621: mol_type = other DNA
atggcaaccgggcagaagctcatgcgtgcagtgcgcgtgtttgagttcggaggccccgaagtgctgaaactcagatctgacattgcagtgcccattcctaaggatcaccaggtgctaattaaggttcacgcatgtggggtgaacccagtcgagacctatatccgcagcgggacctactctcggaaaccactgttaccctacacaccgggttccgacgtggcaggtgttattgaggctgttggcgataatgcctccgccttcaaaaagggagaccgggtcttcacaagttcaactattagtggaggatacgccgagtacgctctggcggcagatcacactgtctataagctgccagagaagctcgacttcaagcagggagctgcaattggaataccttattttactgcgtatcgtgcactgattcactccgcttgtgtgaaagctggcgagtccgttctggtgcacggagcaagcggcggagtgggactggcagcttgccagatcgcgagggcctacggactgaaaatcctgggtactgccggtactgaggaaggccagaagatcgtcttgcagaatggggcacacgaagtgttcaatcaccgggaagtgaattacatctag

SEQ ID NO: 113221 - DNA, 1050 bp, synthetic construct
  misc_feature 1..1050: note = Description of Artificial Sequence: Synthetic coding sequence
  source 1..1050: mol_type = other DNA
atgaagggactgtacttccagcagtcctctaccgacgaggagattacatttgttttccaggagaaagaggacctaccagtgacagaggacaattttgtcaagctccaggtgaaagcttgcgccctgtcacagattaacaccaagttgctcgccgagatgaagatgaagaaggatctgttcccggtgggccgtgaaatcgccggtatcgtactggatgtgggctctaaagtgtcattctttcaaccagacgatgaggtggtaggcatccttcccttggacagtgaagacccaggtttatgcgaggtcgttcgggtccacgagcattacctcgttcacaagccagagaaagttacctggacagaagccgccgggtcaatcagagacggggtcagagcctatacagccttacattatctgtctcacctttcccccggaaaaagcgtcttaatcatggatggtgcgtctgcctttggcactatcgccatacagcttgctcaccatcgtggggctaaggtgatctctactgcttgttctctcgaagacaaacagtgtctggagaggtttcggcctcctatcgcccgcgtgattgatgtgtcaaacggaaaggtgcatgtggccgaaagctgtttggaagagaccgggggcttaggtgtggatatcgtgctggacgctggagtccgactctattccaaggatgacgaacccgcagtcaagctgcaactgctgcctcacaaacatgacatcataactctcttgggcgtcggagggcactgggtaactacagaggaaaacttacaactggatccacctgattcgcattgtctcttcctgaaaggagccaccctggcctttctcaatgatgaagtatggaatttaagtaacgtgcagcaaggaaaatacctgtgtattctcaaagatgtgatggaaaagctgagcaccggagtgttccggccccagctggatgaacccatcccgctgtacgaggccaaagtttccatggaggcagtgcaaaagaatcagggccgaaagaaacaggtggtgcagttctag

SEQ ID NO: 113222 - DNA, 546 bp, synthetic construct
  misc_feature 1..546: note = Description of Artificial Sequence: Synthetic coding sequence
  source 1..546: mol_type = other DNA
atgaagggactgtattttcagcaaagctcaacagacgaggaaattacattcgtttttcaagaaaaggaagacctccctgtaacagaggacaattttgttaaattgcaggtcaaggcatgtgccctgagccagatcaacactaagttgctggccgaaatgaagatgaagaaggacctgttccctgtggggcgcgagatcgccggtattgtgttagatgtcgggagcaaggtaagttttttccagccagatgatgaagtagtcggaatcctgcccctcgatagtgaggaccctgggctctgcgaggtcgtccgagttcatgagcactatctagtccacaaaccggaaaaggtcacttggacagaggctgcgggctctatcagagatggagtgagggcttacacggctctccactacctgagtcacctgtctccgggcaaatctgtgttgattatggatggagccagcgctttcggtactatcgccatccagttagcccaccaccgtggcgctaaggtcattagcaccgcatgtagcctagaggactag

SEQ ID NO: 113223 - DNA, 60 bp, synthetic construct
  misc_feature 1..60: note = Description of Artificial Sequence: Synthetic coding sequence
  source 1..60: mol_type = other DNA
atgaaggggctttatttccagcaatccagcactgacgaagaaataaccttcgtattttag

SEQ ID NO: 113224 - DNA, 597 bp, synthetic construct
  misc_feature 1..597: note = Description of Artificial Sequence: Synthetic coding sequence
  source 1..597: mol_type = other DNA
atgaaaggcctttatttccagcaaagctcgaccgacgaggaaatcactttcgtttttcaagagaaggaggatttgcctgtgaccgaggacaactttgtcaagttacaggtgaaagcgtgcgcgctgtctcagattaacacaaagttgctggctgagatgaagatgaagaaggacctttttccggttggaagagaaatcgccggcattgtcctggacgtcggatccaaagtgagtttctttcaacccgatgatgaagtggtgggaatcctgccactggactctgaggaccctgggctgtgcgaagtggtgcgcgtacacgagcactacctcgttcacaagccagaaaaagttacctggacggaggctgcaggatctattcgagacggtgttagggcatacacagccttgcattatctgagccacctcagcccaggaaaaagcgtgctcattatggacggtgcgtctgctttcgggacgattgccatacagctcgcgcaccaccgcggcgcgaaagtgatctccactgcctgtagcctcgaagacaagcaatgcctggagcgctttagacctcctattgagaattctaccatcgcttag

SEQ ID NO: 113225 - DNA, 2916 bp, synthetic construct
  misc_feature 1..2916: note = Description of Artificial Sequence: Synthetic coding sequence
  source 1..2916: mol_type = other DNA
atggagctgtccgatgctaacctccaaaccctgaccgaatacctaaaaaagacgctggatcctgacccggcaattcggcgccctgctgaaaaatttctggagagtgttgagggaaaccagaactatccacttttgcttctcacactactggagaaaagccaggacaatgttattaaggtttgcgccagcgtgaccttcaagaactatatcaaacggaattggcgcatcgtcgaggacgaacccaacaagatttgtgaggctgaccgtgtggcaataaaagccaatatcgtacatttgatgttgtccagccccgagcagatccagaagcaattgtctgatgcaatttcaatcattgggcgggaagatttcccgcaaaagtggcctgacctcctcacagagatggtcaataggtttcaaagcggggattttcacgttattaatggcgttctacgcacagcccatagcctctttaagagatatagacacgaatttaagtccaatgaactctggaccgaaatcaaactggtcctcgatgcgtttgccctacctctgacaaatctgttcaaggcaaccatcgaactgtgcagtacacatgccaatgacgcctctgcgctgcgcatattattctcttcactgatcctgatatcgaagttattttacagcctgaactttcaagatcttccagagttttttgaggacaacatggaaacatggatgaataactttcacaccttgctgactctggacaacaagctgttgcagaccgacgacgaagaggaagcgggtcttcttgagctcttaaaaagccagatctgtgataatgcggccctctacgctcagaaatatgacgaggaatttcagagatacctgcccaggtttgtgaccgctatttggaatctgctggtgacgactgggcaggaggtgaagtacgacctgctggtctcgaacgccattcaatttcttgcttccgtttgtgaaaggccacactacaagaatctgtttgaggaccagaacactctgacaagcatttgtgaaaaggtcatcgtgcctaacatggagtttcgcgctgcggatgaggaagcgtttgaggacaactccgaagaatacatccgccgtgacctcgaggggtccgacattgacacccgccggcgcgcagcttgtgatctggttcgcggcttgtgtaaattttttgaagggccagtgaccggtatctttagcggctacgtgaattctatgctccaagaatatgcaaaaaaccccagcgtgaattggaagcacaaggatgcagctatctacctggttacttctctcgcgtccaaagcacagacccagaagcacggtattacacaggcaaatgaactggtgaacctgaccgagttcttcgtcaatcatattctgccagacttaaaatctgcgaacgtgaacgagttcccagtcctcaaagcagacgggatcaaatacatcatgatatttagaaatcaggtgccaaaggaacatttgttggtttcaattcccctgctgattaaccacttgcaagctgaatctattgtggtccacacgtatgcagcacatgccctcgagagactttttacaatgcgaggcccaaataacgccactttgtttaccgctgcagaaatagctcctttcgtagagatcctcctgacaaatctttttaaggcactcaccttgcccggttcctccgagaatgagtatattatgaaagccataatgagatccttctccctcttgcaggaggccatcatcccttatattcccacactgatcacccaattgacccagaagttgttagctgtgagcaaaaacccatcgaagcctcactttaatcactacatgttcgaggcaatatgtctgagtataaggatcacttgcaaggccaatcccgctgcggtggttaatttcgaggaggccctatttctggtttttacagagatcctacagaacgacgtccaggagtttataccatacgtttttcaggtcatgagcctcctcttggagacgcataagaacgacatcccatcttcctatatggcactcttccctcatttactgcagcccgtactgtgggaacgaactggaaatatacccgctctggtccgcctgttgcaggctttcctggaaagaggcagtaacacaatcgcctctgccgcggcggacaagatacctggcctgctcggcgtcttccagaagttgatagccagcaaggccaatgaccatcagggtttttatcttttaaactctatcattgagcacatgccaccagagtccgtggatcaataccgaaaacagatcttcatacttctcttccaacggctccagaactctaagacaaccaaattcattaagtcattcctggtcttcattaacttgtattgcatcaagtatggcgctttagctctccaggagatattcgatggcatacaacctaagatgtttggaatggttctggaaaaaattatcatccctgaaattcagaaggtgtcaggcaacgtagagaaaaaaatttgtgcagtcggtatcaccaagctccttactgaatgcccccccatgatggacactgaatacacaaagctgtggacccctctcctccaatccctgattggcctgtttgagctcccggaggatgataccatccccgacgaggagcactttatcgatatcgaggacacgcccggctaccagactgccttttctcagttggcattcgctggcaaaaaggaacacgatccagtgggtcaaatggttaacaacccaaaaattcacctcgctcaatcattgcacaagctaagtaccgcttgtccaggacgggtgcctagcatggtatctacaagtcttaatgccgaggctctacagtacctgcagggatatcttcaggcagcttccgttaccttactttag

SEQ ID NO: 113226 - DNA, 2748 bp, synthetic construct
  misc_feature 1..2748: note = Description of Artificial Sequence: Synthetic coding sequence
  source 1..2748: mol_type = other DNA
atggagctgtcagacgctaatcttcagactctgacggagtacttaaagaagactctggaccccgaccccgcaattagacgcccagcagagaaattcttggagtcagtcgaggggaaccagaattaccccctgctgttgcttacactgcttgagaaatcacaggacaacgtgataaaggtgtgtgccagtgtgacgtttaagaactatattaagaggaactggaggatcgtggaggacgaacctaataaaatctgcgaagccgatcgcgtcgcaatcaaggccaatattgtgcacttgatgcttagttctccagagcagatacagaaacagttatcagatgccatcagcattattggacgggaagacttcccacaaaagtggccggaccttctgacggaaatggtcaaccggtttcagagtggcgatttccacgtgataaacggcgtcctgcgaactgctcactcattattcaaacggtatcggcatgaattcaaaagtaatgaactctggacagaaataaaacttgtgctggacgctttcgccctcccgctcaccaatttgtttaaggccacaatcgaattatgttccacccacgctaacgatgccagcgctttgcgcatactcttcagttcactgatactgatttcaaagttattttatagcttaaactttcaggaccttcccgagtttttcgaagacaatatggagacctggatgaataacttccacactctcctgactttagataataagttgcttcagactgacctggtttctaacgcaatacagtttctggccagtgtatgcgagcgcccccactacaagaatctgtttgaagaccaaaacaccttaaccagcatatgcgagaaagtgattgtgccaaacatggagttcagggctgctgacgaggaggcattcgaggataacagcgaagaatatatccgtcgtgatcttgaggggagcgacatcgacacaaggaggcgtgccgcctgcgatttagttcggggcctctgtaagttcttcgaaggacccgtcacgggtatcttttcagggtacgtaaatagcatgttgcaggagtatgccaaaaaccctagcgtaaattggaaacacaaggacgccgcaatatacctggtaactagtctggcctccaaagcgcaaacacaaaaacacgggatcacccaagctaatgagctcgtcaacctgaccgagttcttcgtgaaccacatacttcctgatttgaaatcagcaaacgttaacgaattccccgtgctgaaagccgacgggatcaagtacattatgatcttcagaaaccaagtgccaaaagagcatcttttggtgagcatccctttgctgattaaccacctgcaggccgagagcatcgtagtgcacacctatgcagctcacgctctcgagagattgttcaccatgagaggaccgaataatgcaacactgtttacggctgccgaaattgcacccttcgtggagatattactaactaatctgtttaaggccctgaccttgccagggtcaagcgaaaatgagtatatcatgaaggcgatcatgaggagtttttcccttcttcaggaagccatcataccctatattcctactttgataacacagctgacgcagaagctgcttgctgtatccaagaacccaagcaaacctcattttaatcattacatgtttgaggcaatttgtctcagcattaggataacttgtaaggccaacccagccgccgtcgtcaattttgaggaggcgctgtttcttgttttcacggagattttgcagaatgatgtgcaggagttcattccctatgtattccaggtcatgagcctgctgttggagacccataaaaatgatatcccatcatcctacatggcactgttcccccacttattgcagcccgtattatgggaacgtacaggcaacatccccgcattagtgcgtcttctccaagccttcttggagcgcggttccaacaccatcgcgtccgccgccgcggataaaattccagggctgctgggagttttccagaaactcattgcaagcaaggcgaatgaccatcaggggttctaccttctaaacagtattatcgaacatatgcctcccgagagtgtggatcaataccggaagcagattttcatcctgctgtttcagagactacagaacagtaaaaccacgaaatttatcaagtcattcctcgtgttcattaacctctactgcatcaaatacggagcactggcactgcaggagatcttcgacggaattcagccaaagatgttcggcatggtcttagagaagataatcattcccgaaattcagaaagtgagtgggaacgttgagaagaagatatgcgctgttggtatcaccaagctcctcactgagtgcccaccaatgatggacactgagtacactaaactctggaccccattgctgcagtctctgatcggcctgttcgagctgcctgaagatgataccattcccgacgaagagcacttcatagatatcgaggacacacccggctatcagaccgcgttttcacaactggctttcgcaggaaagaaggagcacgaccccgtcgggcaaatggtcaataaccccaaaatacatcttgcgcaatctctgcacaaactgtcaacagcttgtcctggaagggtcccctcgatggtgtcgacgtcgctaaatgccgaagccttacagtacctgcaggggtacctccaggctgcctccgttactctgttatag

SEQ ID NO: 113227 - DNA, 1710 bp, synthetic construct
  misc_feature 1..1710: note = Description of Artificial Sequence: Synthetic coding sequence
  source 1..1710: mol_type = other DNA
atggagacctggatgaataactttcacacactcctgacactagataacaaactgctgcagactgatgatgaggaggaggcaggcttattggagctgctgaagagccagatatgtgacaacgccgcactctacgcccaaaaatatgacgaggagttccagcggtacctgccgcggtttgtgacagcaatttggaatctgttggtgactactggacaagaagtgaaatacgatctgctggtgtccaatgccatccagttcctcgctagcgtctgcgagagacctcactacaagaacctgttcgaagaccaaaatacattgacttcaatttgtgaaaaatcaatcgtggtgcacacctatgcggctcacgctctggagcgactgtttactatgcgtgggccaaataacgcgacactcttcactgcggcagagattgcgcccttcgtagagatactgttgactaacttgtttaaggcacttacactccccgggtcttctgagaatgagtacattatgaaggctattatgagaagcttttcgctgctgcaggaggcaattatcccctatatccctaccttgatcacacagttaactcagaagcttcttgccgtctccaagaatccctctaaaccacactttaaccactatatgttcgaagccatttgtctgtctataaggatcacttgcaaagccaacccagctgccgtggtgaattttgaagaggctttattcctcgtgttcacagaaattctacagaacgatgtgcaggaatttatcccgtatgtatttcaggtgatgagcttgctgctcgagacacataagaacgacataccatcttcctacatggccctcttcccccatctgctgcagcccgttctctgggaaagaaccggcaatatacctgccttagtacgcctcttgcaggctttcctggagcgcggcagtaacacgattgcctctgcggcggcagataaaatcccgggactgctcggcgttttccagaagttgatcgctagtaaagcaaatgatcaccagggcttttatctgctgaacagtataatcgagcatatgcctcctgagagcgttgatcagtaccggaaacagatcttcatcctgttgtttcagaggctgcaaaattctaaaaccacaaagtttatcaagagcttcttagtcttcataaatctctattgtattaagtatggcgctcttgccctccaggaaatcttcgatggcatccagcccaagatgtttggcatggttctggagaagataatcatccctgaaattcagaaggttagcgggaatgtggagaaaaaaatctgtgcggtgggcattacaaagctgctcacagaatgtccccccatgatggacacagaatacacgaagctgtggactccgctgctccagtcgcttatcggcctctttgagctccctgaagacgacacaattcccgatgaggaacacttcatcgacatcgaggatacacccgggtatcagaccgcatttagccagctggcattcgcaggcaagaaggaacacgatcccgtggggcagatggtgaataaccccaagattcacttggcacagagcctgcacaaactctccaccgcctgtcccggaagggtcccctctatggtcagcacaagtctgaacgctgaagcattgcaatacctccagggctacctgcaggcagcttctgtcaccctcctctag

SEQ ID NO: 113228 - DNA, 2265 bp, synthetic construct
  misc_feature 1..2265: note = Description of Artificial Sequence: Synthetic coding sequence
  source 1..2265: mol_type = other DNA
atgctctctaacttgaacttccaagacttgccagagtttttcgaggacaatatggagacttggatgaacaactttcatacactgctcactctcgacaacaagctcctacaaactgacgacgaggaggaagctggtctgcttgaactgctcaagtctcaaatctgcgataatgccgcgctgtatgcccagaaatatgatgaggagttccagcggtacctcccacgttttgtgactgctatttggaaccttctggtcaccacaggacaggaagtgaaatatgatttgctggtgtccaatgcaattcagtttctcgcaagtgtttgcgagcggccgcactataaaaatctgttcgaggatcagaacacacttacatccatctgtgagaaggtgatagtgcccaacatggagtttcgcgcagccgacgaagaggctttcgaagacaactctgaagagtacattcgccgtgatctggagggatccgacatcgacacccgccgccgcgccgcctgtgatctcgtcaggggactgtgtaagtttttcgaaggaccagtgacagggatcttcagtggttacgtgaactctatgctgcaggagtacgccaaaaaccccagtgtgaattggaagcacaaagacgctgctatttatctagtgacctccttagcaagcaaagcccagactcagaagcatgggatcacccaggccaacgaacttgtaaacctcactgaattttttgttaaccatatactcccggacctgaaaagtgctaatgtgaatgagtttcccgtgctcaaagctgatggaataaagtatattatgatatttcggaatcaggtcccaaaggagcacttgttagtttccatccctctgctcataaaccacctccaggcagagtccatcgttgtccatacgtacgcagctcacgcactggagagattattcacaatgcggggacccaataacgctaccctgttcaccgcagccgagatagcaccgtttgtggaaattctgctcacgaatttgttcaaagccctgacattgccgggcagctccgagaacgagtacatcatgaaggccatcatgagaagcttctcattactacaagaggccatcatcccttatatcccgaccctcattacccagctgacccagaaactcctggctgttagcaagaatccaagcaagcctcactttaaccattacatgttcgaggcgatatgcctgagcatcagaatcacttgcaaggcaaatcccgccgctgtggtaaattttgaagaagcactgttccttgtcttcaccgagatcttacagaatgacgtacaggagttcatcccgtatgtgtttcaggtgatgagtttgcttctcgaaacccataagaacgacatccctagcagctatatggccctgtttccccacctgctgcaaccagtactttgggagagaactggtaacattcccgcactcgttagactgctgcaggcatttctcgaacgcggcagcaatacaatcgcgagtgcggcagcagacaagatccctggactgttgggggtgtttcaaaagctcatcgctagcaaagcaaacgaccaccagggtttctatctactgaattcaatcattgagcacatgcctcccgaatcggtcgatcagtaccgcaagcagatttttattctcctgttccagcggcttcagaattcaaaaaccaccaaatttatcaagtcttttcttgtctttatcaacctctactgcatcaagtacggtgctctggctctgcaggaaatttttgatggcatccaacccaagatgtttggaatggtgctggaaaagattataattcccgagatccagaaggtgagcggaaacgtagaaaagaagatctgcgccgtgggcatcacaaagctgctcacagagtgtccccctatgatggatacagaatatactaaactctggaccccactgttacagagtctgataggcctgttcgaattgcccgaagacgataccatccctgacgaggaacactttatagacatcgaggacactcccggctatcagaccgcgttcagtcagcttgcatttgcaggcaagaaggagcatgaccccgtcgggcagatggtgaacaacccaaagatccatctggcccagtccctgcacaagctgagcacagcctgccctgggagagtgccttctatggtaagcacctctctcaatgccgaggccctacagtaccttcagggatacttgcaggccgcctcagtaaccttactgtag

SEQ ID NO: 113229 - DNA, 888 bp, synthetic construct
  misc_feature 1..888: note = Description of Artificial Sequence: Synthetic coding sequence
  source 1..888: mol_type = other DNA
atgcaacccgaaggcgctgagaaaggtaagtcgtttaaacagaggttggtgctgaagtctagcttagccaaggagactctttcagagttcctaggaacattcatcttgatcgtgcttggctgcggatgtgtggcacaggctatcctgagtcgaggacgattcggaggggtgatcactattaacgtgggtttcagcatggctgtcgcgatggccatttatgtagccggcggcgtgagcggcggccacatcaacccagcggtgtctctagccatgtgcctgttcggaagaatgaagtggttcaaactgccattttacgtaggcgcccagtttctgggggccttcgtgggcgccgcaaccgtgtttggaatctactatgacgggctgatgagtttcgcagggggaaagctactgatcgtaggcgagaacgccactgctcatatttttgccacttaccccgctccatacctttcccttgcaaacgcgtttgccgatcaggtcgtggccactatgatcctgcttatcatagtgttcgctatcttcgactcccgaaacctgggtgcccctaggggacttgagcctatcgccataggtcttctcatcattgtcattgcctcttccctcggcctgaactccggctgcgctatgaaccccgcccgcgatctgagtcctcgcctgtttacagccctggccggatggggcttcgaggttttccgggcgggcaataacttctggtggataccagttgtgggcccgttggttggagcagtgattgggggcctcatatacgtgctggtgattgaaattcaccatccagaacccgacagcgtcttcaaaacagagcagagcgaggacaagcctgaaaaatatgagctgagcgtgataatgtag

SEQ ID NO: 113230 - DNA, 1353 bp, synthetic construct
  misc_feature 1..1353: note = Description of Artificial Sequence: Synthetic coding sequence
  source 1..1353: mol_type = other DNA
atgtctgccatccaggctgcgtggccatcaggcactgaatgtatagccaaatataactttcacgggacagcagagcaggatctaccattttgcaaaggtgacgttctgaccatagtcgcagttacaaaggaccctaattggtacaaagcaaagaacaaagttggtagggaggggatcatccctgccaattatgtgcaaaaaagagaaggggtgaaggccgggacaaagcttagcctcatgccatggttccatggaaagatcaccagggaacaggcggagcggctgctgtatccaccagaaacgggactttttctggtgcgtgagtcaacaaattatcccggagactataccctgtgcgtgagttgtgatggcaaagtggaacactacaggatcatgtatcatgcgagcaaactttctatagacgaagaagtttattttgagaaccttatgcagcttgtggagcattacacatctgacgccgatggactgtgtacccggttgatcaaaccaaaggtgatggaaggcacggtcgccgcgcaggacgagttctaccgatctggatgggccctgaacatgaaggaattaaaactcttgcagactatcgggaagggcgaatttggagacgtcatgctaggtgactaccgtgggaacaaggtggctgtcaaatgtattaaaaatgacgcaaccgctcaagcattcctggcagaagctagcgtaatgacgcaactccgccactccaatttagttcagttgctgggcgtcatcgtggaggaaaaaggtggtttgtatatagttacagagtatatggccaaggggtctctggtggattacttacgttccaggggacggtcggtcctgggcggtgactgtctgctgaaattctctttagacgtgtgcgaagctatggagtatctcgaaggtaacaattttgtccatcgggacctagctgcacggaacgtgttagtctcagaagataatgtagcgaaagtgtccgattttgggctgactaaagaagctagctctactcaggatacaggcaaactgcctgtaaagtggaccgctcccgaggcgctgagagaaaaaaaattctcaacaaagtccgatgtctggtcctttggaatcctgttgtgggaaatctattccttcggaagagtgccttatcctcgtatcccactcaaggatgtggttcccagagtggagaaggggtataaaatggacgctccagatggctgtccccctgcagtctatgaagtcatgaagaattgttggcacttagacgctgctatgaggccgagctttctgcagctgcgagagcaactggagcacatcaaaactcatgagctccacttgtag

SEQ ID NO: 113231 - DNA, 1353 bp, synthetic construct
  misc_feature 1..1353: note = Description of Artificial Sequence: Synthetic coding sequence
  source 1..1353: mol_type = other DNA
atgtccgccatccaggcagcttggccatcaggcaccgagtgtatcgcaaaatataattttcacggcaccgccgagcaggatctccccttttgcaagggggatgttttgaccattgtcgcggtcactaaggatccaaattggtacaaagcgaaaaacaaagtgggccgcgaaggcataattcccgctaactatgtccagaagcgggagggagtgaaagctggaactaagctgtccctaatgccgtggtttcatggcaaaatcactagagagcaagccgagcgcctcttgtaccccccggagacagggcttttcctggtgagagaatccaccaattaccccggagactacaccctgtgcgtttcttgtgacggtaaggtcgagcactaccgaatcatgtatcatgcatccaagttatctatcgatgaagaggtttacttcgagaatctgatgcagctggtggagcattacactagtgatgctgacggactgtgcactcggctgatcaagcccaaagtgatggaagggacggtcgccgcccaagacgaattctatagaagtgggtgggcgttgaacatgaaggagctcaaactcctccagaccatcgggaagggggagttcggcgatgttatgctgggggactacagggggaacaaggttgccgtcaagtgtattaagaacgacgccaccgcccaagctttcctggccgaggctagcgtcatgactcaactgagacatagtaacctggtacaactgctaggagtgatcgttgaggaaaagggaggtttgtacatagtgaccgagtacatggccaaagggtccctggtggactacttacgcagccgcgggcgcagtgtactaggcggtgactgtctgctcaaattcagtctcgacgtttgtgaggccatggaatacctcgaaggcaacaacttcgtacatagagacctggcggccagaaacgtcctcgtgagcgaagacaatgtggcaaaagtctcagacttcggattaaccaaagaggccagcagtactcaggacaccggcaaacttccagtaaaatggaccgcacctgaagcactgagggaaaagaaattcagcaccaagagcgacgtgtggtcatttggcattctactctgggaaatatattcgtttgggcgcgttccttacccacgaatcccattgaaggacgtagtgcctagagtggaaaagggttataagatggatgcgcctgacgggtgcccacccgctgtgtacgaagtaatgaagaactgctggcatttggacgcagcaatgcgacctagcttccttcaactccgcgagcaactcgagcacatcaagacccacgagctgcacctctag

SEQ ID NO: 113232 - DNA, 1200 bp, synthetic construct
  misc_feature 1..1200: note = Description of Artificial Sequence: Synthetic coding sequence
  source 1..1200: mol_type = other DNA
atgagcgctattcaagccgcttggccttcaggcactgagtgcattgccaaatacaattttcatggcacagcagaacaagacttgcccttctgtaagggtgacgtgcttaccatagttgcagttaccaaggaccccaattggtataaggcaaagaataaggtgggaagagagggcatcatcccggccaactacgtgcagaaacgtgaaggtgtcaaagctggaaccaaactctccttgatgccgtggttccacggcaaactctccattgacgaagaggtttactttgagaatctgatgcagttggtcgaacattatacctctgacgcagatggactatgtacacggctgatcaaaccgaaagtcatggagggcacagtagccgctcaggatgagttctaccggtccggctgggctttgaacatgaaggagctaaagctgcttcagaccattgggaaaggcgaatttggggacgtcatgctgggcgactaccgaggcaacaaggtggccgtgaagtgcatcaaaaatgacgcaacagctcaggcgttcttagcagaggccagcgtgatgacgcaactgcgccattctaatctcgtgcagcttctcggggtgattgtcgaggaaaaaggcggactgtacatcgttactgagtatatggcaaaaggtagcctggtcgattatctgcggtcaaggggccgaagcgtgttaggcggtgattgcttgctgaaattctcgctggacgtatgtgaagccatggaatatctggagggtaacaatttcgtgcacagagatctggctgcaagaaatgtattggtttcggaagacaacgtcgcaaaagtgagcgacttcgggctcacgaaggaagccagcagcactcaagacaccggaaagctacccgtcaaatggaccgctcccgaggccttgagagagaagaaattctctactaagagtgacgtctggagcttcggcattttactctgggaaatttacagctttggcagggtaccctaccccaggatccccctgaaggacgtggtgccgagggtcgagaaagggtataaaatggatgcacccgacgggtgtcccccggccgtctacgaggtcatgaaaaactgctggcatctggacgccgccatgcgtccgtcctttctccagctacgggagcagctggagcacataaagacccacgagttgcatctgtag

SEQ ID NO: 113233 - DNA, 783 bp, synthetic construct
  misc_feature 1..783: note = Description of Artificial Sequence: Synthetic coding sequence
  source 1..783: mol_type = other DNA
atggtagccgctccctgggcaacacaggagcaagaagagggcagaggcatccagccaggtgacagaggcgatcagaagtccgctgcatcacagaagccaaggagccgggggatcttgcattctctgttctgttgcgtctgccgcgatgatggcgaagctctgcccgcacactccggcgcccctctgcttgtcgaagagaacggggccattccaaaaacccccgtgcaatatctcctcccagaggcaaaggcgcaggatagcgacaaaatttgtgtggtcatcgatctcgatgaaaccttggttcactcttcattcaagccagtaaacaacgctgacttcattatccctgtggagatagacggcgtagtgcaccaggtgtatgtgctgaaaagaccacatgttgatgaatttctgcagcggatgggagaactgtttgagtgtgtgttgtttactgccagcctggccaagtacgccgatcctgtggccgacctccttgacaaatggggcgcgttccgtgcaagactattccgcgagagttgtgtgtttcaccgcggcaactatgttaaagacctttcccggctggggagggacctgcgtagggttttgattttggacaactctccagcgtcttacgtattccatcctgataatgcagtgcctgtagcgagctggtttgacaacatgtcggatacagaacttcatgacctcttgcccttctttgaacagctcagccgtgtcgatgacgtgtatagcgtgcttaggcaaccgaggcccggctcatag

SEQ ID NO: 113234 - DNA, 2604 bp, synthetic construct
  misc_feature 1..2604: note = Description of Artificial Sequence: Synthetic coding sequence
  source 1..2604: mol_type = other DNA
atggaagtcccggcagccggacgggtgcctgctgaaggggcgcccactgccgcagtggccgaagtacgatgtccaggccccgcccctcttcgcctactggagtggcgtgtggccgccggagccgctgtgaggatcggtagcgtgctggccgtctttgaagcagctgcctctgcccaatcgtctggagcttcacagtcccgagtcgcctcaggcggttgtgtgagacctgctaggcccgaacggagactgaggagcgagcgggccggtgtcgttcgggagctctgcgctcagccagggcaggtggttgcgcctggtgctgttctggtgaggcttgaaggatgttctcaccccgtggtgatgaagggactgtgcgccgagtgtggccaggacctaactcaactccagtctaagaatggaaagcagcaggtcccgctgtcaacagcaactgttagcatggtgcatagcgttccagaactgatggtaagttccgagcaggccgaacagctaggccgtgaagatcagcagaggctacatagaaatagaaagcttgtgctgatggtcgacttagaccagaccttgatccacacaaccgaacagcactgccagcagatgtcaaacaaaggaatcttccatttccaactgggcagaggcgagccgatgttgcacactcggctgcgaccccactgtaaggatttcctggagaagatagctaaattgtacgaactgcatgtcttcacatttgggtcgcggctgtatgcacacactattgccggattcctagaccctgaaaaaaagcttttttcccatagaattctgagtcgcgacgaatgcattgatcctttcagcaagaccggcaacctccggaacctgttcccttgtggcgacagcatggtctgcatcattgacgaccgagaggatgtatggaaatttgcgcctaatctaatcactgtcaagaaatatgtgtattttcagggaacaggagacatgaacgcacctcctgggagtagggagtcccagacaaggaaaaaagtgaatcactcacgtggaacggaggtgagtgaaccatccccccccgtgcgggacccagagggcgttacccaggctccaggtgttgagccatctaatggattggagaaacctgcacgtgaacttaatggcagtgaggctgcaacaccaagggatagtccccggccaggcaaaccggatgagcgcgatatctggcctcctgctcaggcccctacatccagccaggagctggctggggcgccagaacctcaagggtcttgcgcccagggcggacgagtggctcccggtcagagacccgctcaaggggcaacaggcacagacctagacttcgacctgtcttccgattcagaaagctcatccgaatccgagggcactaagagctcttcttccgcctcagacggagaatctgaaggcaagaggggacgacagaagcctaaggcagctccagagggggccggagcacttgcccaaggctcctccctggaacccggcaggcccgccgccccaagcctccctggggaagctgaaccaggagctcacgcgccggacaaggagcccgagctcggcggacaggaggaaggcgagagggatggactttgtggtctggggaacggctgcgccgacaggaaagaagccgagaccgagtcgcagaatagcgaactgtccggtgttacagccggcgagtctctcgaccagtccatggaagaggaagaggaggaggatacggatgaagatgatcatttaatctacctagaggagattttggtacgcgtgcacactgattattatgctaaatacgatcgttacctgaacaaggagattgaggaagcccccgacattcgtaagatcgtgcccgagttaaaaagtaaggttttggcagatgtggctatcattttctcggggctgcacccgactaattttccaatagagaagacgagagaacactatcatgctacagcactgggagcaaagattctgactaggctggtgttaagtcctgatgcgccagacagagcgacccacctaatcgccgcccgcgccgggactgagaaagtgctgcaggcccaagagtgcgggcacctacacgttgttaacccagactggctctggtcatgtctggagcgctgggacaaggtagaagaacaactgtttcctctcagagacgatcacactaaggcacagagggaaaattcaccagctgcttttcctgatcgggaaggggtgcctcccaccgccctgttccatcccatgcccgtactccctaaggcccaacctgggccagaggtgagaatctacgactccaacacaggtaagcttattagaaccggggctagaggacccccagcgccctcctcttctctgcccatccgccaggaaccctcaagctttcggtggaccactagtcttgagaaggcagccacaacagcaaccgcccggaggggtggcctccgcagtaggcggaggagtcccagcccgggtagtcagggtcctgccggcagcggacgatctggacaccttcgacccgccagaggtgcgcgacaaggcgccgggggccctgaagccactagaggctcatag

SEQ ID NO: 113235 - DNA, 2886 bp, synthetic construct
  misc_feature 1..2886: note = Description of Artificial Sequence: Synthetic coding sequence
  source 1..2886: mol_type = other DNA
atggaagttccggctgctggcagggtgccagcggagggggctcctacagccgcagttgccgaagtccgctgccccggccctgcaccgctgcgtctcctggagtggcgtgtggccgccggcgctgccgtacgcattgggtccgtgctggccgtattcgaagcggctgcatctgcccaatctagtggagcaagccagtcacgggtcgcttcagggggttgtgtgaggcctgcaagacccgaacgacgactgagatcagaacgcgcaggcgtggtacgggagctctgtgcgcagcccggacaggtggtggctccgggggccgtactggtgaggctcgaagggtgcagccatcctgtggtgatgaaaggtttatgcgctgaatgcggccaggacctgactcaattgcagtctaaaaacggcaagcagcaggtgcccttaagcactgccaccgtcagtatggtgcacagcgtgccagagctgatggtgagttcagagcaggcagaacagctaggcagagaagaccaacagaggctgcacaggaataggaagctcgtgctgatggtcgacctggatcagaccctaatccacactacagagcagcattgccagcagatgtcaaataaaggaatcttccacttccagctcgggaggggggaaccgatgctccataccagacttagaccgcattgtaaagacttcctggaaaaaattgctaaactgtatgagctacacgtctttacctttggaagtcgactatatgcacataccatcgccggttttttagatcctgagaagaagttattcagccaccgaattctctcaagagacgagtgtatcgatccattttcaaaaacgggcaacttaagaaatctgttcccatgcggcgattctatggtatgcattattgacgatagggaggacgtctggaaattcgcccccaacctgatcacggtaaagaagtatgtctactttcagggaactggggatatgaatgccccaccggggtctcgcgagagccagacgcgcaaaaaggtgaatcactccagagggactgaggtcagcgaacccagtccccccgttcgagaccccgaaggggtgacacaggcgcccggtgtggagccgtcaaatggcctcgaaaaaccggcgcgagaactgaatgggagtgaggccgccacaccccgtgattcccctcgtccaggcaaaccggatgagcgggacatatggccaccagcccaggctcctacttcgtctcaagagctcgcaggagccccggagcctcagggctcttgcgcccagggaggcagagtcgcacctgggcagagacctgcacaaggagccacaggtacagatctggatttcgacctgtcctcagattcagaaagcagcagcgaatcggaagggaccaagtcttccagcagcgcctctgacggcgaatccgaggggaagagagggcggcagaaacccaaggcggcgccggagggagctggggctctggctcaaggttcatctctggaaccagggagaccagcggccccctcgttgccgggcgaggcagagcccggggctcacgccccagacaaggagccagagctgggcggacaagaggaaggggagagagacggactgtgcggactgggaaatggatgcgctgatcgtaaggaggctgaaaccgagagtcaaaatagcgagctctccggtgttacagcgggggagtccctggaccaatcgatggaagaggaggaggaagaggacactgatgaggacgatcaccttatatatcttgaagagattctcgtccgtgttcacacagattactacgcaaaatatgataggtacctgaacaaggagattgaggaagctcctgacatccgcaagatcgtccctgaacttaaatcaaaagtgctcgccgacgtggctatcatcttttctgggttgcaccccacaaacttccccattgaaaagacgagggaacattaccacgccaccgcgctcggcgccaagattctgactcgactcgtccttagccctgatgccccagatcgcgcaacacatctgatcgcagcaagggccggcacagagaaggtgcttcaggcacaggagtgcggacatctgcatgtcgtgaatcctgactggttgtggtcgtgtttggaacggtgggacaaggtggaagagcagctcttcccattgcgggatgaccatacgaaggcccagagagaaaatagtcccgctgctttccctgatcgcgaaggagtcccccccacggctctgttccaccccatgccggtactgccaaaggcccaacctggaccagaagtgagaatttacgattctaatactgggaagctcatccgaactggggctaggggcccgcctgcaccgtcaagctcgctacccatacggcaggagccgtcatctttccgagctgtccccccaccccaacctcagatgtttggggaggagttaccagatgcacaggacggggagcagcctggcccttctcgtcggaaaagacagccgagtatgtcggaaacgatgcctctgtatacactgtgcaaagaggatctggaaagtatggacaaggaggtcgatgacatcctgggtgagggaagcgacgactccgattctgaaaagcggcgccccgaggaacaggaggaggagccgcagccacggaagcctggaactagacgcgaacgtaccctaggcgcacccgctagcagtgaaagatctgcggccggcggaagagggccaagggggcacaagcgcaaactcaatgaggaggacgctgctagtgaaagttctcgagaaagttctaatgaagatgagggttcttctagcgaggcggatgagatggcgaaggctctggaagccgagttgaacgatttgatgtag

SEQ ID NO: 113236 - DNA, 786 bp, synthetic construct
  misc_feature 1..786: note = Description of Artificial Sequence: Synthetic coding sequence
  source 1..786: mol_type = other DNA
atggatagctctgccgtaattacccagattagtaaagaggaggcccgcggccccctgaggggaaagggcgatcagaaaagcgccgccagccaaaaaccccggagtcgtggtatcttgcattctctgttttgttgcgtctgccgggacgacggtgaggcactaccagcccatagcggagcccccctcctcgtggaggaaaacggtgccataccaaaacagacgcccgtgcaatatctgctgccagaggccaaggctcaggatagcgataagatctgtgtggtgatcgacctcgatgagaccctcgtccactcctccttcaaacccgtgaataacgctgacttcataattcctgtagagatcgacggcgtggtgcatcaggtctacgtattgaaacgccctcatgtcgacgaattcctccagaggatgggggagctgttcgagtgtgtgctatttaccgccagtcttgccaagtatgctgaccccgtagccgacctgcttgataagtggggcgcgttccgcgcgaggctcttccgagaatcgtgtgtcttccataggggcaattatgtgaaggatttgagcagattgggccgggatctgaggcgtgtcttaattcttgacaacagccccgcctcttacgtgttccatcccgataatgctgtccccgtagctagctggtttgataatatgtcagatactgagctacatgatctgctccctttctttgaacagttatctagggtggacgatgtgtactcagtgttgagacaacccaggcccggtagttag

SEQ ID NO: 113237 - DNA, 2928 bp, synthetic construct
  misc_feature 1..2928: note = Description of Artificial Sequence: Synthetic coding sequence
  source 1..2928: mol_type = other DNA
atggaagattacgaacaggaactttgcggcgtagaggatgattttcacaaccaatttgcggccgagttggaagtacttgcggagctggagggagccagtactcctagcccgtctggtgtcccactctttaccgccggacgacccccaaggactttcgaagaagcccttgccagaggtgatgccgctagctcaccagctccagctgcgtcagtggggtctagccagggaggggcccggaagcgacaggtggatgcggatctgcagccagctggatctctgccgcatgccccaagaatcaaacgtccacgcctacaggtcgtcaaacgtctgaacttcagatccgaagagatggaagagcctcctcctccggattcttcacctacagacattactcctccgccctcacctgaggatctggccgaactgtggggccatggggtgagtgaggcggccgctgatgtaggactcacacgggcttcccccgcagctagaaacccggtgctaagacgaccacctattctggaagattatgtccacgtgacgtcgacagagggcgtcagagcctatcttgtccttagggcagacccaatggctccgggggtgcaaggttccttactgcacgtgccctggagaggaggaggtcaattggacctgctaggagtttctctcgcgtccctaaaaaagcaggtcgacggggaaaggcgggaaagactactgcaggaggctcagaagctctccgacacattgcattctctccggtccggcgaagaggaagccgcacagcctctgggagcccccgaggaggaacctacagatgggcaggatgcgtcttcacactgcctgtgggtcgacgagtttgcgccgaggcattatacggaattactcagcgacgactttacaaaccgctgcttactcaagtggcttaaattgtgggacctcgtggtgtttggacatgaaagacccagtcgcaaaccaagaccttccgtggaaccggcccgggttagcaaagaggcgactgctccaggaaaatggaagtctcatgaacaagtgctagaagaaatgctcgaggcaggccttgaccccagccagcgcccaaaacagaaggtcgccttgctgtgtggtccacccggactcggcaaaacaactctggcacacgtgatagctcgccatgctggctattcagtggtcgagatgaatgcctcggacgacaggtccccggaagtgttccgcactcggatcgaggccgcaacccagatggagtcagtgttaggagcgggtgggaagcctaattgcttagtgattgacgagattgatggcgccccggtagccgcaataaatgtgctgctgagcatactgaacaggaaagggcctcaagaggtgggaccgcagggcccagccgtgccttcaggcggcggcagaagacgaagggctgagggcgggctgctaatgaggccaatcatctgtatttgtaacgaccagtttgccccctcactgcggcaactcaagcaacaagctttcctgctgcactttcctcccactctaccctccaggttggttcagaggcttcaggaggtatccctcaggcagggcatgagggccgacccaggtgttttggcagccctatgtgaaaaaactgacaacgatatcagggcttgtattaacaccctgcagttcctatacagccgggggcagcgggaattgtctgtgcgtgatgtccaagctacccgcgtgggtcttaaagaccagcggcggggcctgttttccgtctggcaggaggtattccagctccctcgggcccagaggcgcagggtagggcaggaccccgcactgcccgcggataccctgttgctgggggacggtgatgcagggagcctaacttctgcatcccaacgcttttaccgcgtgcttcatgccgccgcctccgccggcgaacatgaaaaggtggttcagggcctgttcgataattttttgcgcctgcggctgcgcgactcctctttgggagctgtatgcgttgccctggattggctggcgtttgatgatttactggcaggcgcagcgcaccacagtcagtcctttcagctgctgagatatcccccttttttgccagtagcatttcatgtgctctttgcttcatctcacactcccagaattactttccctagtagccagcaagaggcccagaaccgtatgagccagatgcgcaacctgatccagaccttagtatcaggcatagctcctgccaccaggagtcgggcaactcctcaggccctgctcctagacgctttatgcctgctccttgatatcctcgctcctaagctgcgcccagtgtctacgcaactgtatagcacgcgcgagaagcagcagttggcatctctcgtgggtacaatgctcgcatactcccttacctatcgacaggagcggacgcccgatggccagtatatctaccggctggagcccaacgtggaagaactgtgtcggtttcctgaactccctgccagaaaaccactgacctatcagaccaagcaactgattgcaagagaaatagaggtcgagaaaatgcggcgcgcggaggctagcgcccgagtcgagaatagtccccaggtggacggttctcctcctggtctggagggtctgctagggggaatcggcgagaaaggcgtgcatagacctgcccctcggaaccacgagcagcggctagaacacatcatgcggcgtgccgcaagggaagagcagcccgaaaaggacttctttggaagagtggtcgtgagaagcacggccgtgccaagcgcaggcgatacagctcccgagcaggattctgtggagagacgaatgggaaccgccgtcggccggagtgaggtgtggtttaggtttaacgagggagtgagtaacgcagtgcgtagaagcctctatatcagggatttgctatag

SEQ ID NO: 113238 - DNA, 3555 bp, synthetic construct
  misc_feature 1..3555: note = Description of Artificial Sequence: Synthetic coding sequence
  source 1..3555: mol_type = other DNA
atgcacgtgaacgcgtcagctaggaggtggggcagagggggagccgccgcactccccggcccggctgcttcgcctcgacgccccgctccccgcactggccctgttggtagaccaaccttagcgcctagtccctccagggcacatgctcatgccaagacgaacctgcttcctggccgggctgtacaggccccagatgcagtcccaggagcgggaagttcccgagcgccggcacggtggcgccccagagaccctggaagcagtgctcctgacgcttggcagagattccggcccgcgccactgagggcccagccccgtccccctccccgtccggctcctggcccaccacctccaaggaaggggggatgtggcggccagtggcgcgcgccgcaggacaggaccagaggcttacggtcccgtaatagcccccggccccctctggctcagccgcggttgaggcacgccaaccaatggcgggcccctcccggaactcctgccgccgactggcggagaccagcaagaagcgggcgtgccgtccgtgacggcgggggaggcgccggaggtagtgaacgagagcttggcttggcagacggcatggaggactacgagcaagagctctgtggagtcgaggacgactttcacaaccaattcgctgccgaactggaagttttggctgaactggaaggcgctagtaccccgtccccttccggcgtgcccctgttcaccgccggaaggcctccccgaacttttgaagaagcactggcaagaggcgacgccgcaagtagccccgcccctgcagcaagcgttggttcaagtcaaggcggcgccaggaaacggcaagttgatgctgatcttcagcccgcgggatcgttaccccacgcgcctcggatcaagcgaccacgacttcaggtggtgaagaggctcaatttcagaagcgaagagatggaggaaccgcctccccctgatagttctccgaccgatatcacaccacctccaagccctgaggatctggccgaactctggggtcatggcttttctgaggcagccgccgatgtgggcctcacccgggcctcccccgctgctcgaaaccccgtcctccgcaggcctcccattcttgaggactacgtgcatgtgaccagtaccgaaggcgtgcgtgcctatctggttctgagggcagacccaatggcgcccggcgtgcaggggtcactccttcatgtgccttggcgaggtggcggccagttagatctgctcggagtcagccttgcttctctgaagaaacaggtggatggggagaggcgggaacgactactgcaagaggcccagaagctaagtgatactttacaccggtctggggaggaagaggcagctcaacccctcggagcaccagaggaggagcccacagatggtcaggacgcttcctctcactgcctgtgggttgatgagtttgccccacgccattacacggaactcctgagtgatgactttacaaatcgctgcctgctgaagtggctgaagctgtgggacctcgtcgttttcggccatgaaagaccatcgcgaaaaccgagaccttcggtggaaccggctagagtctctaaagaggcaaccgctcctggcaagtggaagtcccatgagcaggtgctggaggagatgttagaggcaggtctcgacccgtctcagcggccaaagcagaaagtcgcactgctctgtggaccccctggactgggaaagaccacgcttgctcacgttatagcccgccatgccgggtacagcgtggtggaaatgaacgcatccgatgatagatcgcctgaggtcttccgtacgcggatcgaggcagcaacacagatggaaagcgttctaggcgccggagggaaaccaaactgcttggtcattgacgaaatagacggagcgcctgtggccgctatcaacgtgttgttgtcaatcctgaatcggaaagggccccaggaagtggggcctcagggcccggcagtgcccagtggcggcggacgtcggcgacgtgctgagggtggactgcttatgagacccatcatttgcatatgcaacgaccagtttgccccatcgctgcgtcaactgaagcagcaagcctttctcctgcactttccccccactctgccctccagactggtacagcgcttacaagaaggtatgcgtgccgaccctggggtcctcgcagcactgtgcgagaaaactgataacgacataagggcttgtattaacaccctgcagtttctctatagcagggggcagcgggagctatctgtgagagatgttcaagccactagggttgggctgaaagaccagcgccgaggattgttttcagtttggcaggaggtatttcaactgccaagggctcagaggtctagccagcacgtttccgtcctgacctgccatggcacacctggagacgctggtctcgtggtactgcaagatatgggagacgccggtctcgggctgtgggacgtgttactgctggcatggactcgtaggggcacctttcctggaagattctatcgcgtactgcacgccgccgcatcggctggtgaacatgaaaaagtggtgcagggattattcgataatttcctgcgtcttaggctgagggacagtagcctcggggccgtgtgtgtggcactagattggcttgcctttgacgatctgttggccggtgcagcccaccacagccagtcctttcagctgctccgataccccccttttctgcctgtggccttccatgtcttgttcgctagttcacacaccccacggattacgtttccaagtagccaacaggaagcccagaatcgaatgtctcagatgcgcaacctgatccagactctggtcagtgggattgcgcctgcaacccgctccagagcgacccctcaggccctattgctggacgcactctgtttactcctcgatatactcgctccaaaattgagacccgtgtcaacccagctgtactccacccgggaaaaacagcagctggccagcctagttggtaccatgctggcttattcactgacctaccgacaagagcggacacctgacggtcagtacatctacaggctggagcctaacgtcgaggaactgtgtcgcttcccagaactccccgcccggaagccactgacctatcagaccaagcagctgatcgcaagagagattgaagttgagaagatgcgtagggctgaagcaagcgcccgcgtagaaaacagtccacaggttgatggttcacccccgggcctggaggggctgctgggggggatcggagagaaaggcgtgcacagacccgcacctaggaatcacgaacagcgcctggagcatattatgagaagggccgccagagaagagcagccagaaaaggacttcttcgggcgagtggtcgtgagaagtactgcagtccctagcgcgggtgacactgccccagaacaggacagcgttgagcggaggatgggtacagcagtgggtcgttcagaggtctggttccgatttaacgagggagtgagtaacgctgtgaggaggagcctgtacatccgcgacctgctgtag

SEQ ID NO: 113239 - DNA, 3012 bp, synthetic construct
  misc_feature 1..3012: note = Description of Artificial Sequence: Synthetic coding sequence
  source 1..3012: mol_type = other DNA
atggaggactacgaacaggaattgtgcggagtggaggacgattttcacaaccaattcgcagccgaactggaagttcttgctgagctcgaaggagcgtcgactccaagtccaagtggcgtgccactctttacagctggacgacccccccgaacattcgaggaggcgctcgcaaggggcgacgctgctagtagtcccgctccagccgcttctgtcggatcgagtcagggcggcgctagaaagaggcaggtggatgccgacctccagccagccggttctctaccacacgggcgcttagccgcgctcccacagggcctaagaagcggcagagaagctgaggaggcctccggatcactacacgtcagtcctcctgcgcctaggataaagcgcccccgcctccaggtggtgaagagactgaactttcggagcgaagaaatggaggagccgcccccccccgacagttctcccaccgacattaccccaccccccagccctgaggacctcgccgaattgtggggccacggcgtatcagaggctgcggcggatgtgggtctgacccgtgctagtccggctgctaggaatcctgtgctgaggcgaccacctatcctggaggattacgtgcacgtgactagcaccgagggcgtacgcgcctacctcgttctgagagccgacccaatggcaccaggggtccagggaagtctgttacacgtcccctggcgagggggcgggcaattagatttactgggcgtgtcactggcctcgctgaagaaacaggtcgacggcgagaggcgcgagcgactgttacaagaagcacagaagttgtcagatactcttcacagccttcgaagcggagaggaggaggccgctcagccattgggagcccctgaagaggaaccaaccgacggacaagatgcctctagccactgcctgtgggtcgacgaattcgctcctcggcattatacagagttactatccgatgattttaccaatcgatgccttctgaagtggctgaagctgtgggatttagtcgtctttgggcacgaacgaccttcccggaagccacgcccctctgtagagcccgcacgcgtatctaaggaagccaccgcccccggcaagtggaagtcacacgagcaggtcctggaagaaatgctcgaggccggtcttgaccccagccagaggccaaaacagaaggttgcgctgctctgcggtccaccggggctgggcaagacgaccttagcccacgtgattgcccgtcacgccggctatagcgtggtggagatgaacgcctccgatgaccgctcccctgaggtgttccgcacacgcatcgaagccgccacccagatggagtctgtgctgggcgcagggggaaagccgaactgtctggtgattgacgaaatagacggcgcacccgtggcagcaattaacgtactcctgtccattctgaatcgtaagggccctcaggaagtcggaccccaaggacctgctgtccctagtggcggtgggcggaggaggagggccgagggcggattactaatgcgtcccattatttgcatttgcaacgaccagtttgccccctcactgaggcaactgaaacagcaagcctttcttttgcatttcccccccacgctaccctcgcgcctggtgcagcgccttcaggaagtgtcactgaggcagggcatgcgcgcagaccctggagttctggctgctttgtgcgagaaaacagacaatgacatcagagcgtgtataaatacactccagttcttgtatagtcggggccaacgcgaactctccgtgcgagatgtccaggccactcgcgttgggctcaaggaccagcgcagggggctgttcagcgtgtggcaggaggtatttcagctgcctcgggcccagcgccggagggtcggccaggaccccgctttgcctgccgacaccctgctgctgggggacggagatgccgggtctctgacatcagcttctcagcgcttctatagggtactccatgccgccgctagcgctggcgagcacgagaaagtagttcaagggctgttcgataacttccttagattacggttacgggacagtagcctgggggcagtgtgtgttgccctggactggcttgcatttgatgacttgttggcaggggctgcacaccattctcagtcatttcagctgttgagatatccgccttttctgccagtggcctttcatgtgctgttcgcttcttcacacactcctcggataactttcccttcctcacagcaggaagcccaaaaccgaatgtctcaaatgagaaacttaatacaaaccctagtctcaggcatcgcccctgccactcggagccgtgccactccacaagctctgttgctggatgcactgtgcctgctgcttgatatcctcgcccccaaactgcgcccagtctctacccagctgtatagcaccagggaaaagcagcagcttgcgtcccttgtcggaaccatgttggcctacagtctcacttaccgccaggagcggactcctgacgggcaatacatttatcggctggagcccaacgtggaggagctctgcagatttcctgaactgcctgcacgtaagccgctcacataccaaactaagcagctgatcgctcgggaaatagaggtcgaaaagatgagacgtgccgaggccagtgcaagagtggaaaactccccgcaggtggacggatcccctcccggactggaaggacttctgggtggcataggagaaaagggggtgcatcgccctgcgccacgcaaccacgagcagcgcttggaacatatcatgcgcagggctgcaagggaggagcagcccgaaaaagattttttcgggcgagtcgtggtccgctccacagctgtacctagcgccggcgacacagcccccgaacaggactccgtggagcgccgcatgggcactgctgtcggcaggtccgaggtttggtttagatttaatgagggcgtcagtaacgcagttagacgtagtttgtacatccgggacctgctctag

SEQ ID NO: 113240 - DNA, 1575 bp, synthetic construct
  misc_feature 1..1575: note = Description of Artificial Sequence: Synthetic coding sequence
  source 1..1575: mol_type = other DNA
atgaaggagccaaggatcttcccacgcgagaggccaactccatggaccagggcccctttacctccccgtggaagactcgatggaagccttggcccccaaggcgggcccgttcttaacaccggacatcccctaggggttaacagcgacccgtttttgatggccgccggcagtctggggggtaacttgaccccctttccccgtaaccctagccccttcccagcttctagtggtagcttggccagtaacccagcaccctttcccgccggcgctcgtgacccaagcatggcctcgttcccacgggggatgaaccccacggggaccggtgcggtaagctttccccgcccgggagggctcctgggacctgggcccggcccaggtcctacgctgaaccctaggacgggggccttgcccggccccggtcctctctctaacccccggttggggggactccccggccccggcccaatgagtaaccctagagcggggggactcctgggcgcgggccctgacccccggggaggcggccccatgggaccaggatccgggcccaatttaagagccggggtgttgttgacatctggtaatggtccgccaaatccaagacctgtgggtctaggcccaggcccaaatccaaacctgcgatctgggttccttggaacaaacccagctccgcggtcgggtgtgttccccggccccggactggggcccaatccacgcccctcagggctgggcccagggcctaatctggatgcccgggctgggggccttcttggcacaggtagcggcctcaatctacgaatggcaggcccccagggtctggatttagctcccatacttcgggccgcaggtctcctcggtgccaattccgcctctttctctcaagcctccgggaacatgggcactagcccttcttcgatggccagggtgccaggtccaatggggcccaactccggtccatcatcgcgcgggattgggcttcctggcccaaacccatctcctatgtcccgggcgccaggacccatcggtcccaactccgcccatttcagcaggcccgtggggccaatgggcgtaaacgctaacccatttcctcgaggcgctggatccagtgccttctcacaaagtagcggaacattagcttcaaatcccgctacattccagaggagtgctggactgcaaggatccaaccccaccatatttcctcgggcatctggtccacttggccccaatcctgccaactttccacgggccaccggcctgcaggggccgtcgccgacgaccttccccaggagcactggaccacttgggccgggccaggttacttttccacggccagcggctgggcacctaggaccatctcctgcaggcccagtaggcattaaccctgcgccatttaccaggcctaccggcacactgggcctgaatcccgcttcatttcctcgaatgaacggacccgccggcaaatcctttgtgcccttcccacgggttggcagtctgcccggaactaatcccgccgcgtttccacgaccaggtggtccaatggccgcgatgtaccctaacggcatgctccccccctag

SEQ ID NO: 113241 - DNA, 366 bp, synthetic construct
  misc_feature 1..366: note = Description of Artificial Sequence: Synthetic coding sequence
  source 1..366: mol_type = other DNA
atggtgcagatcgttatctctagtgctagagccggcggtctggccgagtgggttctcatggagttacaaggcgaaattgaagcccggtattcgaccgggctggcagggaacctcttgggggatctgcactacactactgagggcatcccagtactcatcgttggtcatcacatactgtacgggaagattatccacctggagaagccctttgcagtgttggtgaaacatacacctggagatcaggattgcgatgagcttggaagagaaacaggtacacggtacctggtcacagctctaattaaagacaagatcctctttaaaacaagacccaagccaattatcacaagtgtgcctaagaaagtttag

SEQ ID NO: 113242 - DNA, 366 bp, synthetic construct
  misc_feature 1..366: note = Description of Artificial Sequence: Synthetic coding sequence
  source 1..366: mol_type = other DNA
atggtgcagattgtgatctcaagcgctcgggctggcggtcttgcagaatgggtcctcatggagcttcagggcgaaattgaagcacggtatagcacagggctggctggcaacctcctaggagaccttcattacaccacggagggaatcccagtgctcattgttggacaccatattttatatgggaaaatcatacatctggagaaacccttcgccgtattagtgaaacatacacccggggatcaggactgcgatgaactcggccgagagacaggaactcgctatctcgtgaccgcactgataaaggataaaattctgttcaagactaggccgaaaccaataattacctctgtgccaaaaaaggtgtag

SEQ ID NO: 113243 - DNA, 1776 bp, synthetic construct
  misc_feature 1..1776: note = Description of Artificial Sequence: Synthetic coding sequence
  source 1..1776: mol_type = other DNA
atgaaatacattctggttacagggggggttatctcagggataggcaaaggtattatcgccagttccgtcggtaccattttgaagagctgcggcctccacgtgacctcaataaagatcgatccttacattaatattgatgcaggcactttctccccctatgaacacggcgaggtattcgtgctcgatgacggaggggaagttgacttggacctaggtaactacgaacggttccttgatattcggctgactaaggacaacaaccttacaaccggaaaaatttaccagtacgtcatcaacaaagagcgaaaaggggactatctcggcaaaacagtccaagtggtgccccatatcactgacgctattcaggagtgggtgatgagacaagcgttaataccggtagacgaagacggcctggagccgcaggtctgcgtcatcgaactgggagggaccgtgggtgacatcgagtccatgccctttatcgaagcctttaggcaattccagttcaaagtaaagcgagagaacttctgtaatatccatgtgagcctggtgccccagccgagctctactggcgaacagaaaactaaaccaactcagaatagtgtgagagagctgagggggctgggtcttagccctgatctggttgtctgtaggtgcagtaatcccctggatacctccgtgaaagaaaagatcagcatgttttgccatgtagaaccagagcaggtcatttgcgtgcatgatgtatcatccatctatagggtgcctcttctcttggaggagcagggagtggtcgattactttctgcggcgactagacctgcccatagagcgccagccaaggaaaatgttgatgaagtggaaggagatggccgatcgctacgatcgattactcgaaacctgttctattgctttggtgggcaagtatacaaagtttagcgatagctatgcttctgtaattaaagccctggagcactccgccctggccattaatcataaactggaaattaaatatatcgacagtgccgatttagaaccaataacatcccaggaggagccggtgcgttaccacgaagcttggcagaaactgtgttctgcacacggcgtactggttcctggtggattcggagtgcgggggacagaggggaaaatccaggcaatcgcctgggcacgcaatcagaaaaagccattcttaggtgtgtgtctggggatgcaactggccgtggtagagttcagtagaaatgtgcttggctggcaagatgccaactccacagagttcgatccaacaacctctcacccagttgtagtagatatgcctgagcataacccgggccagatgggaggaaccatgcggttaggaaagagaaggaccctgtttcagacaaaaaactcagtgatgaggaaactgtacggagatgcagactatcttgaagagagacaccgccacagatttgaagtgaatcccgtctggaagaagtgcttagaagaacagggactgaaatttgtcggccaggacgtggaaggcgaacggatggaaatcgtggaactggaggatcaccccttttttgtgggcgttcagtatcaccctgaattcctgtcccggcccattaagccttcaccaccatatttcggcctccttttagctagcgttgggcgactgtcacattaccttcagaaaggttgcagactttctccgcgcgacacctatagtgaccggtctgggagcagctctccagactccgaaattacagagctaaaatttccctccataaaccacgattag

SEQ ID NO: 113244 - DNA, 1776 bp, synthetic construct
  misc_feature 1..1776: note = Description of Artificial Sequence: Synthetic coding sequence
  source 1..1776: mol_type = other DNA
atgaagtacatccttgttacaggtggagtaatcagcgggattggaaaaggcatcatcgcctcctccgttgggacgattttaaaatcttgcggactgcacgtcacatccattaaaattgacccttacatcaacatcgacgcggggacattcagcccttatgagcacggggaggtcttcgttctcgacgacggcggggaggttgatctggacctggggaactacgagaggtttctggacatacgcctgaccaaggataacaacctaaccacaggcaagatctatcagtatgtgataaacaaagagcggaaaggagactacctgggaaagaccgtgcaagtggttccacatattacagatgctatccaggaatgggtgatgcgccaggctctgatacctgtggacgaggacgggttggagcctcaggtctgcgtgatcgagcttggagggacagttggagatattgagtcaatgccctttatcgaagcattcagacagtttcagttcaaggtgaagcgggagaatttttgtaatattcacgtctctttggtcccacagccatccagtaccggcgaacagaagaccaaacccacgcagaattctgtgcgggaactgcggggactgggtctgtcaccggacctggtagtatgtaggtgcagcaacccactagatacttccgtcaaagaaaaaattagtatgttctgtcacgtagaacctgaacaggtgatttgtgtacacgatgtgtcatctatctaccgcgtacctttactgcttgaagagcagggcgtcgtcgactactttttgagaagactcgatctaccgatcgaacgccaaccgagaaaaatgttgatgaagtggaaagagatggccgaccgttacgaccgactgctcgagacatgcagcatcgcactggtgggcaagtacaccaaattcagcgactcgtacgcttctgtcattaaagcattggaacactccgctttagccattaaccataagctggagattaaatacattgactcggccgacctagaacctattacatcccaggaagaacctgtcaggtatcacgaagcctggcagaagctctgttctgcacatggcgtcctcgttccaggggggtttggggtgcgagggacggaaggtaaaatccaggctatagcatgggcgcgaaatcaaaagaagccatttctcggcgtgtgcctgggcatgcaacttgctgttgtggaattttctcgtaacgtgcttggctggcaggatgccaactcaaccgaattcgacccaacgacaagccaccccgtcgtcgtcgatatgcccgaacacaatccagggcagatgggaggaacaatgcgcctcggaaaaaggcggactctgttccagactaagaacagtgtcatgagaaagttgtatggggatgctgattatttggaggaaagacaccggcaccgattcgaagtcaaccccgtttggaaaaagtgcttagaagagcagggtctgaaatttgtcggccaagatgtagaaggggaacgcatggagatcgttgaactggaagaccaccccttttttgttggagttcagtatcatccagagtttttatcacggcctatcaaaccatctccgccctactttggattgctgctggcgtccgtcggacgcctcagccattatctgcaaaaaggctgccggttatcgccaagagacacctacagtgatcgctcgggaagtagctctcccgacagtgaaatcaccgagctgaaatttccatccatcaaccacgattag

SEQ ID NO: 113245 - DNA, 1083 bp, synthetic construct
  misc_feature 1..1083: note = Description of Artificial Sequence: Synthetic coding sequence
  source 1..1083: mol_type = other DNA
atgttctgccacgtggagcctgagcaggtcatctgtgtgcatgacgttagctccatttatagagttcccctgctgttagaggagcagggagtcgtggattatttcctgcgccgcttagatctgcctatcgagcgacaacctcgaaagatgctcatgaagtggaaagaaatggcagataggtatgaccggctcctggagacgtgcagtattgccctcgtgggcaagtacactaagtttagtgatagctatgcctcagtgatcaaggctttagagcatagtgccctggctatcaaccataagcttgaaattaagtatattgactcggcagacctcgagccaattactagtcaagaagagcctgtcaggtaccacgaggcgtggcaaaaactatgttctgcgcacggagtcttggtcccaggcggctttggagtgcgaggaaccgagggaaagattcaggccattgcatgggcgcggaaccagaagaaacccttcttgggcgtctgtctgggcatgcagctcgccgtggttgagttcagccgaaacgtgctgggctggcaggacgccaacagtactgagtttgaccctacaactagccatccagttgtcgttgacatgccagagcataatcccggtcaaatgggtggcaccatgaggcttggtaaacggcggacactgttccagactaaaaacagcgtgatgaggaaactatatggagacgccgattacctggaagagaggcacagacaccgcttcgaggtgaatcctgtttggaagaagtgtctcgaggagcagggcctgaaattcgttggtcaggatgtggagggagagaggatggaaatcgtagagctggaagaccatccgttcttcgttggggtgcagtatcatcctgaattcttgtccaggcccatcaagcccagtccaccgtatttcggtctgctgctggcttcggtggggaggctttcccactatctccaaaagggttgcagactgtctccacgtgatacctatagtgaccggagcggtagttcaagccctgacagcgagataaccgaacttaagttcccttctatcaaccacgactag

SEQ ID NO: 113246 - DNA, 945 bp, synthetic construct
  misc_feature 1..945: note = Description of Artificial Sequence: Synthetic coding sequence
  source 1..945: mol_type = other DNA
atgcccaaatctaaaagcaagatgaaatatattctcgtgacaggtggcgtgatttccgggattgggaaaggaattatcgccagctcagtggggacaatccttaaaagctgtgggctccacgtcactagtattaaaattgatccatatattaatattgatgccggtactttctctccctatgagcacggtgaagtattcgtcctcgacgacggtggggaagtggacctggatcttgggaattatgagaggttcttagatatcagattgaccaaggacaacaacctcacaaccggcaagatctatcaatatgtcattaacaaggagcgaaaaggcgattacctggggaagacagtccaggtggtgccacacatcaccgacgctattcaggagtgggtcatgaggcaggccttgattcccgtagatgaggacggtctggagccgcaggtatgcgtcattgagctgggcgggacggtgggggacatagaatcaatgccttttattgaagctttccggcagttccagtttaaggttaaacgagaaaatttttgcaatattcacgtatccctagtaccacagcctagcagcacgggtgaacagaaaactaagccaacccagaactccgtgcgcgagcttcgcgggctagggctgtctcctgacctcgtggtctgccggtgctcgaatcccctggacacttcagtgaaagaaaagatatcgatgttttgccatgtggagcccgaacaggttatttgtgtccacgatgtctccagcatctacagggtgcccctactgctggaagaacagggcgttgtcgactatttcttgagaagactggacctgcctatcgagagacagccgcgcaaaatgcttatgaagtggaaagaaatggccgataggtttgcttgcaatgaggagctcggcgttctcgcgagctttacactgctttag

SEQ ID NO: 113247 - DNA, 1761 bp, synthetic construct
  misc_feature 1..1761: note = Description of Artificial Sequence: Synthetic coding sequence
  source 1..1761: mol_type = other DNA
atgaagtatatcctggtgacaggaggcgtgatctccggcataggtaagggcattattgccagctccatcgggaccattctgaagtcatgtggcttgagagtaacggccattaagatcgatccatacattaacatcgatgccggaacattctccccctatgagcacggagaagtgttcgtgctgaacgatggcggggaggtggacctcgacctaggcaactatgagcggttcctcgatattaatctgtacaaagacaataatataaccactggcaagatttaccagcacgttattaacaaggagagacggggcgattacttgggaaagacagtgcaggtggtcccgcacatcaccgatgccgtgcaggagtgggtgatgaaccaggccaaggttccagtggatggcaacaaggaggaaccacagatttgtgtgatcgaactcggaggaacgattggagatatcgaaggaatgcctttcgtcgaggcattcagacagttccaattcaaagcaaagcgggagaacttctgcaatattcacgtgagcctggtgcctcagctttcagcaaccggtgagcagaagacaaagccaactcagaacagcgtacgtgctctcagaggtttaggcctaagcccagatctcattgtctgccgaagctcaacacctatcgaaatggcggttaaagagaaaatatctatgttttgccatgtgaatcccgaacaggtgatctgcatccacgacgtgagttctacctaccgggtgccagtcctgctcgaagaacaatccatcgtgaaatacttcaaggagcggctgcatctgccaatcggggatagcgcctcgaacctgctgtttaaatggagaaacatggccgatcggtatgagcgcctgcagaagatctgttcaatcgcccttgtcggcaaatataccaagctgcgcgactgttacgccagcgtgttcaaggccctggagcacagcgcacttgccatcaatcacaaactgaaccttatgtacatcgatagcatcgacctggagaaaatcacggagactgaggaccccgtcaagttccacgaagcctggcaaaagctctgcaaagccgatgggatcctggttcctggcggatttggtattcgcggcacccttggcaaactgcaggcaatatcttgggctcgcactaaaaagatcccgttcctgggcgtgtgtcttggcatgcagcttgccgttatcgaattcgcccgtaattgccttaacttgaaggacgccgactcaactgagtttcgccctaatgcccctgtgcctctggtcattgacatgccggagcataaccctggtaacctgggcggtacgatgagacttgggatccgcaggacagtttttaagaccgagaattccattctacggaaactctacggagacgtccctttcatcgaggaacgacaccggcacaggtttgaggtgaacccgaacttgattaaacagtttgagcagaacgacctgtctttcgtggggcaggacgtcgacggtgacaggatggagattatagagttagctaatcacccatactttgtgggcgtgcagttccatccggagttttccagccggccaatgaagccttcaccaccgtacctgggacttctgctggccgccacaggcaacctgaacgcttatctgcagcaggggtgtaaactaagctcttcagaccgttacagtgacgctagcgatgactccttttcagagcctaggattgcagaactcgaaatctcttag

SEQ ID NO: 113248 - DNA, 531 bp, synthetic construct
  misc_feature 1..531: note = Description of Artificial Sequence: Synthetic coding sequence
  source 1..531: mol_type = other DNA
atgtacattgattccatcgatctggaaaagatcacagagacagaagaccccgtaaagtttcacgaggcatggcagaaactgtgcaaggccgacggcatcctagtcccaggagggtttggcattagaggcaccctgggcaagctgcaggccatctcttgggccagaaccaaaaaaattccctttttaggtgtgtgtctggggatgcagttagctgtgatcgaattcgcccgcaactgtctgaatttaaaggacgcagactcaaccgagtttagacctaatgcccccgtgcccctcgtaattgacatgcctgagcataatcccgggaatctagggggaactatgagattgggtatacgacgtacggtctttaagacagaaaattcaattctgatttctctctcacttggactggccagcgtggagcacactgagtgccctagcgcctttgacctgcgcgacagtctgtttattggtttgttttgtgagctgcctatgttgcttgaaatgaatctggactgggacctggattag

SEQ ID NO: 113249 - DNA, 1761 bp, synthetic construct
  misc_feature 1..1761: note = Description of Artificial Sequence: Synthetic coding sequence
  source 1..1761: mol_type = other DNA
atgaagtacatcctcgtcacaggaggcgtgatcagcggaattggcaagggcatcattgcatcaagcattggcacaatcttaaaatcatgcggtttgcgcgtgaccgccatcaaaatagatccgtacataaacattgacgctggcacctttagtccatacgaacacggggaggtgttcgtccttaacgacggaggtgaagtggaccttgatctgggaaattacgagaggtttctggatataaatttatacaaggataataatattaccactggcaaaatataccaacacgtgatcaacaaggagcgacggggcgattacctgggcaagaccgtgcaagttgtgccccatatcaccgacgccgtgcaggaatgggtgatgaaccaggctaaagtgcccgtggacggaaacaaagaagaacctcagatctgcgttattgaactgggggggaccattggagacatcgaagggatgccgttcgtcgaagccttcaggcaattccagttcaaggccaagagggagaacttttgtaatattcatgtttctcttgtgcctcagttaagcgctacgggcgaacaaaagacgaaacccacacagaattcggttagagcactccggggactggggctgagtccggacctcatcgtttgcaggtcatccacacctatcgagatggctgtgaaggaaaaaatcagtatgttctgtcatgttaaccccgagcaggtgatttgcattcatgacgtctcaagtacctacagagtgccggtcttgttggaggagcagtctattgtcaaatacttcaaagaacgactccatctgccaatcggcgattccgccagcaatcttttgttcaagtggcgaaacatggccgatagatacgaaaggcttcagaagatttgtagcatagccctcgttgggaaatacactaaactgagggattgttacgcttcagtgttcaaagccctggagcactccgctctggccatcaatcataaacttaatctgatgtacattgactcaattgacttagaaaagattacagagaccgaagacccagtgaagtttcatgaggcatggcagaagctttgcaaggctgatggtattcttgtccctggcgggtttggcattagggggacactcggcaaactgcaggctatctcttgggcccgcactaagaaaataccttttctgggcgtgtgtctgggcatgcagctcgcagtgatagagttcgccaggaattgtctgaacctcaaagacgctgattctactgaattccggcctaacgctcctgtaccgctcgtcatcgacatgcccgaacacaacccgggtaaccttgggggcaccatgcgcctgggaatccgccggactgtttttaagacagagaatagcatcctacggaagctatatggagatgttccatttattgaagagagacaccgccacaggttcgaagtcaaccccaatctcataaaacagtttgaacagaacgacctcagctttgtggggcaggacgttgatggcgataggatggagattatcgagctcgcgaaccacccctattttgtgggggtgcagtttcatcctgaattctccagcagacctatgaaaccgtctcctccgtatctgggattacttctggcggcaactgggaatctgaatgcctatctgcaacaggggtgcaagctgtcgtctagcgatcggtattctgacgccagcgacgactccttctccgagcctaggatcgcggagttggagattagttag

SEQ ID NO: 113250 - DNA, 1761 bp, synthetic construct
  misc_feature 1..1761: note = Description of Artificial Sequence: Synthetic coding sequence
  source 1..1761: mol_type = other DNA
atgaaatacatcctggtgaccggtggggttatatcaggcatcggcaagggaattatagcatcaagcatcgggactattttaaaatcatgcggccttagggtgactgctatcaagattgacccatacatcaatatagacgctggaacattttccccttatgagcacggggaagtattcgtgttgaatgatggcggggaggtagatcttgacctcggcaattacgagaggtttctagatattaatctgtacaaggacaacaatattacgacaggaaagatttatcaacatgtgatcaacaaagagcgcagaggcgactatcttggaaagacggttcaagtggtgccccacatcaccgacgcagtgcaggagtgggtgatgaatcaggcgaaagtccctgtcgacggaaacaaggaagaaccacagatttgtgttatcgaactgggcggcacaatcggggatattgaaggcatgccctttgtcgaggcctttcgccaattccaatttaaggcgaaacgagaaaacttttgcaacattcacgtctcgctggtaccacagctctctgccacgggcgagcagaaaacaaaaccaacacagaactcagtccgcgccctaaggggactcggcctttcccccgacttgatcgtgtgccgcagcagcaccccaatcgaaatggccgttaaagaaaaaatctccatgttctgtcacgttaaccctgagcaggtcatctgtatccatgacgttagttcaacttacagggttccagtgttgctcgaggagcagtccatcgtgaagtacttcaaggaacgcctacacctgcccattggggactctgcctctaatctcttgttcaagtggagaaacatggcggatcggtacgagcgccttcagaaaatctgcagcattgctctggttggtaagtatactaaactccgcgactgttatgccagtgtatttaaagccctcgaacattctgccctggcgatcaatcacaagttaaacttaatgtacatagacagtatcgacctcgaaaaaatcacggaaactgaagatccggtcaagtttcatgaggcctggcagaagctttgtaaagccgacggcattttagtacctggaggctttggcattagaggcacgcttgggaagcttcaggctatttcatgggcacgcacgaagaaaatacccttcctcggagtgtgtctgggaatgcagctcgcggtgatagaatttgctagaaactgcctgaatctcaaggacgccgattctacggaattcaggccaaacgctcctgtgccgctggtgattgacatgcccgaacacaaccccgggaaccttggggggactatgaggctcgggatccgacggacggtgttcaagacggaaaattctatcctgaggaagttgtatggagacgtcccgtttatcgaggagaggcaccgtcacaggtttgaagtgaatccgaatctcattaaacagttcgagcaaaatgacctcagcttcgtgggccaagatgtcgatggggatcgcatggagattatcgagctggccaatcatccttactttgtgggcgtgcagttccacccagaattctcttccaggccaatgaagccatcacccccttatcttggactgctgctggcggccaccggtaacctgaatgcctacttgcagcagggctgtaagctgagtagttctgacagatatagcgacgctagcgacgacagtttttcagagcctcggatcgcggagctggagatcagttag

SEQ ID NO: 113251 - DNA, 399 bp, synthetic construct
  misc_feature 1..399: note = Description of Artificial Sequence: Synthetic coding sequence
  source 1..399: mol_type = other DNA
tagggcaaattacaagccatctcctgggctaggacaaaaaagatcccctttttgggggtgtgtttggggatgcagctggctgtcattgaatttgcccggaactgtttgaacctgaaggacgccgatagcactgagttccgccccaatgcgcctgttccactcgtgattgacatgcccgaacacaaccccggaaaccttggggggaccatgcgactgggcatccgaaggactgtatttaagaccgaaaactcgatcctcattagccttagcttggggctggcgtcagtcgaacatactgaatgcccttcggcgtttgacttgagagattccctgttcattggcctgttttgtgagctacctatgctgctggaaatgaacttggactgggatcttgactag

SEQ ID NO: 113252 - DNA, 3654 bp, synthetic construct
  misc_feature 1..3654: note = Description of Artificial Sequence: Synthetic coding sequence
  source 1..3654: mol_type = other DNA
atggcagctggcagggcacaagtgccgagttccgaacaggcatggctggaagacgcgcaggtgttcatccaaaaaactctctgcccagctgttaaggagccgaacgttcagttaacccccctggtgatcgactgtgtcaagactgtttggttgagccaggggaggaaccagggctcaacactgcccctgtcttactcatttgtgagcgttcaagatctgaagacacaccagagacttccatgctgttcccatcttagctggagctctagcgcctatcaggcttgggcacaggaggcaggaccaaacggcaatcctctgccacgcgagcaattgctgctactgggcaccctcacggacctttccgccgaccttgagcaggagtgtaggaacggatctttgtatgtgcgcgataacacgggcgttctcagttgcgagttaatcgatctggacctgagttggcttggtcacctatttcttttcccaagatggagctacctgccaccggcccgctggaatagcagcggggaaggccacctggaactgtgggatgccccagtgccagtgttccctctgactatttcccctggtcccgtgacgccaatacccgtcctctaccccgagtccgcatcatgtctgcttcgactgcgcaacaaacttagaggcgtccagcggaaccttgctggcagcctcgtaaggctgtctgctttggtgaaatccaagcagaaagcttacttcattctaagcctgggtagatcccacccggccgtaacacatgtgtcaatcatcgtgcaggtgcctgcgcagctggtatggcacagggccctacgcccaggtactgcatatgtgcttacagagcttcgcgtgtctaagatccgaggtcagaggcagcacgtttggatgactagccagagcagtagattgctgctgctgaagcctgaatgtgtacaggagctcgagctggagttagaaggtcctctgctggaggcggaccccaaaccgctgcctatgccctccaattccgaagataaaaaggatcctgaatcccttgtgcgttactctagactgttatcctactctggcgctgttacaggcgtgctcaatgaacctgctgggctctacgagctagacggtcaactcggactgtgtcttgcctaccagcagttcagagggctacggagagtgatgaggccaggggtgtgtctgcaactccaagacgtgcacctgttgcaatctgtgggggggggtaccaggcgccccgtcctggctccctgtctcagaggggcagtgctcctgcagtcatttagccggcagaaacccggagctcactcaagcagacaggcatatggtgcatctctgtatgagcagctcgtgtgggagaggcagttgggtctcccattgtatttatgggcaacaaaggctttggaggaactggcctgtaagttatgccctcacgtccttaggcatcaccagtttctgcagcattctagcccaggatccccatctctgggcctccaacttctagcaccaacactcgacctgctggccccccctgggtcccctgtccgaaacgcccataacgaaattttggaggagcctcaccattgtccattgcagaagtatacacgccttcagacaccctcttcttttccaacacttgccacactaaaggaggagggacagagaaaagcttgggcgtcattcgatccaaaagcgctcctccctctgccggaagcctcctaccttccttcatgtcaactgaaccgtcggttggcttggtcatggctgtgcctgctccccagtgccttctgccctgcacaagttctcctgggagtgctagtggcaagttcccacaagggttgtttgcagcttagggaccaatccgggtccctgccctgccttctgcttgcgaaacactcccagccactctcagaccctagattaatcggatgcctcgtccgcgcagaaagattccaactgattgttgagagggacgtgagaagcagttttccctcttggaaagagctttctatgcccgggtttattcagaaacagcaagcacgtgtgtacgtccagttttttctcgccgatgccctgatcttaccagttcccaggccatgccttcatagcgccacccctagcacaccacagacagatcccacaggacctgaagggccacatttgggccagtcaaggttatttttgctatgccacaaagaagcgctgatgaaacgaaacttttgtgttccccccggggctagtccagaagtcccgaagcctgcattatctttttatgtgctgggttcttggcttggggggacacagcggaaggagggtacgggctggggcctcccagaaccacaaggaaacgatgataatgatcaaaaggtgcacctgattttctttggctcttcagtcaggtggttcgagttcttgcatcccggacaggtgtaccgcctgattgcacccgggcctgccactcccatgctgttcgaaaaggatggttccagttgcatcagcagaagaccactagagctggctggctgcgcttcatgcctgactgtccaggacaattggacactggaactcgagtcctcccaagacatccaggacgtactggacgccaacaagagcttgcctgaaagctccttgacggacttgctgagcgacaactttacagatagccttgtgagtttctccgccgagatactgtcccgcacactctgcgagccattggtcgcgtccctctggatgaaactgggcaatactggggcgatgcgccgatgcgtaaagctgactgttgcccttgaaaccgccgaatgcgagtttccaccccacctggacgtgtatatcgaggaccctcaccttccccctagtctcggcctgttacccggagctcgagtgcatttttctcagctggaaaaaagagtctcccgcagtcataatgtttactgttgcttcaggagttccacctatgtccaggtgctgtcattccctccggaaaccaccatcagtatccctcttcctcacatatatctcgcagagctcttgcagggggggcagtcacctttccaggccacagcatcctgtcacattgtgagcgtgttctccctccaattgttctgggtctgtgcctattgcactagcatttgtaggcagggcaagtgtacacggctgggctctacttgtccaacacagactgctattagtcaagccataatccgattgcttgtagaggacggaacggcagaggcagttgtgacatgccggaatcatcacgtagcagctgctttgggcttatgccccagagaatgggccagtctgctggatttcgttcaggttccaggccgggtggtcctgcagttcgccgggccgggagcacagttagagagctccgctcgagtagacgagcccatgacaatgtttctgtggactctttgtacatccccgagcgtgctgcggccaatcgtcctcagttttgagttggaaaggaagcctagtaaaatcgtaccattggagccgcccaggctacaaaggtttcaatgtggcgagttacctttcctcacacatgttaaccctaggctgcggctctcctgcctctctattcgtgagagcgagtatagctctagccttggcattctggcatccagctgctag

SEQ ID NO: 113253 - DNA, 3096 bp, synthetic construct
  misc_feature 1..3096: note = Description of Artificial Sequence: Synthetic coding sequence
  source 1..3096: mol_type = other DNA
atggctgcggggcgcgcacaggttccgagtagtgaacaggcttggctggaagatgcacaggtattcatccaaaaaacgttatgtcccgctgtaaaggagcctaatgtacagctgacacccttggtaatagattgcgtgaagaccgtgtggctaagccaaggtcgcaaccaagggtcaacattgcccttatcttatagcttcgtgtctgtgcaggatttaaagacgcatcagagactgccctgttgtagccatctgtcttggtcctcctcggcctaccaggcctgggctcaagaagctggaccgaatggaaatcccttgcctagagagcaattgttactgttgggcactctgacagacttatccgctgacctggaacaggagtgtagaaacgggtccctgtacgttagagacaacaccggagtgctgagctgcgagctgattgacctggatctttcttggctcggccatctgttcctgttcccccgttggagttatctccctcctgctcgctggaacagttcaggcgaaggacatctcgagctctgggatgcgcccgttcctgtgttcccactgacaatttctcctggtccggtcaccccaattcccgtgctgtaccccgagagcgctagctgtctcttgcggctgaggagccaccctgcagtcactcacgtttcgattattgttcaagtccctgcacagcttgtttggcatagagcattgcgccctggtacagcctacgtgctgacagagctgagagttagcaaaattagaggacagcgccagcatgtatggatgacctctcagtcaagcagactgctgctgctgaagcctgaatgtgttcaagagcttgaactcgagctggaaggccctctgcttgaagctgaccccaagccactgcccatgccctcgaacagtgaggacaagaaggacccagagagtctcgtgcgctactcgcgattactgagttattcaggcgccgtgaccggggtcctgaacgagccagcgggcctgtacgagcttgatggccaattggggctgtgcctggcgtaccagcagttccgggggctcagaagagtgatgcgcccgggagtttgcctccagctgcaggatgtgcatctgctacagtctgtcggcggcgggaccagacgcccagtattggctccgtgcttgcgaggcgctgtactgctgcagagcttcagcaggcaaaagccaggagcccattcatctaggcaggcctatggcgcttccctatatgaacagctggtttgggagaggcagcttggattaccactctatttatgggctactaaggcactggaggaactggcttgtaagctgtgccctcatgttttaagacatcaccagtttctgcagcattctagtcccggatcaccctccctcggcctgcagctgctggccccaactcttgatttgctggccccccccggaagccccgtcaggaatgcccataacgaaattctcgaggagccacaccactgccccctgcagaagtacactcggcttcaaacacctagtagcttccccacactggcaactctgaaagaggaagggcagaggaaagcctgggccagctttgaccccaaagcgctcctcccattgccggaagcgtcttacctaccatcttgccagctgaatagacgcctagcctggtcatggctttgcctgctgccgtcggccttttgtcccgctcaagtcctgctcggtgtcctggtggcctcttctcacaaggggtgtcttcagctgagagatcagtccggctcacttccttgtctgcttctggccaaacacagtcagcccctcagcgatccccggcttatcggatgcctggtgcgagctgagagatttcaactgatcgtggagcgtgacgttcgttcttccttccccagttggaaagagctttcgatgccagggttcatccagaagcaacaggcgcgagtgtacgtccagttcttcctcgccgacgctttaattctccctgtgcccaggccttgcttgcactcagcaacgcctagtacgccacaaaccgacccaacaggtcctgaggggccacacctgggacagagccgactattccttctctgccacaaggaagcgttgatgaaacggaacttctgcgtgccgcccggagcatccccagaggtgccaaagccggccctaagtttctacgtgctcggcagctggctggggggcacccaacggaaggaggggaccggatggggcctgcccgagccccaaggaaacgatgataacgaccaaaaagttcacttaattttttttggaagcagtgttaggtggttcgaatttctgcatcctgggcaggtgtataggttgatcgcccccgggcctgctacgcctatgctttttgaaaaggatgggtcctcttgcatatcaagaagaccgcttgaactcgcaggttgcgcctcctgtttaacggtccaagacaactggactcttgagctcgagagctctcaagacatacaggacgtcctggatgccaacaagtcgctgccagagtcaagtctaaccgatctgctctccgataactttactgattctctggtaagcttttctgcagagattttgagtagaacactgtgcgagcccctggtggctagtctatggatgaaattgggtaataccggagctatgagaaggtgtgtcaagctcacagttgcactcgagaccgccgagtgcgaattcccgccacatcttgatgtctacatcgaggatcctcacctgccacccagcctgggcctgctccccggtgctagagtccatttctcacaactcgagaagagggtttcccgttcacacaacgtgtactgctgtttccggagctctacctatgtacaggttttgtctttccccccggagaccaccatatccatccctctacctcacatttacctggctgagctgttacaagggggacagagccctttccaagctacagcgagctgtcacatcgtaagcgtgttctcattacaacttttctgggtatgtgcatattgtacgtcaatttgccggcaggctcccggaggtggttgggattgtcggtccagaggggatctttag

SEQ ID NO: 113254 - DNA, 843 bp, synthetic construct
  misc_feature 1..843: note = Description of Artificial Sequence: Synthetic coding sequence
  source 1..843: mol_type = other DNA
atgcaagcgaaatacagctctacaagagacatgctggatgatgatggggacaccacgatgtccctccatagtcagggttcagctaccactcggcaccctgagccacgaaggacggagcaccgcgctccttcatctacgtggcgccctgtcgccctcacgttactcacgctatgcctggtgctgctgatcgggctagccgccctggggttgttgttcttccagtactaccagctcagtaatactggccaggacactattagccagatggaggagagactgggcaacacctctcaagagttgcagagtctgcaggtccagaatattaagctggccgggtctctgcaacacgttgcagaaaagctttgtagggagttatataacaaggctggtgcccacaggtgctcaccatgtacagaacaatggaaatggcacggagacaactgctatcagttttataaagatagcaaaagctgggaagattgtaaatacttttgcctttccgagaactccacaatgctcaagatcaacaagcaagaggatttagaatttgcagcatcacagtcttatagcgagtttttttatagttactggactgggcttctcagacctgatagtgggaaggcctggctctggatggacggcacccctttcacctccgaactgtttcacatcataatagacgtcacttccccaagatctcgagattgtgtagctattctgaacggtatgatcttttccaaagattgcaaggaactcaagagatgtgtctgcgaacggcgggctggaatggtcaagcccgagagtctccacgttccccccgagaccctcggtgaaggcgactag

SEQ ID NO: 113255 - DNA, 213 bp, synthetic construct
  misc_feature 1..213: note = Description of Artificial Sequence: Synthetic coding sequence
  source 1..213: mol_type = other DNA
atgcaggcaaagtatagctctacacgagatatgcttgacgatgacggtgacactactatgtccttgcacagtcaggggtctgctaccacccgtcatcctgaacctcgccggacagaacacagggctccatccagcacatggcgccccgtagctcttacactgctgacattatgcctagtgctgctcattggcttggccgcgctcggactctag

SEQ ID NO: 113256 - DNA, 879 bp, synthetic construct
  misc_feature 1..879: note = Description of Artificial Sequence: Synthetic coding sequence
  source 1..879: mol_type = other DNA
atgactagaacgtacgaaaacttccagtacttggagaataaggtgaaagtccaggggttcaagaatggcccccttccactccagtctttgctgcaacgcctctgtagtggcccttgtcatctgctcttatccctgggtctgggtctcttgctacttgtgattatttgcgtggtcgggtttcagaacagtaaattccagagggatctcgttaccctcaggacagacttttccaattttacatctaataccgttgcggagatccaagctctcacctcccagggatcttccctggaggaaacgatcgccagcttgaaggctgaggtcgaaggatttaagcaagaacgtcaggccgtccatagcgaaatgctgctgagagtccaacagctagtgcaggatttaaagaagctaacatgtcaggttgctacactgaataacaacggagaggaggctagcactgagggtacctgctgccctgttaactgggtggagcatcaagattcttgctattggttctcccattctgggatgtcatgggctgaggccgagaagtattgccagctcaagaatgcacacttagtggtaataaatagtagagaggagcagaattttgtacagaagtatctgggatccgcatacacctggatggggctttctgatccagagggtgcttggaagtgggtcgacgggactgactacgcaacaggattccaaaattggaagcctggacaaccagatgactggcagggacacgggcttggcggcggggaggactgcgctcacttccacccggacggcagatggaatgatgatgtgtgtcaaagaccatatcactgggtttgtgaggccgggctgggacagacttctcaggagagtcattag

SEQ ID NO: 113257 - DNA, 951 bp, synthetic construct
  misc_feature 1..951: note = Description of Artificial Sequence: Synthetic coding sequence
  source 1..951: mol_type = other DNA
atgacgcgcacctacgagaatttccaatacctagagaataaggtgaaggtacagggctttaagaacggccctctcccgctgcagtcgctgctgcagaggttatgttctggaccatgtcatcttttgctgtcacttgggctggggctcctgctcctcgtaatcatttgcgtggtgggatttcaaaattcgaagtttcagcgagatctggtgacactcaggacagacttttctaattttacatcgaataccgttgccgaaatacaggccctgactagtcagggtagttctctggaagagaccatcgccagcctcaaggcagaggtcgaaggctttaagcaggagcgccaggccggagtgagcgaactgcaggaacacaccacacagaaagcccacttgggacactgtccacactgtccttccgtgtgtgtgcccgtacactccgaaatgctcctgcgagttcagcagctggtgcaggacctcaagaagctgacgtgccaggttgcgacactcaacaacaacgcttccactgagggaacatgttgccccgtgaactgggtggaacatcaagacagttgttactggtttagccacagtggcatgtcgtgggctgaagcagaaaaatactgtcagttaaagaacgcacaccttgtagtcataaacagccgcgaggaacagaacttcgttcagaaatatctcgggagcgcatacacctggatgggcttgtccgatcccgagggggcatggaaatgggtcgatggcacagactatgcaactggattccaaaactggaagcctggccaaccagacgattggcagggccacgggttgggaggcggcgaggactgtgctcatttccatcccgatggtagatggaacgatgacgtctgtcagcgcccatatcactgggtgtgtgaggcaggtctgggacagacctctcaggaaagccattag

SEQ ID NO: 113258 - DNA, 879 bp, synthetic construct
  misc_feature 1..879: note = Description of Artificial Sequence: Synthetic coding sequence
  source 1..879: mol_type = other DNA
atgaccaggacatacgagaattttcagtaccttgagaacaaagtgaaggtgcagggatttaagaatggacctctcccactgcagtcgctactccagaggttatgctccgggccatgtcacttgctgttgagcctgggcctcgggctgctgttactagtcattatttgcgtggtggggtttcaaaactcgaagttccaacgggatctcgtgaccttacggaccgacttttccaactttacaagtaatacagtggccgaaatccaggccttaacatctcagggatcctctctagaggaaaccattgcaagccttaaagccgaggttgaggggtttaaacaggagcgccaggctgtgcactctgaaatgctcctgagggttcaacagctagtacaggacctgaaaaagctgacgtgtcaagtagccactctgaacaataacggcgaggaggcgagtaccgaggggacttgttgtccagtgaactgggtggaacatcaggattcttgttactggttctcacattcagggatgtcatgggccgaggccgagaagtactgtcaactgaagaacgcacatcttgttgtgatcaatagcagggaggagcagaactttgtccaaaagtatcttggcagcgcttacacctggatgggactgtctgatccggagggtgcttggaagtgggtggatgggacagattatgccaccggatttcaaaactggaaaccagggcagccggatgattggcaagggcacgggctgggcgggggtgaagactgcgcgcattttcatcccgacggacgctggaatgatgatgtgtgccaacgcccataccactgggtgtgtgaggccggcttggggcagaccagccaggaatcacactag

SEQ ID NO: 113259 - DNA, 798 bp, synthetic construct
  misc_feature 1..798: note = Description of Artificial Sequence: Synthetic coding sequence
  source 1..798: mol_type = other DNA
atgagcgaagaggtgacgtacgctgacctacagttccaaaattcctcagaaatggagaagattcccgaaatcgggaaattcggagagaaagccccccccgccccatcacatgtgtggagacccgcggcgctgtttctgactcttctgtgcctgctgcttctcataggtctcggcgtacttgcttcaatgttccatgtgacattaaaaatcgagatgaagaagatgaacaaactgcagaacatctccgaagagttacagcggaatatatcccttcagctgatgagtaacatgaatatcagcaacaaaataaggaacctgtccactacccttcaaacaatcgcgacgaaactgtgcagggagttatattccaaggagcaggagcacaaatgtaaaccctgtccccggcggtggatttggcacaaagatagttgctacttcttatccgacgatgtgcagacctggcaagagtctaagatggcctgcgccgctcagaatgcttctttactgaagatcaataacaagaatgccctggaattcattaagagtcaatcacgatcatacgactactggctgggcctttccccagaggaggactctacaagagggatgcgggtcgataatataatcaatagcagtgcctgggtcatacggaatgcccctgacttgaacaatatgtactgcggttatatcaaccgcctgtatgttcagtattaccactgcacatataagaagcgaatgatctgcgagaaaatggccaacccagttcagcttggatctacctactttagggaagcttag

SEQ ID NO: 113260 - DNA, 699 bp, synthetic construct
  misc_feature 1..699: note = Description of Artificial Sequence: Synthetic coding sequence
  source 1..699: mol_type = other DNA
atgtcagaggaggtgacttatgccgatctgcagttccagaactcgtccgaaatggagaagattcctgaaatcggcaagttcggcgagaaggtgcacgttacgctgaagatcgaaatgaaaaaaatgaacaagctccagaacatctccgaagaactgcagagaaacatttccctgcagctcatgtcgaatatgaatatcagcaataagataaggaatctgtcaacaacactgcagactatcgctactaaactgtgccgagaactgtactctaaagagcaggaacataaatgcaagccgtgccctcgcaggtggatttggcacaaggattcctgctacttcctgtcagacgacgtccagacctggcaggaaagtaagatggcctgcgctgcccagaatgcttccctgctgaaaattaataataaaaacgccctggagtttatcaagtcccagagccgcagttacgattattggctgggactcagccctgaagaggactcaacacgcgggatgcgagttgacaacatcatcaactcaagcgcatgggttatccggaacgctcctgatctgaataacatgtactgcggatatattaaccgtttatacgtgcagtattaccattgcacatacaagaagcgaatgatttgcgagaaaatggccaaccccgtccaactaggctctacctacttccgggaggcatag

SEQ ID NO: 113261 - DNA, 828 bp, synthetic construct
  misc_feature 1..828: note = Description of Artificial Sequence: Synthetic coding sequence
  source 1..828: mol_type = other DNA
atgtggatcgacttctttacctattccagcatgagcgaggaggtgacatacgcagacctccagtttcagaactcttctgagatggaaaaaatacccgaaatcggcaagttcggcgagaaagctccccccgcacctagccacgtttggcgcccggccgccctgtttttgaccttgctgtgcttattgcttcttattggactgggagtcctcgcttcaatgttccatgttacccttaagatagaaatgaaaaagatgaacaagctgcaaaacatatccgaagagctacagcgaaacatctcactgcagttgatgagcaacatgaacatatcaaataagattaggaacctatcaaccacacttcaaacaatcgctaccaagctctgtagggagctctatagcaaggaacaggagcacaaatgtaaaccttgcccgagacggtggatctggcataaagactcttgctattttctgtcagacgacgtccaaacatggcaggagagcaaaatggcatgtgcagcacagaacgcctcactgttaaaaatcaataataaaaatgcacttgagttcatcaagtcacagtcaaggtcttacgactattggctcggactgtcccctgaggaagactccaccaggggaatgagggttgacaatataatcaactcgagtgcctgggtcatccgcaacgcgcctgatctaaacaatatgtattgcggatacatcaacaggctgtatgtgcagtactaccactgcacatataagaaaaggatgatctgcgagaagatggctaacccagtgcagcttggaagcacctatttccgggaggcttag

SEQ ID NO: 113262 - DNA, 264 bp, synthetic construct
  misc_feature 1..264: note = Description of Artificial Sequence: Synthetic coding sequence
  source 1..264: mol_type = other DNA
cataaatgtaagccttgtccgcgcagatggatttggcataaagatagctgctatttcctaagtgacgacgtccaaacgtggcaagaatcaaagatggcatgtgcagcacagaatgcatctctcttgaaaataaacaacaaaaacatcttttcggttatcaaaaagaagaccgagaagttcttctggctgggcttgagttgggacagctccggcaggagctggttttgggaggacgggagcgtaccatcacctagcctatactag

SEQ ID NO: 113263 - DNA, 498 bp, synthetic construct
  misc_feature 1..498: note = Description of Artificial Sequence: Synthetic coding sequence
  source 1..498: mol_type = other DNA
atgtcggaagaggtcacgtacgcagatctacaattccagaactcaagcgagatggaaaaaattcctgaaatcggtaagttcggggaaaaagcccctcctgcacccagtcatgtctggcgacctgcagccctgttcctgacgcttctgtgtctcctgctgttaataggtctgggtgtgctggcctctatgtttcatgtcactctgaagatcgagatgaaaaaaatgaataagctgcaaaacatctccgaggagttacaacggaacatttcactgcaactaatgtctaatatgaacatctcaaacaaaatacgtaacctatcgacaacactgcagaccatcgcgaccaagctatgtcgtgagctgtactctaaggagcaggaacacaagtgtaagccttgccccagacggtggatttggcataaagatagctgctactttctcagcgacgacgtgcaaacatggcaggagtctaagatggcctgcgcggctcagaattag

SEQ ID NO: 113264 - DNA, 642 bp, synthetic construct
  misc_feature 1..642: note = Description of Artificial Sequence: Synthetic coding sequence
  source 1..642: mol_type = other DNA
atgtcagaggaggtaacctatgccgatctccagttccagaatagttctgaaatggagaagatccccgagataggcaaattcggagaaaaagcccctcccgccccatctcacgtgtggcgacccgctgctctattcctgacactgctgtgcctgcttcttctgatcggcctgggagtgttagctagtatgtttcatgttaccctgaagatcgaaatgaagaagatgaataaattacaaaatatatccgaagaactccagcgcaatatatcactccagcttatgtccaacatgaatataagcaataaaatcaggaaccttagcacaacactgcaaacaatagccacgaaactttgccgggagctatactctaaggagcaggagcacaaatgtaagccgtgtccccggcgttggatatggcacaaggacagttgctactttctgtccgacgatgtgcaaacctggcaggagtccaagatggcctgtgccgcccagaacgcttctttactgaagattaacaataagaatgcattggagttcattaaaagccagtcacgatcgtacgactactggttaggcctttccccagaagaggatagtacaaggggcatgagggtggacaacattataaattcttctgcctag

SEQ ID NO: 113265 - DNA, 423 bp, synthetic construct
  misc_feature 1..423: note = Description of Artificial Sequence: Synthetic coding sequence
  source 1..423: mol_type = other DNA
atggcggcaacgggtttttccgctcctaacgggtcttgccatggcacatcaaggactgtgaattctgatgcacctatgtctccagagctgccgaagcctcatctgcccgaccagttggtgatcgtaaacgaaacagaagccgatagcaaaccgtcaaagaacgtcgcaaggtcggcggccgtcgaaaccgcctccctgtcccctagcctggtccccgcccgtcagcccaccatttcactgctatgcgaagacaccgcagatacacttagcgtggaatctttgacccttgtaccacctgtcgatccccactcgctgagaagcctaacgggcatgcccccattgtcaactcctgccgctgcctgtactgagcctgttggcgaagaggctgcctgcgctgagcccgtagggacggcagaagactag

SEQ ID NO: 113266 - DNA, 2721 bp, synthetic construct
  misc_feature 1..2721: note = Description of Artificial Sequence: Synthetic coding sequence
  source 1..2721: mol_type = other DNA
atgtttggaagatctagatcttgggtcggcggcggacacgggaagacttctcggaatattcactcccttgaccacctaaagtacttgtatcacgtgctgacaaagaacacaactgtcaccgaacagaatcgcaatttgctcgtggaaacgatccgtagtatcactgaaatcctcatttggggggaccagaatgatagcagcgtgttcgattttttcttggagaaaaatatgttcgtgtttttcctgaatatcctcaggcagaaaagcgggcggtacgtatgcgtgcagctgctccaaacgttgaacatcttatttgagaatattagccatgaaacaagcctgtactaccttctgtctaacaactacgtcaactccattatagtgcacaagtttgacttctctgatgaagagataatggcctactatatttccttcctaaaaactcttagcctcaagttgaacaatcatactgttcacttcttctacaacgagcatacgaatgatttcgccctgtacactgaggcgatcaaattcttcaaccatcccgagagcatggtacgaatcgcggtgcggactattacactgaatgtgtacaaagtcgataaccaggctatgttgcattatattagagataaaacagcagtgccctatttcagcaacctggtatggtttatcggatcccatgtgattgaactagatgattgtgtccagacagacgaggagcaccgtaaccgcggtaagctcagcgatcttgtggcagaacaccttgaccatcttcattatctcaacgacatcttgatcattaattgtgagtttctcaatgacgttctgactgaccatctgctgaacaggctattcctccccctgtacgtgtactcactggaaaatcaagacaagggcggggaaaggccgaagatcagtctgccggtcagcctttacctgctgtctcaggtttttctcattatacaccacgctcctttagtgaactctttagctgaggtgatcctgaacggtgatttgtccgaaatgtacgctaagaccgagcaggatatccaacgatcatccgctaagccctctataagatgcttcatcaaacccacagaaacgttggagcggagcttggagatgaacaagcacaagggcaaacggcgtgtgcagaaacgtcctaactataagaacgtaggggaggaggaagacgaagaaaaaggtccaacagaggacgcgcaggaagacgctgagaaagcaaaggagatcgaaatggtgataatggaacggagtaagctgtctgaactagccgcctccacctcagtgcaggaacagaatactacagatgaagaaaagtcggcggctgcaacctgctccgagtccacccagtggagtcggcctttcctggacatggtgtatcacgcacttgactctccggacgatgactatcatgctctgtttgttttgtgcttactgtacgcaatgtctcataacaagggaatggatccagaaaagctggaaagaattcagctgcctgtgccgaatgctgctgagaagactacatacaatcacccactggccgagagactgatacgtattatgaacaacgctgctcagccagatggaaaaattcggttggccacgcttgagttgtcatgcctcctgttaaagcaacaggtcctcatgagcgctggctgtatcatgaaagatgtgcatctggcctgcttagagggcgctagggaggagagtgtgcatctggtgagacacttctataagggcgaggacatctttctggatatgtttgaggacgaatatagatctatgacaatgaagcccatgaatgtcgagtacctgatgatggacgccagtattctcttacctcccacaggaacaccactgacagggatcgactttgtgaaaaggctaccatgcggtgatgtggagaagacccgccgggccatccgagtctttttcatgctgcggtctctgagtctgcagctgcgcggtgagccagaaacacagctgccgctgacgcgcgaagaggatctgatcaagacagacgatgttcttgatcttaataattctgatctgatcgcgtgtactgttatcaccaaggacggggggatggtgcagagatttctcgctgtggacatataccagatgtctctagtggagcccgacgtatcgcgcctggggtggggagtggttaagttcgcagggctcctgcaagacatgcaagttacgggtgtagaggacgattcgcgcgcattgaatattactattcataagccggccagcagccctcatagcaaaccattcccaattctgcaggccacatttattttctcagaccatattcgctgtatcatcgcaaaacaaagacttgcaaagggacgcattcaagcccgcagaatgaagatgcagcgcatcgctgcgctgctggacctccctattcagcctactacggaagtcctgggcttcggtctagggtcctcaacctctacacagcatctcccatttaggttctacgaccaggggaggagaggctcgtccgacccgaccgtgcaacgaagcgtttttgcctccgtagacaaggtgcccggagaacctgcccccagacccgcaccacagctagttcaccatggtgggaggtcaaggagctttagcctgtggtcgctgtgcgagttacctttcctttcccaaaagccccgtcgcctcgccgcgcctgcctcttag

SEQ ID NO: 113267 - DNA, 3162 bp, synthetic construct
  misc_feature 1..3162: note = Description of Artificial Sequence: Synthetic coding sequence
  source 1..3162: mol_type = other DNA
atgtttggccgttcccgatcctgggtgggtggaggacacgggaagacttcacggaacatacattcacttgaccatctgaagtatctttaccacgtgttgaccaagaacacaaccgttacggagcagaaccgaaatctcttggtagagaccataagaagcatcactgagatactcatttggggtgatcaaaacgactcctccgtttttgatttttttctcgaaaaaaatatgtttgtgttctttcttaacatcctgagacagaagtcaggccgttatgtgtgcgttcagttacttcagactctcaacattctgttcgaaaatatctcccatgaaacatccctgtattatttgcttagtaataattatgtcaactcaataatcgtgcacaagttcgatttcagcgatgaagagatcatggcatattacattagcttcctcaaaaccttgtcactgaaacttaataatcataccgttcatttcttctataatgagcatacaaatgactttgctctctacactgaggctataaagttcttcaaccatcctgagagcatggtccggatcgcggttagaaccattactctgaatgtgtataaggtttccctcgacaatcaagctatgctgcattacatccgggataaaactgccgtgccctacttttccaatttggtctggtttatcggtagccacgtaatcgagttagacgattgcgtgcaaaccgacgaagaacataggaatcgaggaaagttatctgatctggtcgccgagcacctcgaccatctgcattatctcaacgacatcctgattatcaattgcgaatttctgaacgatgtactgacggaccatctgctcaaccgcctttttctccctttgtatgtgtattcactggagaatcaggataaggggggcgagagacctaagatatcccttccagtgagtctgtatctgctgagtcaggtatttttaattattcaccatgctcctttggtcaactcactggcagaggtcatattgaatggggacttgtcagaaatgtacgcaaaaacagagcaagatatacagcgttcgtccgcaaagccatctatacgctgcttcatcaagccaactgagaccttggagaggagtttagaaatgaacaaacataagggtaaacggagagtgcagaaaagaccgaattacaagaatgtgggcgaagaggaggatgaggagaagggccccacagaggatgcacaggaggatgccgagaaggccaagggaacagaagggggcagtaagggaattaaaacaagcggcgaaagtgaagagatcgagatggtgattatggaaagaagcaagctctctgagctggcggcctctaccagtgtgcaggaacagaatacaacagatgaggagaagagtgcggctgccacatgctctgagagtacacagtggtcaaggcctttccttgacatggtgtatcatgccttggattctcccgacgatgactatcatgcactctttgtactctgcctgttgtacgcaatgagtcacaataagggaatggaccccgaaaagctagaacgtatccagctccctgtcccgaatgccgcagagaagaccacctataaccatccccttgcagaaagactgataagaatcatgaataacgccgcacagcctgacggcaagattagactagccacattggagctttcatgcctgcttctgaaacagcaggttttaatgtcagccggttgcatcatgaaggacgtccacctagcgtgtcttgaaggagctcgcgaggaatccgttcacttggtgcggcatttttacaagggggaggatatatttctggatatgttcgaagatgagtatcgctctatgacaatgaaacctatgaacgtggagtaccttatgatggacgcaagcatcctcctgcctccgaccgggacaccactgacaggcattgacttcgttaaacgcctgccatgtggggacgtggagaaaactagacgggcgattagggtgttcttcatgctgagatccctgtccctccagctgcggggggagcctgaaacccagctccctctaacacgggaggaagacctgatcaagaccgacgacgtgctggatctgaataattccgacctgatcgcttgcactgtgatcacgaaggatggtgggatggttcaaaggttcctggccgtcgatatttatcagatgtctctcgtggagccagacgtttcccgcctgggatggggagttgtcaagtttgcaggcctgctgcaggatatgcaggtcaccggcgtggaggacgatagcagggccctgaacatcaccatacataagcccgctagtagcccgcattcaaagccgtttccaattttacaggccacgttcatatttagcgatcacattcgctgcataattgctaaacaacgcctggcaaaaggccggattcaggctcggcgaatgaaaatgcagcgtatcgcagccctgttggatttgcctatccagcctacgacagaggtgctcggttttggcctaggaagctcaacatctacccaacatttaccgttcaggttctatgaccaggggcggcgaggctcttctgatcccactgtccagaggagcgtgttcgcctcagtggataaggtgcctgggttcgcagtcgctcagtgcattaaccaacatagtagccctagtctgagctcccaaagccccccttccgccagcggaagtccctctggctctggatcaacctcccactgtgacagtggaggaacatccagctcttccactccgtccacagcccagtcccccgctgacgctcctatgagccctgagctgccaaagcctcacttaccggatcagttagtgatagtgaatgaaactgaagccgactcaaagccttcaaaaaatgttgccaggagcgccgctgtagaaacggcctctctgagtccatcactggttccagccagacaacctactatctcgctgttatgcgaagatactgccgacactctctccgtggagtccctgaccctggtgcccccagtggatccccatagcttacggtcccttacagggatgcctccactgtccactccagcagccgcatgtacagagccagtgggcgaggaagcggcatgcgcagagccagtaggcactgcggaagattag

SEQ ID NO: 113268 - DNA, 3162 bp, synthetic construct
  misc_feature 1..3162: note = Description of Artificial Sequence: Synthetic coding sequence
  source 1..3162: mol_type = other DNA
atgtttggtcgttcaagaagctgggtcggggggggacacggaaagacatctagaaacattcactctcttgaccatcttaaatacctgtatcacgtcctgaccaaaaacacgacagtgacggaacagaacaggaatctgctggtagagaccatacggtcaataaccgagattttaatttggggcgaccagaatgatagctcagtttttgacttcttccttgaaaaaaatatgtttgtgttcttcctaaacattctgcgccaaaaaagtggccgctatgtttgcgtgcagcttctgcaaacgttgaatattctgttcgagaacatatcccacgagacgagcttatactatctgctgtccaacaactacgttaacagcatcattgtccacaagtttgatttttccgatgaggaaattatggcctactatatatcatttctaaaaaccttatccctgaagctaaacaaccacaccgtgcactttttctacaatgagcatacgaacgatttcgccctgtataccgaggcgataaaattttttaaccacccagagagcatggttagaattgcagtccgtactattacattgaacgtgtacaaggtctctgtggataaccaggctatgctgcactacatccgagacaaaacagcagtgccttacttttccaacctagtatggttcatcgggagtcacgttatcgagctcgacgattgcgtgcagacagacgaagagcatcggaatcgagggaaactttctgaccttgtggccgagcatttggaccacttgcactatctgaatgatatactcattataaactgcgaattcttgaatgacgtccttacagaccatctcttgaacaggctgtttctccccttatatgtgtattccctagaaaaccaggacaagggaggggaacggccaaagatttccttacctgtgagtctctatctgttatcccaggtctttctgattatccatcacgcgccgctggtaaatagtctggctgaagttattctgaacggcgacctctctgagatgtacgcaaagaccgaacaggatatacagcggagcagcgccaaaccgagcattcgctgcttcattaaacccaccgagacactagagaggtcgttggaaatgaacaagcataaggggaagcgtagagtccaaaagaggccgaactataagaatgtcggtgaggaggaggacgaggagaagggtccaacagaggacgcgcaagaggatgctgaaaaggccaagggaactgaaggaggttcaaaggggattaaaacatcaggtgaatccgaagagatcgaaatggtcatcatggagaggtccaagctgagcgagctagctgcctccacaagtgttcaggaacaaaacaccaccgacgaagagaagtcagcggccgctacctgttctgagtccacccagtggagcagaccatttcttgacatggtgtaccacgctctcgatagtccagatgatgactatcacgcactcttcgtcctctgtttactttacgcaatgagccacaataaagggatggaccccgaaaagcttgagcgcatccagttacccgtgcctaatgccgccgaaaagacaacctacaatcaccctttggccgaaagattgattaggattatgaacaacgcagcccaaccagacggaaaaatccgattggcgacattggaactgtcctgcctgttactgaagcaacaggtgctgatgtccgccggttgcataatgaaagacgtgcatctggcctgtctcgagggggcccgggaggagtcagtgcacctcgtgcgccatttttataaaggcgaggacatcttcctggacatgttcgaagatgaatacaggtcaatgacgatgaagccaatgaatgtcgagtatctcatgatggacgcctctatactcctccctccgaccggcacccctttgaccggtatcgatttcgtcaagagactgccatgtggggacgtggagaaaacccggcgggccattcgtgttttcttcatgctgaggtccctttcactgcaactgcgaggagagccggagactcaactccctctgaccagagaagaggatctcatcaagacagatgatgtcctcgacctcaataactccgaccttatcgcttgtaccgtgataacaaaggacggaggcatggtgcagcgcttcctggcggtcgatatctaccaaatgtctcttgtcgagccagacgtgtcaaggctgggctggggggtagtcaagttcgctggcctgctgcaggacatgcaggtgactggggtcgaggacgatagtagagccctcaatattaccatccataaacctgccagttccccacactccaagccattccctatcctgcaagccaccttcatctttagcgaccacataagatgtattatcgctaaacagagactggctaaggggagaattcaggcccgccgtatgaagatgcagcgtattgccgcattgctggatctgccgattcagcccaccaccgaggtgttaggcttcgggctgggaagcagcacatcaacccagcatctgccattcagattttacgatcaagggcgccgcggctccagcgatcctaccgtgcaacgcagtgtgtttgccagtgtggacaaggtacctggctttgctgtagcacagtgcattaatcagcactctagccccagtctgtcctcccagagccccccctccgcgagtggttctcctagcggatctggttccacctcccactgtgattcagggggtacgtccagtagctctacgcccagtaccgcccagagccctgctgacgctcctatgtcccccgaacttcctaagcctcatctacccgaccaacttgttattgtcaacgaaactgaagcggattctaaaccaagcaaaaatgttgcacgtagcgctgcagtggaaaccgcttccctttccccctccctggtgcctgcccgtcaacctacaatctcactgctatgtgaggatacagcagatacactgagcgtcgaaagcctgactctggttccacctgtggatccacacagcctgcgttcgctgacaggaatgcctcccttgtcaactcccgcagctgcttgtacagagcccgtgggagaagaggcagcctgtgccgaaccagtggggacagctgaggattag

SEQ ID NO: 113269 - DNA, 288 bp, synthetic construct
  misc_feature 1..288: note = Description of Artificial Sequence: Synthetic coding sequence
  source 1..288: mol_type = other DNA
atgcatgatagcaataacgtggagaaagacataaccccatccgaactgcctgcgaacccggcaattcgcgccaactgccatcaggaaccctctgtatgtctgcaagccgcttgcccggaatcttggatcggcttccagcgaaaatgcttctatttttccgacgacaccaaaaactggacatcatcccagaggttctgtgactcgcaggacgccgatctggcccaagtcgagagctttcaggagctcgtgtcgtatccagggtctcggagggtttgtctcttcgagtag

SEQ ID NO: 113270 - DNA, 525 bp, synthetic construct
  misc_feature 1..525: note = Description of Artificial Sequence: Synthetic coding sequence
  source 1..525: mol_type = other DNA
atgattaaccccgagctaagagatggacgggcagatggcttcatacaccgcatcgtgcctaagctgatccaaaattggaaaatcggcctcatgtgtttccttagcatcataatcactaccgtatgtattatcatgatcgccacctggtctaagcatgccaagcctgttgcgtgctccggcgactggctaggcgttcgcgacaaatgtttctatttttccgatgacacacgcaattggacagcctctaagatattttgttcattgcaaaaggctgagcttgctcagatagacacacaagaggatatggaatttctgaagaggtacgctggaaccgacatgcactggattggcttgagccgcaaacagggtgacagttggaagtggacgaacgggaccaccttcaacggctggtttgaaataataggcaatgggagttttgcctttctcagcgcagacggggtgcactcctcacgggggttcatcgacataaagtggatttgcagcaagcctaaatacttcctctag

SEQ ID NO: 113271 - DNA, 2406 bp, synthetic construct
  misc_feature 1..2406: note = Description of Artificial Sequence: Synthetic coding sequence
  source 1..2406: mol_type = other DNA
atgcatcacaggatgaacgagatgaatctgagtcccgttggaatggaacaactgactagtagcagcgtttccaatgcccttcctgtttctgggagccatctcgggttggcggcaagtccaacacattccgccatccctgccccggggctgccagtggcgattcctaacttggggccctccttgtctagcctgcccagcgctctgtcactcatgctgccaatgggaataggtgaccggggagtgatgtgcggccttcccgagagaaattatacgctgcctccaccaccctatccccacttggagagtagctattttcgaaccatcctccccggaattctttcttatctggccgatagacctccacctcagtatatccaccctaactcaattaatgtggacggaaatactgccctcagtattacaaacaatcccagcgcactggacccttatcaatcaaatggaaatgtggggttggagccaggaattgtgtctatcgattcccgcagcgtgaatacacatggggcacagtcccttcatccatctgacggacatgaggtcgctctggacacagcgatcactatggagaatgtcagtagggttacatctcctatctcaacggatggcatggcagaagaacttaccatggacggtgtggcgggagagcactcacagatcccaaatggaagcagaagtcatgagccactgagcgtggacagtgtgtccaataatctggctgccgacgcggtgggtcacggtggggttatcccgatgcatggaaatggcctcgaactgcccgttgttatggagacagatcacattgcctctagggtcaacggtatgtccgattctgccctgtctgacagcatccacacagtggccatgtcaacaaacagtgtgagcgtggcgttgtccacatcccacaaccttgccagtctggagtctgtttctctgcatgaagtgggcctttcccttgagcctgtagctgtgtcatctatcacccaggaggtcgcaatgggcaccggccatgtggatgtcagttccgatagtctgtctttcgtgtccccttcattacaaatggaggactccaatagtaataaggaaaatatggctacacttttcacaatctggtgtactctttgtgatcgcgcttacccctccgactgtcctgagcatggccccgtgaccttcgtccccgatacacccattgaaagtcgggcacgtctgtctcttccaaaacagctggtattgcgccagtctatcgtgggcgcggaagtgggtgtctggacgggcgaaaccatcccagttcggacatgcttcggtccattaatcggccagcagtcccatagcatggaggtggccgaatggacagacaaagccgtcaatcatatctggaagatttaccataatggtgtgctcgagttttgcataatcacaacggacgagaacgagtgcaactggatgatgtttgtcagaaaggcgcgcaacagggaggaacagaatttagttgcgtacccgcacgatggcaagattttcttctgtactagccaggatataccacccgaaaatgagctgctgttctactactctcgcgattatgcccaacagatcggcgtacccgaacaccccgacgtccacctgtgtaactgcggaaaagagtgcaactcttacaccgagtttaaagcacatttaacttcccacatacacaaccacttgccgactcagggccacagcggatcacatgggccatctcattccaaagagcgcaagtggaagtgttccatgtgccctcaggcttttatctctcccagtaaattgcatgttcatttcatgggacacatggggatgaagccacataagtgtgatttctgtagtaaggcgttttcagatccttccaatctgagaacccacctgaagatccataccggacaaaaaaattatcgatgtaccctctgtgacaaatcttttacccagaaagcgcatctggagtctcatatggtaatccatactggggagaagaatctcaaatgtgactattgtgataagctgtttatgcggcggcaggacctgaaacagcacgtactgatccatacccaagagaggcagattaagtgcccgaagtgcgataaactgtttctgcgaaccaatcatttgaaaaagcacctgaactctcacgaagggaagagggactacgtctgcgagaaatgtactaaggcctacctgacaaaataccacctgacgcggcatctaaagacatgcaagggaccaacctcttcatcgtcagccccagaggaggaagaagaagacgacagcgaagaggaggatcttgccgacagtgtaggcactgaggattgtcggattaattcagctgtgtacagcgcggatgagtccctgtcggcccacaaatag

SEQ ID NO: 113272 - DNA, 465 bp, synthetic construct
  misc_feature 1..465: note = Description of Artificial Sequence: Synthetic coding sequence
  source 1..465: mol_type = other DNA
atgcatgacagcaataatgttgaaaaggatataactccctctgagctgcctgccaacccagcaatcagagcaaattgccatcaagagcctagcgtttgcctgcaagctgcttgccccgagtcctggattggtttccagagaaaatgtttctacttcagtgacgacaccaaaaactggacctccagccagagattctgtgactcacaggacgcagacctggcgcaagtagaaagttttcaggaactgaactttctgctcaggtataagggaccgtcagaccattggataggactttcccgcgaacagggccagccgtggaaatggataaacgggactgaatggactcgccagttccccattctgggagcaggcgaatgtgcttatctgaatgacaagggagcatcttctgcgaggcattataccgaacggaaatggatttgctctaaatcagacattcatgtctag

SEQ ID NO: 113273 - DNA, 585 bp, synthetic construct
  misc_feature 1..585: note = Description of Artificial Sequence: Synthetic coding sequence
  source 1..585: mol_type = other DNA
atgcacgactctaacaatgtcgaaaaagacataaccccctctgaattacccgctaatccaggctgccttcacagcaaagaacacagcattaaggcaactctgatctggcggctgttctttttgatcatgtttttgactatcatcgtttgcgggatggtcgctgccctgagcgccatccgggctaattgccaccaggagccatctgtgtgtctccaagctgcctgtcccgaatcttggattggctttcagagaaaatgcttttacttttctgatgatactaagaattggaccagttcacagcgcttctgcgattcacaggacgctgatctggcccaagtcgaaagcttccaggagttaaactttctcctccgatacaaaggaccctctgaccattggattggcctgtctcgcgaacagggtcaaccctggaagtggatcaacggtaccgagtggacgagacaacttgttatgaaagaagatggcgctaatctctacgttgccaaagttagtcaagttccgcggatgaatcctcgacccgtcatggtgtcctaccctggctcgcgcagagtgtgtttgtttgagtag

SEQ ID NO: 113274 - DNA, 576 bp, synthetic construct
  misc_feature 1..576: note = Description of Artificial Sequence: Synthetic coding sequence
  source 1..576: mol_type = other DNA
atgcacgatagcaacaatgttgaaaaagatattaccccgagcgagctccccgcgaacccaggctgcctccactccaaagaacacagcataaaagccaccctgatttggagactattttttctgattatgtttctaaccataatcgtttgcggcatggtagccgcactctccgctatccgggccaactgtcatcaggagccatctgtctgcctgcaggcagcctgccccgaaagttggatcggctttcagcgaaaatgcttttacttcagtgatgacactaagaattggacgagtagtcaaagattctgcgattcccaggatgccgacctggcccaggttgaatccttccaggagttgaatttcctcctccgctacaagggcccctcagatcactggatcggcctttcccgcgagcagggtcaaccatggaaatggataaatggaaccgaatggactagacagtttcccattctgggggccggggagtgcgcctatctgaatgataaaggagcgtcatcggcgagacactacaccgaacggaaatggatttgctcaaagtccgatattcatgtctag

SEQ ID NO: 113275 - DNA, 399 bp, synthetic construct
  misc_feature 1..399: note = Description of Artificial Sequence: Synthetic coding sequence
  source 1..399: mol_type = other DNA
atgcatgattccaacaatgttgagaaagatatcactccttccgaactgcctgcaaaccccgggtgtttgcattccaaagaacactctatcaaagcaacactgatttggcgcttgttcttcctaatcatgtttctgaccatcatcgtctgcggcatggtggcggccctgtctgcaatccgggccaattgtcaccaggagcctagcgtgtgcctgcaggctgcatgtcctgagtcttggattggttttcagagaaagtgcttctacttctctgacgacacaaaaaattggacatccagccagcgcttctgtgacagtcaagacgctgaccttgcccaggtcgagtccttccaggaactcgtaagttacccagggtctcgtagggtttgcttgttcgaatag

SEQ ID NO: 113276 - DNA, 891 bp, synthetic construct
  misc_feature 1..891: note = Description of Artificial Sequence: Synthetic coding sequence
  source 1..891: mol_type = other DNA
atgtccgattctaaggagccaagggtgcagcaactgggactcctgggatgccttggtcatggagccctggtgctacagctgttatcattcatgctgcttgccggagttttggttgctatcttggtgcaggtctccaaggtgccaagctcactcagccaggaacagtcagagcaggacgcaatttaccaaaatttaacccagttaaaggcagcagtgggcgaactgtcagagaaaagcaagctgcaagagatctatcaagaactcacgcagctgaaggcggctgtgggggagctgccggaaaaatcaaaacttcaagaaatctatcaagagctgacaaggctgaaggcggccgtgggagaactgcccgaaaaatcaaaactgcaggaaatctaccaggaacttacaaggctgaaggcggccgttggcgaattaccagaaaaatctaagctccaggaaatctaccaggaactgaccaggctgaaggcggcagtcggggaactgcctgaaaagtccaagctgcaggagatctatcaggaactgaccgagctgaaagcagccgtgggtgagctcccggaaaagtccaaattgcaagagatctaccaggaattgactcaactcaaagctgccgtgggagaattgcctgaccagtccaagcagcagcaaatataccaggaactgacagatctgaagacggctttcgaacgcctttgcaggcattgccctaaagactggaccttcttccagggcaactgttacttcatgtcgaattcacagcgtaattggcacgactcggtgactgcctgtcaggaggtgcgcgctcagctcgttgtgatcaagaccgcagaggaacagctccccgcagtgttagaacagtggaggacgcagcagtag

SEQ ID NO: 113277 - DNA, 2379 bp, synthetic construct
  misc_feature 1..2379: note = Description of Artificial Sequence: Synthetic coding sequence
  source 1..2379: mol_type = other DNA
atggctgctccatcactcttgaactggcgccgtgttagctcctttacgggccccgtccctagagctcgacacggccatcgggcggttgccatccgtgaattaatgatcatcttcggggggggcaatgagggtatcgccgatgaactccacgtgtacaacacagcaacaaaccagtggttcctgccagctgtgcggggtgacattcctcccggttgtgctgcacacggcttcgtttgtgacggcactcgcatcctcgtgttcggcggcatggtggagtacgggcgctactctaacgagctttatgagttgcaggcatcccgctggctttggaaaaaagttaagccgcaccctccaccttcaggcctacctccctgtcctcgcttgggccattcattctctctttacggcaataagtgctatctcttcgggggactggccaacgaatctgaggattctaacaataatgtaccacgatacctcaatgacttctacgagctggagctgcaacacggctcaggcgttgttggctggtccatccccgtgaccaagggcgtcgtgccttctccacgtgagagccacactgctgtgatttactgcaagaaggactctggtagtcctaaaatgtacgtgttcggaggcatgtgtggagccagacttgatgatctctggcagttggatctagagaccatgtcatggtcaaagcctgaaaccaaaggcaccgttccattgccccgcagtctacacactgcaagcgtaatcggcaataagatgtacatttttgggggttgggtcccacacaagggcgagaacaccgagactagcccacatgactgcgaatggcggtgcacaagttcctttagctacctgaatctggataccaccgaatggactacacttgtcagcgattcgcaagaagacaaaaagaattcgagacctagaccccgcgctggacactgtgccgtggcgatcgggacccgcctttatttctggagcggacgggacggctataaaaaagcactgaattcacaggtgtgttgtaaagatctctggtatctcgatacagagaaaccaccagctccatctcaagtgcagctgattaaggcgaccaccaacagcttccatgtgaaatgggatgaggtgtccaccgtggagggctacctgttgcagttgtccacagacttgccataccaggcagcgagctctgacagttcagccgcgccaaatatgcagggagtgaggatggacccacataggcaaggaagcaataacatcgtgccgaattccatcaatgacacaatcaactcgaccaaaacggagcagccagccaccaaggaaaccagcatgaagaacaaacctgactttaaagcactcaccgattcaaacgctatcctttatccaagcctggcctcaaatgccagtaatcataattctcatgttgtcgacatgttgcggaagaacgagggaccccatacctccgccaatgtcggagtgctgagcagctgcctggacgtccgtaccgtcatcccagaaacttccgtgagtagcaccgtaagctcaactcaaaccatggtgacccaacagaccattaagaccgagtcatcatcaacaaacggagcagtcgtgaaggacgagacaagtctcacgacgtttagcacgaaatctgaagtagacgagacttacgcattgcctgcaacaaaaatttcgagggtcgagacacacgccaccgctacaccattcagtaaagagacacctagtaatcccgttgctacagtgaaagcaggggaacggcagtggtgcgatgtgggcatattcaaaaacaatacagctctcgtgtctcaattttacctcctgcccaaagggaagcaaagtatctctaaagttggaaatgccgatgttcccgactacagcctgctgaaaaaacaagacctggtgcctggcacgggctatcgtttccgggtcgccgccataaatggctgcggcattggacctttttctaaaatcagcgaatttaagacatgcatcccaggctttcccggtgcaccatcagccgttaggatttccaaaaacgtcgaagggattcacctgagctgggagccccctacttctccatctggcaatatcttagaatatagtgcatacttggcaatacgaactgcgcagatccaggataacccaagccaactggtgttcatgcgcatttactgtggactgaaaacatcttgcatcgtgactgctggccagctagcgaatgcacacatcgactacacttcacggcccgcaattgtctttaggatttcggcaaaaaacgagaaaggatacgggcccgcgacccaggtcagatggctgcagggaaataacaaaaaagcaccactcaactag

SEQ ID NO: 113278 - DNA, 498 bp, synthetic construct
  misc_feature 1..498: note = Description of Artificial Sequence: Synthetic coding sequence
  source 1..498: mol_type = other DNA
atgactagtgaaattacgtatgctgaggtccggttcaaaaatgaattcaaaagctctggcattaacaccgcatcttctgccgagaccgcgtggtcctgctgccctaagaactggaagtcctttagctctaactgctatttcatatcaactgaaagcgcaagttggcaggactcggagaaggactgtgcacggatggaggctcatttgctggtgatcaacacccaggaagagcaagacttcatctttcagaatctgcaggaggagagcgcgtacttcgttggcctgtccgaccctgaggggcagcgacactggcaatgggtggaccagacgccctataatgaaagttcaacattttggcatcctcgtgagccctctgatcctaatgagcgctgtgtggtgctgaattttagaaaatcccccaaacgatgggggtggaacgacgtaaattgcctgggtcctcagcggtctgtgtgcgaaatgatgaagatccacctctag

SEQ ID NO: 113279 - DNA, 615 bp, synthetic construct
  misc_feature 1..615: note = Description of Artificial Sequence: Synthetic coding sequence
  source 1..615: mol_type = other DNA
atgacctctgaaatcacttatgcggaggtaaggtttaagaacgaattcaaaagctcagggattaacacggcatcttctgctgcctctaaagaaagaacagcaccccacaagtcaaacacaggtttccccaagcttctttgtgcctcgctcctcatcttcttcctgctgctggcaatttcttttttcattgcatttgtgaagacggcttggtcatgctgtcccaaaaattggaagagcttttcttctaattgttactttatatcaacagaatctgcaagctggcaggacagcgaaaaggattgtgctcgcatggaagcccacttgctcgtgatcaacacacaagaggagcaggactttatctttcagaatctgcaggaagagagcgcttattttgttggcctaagtgatcctgagggacaacggcactggcagtgggtggaccagaccccctacaatgagtcctcaactttttggcaccctcgggagccgtctgacccaaatgagcgatgtgtcgtcctcaattttagaaagtccccaaagaggtggggatggaatgacgtgaattgtctcgggccgcagcgctccgtgtgcgagatgatgaagatccatctctag

SEQ ID NO: 113280 - DNA, 597 bp, synthetic construct
  misc_feature 1..597: note = Description of Artificial Sequence: Synthetic coding sequence
  source 1..597: mol_type = other DNA
atgacgagcgaaatcacatatgccgaggtgaggtttaagaacgaatttaagtcctcaggtattaacacggcttcatccgccgttttctttcagaagtacagccagctgctggaaaagaagacaactaaggaacttgtccatactactcttgagtgcgttaaaaagaatatgcccgtggaagagaccgcttggagctgctgccctaagaactggaagtctttcagcagcaactgctacttcatcagtactgagtccgcttcatggcaggactctgagaaagattgtgccagaatggaagcacatctgcttgtcattaatacacaggaggagcaggatttcatctttcagaatctgcaagaggagagtgcttacttcgtggggctatctgatcccgaaggccaacgccactggcagtgggtggaccagaccccctacaacgagtcgagcactttctggcaccctagagagccatctgacccgaacgagagatgtgttgtacttaactttcgtaagtcgcctaagaggtggggttggaatgatgtgaactgtctgggaccccaacgtagtgtctgtgagatgatgaagatccacctgtag

SEQ ID NO: 113281 - DNA, 549 bp, synthetic construct
  misc_feature 1..549: note = Description of Artificial Sequence: Synthetic coding sequence
  source 1..549: mol_type = other DNA
atggtccccgaagaagaacctcaggaccgcgtgccacacaattttatgtatagtaagaccgtaaagagattgagcaagctgagagagtatcagcagtaccatccttccctgacctgcgtcatggagggtaaggatatagaagactggagttgctgtccgacaccctggacatcattccagtcctcttgttattttatctcaacgggcatgcagtcttggacaaaatcccagaagaactgtagcgtgatgggtgccgacttggtggtgattaataccagagaggagcaggactttatcatccagaatctgaagcgaaatagtagctatttcctcggcctgtctgatcccggaggaagaagacactggcagtgggtggatcagaccccatataacgaaaatgttacattctggcacagcggcgaacctaataacctcgacgaacgatgtgccatcatcaattttaggagtagcgaagaatgggggtggaacgacattcattgccatgtgccccagaagtcaatctgcaagatgaaaaagatctacatttag

SEQ ID NO: 113282 - DNA, 642 bp, synthetic construct
  misc_feature 1..642: note = Description of Artificial Sequence: Synthetic coding sequence
  source 1..642: mol_type = other DNA
atggtgccggaggaggagcctcaggaccgggagaaaggcctatggtggttccaactgaaagtctggagtatggcagtggttagcatcctcttgctgagtgtgtgctttaccgtctcctccgtggtcccgcacaactttatgtacagcaagaccgttaagcgcctcagtaaactgcgcgaataccagcagtaccacccgagcctgacatgtgtcatggagggcaaagacattgaggattggagctgctgtccaaccccttggacctcattccagagctcttgctatttcatttcaaccgggatgcaatcatggacaaaaagccagaagaattgctctgtcatgggagcggatttggtggtaataaacactagagaagagcaagatttcattattcagaatctgaaacgcaactcttcctattttctgggccttagcgaccccggtggacgccgtcactggcaatgggtggaccagactccctataatgagaacgtaacgttttggcactctggcgaaccaaacaatctggatgaaagatgcgcgataattaattttaggagctccgaggaatgggggtggaatgacatccattgccatgtcccacagaaatccatatgcaaaatgaaaaagatctacatctag

SEQ ID NO: 113283 - DNA, 549 bp, synthetic construct
  misc_feature 1..549: note = Description of Artificial Sequence: Synthetic coding sequence
  source 1..549: mol_type = other DNA
atggtgcctgaagaggagccacaggatcgggtgcctcataatttcatgtattctaaaaccgtcaagaggttaagcaaactgagagagtatcagcaataccaccccagtctgacatgtgtaatggaaggaaaagatattgaggactggagctgttgccccactccctggacctcctttcaatcctcctgttactttatctcgaccggcatgcagagctggaccaagagccaaaaaaactgttcggtcatgggagctgacttagtggttataaatactagggaggaacaggattttatcatccagaacctcaaacgcaacagctcctactttctgggcctctccgatccagggggccgtagacactggcagtgggtggatcaaaccccttacaacgagaatgtgaccttttggcacagtggtgagcctaacaatttggatgagagatgtgcgataatcaacttcagaagctcagaagaatggggatggaatgacatccactgtcatgtgccccagaagtcgatctgcaagatgaaaaagatctacatctag

SEQ ID NO: 113284 - DNA, 642 bp, synthetic construct
  misc_feature 1..642: note = Description of Artificial Sequence: Synthetic coding sequence
  source 1..642: mol_type = other DNA
atggtcccagaagaagaaccccaagatcgggaaaagggtctctggtggtttcagctgaaagtttggagcatggccgtggtgtccattttgttgctctcggtctgtttcacagtaagttctgtggtacctcataatttcatgtattctaagactgtgaaaaggctctccaagttgcgggaataccagcagtatcatccttctctcacatgtgtgatggagggcaaggatatagaagattggtcatgctgccccactccctggacatcttttcaatcttcatgttatttcatttccacaggaatgcagtcgtggactaaatctcagaagaactgtagcgtcatgggggccgatctggtcgtaatcaatacccgtgaggagcaggatttcatcatccagaacttaaagagaaactcatcttatttcctgggcctctcggaccccggaggccgccgacattggcagtgggtggaccaaacgccatataatgaaaacgtgacattctggcattctggagaaccaaataatctcgacgaacgctgcgctatcattaactttcgctcaagcgaggagtggggttggaacgacatacactgccatgtccctcagaagagcatctgcaagatgaagaagatttacatctag

SEQ ID NO: 113285 - DNA, 648 bp, synthetic construct
  misc_feature 1..648: note = Description of Artificial Sequence: Synthetic coding sequence
  source 1..648: mol_type = other DNA
atgggtcttgaaaagcctcagtccaagctggaaggagggatgcatcctcagctgattcccagtgtaatcgcggtggtttttatcttgcttctttctgtctgttttattgcgtcatgtctcgtgacacaccacaatttttcgagatgcaaacgaggcactggggtccacaaattagaacatcatgctaagctgaaatgcatcaaggaaaaatccgagctcaagtctgccgaggggtctacatggaactgttgtccaattgattggagagcctttcagtctaactgctatttccccctgaccgataacaagacgtgggcagaaagtgaacgcaactgctcagggatgggagctcacttaatgacaatttccaccgaagcggagcagaactttatcatccagtttttggataggagattgagctattttctcgggctgagggacgaaaacgcgaagggacagtggaggtgggtcgatcagactccattcaacccacggcgagtcttctggcacaagaacgagccggataattcccagggagagaactgcgtggtgctggtttacaatcaagacaaatgggcctggaacgacgttccttgtaatttcgaagcttcccgtatctgcaagattcccggcaccacactgaactag

SEQ ID NO: 113286 - DNA, 435 bp, synthetic construct
  misc_feature 1..435: note = Description of Artificial Sequence: Synthetic coding sequence
  source 1..435: mol_type = other DNA
atgggattagaaaaacctcaatctaagctggaggggggaatgcatccccagctgatcccttctgtgatcgccgtggtcttcatcttgctcctttccgtctgctttatcgcctcttgcctcgtgacacatcacaactttagccgctgtaaaaggggaaccggtgtgcacaagctggagcaccacgccaagttaaagtgcatcaaggaaaaatcagaactcaagagcgccgaggggagcacttggaactgctgtcccatagactggagggcattccaaagcaattgttactttccacttacagacaataagacctgggcagagagcgaacggaactgctcaggtatgggagctcacttgatgaccatttctactgaggccgagcagaacttcatcattcaatttctagatcggagactctcctattttctgggttag

SEQ ID NO: 113287 - DNA, 660 bp, synthetic construct
  misc_feature 1..660: note = Description of Artificial Sequence: Synthetic coding sequence
  source 1..660: mol_type = other DNA
atgaactcttctaagtcgtccgaaacccagtgtactgagcgagggtgcttttcctcccagatgtttctgtggacggtggctggaattcccatactgtttcttagcgcctgtttcatcactcggtgcgtggtcacttttcgcattttccaaacatgtgatgagaagaaatttcaattgcctgagaatttcaccgagctgtcttgctacaactatggctccggctccgtgaagaattgttgccctcttaactgggagtactttcaatcctcatgttattttttcagcaccgatacaattagttgggcactcagcttgaagaactgttcagcgatgggggcacatctagtggtgattaattcgcaggaagaacaagaattcctgtcatacaagaaacccaaaatgagagaatttttcattggcctctctgaccaagttgtcgaaggacagtggcagtgggtcgatgggactccactcactaaatccctcagcttttgggatgtgggcgagccgaacaatatcgcaacgctcgaagactgcgctactatgcgtgattcaagcaatccacgccagaactggaacgatgtcacttgtttcctcaactatttcaggatatgcgaaatggtcggaatcaaccctctgaacaagggcaaatccctgtag

SEQ ID NO: 113288 - DNA, 1134 bp, synthetic construct
  misc_feature 1..1134: note = Description of Artificial Sequence: Synthetic coding sequence
  source 1..1134: mol_type = other DNA
atgagtgactcaaaagaacccagggtccagcagctaggactcctcgaagaggatcccaccacaagcggcatacggctgttccctcgcgacttccagttccagcagatacatggacataagtccagcacgggctgtctgggccatggcgccctagtgttacagctcttatcgtttatgcttctggcaggtgtcctagtagccattctagttcaggtgtctaaagttccgtcttctctgagccaggaacagtccgaacaggatgctatttatcagaatttgactcagctgaaggcagccgtgggagagctctccgaaaagagtaagctgcaagaaatataccaggagttaacacaacttaaggctgccgtcgtgggggagctcccagagaaaagcaagttacaagaaatttaccaggagcttactcgcctgaaagcagcagtgggtgaactgccagaaaagagtaagctgcaggaaatctaccaggagctgacacgactgaaagcagctgtgggcgagctgcctgagaagtccaaactgcaggaaatctatcaggagctgaccgagctcaaagctgctgtgggggagctgcctgagaaaagcaaattacaggagatctatcaggaactgacacagcttaaagccgccgttggcgaactgcccgaccagagcaaacagcagcagatataccaagagttgacagacctcaagactgctttcgaacgtctctgcagacattgtcctaaagattggacctttttccaggggaactgttactttatgtccaattcccagagaaattggcacgactctgttacagcatgccaagaggtgcgagcccagctcgttgtaattaaaactgccgaggagcaaaacttcttgcagcttcagacatctcggagtaaccgattctcttggatgggactgtcagaccttaaccaggaagggacatggcagtgggtcgacggcagtcctctttcaccctccttccagcggtactggaatagcggcgagccgaacaattcagggaatgaagactgcgccgaatttagcggcagcggatggaacgacaacaggtgtgacgtggataattattggatttgcaagaagcctgcggcatgtttcagagatgaatag

SEQ ID NO: 113289 - DNA, 1200 bp, synthetic construct
  misc_feature 1..1200: note = Description of Artificial Sequence: Synthetic coding sequence
  source 1..1200: mol_type = other DNA
atgagtgacagtaaagaaccacgcgtccagcagttaggcttgctggaagaggatccaactacatcaggcattcgcctgtttccgcgggactttcagttccagcagattcacgggcacaaatcttcaacgggctgcctggggcatggcgcattggtgctgcagctgctctccttcatgcttctcgctggcgttttagtggccatcctggtccaggtctctaaggtaccgagcagcctgtcccaagaacagtccgaacaggatgccatctatcagaatctgacgcaactgaaagccgctgtgggggaactctccgagaagagtaagttgcaagaaatctatcaggagctgacccagctgaaggctgctgtgggcgagctgccagaaaagtctaaactgcaggaaatctaccaggaactgactcggctcaaagctgccgtcggagagctccccgagaagagcaaactgcaggagatctaccaagagttgaccagactgaaagccgccgtaggcgagctgcctgaaaaatcgaagctgcaggaaatataccaggagctcacaagactgaaggccgccgtgggggaactgcccgaaaagagcaagttacaggagatctatcaggaacttacagagttgaaggcagctgtgggagaactgcccgaaaagtcaaagttgcaggaaatttatcaggagttaacccagctgaaagccgcagtgggcgagttaccggaccagtccaagcagcagcaaatctaccaggagctgaccgacctgaaaacggcttttgaacggctttgccgacattgtccaaaggactggacattctttcaaggaaattgttactttatgagtaacagccagaggaactggcacgattctgtgactgcatgtcaggaggtccgggctcagctggtcgtaatcaagaccgccgaagaacaaaatttccttcagctccagaccagtcgatccaatcgtttctcatggatgggcctttccgacctcaaccaggagggcacgtggcagtgggtggatgggagtcccctgagcccctctttccagcggtattggaattccggcgagcccaataatagtgggaatgaggactgtgctgagtttagcgggagcgggtggaatgacaacagatgtgacgtggacaactactggatctgtaagaaacctgctgcctgctttcgggatgagtag

SEQ ID NO: 113290 - DNA, 1047 bp, synthetic construct
  misc_feature 1..1047: note = Description of Artificial Sequence: Synthetic coding sequence
  source 1..1047: mol_type = other DNA
atgtcagattccaaggagcccagagtgcaacagctgggattactgggttgcctgggtcatggagcactggttctccaactcttgagctttatgctgctggccggtgttctggttgctattctcgtgcaagtgagcaaggttccaagctccctgtcccaggagcagtctgagcaagacgcaatttaccaaaacctcacccagctaaaagccgccgtcggagagctttcagaaaaaagtaaactccaggaaatctaccaggaactaacgcaactcaaagctgcagtgggggagcttccagaaaagagtaaattacaggaaatttatcaggagttaacgcgactgaaagcagcagtcggagagcttcccgagaagagcaagttgcaggaaatttaccaggagctaaccagacttaaagccgctgtcggagagctgcctgaaaaatccaagttacaggaaatctatcaggaactgacagaattgaaagccgccgtgggggagctgcctgagaagtctaaactgcaggaaatctatcaggaactgacacagctaaaagcagctgtgggagagttgcctgatcaatctaaacagcagcagatctaccaggaactcactgatctgaaaactgccttcgagaggctgtgtcggcattgtccaaaagactggacttttttccaaggaaattgttatttcatgagcaatagccagcgcaactggcacgacagcgttaccgcctgtcaagaggtgagggcccagctggtggtcatcaaaacagccgaggagcaaaacttcctacagctacagacttccaggagtaatcggtttagttggatgggcctcagcgatttaaatcaggagggcacctggcagtgggttgacggtagccctctaagcccgtcttttcagcgctattggaatagtggtgaaccaaataactcaggtaacgaggattgcgctgaatttagtggctccgggtggaatgacaacagatgtgatgtagataactactggatctgcaagaagccagctgcgtgtttccgggatgagtag

SEQ ID NO: 113291 - DNA, 975 bp, synthetic construct
  misc_feature 1..975: note = Description of Artificial Sequence: Synthetic coding sequence
  source 1..975: mol_type = other DNA
atgtcagatagcaaggagcctagggtccagcagctgggacttctagaagaggacccaacgacatccggaattaggttgttccctcgagattttcaattccagcagatacacggccacaagtcctcaacgggttgcttgggtcacggagctcttgtgctgcagttactgagtttcatgctcctggcaggggtgctggttgctattctggttcaggtcagtaaggtaccctctagcctttcacaggagcagagcgagcaggacgccatttaccagaaccttacccagttgaaagccgctgttggggagttatcagagaagtccaagcttcaggagatttaccaggaactgactcaactgaaagcggccgtgggggagctgccggagaagtccaaactacaggagatctaccaggagctgactaggttaaaggcagctgtgggggaacttccggaaaaatctaaactgcaggaaatttatcaagaactaactcgcctgaaggcagcggtgggagagctgcccgaaaagtccaagctgcaggaaatctaccaggaactcacacggctcaaggccgcggtcggtgagttgccagagaagagcaaacttcaggaaatataccaagaattgactgagctaaaggcagcggtgggtgagcttcccgaaaaatctaaattgcaagagatctaccaggaactgacccagttgaaagcggccgtgggtgagcttcccgatcagtctaaacagcagcagatctatcaggaactgactgatctcaagaccgcgttcgagcgtctgtgcagacattgccctaaagattggacattctttcagggcaactgctattttatgtctaattcccagcgaaattggcacgactccgtcacagcttgccaggaagtcagagcccagctggtggttattaagactgccgaagaacagttacccgcagtgctcgaacagtggagaacacagcagtag

SEQ ID NO: 113292 - DNA, 771 bp, synthetic construct
  misc_feature 1..771: note = Description of Artificial Sequence: Synthetic coding sequence
  source 1..771: mol_type = other DNA
atgagcgactccaaagaaccaagggtccaacagttaggccttttagtctccaaagtgccaagtagtttatcccaagagcagtcagagcaagacgctatttatcaaaatttgactcagctaaaggccgctgttggagagctcagtgaaaagtcgaagctgcaagagatctaccaggagcttacacagctgaaggcggctgtcggtgagctgcccgagaaatctaagctccaggagatctaccaggaactgacacgcctgaaggccgctgtcggcgagctacccgagaagagtaaactgcaggaaatataccaggagctgactcgccttaaagctgccgtgggggagttacccgaaaaatccaaactgcaagagatttatcaggagctcacacggctgaaggccgctgtcggcgaactgcccgagaagagtaagctccaggaaatctatcaggagctgaccgaactgaaggcggccgtcggcgagctgccggagaagtccaaattgcaggagatataccaagagcttacacagctgaaggccgctgtgggcgaattgccggaccagagcaagcagcagcagatttaccaggagttgaccgacctgaagacggccttcgagagactgtgtagacactgcccaaaggactggaccttcttccagggcaactgttacttcatgtctaattcacagagaaactggcatgattccgttactgcatgccaagaggtgagggcgcagctagtggttatcaaaacagccgaggaacaatag

SEQ ID NO: 113293 - DNA, 999 bp, synthetic construct
  misc_feature 1..999: note = Description of Artificial Sequence: Synthetic coding sequence
  source 1..999: mol_type = other DNA
atgagtgattcgaaagagcctcgcgtccagcagctggggctcttagaagaggatccaaccacttctggcattcgtttatttccacgggattttcagtttcagcagattcacggccacaagtcatccaccgtgccattcctgctgggtcctgtgtccaaagttcctagcagtctgtcccaagagcagtcagagcaggacgcaatctaccagaatctgactcaattgaaggcagcagttggggaactgagtgaaaaatctaagttgcaggaaatctaccaggaactcacacaattgaaagctgctgtgggagaattacccgagaagagtaaactccaagagatctatcaggaactgacccgccttaaggcagccgttggtgagctccccgaaaaatccaaactccaggagatttatcaggaactgacgcgcctaaaggcagccgtaggggagctgccagagaaatccaaactgcaggaaatctatcaggagctcacagagctgaaagccgccgtcggagaactgccggagaaaagcaagctgcaggagatataccaggaactgacccaacttaaggccgcggtggaacggttgtgccgtcactgtcccaaggattggacttttttccagggcaactgttacttcatgagcaactcgcagcgaaactggcatgatagcgtcaccgcatgccaggaagtgcgagctcaactcgtggtgatcaaaaccgccgaggaacagaacttcctgcagctccaaaccagcagaagtaataggtttagctggatgggactcagcgatctgaatcaagaagggacttggcagtgggtggatggttctccattaagcccgagcttccaaaggtactggaactccggggagcccaacaactcaggtaacgaagattgcgccgagttttctggttccggctggaacgataatcggtgcgatgtcgacaactactggatctgcaaaaagcccgccgcttgcttccgcgacgaatag

SEQ ID NO: 113294 - DNA, 1164 bp, synthetic construct
  misc_feature 1..1164: note = Description of Artificial Sequence: Synthetic coding sequence
  source 1..1164: mol_type = other DNA
atgtcggattcaaaagagcctagagtgcaacagctcggactcctggaggaagacccgacaaccaactttcagttccagcagatccatggacacaagagctcgactggatgcctggggcacggcgctctggtattgcagctcctgtccttcatgctgctcgctggcgtcctgccgcggttaagtaaggtaccgtcctcgctttcacaggaacagtccgaacaggacgccatatatcagaatctcacccagttgaaggctgctgttggagaacttagtgagaagagcaagctgcaggagatctatcaagagctgacccaattaaaggctgctgtaggcgagctgccagaaaagagcaaactgcaagaaatatatcaagagttaacccggttgaaagctgccgtgggggaacttccggagaagagtaagcttcaggaaatctaccaagagctgaccaggctcaaggcagccgttggtgaattgcctgagaaatcaaagctccaggaaatttaccaggagctcacacgcttaaaggccgcggtaggcgaactccctgagaaaagtaagctccaagagatttatcaggagctgacggaactgaaagccgctgtcggggaactccccgagaagagcaagctgcaagagatctaccaggaactcacccagttaaaggccgccgtgggcgagctgcctgaccagagcaaacagcagcagatctaccaagaactgaccgatcttaagacggccttcgaaagactgtgccgccattgtcctaaggattggacattctttcagggcaactgttactttatgagtaactcacagaggaactggcatgattccgtgacagcatgccaagaggtgcgtgcccaactcgtggttatcaagacagcagaagaacagaactttctgcagcttcagacaagtagaagcaaccgtttttcatggatggggcttagtgatctgaaccaggagggtacatggcagtgggtcgatggatctcccttgagtccctcattccaaaggtattggaactcaggggaaccaaataatagcggaaatgaggattgtgctgagttctccggcagcggatggaacgacaatcggtgcgatgttgataactattggatttgcaagaaacccgccgcctgctttcgggatgagtag

SEQ ID NO: 113295 - DNA, 567 bp, synthetic construct
  misc_feature 1..567: note = Description of Artificial Sequence: Synthetic coding sequence
  source 1..567: mol_type = other DNA
atgaattggcatatgataatctctggcctgatcgtcgtcgtattgaaagtggtggggatgacactgttcctcctctacttcccacagatcttcaataaaagcaatgatggctttacaacgacaagaagttacggtacagtgtcacagatcttcggcagctctagcccctcgcccaatggcttcatcacgacgagaagctacggcaccgtgtgtcctaaggactgggaattttaccaggctaggtgcttcttcctcagcacctcggaaagcagctggaatgaaagtcgggacttttgtaagggcaagggaagtacccttgcaatcgtgaacactccagagaaattaaaattcctgcaagacattactgacgccgagaaatactttatcggcttgatataccacagggaggagaagcggtggcgctggattaacaattccgtatttaatggcaatgtgaccaaccagaaccaaaacttcaattgcgccaccatcggcttaactaaaaccttcgacgccgcttcctgtgatatctcctatcgccgaatatgtgaaaagaatgctaagtag

SEQ ID NO: 113296 - DNA, 630 bp, synthetic construct
  misc_feature 1..630: note = Description of Artificial Sequence: Synthetic coding sequence
  source 1..630: mol_type = other DNA
atgatgcaagagcagcagcctcaatctacagaaaagcgcggctggttatccctgcgtctctggtctgtggcaggcataagtatcgctttgctgtccgcctgcttcatcgtttcttgtgtcgtgacataccattttacatacggagagaccggcaagagactgagcgagctccattcctaccactcttcattgacttgcttttcagaaggaacaaaagttcccgcatgggggtgctgtccggcatcgtggaaatcttttgggagtagctgctactttatttcttccgaggagaaagtatggagcaagtctgaacaaaactgtgtggagatgggggcccacctagtggtatttaatactgaagccgagcaaaacttcatcgtacagcagctgaacgaatcttttagctatttcctgggactgtcagatcctcagggcaacaataattggcagtggatcgacaagactccatacgaaaagaatgttagattctggcacctgggcgagcccaatcacagcgctgaacagtgtgcgtccatcgtcttctggaaacctacaggctggggttggaacgatgtcatctgcgagacaaggaggaattccatttgcgaaatgaataaaatctatttatag

SEQ ID NO: 113297 - DNA, 432 bp, synthetic construct
  misc_feature 1..432: note = Description of Artificial Sequence: Synthetic coding sequence
  source 1..432: mol_type = other DNA
atggaatatcaccccgacctggagaacttggatgaagacggttatacacagcttcatttcgactctcagagcaacactcggatcgccgtggttagtgaaaagggatcgtgcgccgcttcaccaccttggcggctgattgctgtaatcttgggaatcctttgtctggtgatcctcgtcattgccgtggtcctggggactatgggagtgctcagctccccctgcccccctaactggattatctatgagaagtcttgctacttattctccatgagcctgaattcttgggatggctcaaagaggcagtgctggcagctgggctccaacctgctgaaaatcgacagcagcaacgaactaatcagcgatcagaatcactcatacccccggaagccaatctccaagctgtgcatggactcgcgtgtgagccacctgtag

SEQ ID NO: 113298 - DNA, 744 bp, synthetic construct
  misc_feature 1..744: note = Description of Artificial Sequence: Synthetic coding sequence
  source 1..744: mol_type = other DNA
atggaatatcacccagacctggaaaatctggatgaggatggatatacacagctgcactttgattctcagtcaaacaccagaattgccgttgtgagcgaaaaaggcagctgcgcggcctcccccccctggcgcctaatcgctgtgatccttggcattctctgtttggtgattctggtcatcgcagttgtccttggaactatggccatatggagatccaatagtgggtccaacacactcgaaaacggctacttccttagcagaaataaggaaaaccacagtcaacccactcagagcagtctggaggactctgttactccaacaaaggctgtgaaaacaaccggggtgctcagcagcccctgtccgccaaattggattatctatgaaaaatcctgctacctgtttagtatgtccctaaacagctgggatggcagcaaaagacagtgttggcaacttggaagcaacctcctcaagatcgactcaagcaatgaactgggctttatcgttaaacaggtaagcagccaacctgataatagtttttggattggactttctcggccacagacagaagtgccctggctttgggaggacggatccacttttagctctaacctattccaaatcaggaccaccgcaactcaggaaaacccttcaccaaattgtgtctggatccacgtgagtgtaatttatgaccagttatgttccgtgccttcttatagtatctgcgagaagaagttttcaatgtag

SEQ ID NO: 113299 - DNA, 234 bp, synthetic construct
  misc_feature 1..234: note = Description of Artificial Sequence: Synthetic coding sequence
  source 1..234: mol_type = other DNA
atggaatatcatcccgacctggaaaatctggatgaggatggctacactcagcttcactttgactcacagtcaaataccagaatcgccgttgtgagcgagaagggctcctgcgccgcctctccgccatggagactgattgccgttatcttaggtattttatgtcttgtgattttggtgattgctgtggtactaggcaccatggctggctttaaagcagtggagtttaaaggttag

SEQ ID NO: 113300 - DNA, 606 bp, synthetic construct
  misc_feature 1..606: note = Description of Artificial Sequence: Synthetic coding sequence
  source 1..606: mol_type = other DNA
atggaataccatccagatctcgagaacctggacgaggacggctatacacagctgcacttcgattcccagagcaataccaggattgccgtcgtctccgaaaaaggtagttgcgcagcctcccctccgtggcgcctgatagcggttatactcgggattctttgtctagtgattttggtaattgccgtagtcctcggtactatgggcgtactctcttctccttgtccccctaactggatcatctacgaaaagagttgctatctcttctcaatgagcctgaacagttgggacggaagcaaacgacaatgctggcagttgggatctaacctccttaaaatcgattcatctaacgaactcggcttcatcgtgaaacaggtgtcatcccagccagacaattcattttggatcggcttgtcccgacctcagaccgaagtgccgtggctatgggaagatggctccacgttttctagtaatctgtttcagatcagaaccaccgctacacaagagaacccttcaccgaattgcgtatggatccacgtgtccgtgatatatgaccagctctgtagtgttccttcatattcaatctgtgaaaaaaaattttccatgtag

SEQ ID NO: 113301 - DNA, 507 bp, synthetic construct
  misc_feature 1..507: note = Description of Artificial Sequence: Synthetic coding sequence
  source 1..507: mol_type = other DNA
atggagtaccaccctgatttggaaaatctggatgaagatggctacacacagcttcatttcgactcgcagagcaataccaggatagccgtggtcagtgaaaaaggggtcttatcgtcgccttgtcctcctaattggatcatatacgaaaagagttgttacttgttctccatgtcattgaattcctgggatggatctaaacggcagtgttggcagctcggatccaacctgctgaagatcgattcttccaacgaacttggatttatcgtcaaacaggtgtccagtcagccagataattctttctggatcggcttgagcaggccccaaacagaggtcccctggctgtgggaagacggctctacgttttcttccaacctgttccagatccggacgaccgcaactcaagaaaatccttcccccaactgcgtatggatccatgtgtcagtcatttacgatcagctgtgtagcgtcccatcgtactcgatctgtgagaagaagttttctatgtag

SEQ ID NO: 113302 - DNA, 351 bp, synthetic construct
  misc_feature 1..351: note = Description of Artificial Sequence: Synthetic coding sequence
  source 1..351: mol_type = other DNA
atggagtatcatccagacctagagaaccttgacgaggacggatatacccagctgcactttgacagtcaaagcaatactcgcatcgcagtggtctcagagaaggggagctgtgcagcttctcctccctggaggctgattgcagtgatcctgggaattttgtgcctcgtgatcttggtgattgccgtcgttttaggcaccatgggtacgggccagtttctgaaagatctgtccttcctcaataatcggcggaagttgttcggggacccaatccaggaggccacccactggaggatggcaaccttttaccaagaaataaaaagaactacggtgaaccctcacaatcacttgtag

SEQ ID NO: 113303 - DNA, 744 bp, synthetic construct
  misc_feature 1..744: note = Description of Artificial Sequence: Synthetic coding sequence
  source 1..744: mol_type = other DNA
atggagtaccaccccgaccttgaaaatttagatgaggatggctatacacaactgcatttcgactctcaatcaaatacccggatagccgttgtgagtgagaaaggctcatgcgccgcctccccaccgtggcgtcttattgctgttatccttggaatcttgtgtttggtcatactagttatcgcagttgtgctaggcacaatggccatctggcgatctaactctggcagcaacaccctggaaaatggctactttctgagcaggaataaggagaaccactcgcaacctacgcagagctcgctggaggacagtgtcacccccaccaaagccgttaaaacgaccggcgtattgtcaagcccttgcccccccaactggatcatttatgaaaagagctgctacttgttctccatgtctctgaattcttgggacggatcaaagcggcagtgctggcagctcggttccaacttgcttaagatcgactcatctaacgagctgggttttatcgtcaagcaggtgagcagtcaacccgacaacagcttttggatcggcctttccagaccacagaccgaagtgccttggctgtgggaagacgggagcacttttagcagtaacttgttccagatcagaacaacggcgacacaggaaaatccctcccctaattgcgtctggatccacgtatcggttatctacgaccaactgtgttccgtgccaagctacagtatttgcgagaagaagttctcaatgtag

SEQ ID NO: 113304 - DNA, 570 bp, synthetic construct
  misc_feature 1..570: note = Description of Artificial Sequence: Synthetic coding sequence
  source 1..570: mol_type = other DNA
atggaataccatcccgacctggagaacctggatgaagatggctatacccaactgcatttcgattcccagtcaaacacgcggatcgcggttgtaagcgagaaaggctcttgtgccgctagcccaccctggcgcctgatcgctgttattctcggtattctgtgtctcgtcatactggtgatcgcggtcgtgctcggtaccatggcgatctggaggtcgaactctggcagtaacactctcgagaatggttatttcctaagtcgtaataaagagaatcatagccagcctacccaatccagcttggaggactccgttactcccacaaaggccgtgaaaacgacaggcgttcttagttctccatgtcctcccaattggatcatatatgaaaaatcttgttaccttttctcgatgtcattaaattcttgggatggttcaaagaggcagtgttggcaattaggctctaatctgctgaaaatagacagttccaatgaactcataagtgatcagaatcacagctatccacgaaagccaatttctaaattatgtatggactctcgggtgtcgcacttgtag

SEQ ID NO: 113305 - DNA, 10281 bp, synthetic construct
  misc_feature 1..10281: note = Description of Artificial Sequence: Synthetic coding sequence
  source 1..10281: mol_type = other DNA
gtgcttccctcgcacacatgcggaaaccccggagagatactgaaaggtgttctacacgggactcggttcaatattggcgacaagatcaggtactcctgcctgccaggatatattctggaaggacatgcaattctgacgtgcattgtgtcaccagggaacggagcatcgtgggatttccctgcccctttctgcagggctgaaggggcctgcggagggacgctgcgaggaaccagcagtagcatttcctccccccacttcccaagtgaatatgaaaataacgccgactgtacctggaccatcctggccgagccaggcgacactatcgcattagtcttcactgacttccaattggaggagggctacgatttcctggaaataagcgggacggaagctcctagcatctggctgacaggaatgaatctgcccagccctgtcatttcttcaaagaactggcttcgactgcatttcactagcgatagcaatcaccgccgtaaaggttttaatgctcaattccaggttaagaaggccattgaactaaaatctcggggcgtgaaaatgcttccaagcaaagatgggtctcacaagaacagtgtgctgtcccagggcggggtggcactggtcagtgatatgtgtccagaccctggtattcctgaaaatgggcgaagagctgggagtgactttagtagggtcggcgctaacgtacagttttcttgtgaggataattatgtcctccaaggttccaagagcataacatgccaacgtgtaaccgagactctggctgcctggtcagaccatcgcccaatttgccgggctagaacctgcgggtctaatctccgtgggccttcgggcgtgataacaagtcccaactacccggtccagtacgaagataacgcacactgcgtctgggtgatcactacgactgatccggataaggttatcaaactggctttcgaagaattcgagcttgagcgcggctacgacactttgactgttggcgacgccggtaaggtcggggacaccaggtctgtgctctatgtactgacgggaagttccgtgcctgacctcatcgtgagtatgagtaaccaaatgtggcttcacctgcagtccgatgattccattggcagtcccggctttaaagcagtttatcaggaaatcgagaagggcggatgtggtgacccaggtatccccgcgtatggcaaacgtaccgggtcctcattccttcacggtgacaccctgaccttcgagtgtcccgcagcttttgagctggtgggagagcgggtcattacctgccagcagaataaccagtggagcggcaacaagccaagctgcgtcttctcctgcttcttcaactttacggcctcttctggcatcattctgtcacccaactatcctgaggagtacggcaacaacatgaattgcgtctggttaattataagtgaacctgggtcacgcatccaccttatatttaatgatttcgacgtcgaaccacaattcgatttcctggctgttaaagacgatggcatcagtgacattacagttctgggcactttctctgggaatgaggttccatcacaactggcctcctccggccacatcgtgcgtctggagtttcagagcgatcattccacaaccggaagaggcttcaatattacatacactacatttggccaaaacgagtgccacgaccctgggataccaattaatgggcggcggtttggcgatcgattcctgctcgggtcttccgtttcattccattgcgatgacggctttgtgaaaacccaagggagtgaatccataacctgtatcctgcaggacggaaacgtggtgtggtcctctacagttcctcgctgcgaggcaccttgtgggggccacttgaccgcatctagcggtgttattcttcctccgggctggcccggttattacaaagactccttacattgcgagtggatcatcgaggctaaacctgggcacagcatcaagatcaccttcgaccgttttcagaccgaggtgaactatgatacgttggaggttcgcgatggccccgctagttccagtcctctgatcggcgaataccacggcacccaggccccgcagttcctcatctctaccggcaactttatgtatctgctgtttacgacggacaactcacgcagctcaatcggcttcttgatccattatgaatcagttactctggaatcagactcctgcctggatccagggatcccagtgaacggacacagacacggaggtgatttcggtattcgtagcacagtgacattctcctgcgaccctgggtacacgctatcggacgacgagccactcgtatgcgagcggaaccatcaatggaaccacgctctaccatcgtgcgacgctctgtgcgggggctacatccaaggaaagtcagggaccgtgctgtcccctgggttccccgatttctaccctaatagccttaactgtacatggaccatcgaagtttcgcacggcaagggggttcagatgattttccataccttccatcttgagagctctcatgactacttgctgattacggaagacggctccttttcagagcctgtggctcgtttaacgggaagcgttctaccccacacaataaaggcggggctctttggaaatttcactgcccagcttcgcttcatctctgatttctcaatttcatacgaagggtttaacatcaccttttccgagtacgacctagagccgtgcgacgaccctggggtacctgcttttagccggcgcatcggatttcatttcggcgtaggagacagcctcacattttcgtgcttcctgggctaccgactggagggcgccactaaacttacttgtctcggaggagggcgtcgcgtatggtctgcccctctgccccggtgcgttgcggagtgcggggccagcgtgaagggaaatgagggaacccttttgtctccaaacttccctagcaattatgacaataatcatgagtgcatctataaaatcgaaactgaggcaggaaagggaatccacctgcgaacccgctctttccaactctttgaaggcgacacactgaaagtgtacgacggcaaggactctagctccaggccgttgggcacctttaccaagaacgaactcctggggttgatattgaacagcacaagcaaccatctttggctggaatttaacactaatgggagcgacactgaccagggattccagctcacttacactagcttcgatctggttaagtgcgaagaccccggaattccaaattatggttatcgtattagagacgagggacattttaccgacaccgtggtgctgtactcttgtaatcccgggtatgcaatgcacgggtctaataccctaacgtgcttgtcaggagacaggcgagtctgggacaagcccctaccttcgtgtatcgctgaatgtggcggacagatccatgcagccacgtcgggcagaatactttccccaggataccctgcgccctatgacaacaacctgcattgtacctggattatagaggcggatccaggaaagactatctctctgcacttcatcgtgttcgatacagagatggcccacgacatactgaaagtgtgggacgggcctgtcgattccgatatcctgctgaaagaatggtctggaagtgctctcccggaagacatccattcgacgttcaatagcttgaccctacagttcgactccgacttctttatcagcaagagcggcttttcaatccagttttcaacaagcatcgctgcaacctgtaatgacccaggaatgccccagaatggtacaagatacggggactcacgcgaggccggagatactgtcaccttccagtgtgaccctggataccaactgcaagggcaggctaaaatcacctgcgtccagttgaacaaccgctttttctggcaacctgatccccccacttgcattgccgcctgcggcgggaacctgaccggacctgccggggtgatcttgtctccgaactacccacagccctatccacccggaaaagagtgtgattggagggtgaaggtcaaccctgatttcgtgatagcattgatttttaaatcttttaacatggagccttcctacgatttcttgcacatttatgaaggggaggattccaactctccgttaataggatcttaccagggttcacaggccccagagcgcatcgagtcatctggaaactcactattcctggccttccgatcagatgccagcgttgggctaagtgggttcgccattgaatttaaggagaaaccccgggaggcctgctttgaccccgggaacatcatgaatggaacacgcgtcggtaccgacttcaagttaggaagcactattacgtatcagtgtgattcaggctacaagatcctcgaccccagtagtatcacctgtgtcattggcgccgatggcaagccttcatgggatcaagtcctgccttcttgcaatgctccctgtggaggtcagtacacaggttcagagggggtcgtactgtcacctaattatccacataactatactgctggccagatatgcctttactccattacagtcccgaaagaattcgtggtgtttggacagttcgcttactttcagacggccctcaacgacctggccgagttgttcgatggcacccacgcccaagccaggctgctgagttcgctgtccggatcgcattctggcgagaccttgccacttgcgacgagtaaccagatcctgctgcgattcagcgccaaaagcggcgctagtgcgagggggttccactttgtctaccaggctgtgccgagaacttctgatacccagtgttcatcagtacctgaacccagatatggcagacgtatcgggagtgaattctcggcagggtccattgtgagatttgagtgcaatccaggctatctgcttcagggatccaccgccctccactgccagtcggtacctaacgcccttgcccagtggaacgacacgatcccgtcgtgtgttgtgccttgctccgggaatttcacccagcgcagggggactattttatcccccggctatcctgagccatatggcaataacttaaactgtatttggaaaatcatcgttaccgagggcagtgggatccaggacccctccgaccagttttgtcatggggccgagcttgggctggagatccacgacggcggtgacgttaccgcgccccgcctgggtagctttagcggaactacagtgcccgccttgctgaattcaacttctaaccagctctatctgcactttcaaagcgacatatcagtggctgcggctggattccatctggagtacaaaactgtgggactagcagcctgtcaggagccagctttgcccagtaatagcatcaagatcggtgaccgatacatggttaatgatgtgctcagcttccagtgtgagcccggatatactctccagggccgcagccacatcagttgcatgccaggaaccgtcagacgctggaattaccctagccccctgtgcatcgccacatgcggaggcacattgtccactttgggaggggttatcctgagccccggattccctggaagctacccgaataacttggattgtacctggagaatctctctgcccattggttacggagcgcacatccagtttctgaacttttctaccgaggctaatcacgactttctcgaaatccaaaacggaccttaccatacaagccccatgatcggccagttctcaggaacggatctgcccgccgccctgctgagtactacccacgagacgcttatccatttttattccgaccattcgcagaatcgacaaggtttcaaactggcataccaggcatacgagctgcaaaattgtcctgatcctcctccatttcaaaacgggtatatgatcaattctgattactcagtaggtcagagtgtgtccttcgagtgctaccctggctacattctgattggtcaccctgttctgacctgtcagcacggaatcaatcgtaattggaattacccgtttccaaggtgcgacgcaccttgcggctataacgtaacttctcagaatggcacaatctacagtccaggctttccagacgaatatcctattctgaaagattgcatatggttgattactgttccaccaggacatggcgtatacataaacttcactcttttgcaaacggaagcggtcaatgactacattgctgtgtgggacggtcctgatcagaactcaccgcagttgggcgtgtttagcggtaacacagccttggagacagcctatagttctactaatcaggtcctccttaagttccacagcgacttcagcaatggaggcttcttcgtgctcaacttccacgcctttcagctgaaaaaatgtcaaccccccccagcagtgcctcaggctgagatgctgacagaagacgatgattttgagataggggatttcgtgaaataccagtgccatcctgggtacacactggttgggaccgatattctgacatgtaaactcagctcccagctgcagttcgaggggagtctaccgacttgtgaggcccagtgccccgcaaacgaggtccggaccggatcttctggcgttattttaagcccgggctaccccggcaactattttaacagccaaacatgttcttggtccattaaagtggaacccaattacaatatcaccatctttgtcgacacctttcagagtgaaaagcagtttgacgctctcgaggtatttgacggatcaagtgggcaatcacctttactcgtggtcctttcaggcaaccacacagagcagtcgaactttaccagccgctccaatcagctgtaccttcgatggtcgaccgatcacgccaccagcaagaaaggcttcaaaataagatacgccgctccctactgtagcctgacacatccccttaagaatggaggtattctgaataggacggctggagctgtgggatccaaagtgcattacttttgtaagccaggttaccgcatggtgggccactccaacgcaacctgtcgaagaaaccctctgggaatgtaccaatgggatagtctgacacccctttgccaggccgtgagctgtggaataccagagtcccctggaaacggctcatttaccggcaatgaattcacattggactcgaaggtagtttatgaatgtcacgagggctttaagttggaatcaagtcaacaagcaacggccgtgtgccaggaggatgggctgtggagcaacaaaggcaagccacccacctgtaagcccgtagcttgtccgtcaatagaagcccagcttagcgagcacgtaatctggcgtcttgttagcgggagccttaatgaatatggggcccaggtgctcctatcatgctcccccggctactacctagagggctggcgtttgctgcggtgtcaggccaacggcacctggaatataggtgatgagaggccctcatgcagggtgatctcatgcggatcgctttcttttccaccaaacggaaataaaatcggaacactgacagtctacggcgccactgctatctttacttgtaacactggatacactctggtgggttctcatgtgagagagtgtcttgcaaacggactctggagcggaagtgagaccagatgcttggctgggcactgcggttcaccagatcccattgtaaacgggcatatctctggcgacggcttctcttatagggataccgtggtttaccagtgtaatccaggcttcaggctggtgggaacgagcgtacggatatgcctacaagaccataagtggagcgggcaaactccagtatgcgttccaattacctgtggccaccctggaaacccggctcacgggtttacgaatggcagcgagttcaacctgaatgacgtcgtcaatttcacttgtaatactgggtacctgctgcagggagtatctcgcgcccagtgcaggagcaatggccagtggagcagccctctgcccacttgtcgggtggtaaattgttccgaccctggttttgtcgaaaacgccatccgtcacggccagcaaaactttccagaatcctttgagtacgggatgagcatactttatcactgtaaaaaggggttttacctgctgggcagctcggctttgacttgtatggccaatgggctgtgggatcgatctttgccaaaatgtttagccatatcctgcggtcaccccggagtcccagcgaacgccgtcttaactggagagctgtttacctatggtgctgttgtgcattactcatgcaggggttctgagagcctcattgggaatgatacacgagtgtgtcaagaggactcccactggtctggcgctttgcctcattgtaccggtaataaccccggcttttgcggcgacccgggaacccctgcccatggcagcaggctcggcgacgacttcaaaacaaagagcctcctccggttctcttgtgaaatgggacaccaactgcggggctcacctgagagaacctgcctgctgaacggcagttggtctggcttgcaacccgtatgcgaggctgtgagttgcggcaacccgggaacccccacaaacggaatgattgtgagcagcgacggaatcctgttttcatcaagtgttatctatgcctgctgggaaggttataagacatccggcctgatgacgagacattgcactgctaacggcacctggacgggtactgcacccgattgtacaattatctcatgcggcgaccccggaacgcttgccaatgggatccagttcggcacggatttcacatttaataagacggtgtcttaccaatgtaaccctggctacgtgatggaggccgtaacctctgccactatccgttgtaccaaagatggccgctggaatccatccaaaccagtttgcaaggcagtgttgtgccctcagccacctcccgtgcagaacggtaccgtggagggttccgatttcaggtggggcagctccatctcatactcatgtatggatgggtatcaactcagccactcagctatactgagctgcgaaggtaggggcgtctggaagggagaaatcccccagtgtctccccgttttttgcggcgaccctgggatccctgcggaggggcgcctcagcggcaagtctttcacgtataagtctgaagttttctttcagtgcaaatctcctttcatcctcgtgggctcttcccgcagggtttgccaggctgatggaacatggtctgggatccaacccacatgtatcgatccagcgcacaacacctgtcctgatccaggcacccctcactttggcatccagaacagctcccgtgggtacgaagttggaagtaccgtcttctttaggtgccgtaagggctatcatattcagggctccactacaaggacttgcctagctaacctgacgtggagtggtatccagacggagtgcatcccacacgcatgtcgacagcccgaaaccccagcacatgccgatgtgagagccattgatctcccgaccttcggatacaccttggtgtacacatgtcatccaggattcttcctggcaggtggatctgagcataggacctgcaaagcagacatgaagtggactggcaagtctcccgtttgtaagtccaaaggagtccgagaggtgaacgaaacagtgactaaaactcctgtgccatcggacgttttctttgtgaactcattgtggaaagggtactatgagtacctgggaaagagacaaccagcaacactgacagtggattggttcaacgcaacctcgtccaaagtgaatgccactttttcagaggccagtccagttgagctaaagctgactggcatctacaagaaggaagaagcacacttactgctcaaggcgttccagatcaagggccaagctgacatctttgtgagcaagtttgagaatgataattgggggctggacggatacgtgagttctggtctggagcgagggggctttaccttccaaggtgatatccatgggaaggacttcggaaaattcaaactggagcggcaggatccactgaacccagaccaggatagctcatctcactaccacggtacatcctcaggatcggttgctgccgccatcctggtcccctttttcgcccttatactcagtggcttcgctttctatctgtataagcatcgcactagacccaaggtccaatacaatgggtatgccgggcacgaaaactcaaacggccaggcatcattcgaaaacccaatgtatgatacaaacctgaaaccaactgaggcaaaagccgtgcgttttgacactacactgaacacggtttgtaccgtggtgtag

SEQ ID NO: 113306 - DNA, 10167 bp, synthetic construct
  misc_feature 1..10167: note = Description of Artificial Sequence: Synthetic coding sequence
  source 1..10167: mol_type = other DNA
atgaccgcctggcgaaggttccaaagcctgctcctgctcctggggctcctggtcctatgtgcaagattactgacagctgcaaaagggcaaaattgcggggggcttgttcaagggccaaatggaactatagaatcccccggctttccgcacgggtatcccaactacgcaaactgtacgtggattatcatcacaggggagcgtaatcgcattcagttgtctttccatactttcgcccttgaggaagactttgatattctctctgtgtacgacggacagccgcagcagggcaatcttaaggtgcggttgagtgggtttcagctgccctccagtattgtgagcactggctcaattcttactctctggtttactaccgacttcgccgtgtctgctcagggcttcaaggctctttacgaggtcctgcctagtcacacctgcgggaacccaggcgaaatcctgaagggcgtgttacacggcactcggtttaatatcggggacaaaatccgctatagttgcctgcccgggtatattttggagggacacgcaatcctcacctgtatcgtgtccccaggaaacggcgcgtcctgggactttcccgccccattctgccgcgctgaaggtgcctgcgggggcaccctgagggggaccagctcatcaatttcctcgccacatttcccaagcgaatacgagaacaacgcggattgcacttggactatactggccgagcccggcgataccattgcgttggtattcaccgattttcaactcgaggaggggtatgatttcctcgagattagcggcacagaggccccttccatttggctgacaggtatgaatctgccatccccggtgatatcttccaagaattggcttagactccattttacctcggactccaaccatcggcgcaaaggcttcaatgcacagtttcaagtaaagaaggccatcgaattaaagagccggggtgtgaagatgcttccaagcaaagacggatctcacaaaaactcagtccttagtcagggtggggtcgctctggtttctgacatgtgtccggaccccggcattccggagaacggccgaagggccggatcggatttttccagagtgggggctaacgtgcagttcagttgcgaggataattatgttttacaggggagcaaatcaattacttgtcagcgggtgacagagactttggcagcttggtccgatcaccggcctatctgtagagcacgcacttgcggatccaatttaaggggaccctcaggggttattacctcccctaattaccctgtccaatatgaggacaacgcacattgcgtttgggtcattacgactactgatcctgataaagtgattaaactggcgtttgaggagtttgaattggaaaggggttacgacaccttaacagttggtgatgccggtaaggtaggggacacaaggagcgtgctgtacgtgctcacaggctccagcgtgcctgacctgatagtttctatgagtaaccagatgtggttgcacctccaatcagacgattctataggctcccctggcttcaaggctgtctatcaggagattgagaagggtgggtgtggtgatcctggaatcccagcgtatggaaaacgaactggatcctcgttccttcacggcgataccctgaccttcgaatgccctgcagctttcgaacttgttggcgaaagagttataacatgccaacagaataaccagtggagcggtaacaaaccatcttgtgtctttagctgcttttttaatttcacagccagctcagggattatactgagcccgaactaccctgaggagtatggtaataatatgaactgtgtctggttgatcattagcgaaccaggatctcgaatccacctaatttttaatgattttgacgtagagcctcagttcgattttctggctgttaaagatgacggtatatctgacatcaccgtgctgggcacattctctggcaatgaagtgccaagccagttggcaagctcaggccacatcgttcgcttagagtttcagtcagatcacagcacgaccgggcggggctttaacataacctataccactttcggccagaatgaatgtcatgaccctggcattcccattaatggccgccggttcggcgaccgatttttactgggcagttctgtgagttttcactgcgacgacggtttcgtcaagacacaaggctcggaatccatcacctgtattctgcaggatgggaacgtcgtgtggagctctacagtgccccgttgcgaggctccctgtggaggtcatttgaccgcttcatctggagtgatactaccccccgggtggcctggatactataaagactctctgcattgcgaatggattatcgaagcgaagcccggacatagtattaaaatcacgttcgacaggtttcagaccgaggtaaactatgataccctggaggtccgggatggtcccgccagttcctccccactaattggcgagtatcacgggacccaggcaccacagtttctaataagcacagggaatttcatgtacctgctgtttacaaccgacaattcacggtcctccatcggatttctgattcattacgagtcagtgaccctggagtctgactcttgtctagacccgggtatccccgtgaacgggcatcggcatggcggagacttcgggattcgctcaactgtcaccttttcttgtgaccctggttataccctcagcgatgacgaacctttggtgtgtgagcgcaatcaccagtggaaccatgccctacccagctgcgacgccctatgcggaggctacatccaaggaaagtcgggtactgtcctttctccagggttccccgacttctacccaaacagcctaaactgcacttggaccattgaggtgagccacggtaaaggcgtccaaatgatttttcacaccttccacctcgaaagctctcacgactaccttctcattaccgaggatggtagcttttcagagcccgtagcccgactgaccggatccgtactaccccataccataaaagccggacttttcgggaacttcacggctcagttgcggtttattagtgacttttcaatcagttacgaaggcttcaatatcacatttagtgagtacgacctggaaccatgcgatgaccccggagtgccggcattctcccggagaattggattccactttggcgttggcgattccttgacattttcctgtttcttaggatataggttggagggcgccacaaagctgacctgcttaggcggggggcgtagggtgtggtccgcgcctctgcccagatgtgtagccgagtgtggggcaagtgttaaagggaacgaaggcacactgcttagccctaactttccctcgaattacgacaacaaccatgagtgcatttataagattgaaactgaagccggtaaagggattcacttgagaacgcgctcctttcagctattcgagggtgatactttgaaggtttacgatgggaaagattccagctcacgaccgctgggaactttcacaaagaacgaactcctgggcctgatcctgaactctacatccaaccatctctggctggaattcaatacgaacggttccgacaccgaccaggggttccagttgacctacacgagctttgatttggtcaagtgcgaagaccctggtatccctaattatggttataggatcagagatgaagggcattttacggataccgtcgtgctgtactcctgtaaccccggctatgcaatgcacggctctaataccctgacctgcctaagcggggatcgccgggtgtgggataagcctcttccctcttgcatcgctgagtgtggaggccaaatccacgccgcaacatccggtagaatccttagtcccgggtaccccgccccttatgacaataacctccactgtacgtggattattgaagccgaccctggcaaaactatctcattgcatttcatcgttttcgataccgagatggctcatgacatcctcaaggtttgggacggaccggtggattccgacatcctgctgaaagagtggtcaggcagcgctctcccggaagacatccacagcacattcaattcgctgaccctgcagttcgattcagacttcttcatcagtaaatcaggtttttccatccaattttctacttccattgcagccacctgcaacgaccctgggatgccccaaaatggaacccgctacggtgatagcagggaggcaggtgatactgtgaccttccagtgtgacccgggatatcagctccagggacaggcaaaaatcacatgtgtgcagctgaacaatagatttttctggcaaccggatccaccgacttgcatcgccgcctgcggagggaatctgactggccccgctggcgtgattctctctcctaattaccctcagccctatccaccaggcaaggagtgtgactggcgagtgaaagtaaaccccgactttgttatagcactcattttcaagtccttcaatatggagccgtcctatgacttcttgcatatatacgagggggaggactctaatagcccactcataggttcctaccagggaagccaggcccctgaaaggattgagagtagtggaaatagcctatttttggccttccggtcagacgcgagtgtggggctttcgggctttgcaatagaatttaaagagaagccacgggaagcatgtttcgatccaggcaatattatgaatggaacccgagttggcaccgactttaaactcgggagcactatcacataccaatgcgattctggctataagatccttgaccccagttccattacctgcgtcataggcgctgacgggaagccatcttgggatcaggtgctgcctagctgcaacgccccttgcggggggcagtacaccggctcagagggcgtcgtacttagtcccaactatccacataattacaccgccggacagatttgtctctattcaataactgtaccaaaggagttcgtcgtattcggccagttcgcttacttccagaccgccctgaacgatctggcagaactttttgacgggacccatgctcaggcaagacttctgtcctctttgagtggatctcatagtggggaaacactccctcttgctacatccaatcagatcctcttgaggttctcggccaagagtggtgcttctgcccgaggattccactttgtttaccaagcagttcctaggacctcagacacccagtgctcgagcgtcccagagcctcgatatggacggagaatcgggagcgaatttagtgctggaagcattgtgcgtttcgaatgtaaccctggttacctgctccaagggtctacggctctacattgtcaaagtgttcccaacgcgcttgcacagtggaacgacactatccctagctgtgttgttccctgtagcggtaacttcacccagaggcgtggaacgatcctctcccctgggtaccccgaaccatacgggaacaacctgaactgcatctggaagattattgtcaccgagggttctgggatccagatccaggtcatcagctttgcaactgagcaaaattgggatagccttgagatccacgatggtggtgacgtgactgcacctcgtttgggatcattcagcggcactactgtccccgcccttctcaattcgacatctaatcagctgtatcttcacttccagtccgacatcagcgtggcggccgctgggtttcatttggaatacaaaacggtgggcctggctgcctgccaggagcctgcccttccttccaatagcattaaaattggagaccggtatatggtgaatgatgttcttagcttccaatgcgaaccaggctatacattgcagggtcgttctcacatcagttgtatgcccggaactgtgagaagatggaactatccctcccctctatgtatcgccacttgtggcggaacactgtcaacgctgggcggcgtgattctgagtcccggttttcctgggtcctatccgaataaccttgattgcacctggcgcatctctctcccaatcgggtatggcgcacatatccaatttttaaatttttcaactgaagcaaatcatgacttcctggaaatccaaaacgggccataccatacctccccaatgatcggccagttctccggaacagatctccccgcagcactactgtcaactactcacgagactcttattcatttttattcggatcactcacagaaccggcagggctttaagctggcttaccaggcgtacgagctgcagaattgtcctgacccccccccgttccagaacgggtatatgataaactcggattactctgtcggacagtcagtgagtttcgaatgttaccccggctatatcctgatcggccatcccgtcttaacatgccagcacgggattaaccggaactggaactacccgttcccaagatgcgacgcaccctgcgggtacaacgttacgtcgcagaatggcacaatatattcaccgggcttccctgatgagtacccgatcctgaaggattgtatttggctgatcacggtgccaccaggacatggtgtgtatatcaatttcactctactgcagaccgaggccgttaacgactatattgcggtctgggacggccctgaccagaatagcccccagctcggtgtgttctcaggtaacactgccctcgagaccgcatatagttccactaaccaagtattactaaagttccactctgactttagcaacggtggctttttcgtgcttaatttccatgcctttcagctcaagaagtgccagccgcctcccgctgtgccccaagccgagatgttaacggaggatgatgacttcgagatcggtgacttcgtgaagtaccagtgccacccaggctatactttggttggcactgacattttgacatgcaaattgagctcacaactgcagttcgaaggtagccttccaacatgcgaagcacagtgccccgcgaacgaggttaggaccggctcatccggcgtaatcctctctcctggatatcccggcaattacttcaactcccagacttgcagctggtccatcaaggtggaaccaaactataatatcacgatattcgtggacaccttccagagcgaaaaacaattcgatgccttagaggtgtttgacggctctagcggacaatctccattactagttgtcctgagtggaaatcatactgagcagtcaaacttcacttcacgctccaatcagttatatctgagatggagcactgatcatgctacgagcaagaagggctttaagatcagatatgcagcaccttattgttcacttacacaccctcttaagaatggcgggatcttgaatagaacggcaggtgcagtaggctctaaggtacactacttctgtaagcctggctatcgcatggtaggtcattccaatgcgacatgcagacgcaatccgctcggaatgtaccagtgggatagcctgaccccgttgtgccaggctgtttcatgtggcatccctgaatctccaggcaacggtagcttcacaggcaacgagtttacgctggactccaaggtcgtttacgagtgccacgagggattcaagctggagtcgtcgcaacaggcgactgcagtgtgtcaagaggatggtctttggagcaacaagggtaagccaccaacatgtaagcctgttgcatgtcctagtatcgaggcccagctctccgagcatgtcatatggaggctcgtgtctggcagtttaaacgaatatggtgcgcaagtccttctatcatgtagcccaggttattacctggaaggctggaggctcctcagatgccaagccaacggcacttggaatatcggggacgaacgcccctcatgcagggctggccattgtgggtctcccgacccaattgtgaacgggcacatctctggcgatggcttttcatatagggataccgtcgtttaccagtgcaaccccgggttccgcttagttggaaccagtgtgcgcatttgtctgcaagatcacaaatggtctggccagaccccggtctgcgtccctattacttgtggacatccaggcaatcctgcgcatgggttcaccaacgggagcgaatttaatctgaatgacgtagtgaattttacgtgcaacaccgggtacctgctgcagggggtgagtcgtgcccagtgccggtctaacggacaatggtcaagtcctttgccgacctgcagagtggtgaactgcagcgatcctggatttgtggaaaatgctatccgtcacggtcagcaaaacttccctgaaagttttgaatatgggatgtctattctttaccattgtaaaaagggcttttatctcctgggcagctctgcattaacctgcatggccaatgggctgtgggacaggtccctgcccaaatgtctggccatttcctgtggccatccaggcgtgccggcaaatgctgtactgacaggcgaactgtttacttacggtgccgttgtccattattcctgtaggggttcggaatcattgatcggaaatgacacacgcgtctgtcaggaagatagccactggagcggcgcactgcctcattgcactggtaataaccctggcttctgtggcgatccaggcactcctgcacacggaagtagacttggcgatgacttcaagaccaaaagtctgttaagattctcctgtgaaatgggccaccagctcaggggctctccagagagaacctgtctgttgaacggctcttggtctggactgcaacccgtatgcgaagctgtcctttgtcctcagcccccacctgtgcagaatggcactgtcgaagggtccgatttccgctggggttcctctataagttacagctgtatggacggctatcagttgagtcattccgcaattctttcttgcgagggtcgaggcgtgtggaagggggagatcccccagtgtctcccggtattttgtggcgacccaggaatccccgctgaaggcagactttctgggaagtcttttacttacaagagcgaggtgtttttccagtgtaaatctcctttcattctagttgggtcctcaaggcgagtatgtcaggcggacgggacctggtccggtatccagcccacctgtattgacccagcacacaacacatgtcccgatcctggcaccccacatttcggaatccaaaactcttccaggggatatgaggttggctcaactgtcttcttccgctgtagaaaaggatatcacatccagggctcgacaactcgaacctgtttagctaacctgacttggtccggtatccagaccgaatgtatccctcatgcatgccggcagccggaaaccccggctcacgctgacgtgcgtgcaatcgaccttcctactttcgggtacaccctggtttatacctgccacccaggattcttcctggcggggggcagtgaacacaggacatgtaaagccgatatgaagtggacaggaaaatctcctgtgtgtaagtctaaaggagtgagagaagtgaatgaaacagtgaccaagaccccagtcccttccgacgtgttctttgtgaatagtctgtggaagggctactacgagtatctcgggaagcggcagccagcaaccctgaccgttgactggttcaatgctactagcagcaaagtaaatgcaaccttttccgaagcatcacctgtagagctcaagctgaccggaatctataaaaaagaggaagcccacctgctacttaaggccttccagataaaaggtcaggctgatatcttcgtcagcaaatttgaaaacgacaattgggggctggacggatacgtgtcaagcggcctggaacggggagggtttacatttcagggagatatccatggcaaggactttgggaaatttaaactggaacggcaggaccccttgaaccctgaccaggactctagttcacattaccatggaacttccagtgggtccgttgcggctgctatcctggtcccctttttcgctctgattcttagcggatttgctttctatttatataagcatcgcacacgacctaaggtacagtacaacggctacgcagggcacgagaatagcaatggacaagcctctttcgaaaacccaatgtatgatacaaacttaaagcccacagaagccaaggctgtgaggttcgatactacgctcaatactgtttgcactgtggtctag

SEQ ID NO: 113307 - DNA, 10698 bp, synthetic construct
  misc_feature 1..10698: note = Description of Artificial Sequence: Synthetic coding sequence
  source 1..10698: mol_type = other DNA
atgaccgcttggcggcggttccagtcattgctgctgctactgggtctgctcgtcctctgcgcccgactgctgaccgcggccaagggacaaaattgtggcggcctggtgcagggacctaatggcactatcgaatctccaggtttccctcacggttatcccaactatgcgaattgtacatggatcattatcaccggagaacggaatagaattcagctaagtttccacacattcgccctggaggaggacttcgacattctgagcgtttatgatggacagccccagcagggcaacctcaaagttagactctccgggttccagttacctagttcaattgtgtccacagggagcatcctgacgctatggtttactaccgattttgcagtgtccgcccaaggattcaaggctctgtatgaagtccttccatctcatacgtgcggaaatccaggagagattctgaagggcgtcttgcacgggaccaggtttaatatcggagataagatcaggtattcttgtttgccaggatatatccttgaggggcacgcgatccttacctgcattgtgtccccaggcaatggcgcctcatgggattttcctgcccctttctgcagagctgagggcgcgtgtggtggaacgcttagagggaccagcagctccattagctctccacattttccctctgagtacgaaaataacgctgactgcacctggacgatactcgcggaacccggagacaccattgctctggtgtttacagatttccagctcgaggaaggctatgactttctggaaatctccgggactgaggcacccagcatatggctgacaggcatgaacctgccctcacccgtgatcagctcaaaaaattggctacgcttgcactttacctccgacagcaatcataggcggaaaggatttaacgcacagttccaggtgaagaaagccatcgagcttaaatccagaggggtgaagatgctgccttccaaagacggttcgcacaagaatagtgttctgtcgcagggtggggtagcactcgtctcagatatgtgtcctgatcccggtatccccgagaatggacgccgcgccggctctgacttttcccgcgtgggcgccaacgtccaatttagctgtgaggacaattacgtccttcagggctctaagagcatcacttgccagcgcgtcactgaaaccctggcggcctggagcgatcaccggcctatctgccgagcaaggacttgtggttccaatctcaggggtccatctggcgtgattacgtcacctaattacccagtacagtatgaggataacgctcattgcgtgtgggtgattacgacaaccgatccagacaaggtgattaagttggcgtttgaagagtttgagctggaacggggatatgatacgctaaccgtgggggacgccggaaaagtcggagacaccaggagcgtgctgtatgttctgaccggcagtagtgtgcctgatcttattgtgtccatgtcaaaccaaatgtggttgcatctgcaatccgacgatagtatcggttcacctgggtttaaggccgtataccaggagatcgagaagggaggatgtggcgacccaggcattcccgcgtacggcaagcgtactggatcctcatttcttcatggcgatactctgacctttgagtgtccagccgcatttgaattggtgggcgaacgcgtgatcacttgtcaacagaataaccagtggagtggaaacaagcctagttgtgtgttttcttgctttttcaactttacagcgagctcgggcattatattgtctccaaactatcctgaggagtacggcaacaacatgaattgtgtttggctaattatctccgagccaggatctaggattcacctaatcttcaacgatttcgacgtggagccccagtttgacttcctggcagtgaaagacgacgggatttcagacatcaccgtgctcggaaccttcagtggcaatgaagttcctagtcagttagctagtagtgggcacatcgtacgcctcgaattccagagcgatcattctaccaccggaagagggtttaacattacttacaccacattcggccagaacgaatgccacgacccaggcatacctatcaacgggagacgcttcggcgatcgattcctgttgggctcatcagtgtcattccactgtgatgacggttttgtgaagactcagggttcagaatctattacatgcatactccaggatggcaatgtcgtgtggtcttcaactgtcccccgctgtgaggccccttgtggtggccatctaacggcatccagtggggtgatcctccccccaggatggcccgggtattacaaggacagtctgcactgtgagtggattatcgaagccaaacctggccacagtatcaagatcactttcgacaggttccaaactgaggtgaactatgatacacttgaggtgcgcgacggacccgcctctagctctcccctgatcggcgagtaccatggtacccaagccccacagttcctgatcagcactggtaactttatgtacttactgttcaccaccgacaactcccggtcatccatcggatttttaattcattacgaaagcgtgaccctggagtcagactcatgcttagacccagggatccccgtgaacggccacagacatgggggtgattttggcatacggtcaactgttactttctcatgcgatcccggatacaccctgtcagatgacgaacccctggtatgtgaaagaaaccaccagtggaatcatgctctgccttcctgcgatgcattatgcggggggtacatacaaggaaagtccggcaccgtactgtccccgggatttcccgatttttaccctaacagtttgaactgcacatggactatcgaggtttcccacgggaaaggcgtgcagatgatctttcacacctttcacctggagtcgtcgcatgattacctgctgataacagaagatgggagtttttccgagcccgtcgctagacttactggatcggtgctccctcatacaatcaaagctggcttattcgggaacttcaccgcgcaactgcgtttcattagcgatttctcaattagttacgaaggcttcaacattaccttcagcgagtatgacctcgagccatgcgacgaccccggagtgcctgcattttcaaggcgtatcgggttccacttcggggtgggagacagcctcacattttcatgcttcctaggatacaggctcgaaggagcaacgaaactgacatgtctcgggggcggtcggagagtttggagcgctcccttaccccgctgcgtagccgaatgcggcgccagcgtcaaaggaaacgaagggactctcctctcacctaacttcccaagtaattatgataacaaccacgaatgtatctataagatcgagacagaagcgggaaagggaattcacttgcgcactcggtcattccagttatttgagggagacaccttgaaagtgtatgacggtaaagactcatccagtcggccactcggtaccttcacaaagaacgagctgctgggactcattttaaattccacttcgaaccacttgtggctggaatttaataccaatggctcagatacagatcaggggtttcagctgacttatacgagctttgacctggtgaaatgcgaagatccggggataccaaattatgggtaccgaatccgtgacgagggtcatttcactgacactgtggttttgtattcatgcaaccctggatacgcaatgcacggatctaatacattaacatgcttgtcgggcgacaggcgagtttgggataagccactgccatcatgcatcgctgagtgcggtggacaaattcacgctgccacatctggtagaattctgagcccaggctatcccgcaccttatgacaacaacctccattgtacatggatcattgaagccgatcccggcaaaaccattagcctgcattttatcgtgtttgacacagaaatggcacacgatatccttaaggtgtgggatggccccgtcgattctgacattctgctgaaagagtggagtgggtcagccctccctgaagatatccactccacatttaactctttgacattgcaatttgactccgatttctttatatctaagtccggtttttctatacagttctctacgtctatagccgccacctgcaacgaccccggcatgccgcagaatggaactaggtacggagattctcgggaagcaggagacacggttaccttccaatgcgaccctggctaccagctgcagggacaggccaaaatcacctgtgtgcagcttaataacagattcttctggcaacccgatccacctacctgtattgcagcatgtgggggtaaccttactggaccagcaggtgtgattcttagtccgaattatcctcaaccgtaccctcccgggaaggagtgcgactggcgggtgaaggtcaatcctgacttcgtgatcgcccttatatttaagtcctttaacatggaaccaagttacgattttttgcatatttacgagggcgaggacagcaacagtccgctgatcggaagctatcagggttcccaggccccagaacggatcgagtccagtgggaattccttgttcctggccttccggagtgatgcctccgtaggactgtccggttttgccatcgagtttaaggaaaagccaagagaggcttgctttgaccccgggaacatcatgaatgggacccgcgtgggtactgattttaagttgggaagcactataacataccagtgtgacagcggatataagatactcgatcccagttccattacatgtgttatcggggccgatgggaaaccttcctgggaccaggtgctgcccagctgtaatgccccatgcggtgggcagtacactggttctgaaggtgtggttctgtcacctaattacccccacaactacactgctggccaaatctgtctgtattccattaccgttcccaaagaatttgtcgtgttcggtcagttcgcttatttccagaccgccctaaatgacttggccgaactctttgacggaacacacgctcaagctcgcctgctgagctctctgtctgggagtcattcaggcgaaactctgcccctggctacttcaaatcagatcttactgcgctttagtgcgaagtctggggcctctgctcgcggattccacttcgtctatcaggcggtgcctcgaacctctgacacacagtgcagctccgtgccagaaccacgttatgggcgcagaatcggtagcgaattctcagccggttccattgttcgcttcgaatgcaaccctgggtatctgcttcagggttcaacagctctgcactgtcaatcagtacccaacgctctggcccaatggaatgacacgatcccttcatgcgtcgtgccgtgtagcgggaatttcacccagcggcggggcactatcctctctcccggttacccagagccatatggcaataacctaaactgtatttggaagatcatagtcacagaagggagcggtattcagatacaggtgatatcgtttgctacagaacagaattgggactccctagagattcatgacgggggggacgttacagcccccagactgggaagcttttccggaaccaccgtgcccgctctactcaatagcactagcaaccagttgtatcttcacttccagtccgacatctctgtggccgccgcggggtttcatcttgagtataagactgttggattagccgcctgccaggagcccgccctgccttctaattcaattaagattggtgaccgctatatggtgaacgacgttctctcctttcagtgtgagccagggtataccctacaggggcggagtcacatctcctgtatgcctggtacagtgcgccgctggaattatccgtctccgctgtgtatcgccacctgtggaggcaccctgagtaccctaggaggcgtgattctgagcccaggctttccaggttcgtatcccaacaacctcgactgtacctggcgcatctctctccccattgggtacggagcccacatacagtttcttaatttctccactgaagccaaccacgacttcctggagatccaaaatggcccgtaccatactagtccaatgattggacagttcagcgggaccgatttgccagctgcgctgctctcgaccacccacgaaactctgatccatttttatagcgaccatagccagaatcggcagggatttaagctcgcctatcaagcttacgaactccagaattgcccggatcccccgccgtttcagaacggatatatgatcaattccgattacagtgtgggccaatcagtgtcctttgagtgctacccaggctacatcctaataggacacccagttttaacttgtcagcacggaatcaacagaaactggaactatcctttccccaggtgcgacgccccctgtgggtacaatgttacatcccaaaacggaaccatttattcgcccggatttccagacgagtatccaatccttaaagactgcatttggttgattacagtgcctccaggacatggagtgtacataaacttcaccctgctgcagaccgaggcggtgaatgattacatcgcagtctgggatggccccgatcaaaatagcccccagttgggagttttctcaggcaatacagccttagagaccgcatattccagcacgaatcaggtcctccttaaatttcactccgatttctctaatggaggtttcttcgtgctgaatttccacgcattccaactaaagaaatgtcagccaccgcccgccgtcccccaggcggaaatgttaacagaagacgacgattttgaaattggcgatttcgtcaagtaccagtgtcacccaggatatactctggttggcactgatatcctaacatgtaaactgtcctctcagctccagtttgagggttctctgcctacttgcgaggcacagtgtcccgccaacgaggtgcgtaccggatcgtccggtgtcattctcagtcctgggtaccctggaaactacttcaactcgcagacttgcagctggtcaattaaggtggagccaaactataacattacaatatttgtggacaccttccaaagcgaaaaacagtttgatgccttggaagtgtttgacggatcttccggtcagagccccctcttagttgttctctccgggaaccacaccgaacagagcaacttcaccagccgaagcaatcaactgtacttgcgatggagcacagatcatgcaaccagcaaaaagggctttaagatacgctatgccgcaccctattgctcccttactcatcccctgaagaatggggggattctaaatagaacagcaggcgctgttggatccaaggttcactatttttgcaaacccggctacagaatggtaggacattctaatgccacgtgccgacgcaatcccctgggaatgtatcagtgggactccctgacaccgctgtgtcaagctgtcagctgtgggattcccgaatctccagggaacgggagttttaccggaaatgaatttacgctggactccaaagttgtctacgagtgtcatgagggctttaaactggagtcatcccagcaggccacagccgtatgccaagaagatggtctgtggtctaacaagggaaaacctccgacctgcaagccggtggcctgtcctagtatcgaggcgcagttgtcggaacacgtaatctggaggctagtttctgggtccttgaacgagtatggggcacaggtgttgctgtcttgttccccaggatactacttagaaggatggagactcctccgctgccaagcgaatgggacgtggaatatcggcgacgagagaccctcttgccgggtcattagctgtgggtctctctctttccccccgaatggcaacaaaattgggactctgaccgtgtacggagcgacggctatcttcacctgcaacaccggttacacactggtcggttcccatgtgagggaatgtctcgctaatggtctgtggtcaggttcagagaccagatgcctagccgggcattgcggctcgccggatccaatagttaatggccacattagtggcgacggtttctcataccgggacacagtcgtctaccagtgcaaccctggctttaggcttgtcgggacatccgtacggatttgtctgcaggatcacaagtggagtggacagactccagtgtgcgtccctattacatgcggccatcctggtaatccggctcatgggttcaccaatggctctgagttcaacctcaatgacgtcgtgaattttacttgtaataccggctatctgctacagggagtctctcgagcccagtgtcgatcaaatgggcagtggtcaagcccactccccacatgccgcgtggtgaattgctcggatcctggctttgtggaaaatgcaattcggcacggccaacaaaactttcccgaatcctttgaatacggcatgtccatcctctatcactgtaaaaaaggtttttacctgctgggctcaagcgccctgacgtgcatggccaatggactgtgggaccgtagcttaccgaaatgtcttgccatctcctgcgggcaccccggcgtgccagcaaacgccgtcttaactggagagctattcacatacggagccgttgtgcattacagctgcagggggagcgaatccctcatcggcaacgatacgcgcgtctgtcaggaagatagtcactggagcggggctcttccacattgcactgggaacaatcctggcttctgtggcgaccccggcactccagcccacgggtcgcgattgggagatgacttcaagaccaagtccctcctgcgtttcagttgcgaaatgggacatcagctgcgtggtagcccagagcggacatgcctcctaaacggctcttggagcggcctccaacccgtgtgtgaggccgtcagctgtggcaatcctggcactccgacaaacgggatgattgtttcaagcgacggtattctgttctcgtcaagcgtgatctatgcttgttgggagggatataagacatccggactgatgacgcgtcattgcaccgctaacggtacatggaccggcacagccccagattgcaccatcatcagttgcggcgatcccggcacattggcaaacggcatccagtttggcactgacttcacattcaataaaactgtctcatatcaatgtaacccaggttacgtgatggaggcagttacatccgctaccatccgttgcactaaagacggtcgctggaacccatcaaaaccagtgtgtaaagcagtgctgtgcccacagcctccacccgtgcagaatgggacagtggagggaagtgattttcgctgggggtcatctatcagctactcgtgcatggatggttatcagctctcgcacagcgctatcctgtcatgtgagggaaggggggtatggaagggcgaaatcccccagtgtttgcccgtgttctgtggagacccagggatacctgctgaagggcggctctccggcaaatccttcacatataagtctgaagtattcttccaatgcaagtctccgtttatattggtgggctcatcacggcgtgtgtgccaggccgatgggacttggtccgggatccaacccacctgtattgatcctgcacacaatacgtgcccagaccccggcaccccacactttgggattcagaactcatcccgcggatatgaagtcgggtccacagtattttttagatgccgtaagggttatcatatacaaggatcgactacccgcacgtgccttgccaacctaacatggtcaggcattcaaaccgagtgtattccacacgcttgtcgccagcccgaaacaccagcccatgcagatgtgcgcgccattgacttacccaccttcggatacactctggtatatacatgccacccagggttcttcttagctgggggatccgaacacaggacctgtaaggctgacatgaagtggacaggcaagtcacccgtctgtaaaagtaaaggagtgagggaggtcaacgaaacggtgacaaagactcccgtaccgagcgatgtattttttgtgaattctctgtggaaggggtactatgagtacctcgggaaacggcagccagctaccctgaccgtggactggtttaatgccacgagcagcaaggtcaatgccactttttcagaagccagtcccgtggaattaaaactgacagggatctataagaaggaagaagctcaccttttacttaaagcttttcagattaaaggtcaagcagacatatttgttagtaagtttgagaatgacaactggggcttggatggctacgtcagtagtggtcttgaaagagggggcttcacttttcaaggggacattcatggcaaggatttcggaaagtttaagttagagcgccaagatcctctcaaccccgaccaggactcctcctctcactatcacgggacatcttccggctctgttgccgcagccatcctggttccctttttcgccttgatcctctccgggtttgcattctacctctacaagcacagaacaagacctaaggtgcagtacaacggctatgctggccatgagaactccaatgggcaggcctcttttgagaatcctatgtatgataccaacctcaagcccaccgaagctaaagcagtcaggtttgatactactctgaacactgtctgcactgtcgtgtag

SEQ ID NO: 113308 - DNA, 10695 bp, synthetic construct
  misc_feature 1..10695: note = Description of Artificial Sequence: Synthetic coding sequence
  source 1..10695: mol_type = other DNA
atgaccgcctggcgtcgattccagtctctgttattgcttcttgggctactggtcctctgcgctcgcctcctgaccgcagctaagggccagaattgtggaggcctcgtgcagggtcctaacggcactatcgaatctccaggcttcccccacggttaccccaattatgcaaactgcacctggattatcattacgggtgaacgaaaccggatccagctttcgttccacactttcgctctggaagaggatttcgacatcctctctgtgtacgacggtcagcctcagcagggcaacctgaaggtccgcctgagtggcttccagctcccgtcctccattgtttcaactgggtctattttgaccctctggttcaccacagactttgcagtatccgcccagggctttaaggctctttacgaggttctgccaagccacacatgcggcaatcccggcgaaattctgaagggcgtgctacacggaacaagatttaatattggggacaagattaggtatagttgtttgccaggttatatcctggagggccacgcgattctcacatgcatcgtcagtcccggcaatggtgcaagctgggatttcccagcaccattctgtagagcagaaggcgcttgcggaggcaccctgcgaggcacgtccagcagtatttcctcaccgcactttcctagcgagtacgagaacaatgcagactgtacgtggaccatcttagctgaacctggggacaccatcgcactcgtatttacggattttcagttggaggagggttacgatttcctcgagatcagcggaacggaggcaccctctatctggctgaccggaatgaatctgccatcccctgtcatcagtagcaagaattggttgcgattgcactttacatctgacagcaatcaccgccgtaagggatttaacgctcaattccaagtgaaaaaggcaatagaacttaaaagccggggcgtaaagatgctgccttctaaagacggcagtcacaagaacagcgtcctgagccagggaggcgttgctttagtcagcgacatgtgtcctgatcccggaattcccgagaacggcaggagagctggctccgactttagagtcggcgccaatgtgcagtttagttgcgaggataactatgtcttgcagggatcaaagagcatcacatgccagcgtgttactgagaccctggcagcgtggtctgatcatagaccaatctgtcgcgcacgcacctgcggttctaacctgaggggccccagtggtgtaattaccagtcctaactaccccgtccaatatgaagacaacgctcactgcgtgtgggtcatcaccactaccgatccggataaagtgattaagctagccttcgaagagtttgagcttgagcgaggatacgatacccttacagtgggagatgctggaaaagtcggagatactaggtctgttctttacgtgctcaccggaagtagcgtgccagatcttatcgttagcatgagtaatcagatgtggctccatctgcagtccgacgattcaattgggtcaccggggtttaaagccgtgtatcaagaaattgagaaaggagggtgtggggaccctggaatccccgcttacggtaagcgcaccggaagcagctttctccatggtgataccttaacattcgaatgtcccgccgcattcgaactggtgggggagagggtgattacctgtcagcagaacaaccagtggtcgggaaacaaaccatcgtgtgtgttctcctgcttttttaacttcaccgcatcatctgggatcattctttctccaaattacccagaagagtacggcaacaacatgaattgcgtttggctcatcataagtgagccggggtcgcggattcaccttattttcaatgacttcgatgttgagccccaattcgactttctggctgtaaaggacgacgggatttctgacataaccgtgctggggacattctcaggaaacgaagtcccttcacagttagcttcatcaggtcacatagtgcggctggagtttcagagtgatcacagcactacagggagagggtttaatatcacttacaccaccttcggtcagaatgagtgccatgatccaggcatccctattaatggtcgccggttcggggatcgtttcttgctgggtagctcagtaagtttccactgcgatgacgggttcgttaagacccaggggtcagagagcatcacgtgcatactccaggacggaaatgtagtttggtcatctacagtgccgagatgcgaagccccctgtggtggacacctgactgcttcaagcggggtgattctaccccctggctggcctgggtactacaaagactctctacattgtgaatggattattgaggccaagccagggcactctatcaaaatcacgtttgacagatttcagactgaagtaaactatgacacacttgaggttagagacgggccggcatccagctcacccctgatcggcgagtaccacggcacacaggccccccagttcctcatctcgacagggaacttcatgtacctgctcttcacaaccgataacagtagatctagtatcggtttcctgatccattacgagtccgtgactttagaatctgacagctgtctcgaccccggaataccagtaaacggtcacaggcacgggggggactttggcatacggtctacagtgacattttcttgtgatccaggctatacactctctgacgatgagcctctcgtgtgcgagaggaatcatcagtggaatcacgccttgccctcctgcgatgccctgtgcggtgggtatatccagggaaagtcaggtaccgtcctctcaccaggattcccggatttctacccgaattcactgaactgcacatggacgattgaggtctcacatggtaaaggagtccagatgattttccacacttttcacctcgaatctagtcatgactatctcctaatcaccgaggacggatcattctctgaacccgtggctcggttgactggctcagtcctgccacacactattaaggcaggactgtttggcaattttaccgctcaactgaggtttatctccgatttttcaattagttatgagggattcaatattaccttcagcgagtacgatctcgaaccatgtgatgatcccggcgttccagcattttcccgccggatcggcttccattttggtgtcggtgactcgctgacattcagttgcttcctgggttatcgcttggaaggcgccacaaaactcacttgtctcggcggaggaaggcgggtgtggtcagccccacttcctcggtgtgtcgcagaatgtggagccagcgtgaagggaaatgagggtacattgctttcacctaatttcccttcgaactatgataataatcatgagtgtatctataaaattgaaacggaagcaggcaagggcatacacttgcgcacccggtcttttcaactgtttgagggtgacactttaaaggtctacgacggtaaggattcgtcgtcacgcccgctgggcaccttcacaaagaacgagctgttgggcctcatactgaactccacatctaatcacttatggctcgagttcaacacgaacgggtccgacacagatcaggggttccagctgacttatacctcgtttgatctagtgaagtgtgaggacccgggtatacccaattatgggtataggatacgggacgaggggcactttaccgacacagtagtattgtacagctgtaaccctggctatgcaatgcacgggagcaatactctgacatgtctgtcgggagacaggcgggtctgggataagccgctgccctcatgtatcgccgagtgtggcggccagatccacgctgccacctccggcaggatcctgagccctgggtaccccgcaccctacgacaacaatctgcattgtacatggatcatcgaggctgatcccggcaagaccatctctttacacttcattgtgtttgacacagaaatggcccatgatatcctcaaagtctgggatgggccagtagactctgacatcctactcaaggagtggagtggctcagctctgcctgaagatatccacagcaccttcaactcccttacacttcaatttgattctgacttctttatatcaaaatccggattctctatccaattctctacctcgattgctgcgacctgcaacgaccccgggatgccccagaatggtacccggtacggagactcgagggaagcgggtgatactgtgacattccaatgtgatcctggataccagctgcagggtcaagccaagattacatgcgtacagctgaataaccgctttttttggcagccagaccctccgacgtgtatcgccgcttgcgggggaaatctcactggccctgccggggtaatcttgagccccaactatcctcagccatatcctcccggtaaggaatgcgactggagagtaaaggtcaatccggactttgtgatcgccctcatttttaagtcattcaatatggagccctcttatgactttctacacatatacgagggcgaagatagtaattctccactgattggaagctaccagggcagccaggcccccgagaggatcgaatcttcggggaactctctctttctagccttccggagtgacgcctctgtcggtttgagtggttttgctatcgagttcaaggaaaaaccaagagaggcctgcttcgacccagggaatatcatgaacggtacacgcgtgggaaccgacttcaaactggggagcacaattacctaccagtgcgattccggctacaaaattctcgatccgtcttcgatcacctgcgtcattggggcagacggtaaaccctcttgggaccaagtcctgccctcctgcaacgcaccttgcggcggacagtacacagggtctgaaggagtggtactttcccctaattaccctcacaattacactgctggccagatttgcctgtactctatcaccgtccctaaggagtttgtggtgttcggccagtttgcttacttccagaccgcgctcaatgacttggccgagttgttcgacggaacgcacgctcaggcacgcctattgtccagtcttagcgggtcacactctggagaaacactccctttagcaacatccaatcagatcctcctgaggtttagcgccaagtccggggcctccgcgagagggttccatttcgtgtaccaggcggttcctagaacttctgacacgcaatgttcctcagttccggagccacgatatggacgacggatcgggtctgaattttccgctggcagtatcgttcgatttgagtgtaatccaggatacctgctgcaagggagcacagcactgcactgccagagtgtgcccaacgctttggctcaatggaacgatacaatcccgagctgtgtggtcccctgctcaggaaactttactcagcggcggggcaccattctttccccggggtacccggagccttatgggaataatctaaattgcatttggaaaattatcgtcaccgaaggatccggtatccaaatccaagtgatatcgttcgctacagaacagaattgggactcgttggagatccatgacggtggggatgtcacagcacctcgactgggatctttttccgggaccacagtgcctgctttacttaacagcacatccaatcaactgtatctgcactttcagagcgacatttccgtcgcagctgccggattccacctagagtataagaccgtggggcttgcagcatgtcaggagcctgccttgccctccaattctataaaaatcggggatcgatacatggtaaacgatgtgctgtccttccagtgcgaaccagggtacaccctgcagggtcggagtcacatatcctgtatgccagggacagtgcgcaggtggaactaccctagccccctctgcatcgccacatgtggaggtactctctcaaccctgggcggagtgatactgtcaccaggatttcctggatcataccccaacaatctggattgtacctggagaatctcattaccaattggttacggcgcacacattcagttcctaaatttctctacagaggctaaccacgacttcctggaaatccagaacgggccataccatactagccctatgataggacagttttcaggaactgacctgcctgcggctctgctgtctacaacccatgaaaccctcatccatttctatagtgatcacagccagaatcgacagggctttaaactcgcctatcaggcgtacgagcttcagaattgccctgatccacccccgttccagaatggctacatgattaactctgattactccgttgggcagagtgtcagcttcgagtgttatcctggttacattctgattgggcatcccgtgttaacctgccagcatggtatcaaccggaactggaactacccctttccgaggtgtgacgccccttgcggctacaatgtgaccagtcagaatggaactatctattctcctggctttcctgacgagtatccaatactcaaagactgtatatggctgataacagtacctcctggtcacggagtgtatatcaacttcacccttcttcagacggaggctgtgaatgattatattgcagtctgggacggtcctgatcagaattctccgcagctgggtgtattttctggtaatactgcccttgagaccgcttactcatccacaaaccaggtgttgctgaagtttcattccgacttcagtaatggtggatttttcgtccttaattttcacgcgtttcagctcaaaaagtgccagcctcctccagctgttccacaagccgaaatgctgacggaagacgacgacttcgagataggggacttcgtcaagtaccagtgccatcctggctacactctggttggaaccgacatcctcacttgtaagctgtcctcacagctgcagttcgaggggagtctacctacttgtgaggcccagtgccctgccaatgaagtgcggaccggttcctcaggtgtgatcttgtcccctgggtaccccggaaactactttaactctcagacatgctcatggtcaataaaggttgagccaaattataacattacgatcttcgtggatacctttcaaagtgagaaacagttcgatgcccttgaggtcttcgacgggtcctccgggcagtccccattgttagtggtgctgtccgggaatcataccgaacagtctaatttcactagtcggagcaatcagttgtatttgcggtggagtacagaccatgccacttctaagaagggattcaagataagatatgcggctccctactgttccctgacgcatcccctcaagaatggcggaattctaaaccggactgccggcgctgtcggatcgaaggtccactatttctgcaaaccgggttaccgtatggtggggcacagcaacgccacttgtagacgcaatccacttgggatgtaccaatgggactcgctcacccccctgtgtcaagccgtatcctgcggcatccccgaaagccctggtaatggaagctttaccgggaatgagttcaccctggactctaaagttgtgtacgagtgtcatgaagggtttaagctcgagtcatcacagcaggccaccgccgtttgtcaggaggatggtctctggtctaataaaggaaaaccaccaacttgtaagccggtcgcttgtccctctatcgaagctcagctatcagagcacgtaatttggcgcctcgtaagcgggagccttaacgagtacggagcccaagtccttctctcatgttctccagggtactacctggaggggtggaggctgcttaggtgtcaggccaacggcacatggaacattggcgatgaaagaccatcatgtcgggtgatttcgtgcggttctctgtctttccctcctaacgggaataaaattggaacactgacagtgtacggggccaccgcaattttcacctgcaacactggatacaccctagtgggttcacatgttcgcgagtgcctggcaaacgggttgtggtcaggctccgagacacggtgtttggcagggcattgcggaagccctgatcctattgtcaacggccacattagcggcgacgggttttcttaccgcgatacggtggtgtaccagtgcaacccaggcttccgccttgtcgggacctcggtgagaatatgcctacaagatcacaaatggtccggccaaacgcccgtgtgtgtgccaatcacttgtggtcaccccggcaatccagctcacggcttcaccaatgggtctgaatttaatttaaacgacgtcgtcaattttacctgtaacactggttatctcctccagggagttagtcgagcccagtgcaggtctaatgggcagtggtcttctccccttccaacctgtagggtggtgaattgcagtgaccccggttttgtggagaacgctatcagacacggtcagcagaactttcccgagtctttcgagtatgggatgagcattctttaccattgcaagaagggcttttatctgttagggtcttccgctctgacttgcatggccaatggcctgtgggaccggtctttacctaaatgcctggcgatctcttgtggccacccaggagtgcctgctaatgccgtgttgaccggcgagctcttcacatacggtgccgtggtacactactcctgcaggggatcggagtctctgattggcaacgacacccgggtgtgccaggaagattcacactggagcggggcactccctcactgtaccggcaacaatccgggattctgcggcgaccccggcactccagcccatggaagccgcctgggcgatgacttcaagactaagtccctgttgcgattctcctgcgagatgggacatcagctgcgtggatcccccgaacgcacatgtcttctcaacggctcatggagcggacttcaaccagtgtgcgaggcagttagttgcggaaaccccggaaccccgaccaatggaatgatcgtaagttccgatggcatcttatttagctcaagtgtcatctacgcctgctgggaaggctacaagacctcagggcttatgacaagacactgcacagccaatgggacttggacaggcacagctcccgattgtacgattatttcatgcggggaccctggaaccctcgccaatggcattcagtttgggactgattttacctttaataaaacagtgagctaccagtgtaatcctggctacgtaatggaagccgtcacatcagctaccattcgatgcactaaagacggcaggtggaacccaagcaaacccgtttgtaaagccgtcctgtgtccccagccaccgccagtgcagaacggaacagtggagggaagcgacttcaggtgggggtcttccatctcctacagctgcatggatggatatcagctctcacactccgcgatattgagctgtgaggggagaggcgtctggaagggcgaaatacctcagtgtctgcctgttttctgtggcgatcctggcattcccgctgagggacggttgagcgggaagtcctttacatataagtcagaggtcttctttcagtgtaagagcccatttatcctggtcgggtcaagcaggcgagtgtgccaagctgatgggacttggtctggcatacagcccacttgcatagatcctgctcataacacctgccctgaccctgggacaccccattttgggatccagaacagttctagaggctacgaagtggggagcaccgttttctttaggtgccgcaaaggataccacatacagggaagtactacacgcacctgcctcgccaacctcacctggtcaggcatccaaaccgaatgtattcctcacgcttgcaggcaacctgagaccccagcgcacgcagacgtgcgggcgatcgatctgcccacctttggttacaccctggtgtacacctgccacccaggtttcttccttgccggaggctctgaacaccggacctgcaaagccgacatgaagtggacgggtaaaagtcccgtctgtaaatcaaaaggagtacgggaggtcaacgagaccgttactaaaacacccgtcccttccgacgtattcttcgtgaacagtttgtggaagggttactacgagtacctgggcaagcgtcagccagctacactcaccgtggattggtttaacgcaacctcttcaaaggtgaacgctactttctccgaggcctcaccggttgagctcaaattaactggcatatacaagaaagaggaagcacacctcctccttaaggcattccagatcaaaggtcaagcggatatctttgtcagtaagttcgaaaacgacaactggggactagacggctatgttagctccggcttggagagaggtggattcaccttccagggcgatatacacggcaaagatttcggaaaatttaagctggagcggcaggatccactgaatccagaccaggacagctctagtcattatcacggtactagctctggttcggtggcggccgccatcctagtgccttttttcgccctcattctgagtggattcgctttctacctctacaaacatcggactagacctaaggttcaatataatggatatgctgggcatgagaattctaacgggcaggcttctttcgagaatccgatgtacgacaccaacctcaaaccaacagaggccaaagccgtgcggtttgacacaacccttaatactgtttgcactgtcgtgtag

SEQ ID NO: 113309 - DNA, 6330 bp, synthetic construct
  misc_feature 1..6330: note = Description of Artificial Sequence: Synthetic coding sequence
  source 1..6330: mol_type = other DNA
atgactgcctggcggcgattccagagcctgctgctcctgctaggcttgctcgtgctgtgtgctaggctgttaacagctgctaaagggcaaaactgcggcggcttggtccaggggccaaatgggaccatagaatccccgggcttccctcacggataccccaactatgccaattgcacctggatcataataactggtgaacgaaatcgtatccagctgtcttttcacaccttcgccctcgaggaggattttgacatcctaagtgtttacgatgggcagcctcagcaggggaatttaaaggttcggctttccggctttcagctgcccagttccatagtcagcaccggatctattctaactctgtggttcaccacggactttgctgtgagtgctcagggattcaaggctttatatgaggtgctgccatcccatacgtgcggtaatccaggcgagatcttgaaaggggtgcttcacggcactcgcttcaatatcggggataaaattaggtactcctgcctgccaggttacatcctggagggtcacgcgatattaacttgcatagtgtcacccgggaacggagcatcttgggatttccccgcacccttctgcagggccgaaggagcttgtggagggacattgcgaggcactagctctagcatctcctctccacactttcctagtgaatacgagaacaatgccgactgtacatggaccatcctggcagagcctggcgataccatagccctggtatttacggacttccagctggaagagggatatgactttttagagatttccgggaccgaggctccatctatttggttgactggaatgaatctgccatcccccgtgatttcatccaaaaattggcttaggctgcattttacatcagacagcaatcaccggcgcaaagggttcaacgctcagttccaggtaaagaaggccatcgagctgaagtctcgcggagttaaaatgcttccctcgaaagacggttcccataagaacagcgtgctgtcacaggggggagtggcgctcgtcagcgacatgtgtcctgatccaggcattccagagaatggacgccgtgccggttccgactttagggtcggcgctaatgtgcagttctcctgcgaggataattacgtcttgcaggggtcaaaaagcattacttgccagcgggttacagaaactctcgccgcgtggagtgaccacagacccatatgcagggcgagaacctgtggcagcaacctgcgtggcccctcaggcgtcataacctctcctaattaccccgtgcagtatgaagataatgctcattgcgtgtgggtgattacaacaaccgaccctgacaaagttattaagctggcttttgaagagttcgagctcgaaagaggttacgacactttaacggtcggtgacgccggcaaggtgggtgatactcgatctgtgttgtatgtgctaacgggcagcagcgtacctgacttaatcgtgtccatgagtaatcagatgtggctgcacctgcagagcgatgacagcatcggctctcccggcttcaaagcagtttaccaggaaattgagaagggtggatgcggtgacccaggtattccagcctacggtaaacggactggatcaagcttcctgcatggagatactcttacattcgagtgcccagctgcctttgagctggtcggtgagcgggtgatcacctgtcagcagaacaaccagtggagcggcaataaaccttcatgcgtatttagctgtttcttcaacttcactgcgtcctccggcataatcctgtcaccaaattatccggaggaatacggaaacaatatgaactgtgtatggctgattatcagcgaaccgggcagtaggatccatcttattttcaacgatttcgatgtggagcctcagtttgatttcctggctgtgaaagacgacggaatatcggacatcacagtgctgggaaccttctccggtaatgaggttccgagtcagctggccagcagcggccacatcgttagactcgaattccagtcggatcattccactactggaaggggcttcaatatcacatatacgaccttcggccagaatgaatgccatgatcctggcattcctatcaacgggcggcggttcggcgaccggttcctattaggaagctccgtctcattccactgtgatgatggattcgttaagacgcagggctctgaaagcatcacgtgcatcctgcaggatggaaatgtggtctggtccagtacggtgccccggtgcgaggccccatgtggggggcacctaacagcttcatccggcgtgatactgccaccggggtggcctgggtactataaggacagcctgcactgtgagtggattattgaggccaaacctggccacagcattaagataacattcgataggtttcagaccgaggtgaactatgacacactggaagtccgggatggccctgcctcctcctcccccttaattggagaatatcacgggacccaagctccacagtttctaattagcacgggtaatttcatgtacctgctttttacaactgacaactctcggagctctataggctttcttattcactacgaatcagtgactctcgaaagcgatagctgtcttgaccccggtattcctgtcaacggtcaccgtcacggcggggactttggaattcgctccaccgtgaccttttcttgtgacccaggatacacgctgtccgacgacgaacctctcgtgtgcgagcgaaaccaccagtggaatcatgctcttccctcatgtgacgcgctttgcggcggctacattcagggcaaatccgggacagtgctgagccccgggtttccagacttttacccgaatagcctgaattgtacatggaccattgaagtgtctcatggtaagggagtgcagatgatctttcatacgttccacttggagagtagccatgattacctgctgatcactgaggacggttctttcagcgagccagtggcacggcttactggcagcgttctaccccataccatcaaagccggcctcttcggaaattttaccgctcagttgaggttcatctccgacttctcaatcagctatgaagggttcaacattactttttccgagtacgacctagagccatgtgacgacccaggagtgccagctttttccagacgtattggcttccatttcggagtgggtgactctctcacctttagttgctttctcggatatcgcctggagggtgctaccaaactcacttgtctcggtggaggcaggagagtctggtccgccccactgcctcggtgtgttgcagaatgcggagctagcgttaagggcaatgagggcacactgctgtctccgaattttccgtcaaactacgataacaatcatgaatgtatttacaagatcgagactgaggctggcaagggcatacatctccgtaccaggtccttccagctctttgaaggagacacccttaaagtgtacgacggcaaagattcctctagccgccctctaggtaccttcacaaagaatgagcttctgggcttgatcctcaattctacaagcaatcatctgtggcttgaattcaacacgaacggatcggacacagatcagggcttccagctgacgtataccagttttgacctcgttaagtgcgaggacccagggatccccaattacgggtatcgaatcagggatgaggggcacttcactgatactgtggtgctgtatagctgtaatccgggctatgccatgcacggaagtaataccctgacatgtctgtccggggacaggcgcgtctgggataagccacttccgtcttgcatagctgaatgcggtggacaaatccatgccgctacgagcgggagaatactcagccctggatacccagcaccatacgataacaatcttcattgcacctggatcattgaggctgaccctggaaagacgatctcactacattttatcgtgtttgacaccgaaatggcacacgatattctcaaggtatgggacggcccagtcgactctgacatcctcctaaaggagtggtccggcagtgccctccccgaagacatccatagcacctttaacagcttaacgctacagttcgacagcgatttcttcatctctaaaagcggatttagtatccaattttctaccagcatcgccgctacttgcaatgatccggggatgccacaaaatggtacgcggtatggggactcacgcgaggcaggcgataccgttactttccagtgcgatccaggatatcaactccagggccaagcaaagataacctgcgtccagctaaataataggtttttttggcagcctgaccctccgacttgcatcgcagcctgtggagggaatctgacaggacctgccggcgtaatcctaagccccaactacccacagccgtacccccctgggaaagagtgtgactggcgcgtcaaggttaaccctgatttcgtcattgccctgatatttaaatcattcaatatggagccttcgtatgatttcctgcacatctatgagggcgaggatagtaactcacccctgattgggtcttaccagggatcacaagcaccggaacgtatagagtccagcggcaactcactgttcctggccttcaggtccgacgcctcggttggactgtctgggtttgccatcgagttcaaggaaaagcccagagaagcatgttttgacccgggaaatataatgaacgggactcgcgtcggcactgattttaaactgggaagtaccatcacctatcaatgtgacagcggatataagatcctcgatccttccagcataacctgcgtcatcggcgccgacgggaagccaagttgggaccaggtcctccccagttgtaatgctccctgcggcggccaatacacaggatcagagggcgtggtactcagccctaactaccctcacaactacactgctgggcagatctgcctttacagtattaccgtgcctaaagagttcgtcgtgtttgggcagtttgcctatttccagactgcgctgaatgatctggccgagctgttcgacgggacacatgcgcaggccagactactgtcatcactttccggctcacattctggcgaaaccctgcctctggctacctcaaatcaaatcctgttgagattctcagcgaagtctggggcatccgcccgaggattccattttgtctaccaagctgtacccagaacaagcgacacacagtgtagttccgtgccagagccacgctacggaagacggataggctccgagttttcggcaggctccattgtccgtttcgagtgcaacccgggatatttgcttcaggggagcactgccctccactgccagagtgtgccgaatgctctggcgcagtggaacgacaccatccctagctgcgtcgttccatgcagtggaaacttcacacagagaaggggaacaattctgagtcccgggtatccagagccctatggcaataaccttaactgcatatggaaaataattgtcacggaggggtccggcatccagatccaggtcattagttttgcaacagaacagaactgggattccctggagatccatgacggaggagacgttactgcccctagactaggcagcttctccgggacaactgtacctgccctactgaactcaacgtcaaaccaactgtatctccattttcagtcagacatctccgtggcagccgccggttttcacctggagtataagacagtgggcctggctgcttgtcaggagcctgctctgcctagcaacagtatcaaaatcggcgacaggtatatggttaatgacgtcctcagcttccaatgcgaacccggctatactcttcagggtaggtcccacatctcctgcatgccgggaaccgtacggagatggaactacccctctcctctgtgtattgccacctgtggtggaaccctctctaccctgggaggcgtgatattatccccgggctttcccggctcatatccgaacaacctcgattgtacatggagaatcagtctgcctataggatatggcgcccatatacagtttcttaactttagcaccgaggcaaaccacgatttcctcgagatacagaacggaccatatcacacgtctcctatgatcggacagttttccggaacagacctgcccgctgcattactaagtacgacacacgagactctcatacatttctatagcgaccacagccagaatcgccagggattcaaacttgcttatcagggtgggtctggcaatatcgggccagccttcccatgcctggacacgccctttcaggcccgatgtcagggagaggaacggaccttcaactag

SEQ ID NO: 113310 - DNA, 10164 bp, synthetic construct
  misc_feature 1..10164: note = Description of Artificial Sequence: Synthetic coding sequence
  source 1..10164: mol_type = other DNA
atgactgcctggcggcggtttcaaagcctgctactcctgctgggactccttgtgttgtgcgcacgcttgctcactgctgcgaagggccagaactgcggaggcctggttcagggacccaacggcacgattgagtccccagggtttccgcatgggtatccaaattacgcaaactgtacttggatcattataacaggtgaaaggaaccgaattcagctgtcttttcacacatttgcattggaggaggacttcgatatactgagcgtatatgatgggcagccccagcagggaaatcttaaggtaagactgtctgggtttcagcttccgtcatctatcgtgtctacaggctccattctcactttgtggttcacaactgacttcgccgtatcagcccagggctttaaggccctgtatgaagttttaccctcccacacttgcggcaaccctggagagatcttaaagggggtcctccacggaacaagattcaatatcggtgacaagatccgctactcttgcttacctggctatattctggagggccacgcaatactgacttgcatagtgtctccaggaaatggtgctagctgggatttccccgccccattctgtcgggccgagggggcatgcggcgggactttgcggggcaccagtagctccataagcagcccacatttcccctctgaatatgaaaataacgccgactgcacatggaccatattagccgaacccggagatacaattgctctggtgttcacagatttccagctcgaagaagggtacgacttcctggaaatttctggcacggaagcaccatccatctggctgaccggaatgaatctccccagccccgttatctcttccaaaaattggctgcgcctgcactttacatctgactccaatcaccgtaggaagggcttcaacgcacagttccaggtcaaaaaggctatcgagttaaagagtagaggcgtaaagatgttgcccagcaaggacgggagccacaagaactctgtgctctcccagggcggggtcgctctggtgtccgacatgtgcccagacccaggtattccagagaatggcagaagggctggcagcgacttcagagttggcgccaacgtgcagttcagctgtgaggacaactacgtgctacagggcagtaagagcataacctgtcaaagagtgacagagactcttgctgcctggtccgaccaccgccccatttgtcgcgctagaacatgtgggagcaatctgaggggcccctccggcgtgataacctccccaaattatcccgtgcagtacgaagataacgcgcattgcgtgtgggtaataaccactacagacccagataaagtgatcaagctagcgtttgaggagtttgagctggagaggggttatgataccctgactgtgggcgatgccgggaaggtcggagataccaggagtgtactctacgtgctaacaggatcttccgtgcctgaccttatcgtgtctatgtcaaaccaaatgtggctgcacctgcagtctgacgatagcataggctcaccagggttcaaggctgtttaccaggagatcgagaagggggggtgtggcgatcctggcatccccgcctacggcaagcgcactggatcctcattcctgcatggcgacaccctgacttttgaatgtcccgcagcatttgaattagttggagaaagggtgatcacttgccagcaaaacaaccagtggtcagggaacaaaccaagttgcgtattcagctgtttctttaactttaccgcttcatctggaatcatactatcacccaattaccccgaggagtatggcaacaatatgaactgcgtctggctgattatcagtgaacccggctccaggatccatttgatctttaatgactttgacgtggaacctcagttcgattttttagccgttaaggatgacgggattagtgacattacggtgctcggcactttctccggaaatgaagtgccatcgcagctggcatccagcggccacattgtgaggctggaatttcagagcgatcacagcaccaccggcagaggctttaatatcacttacacaacctttggccaaaacgaatgccatgaccctgggattccgatcaatggccggaggttcggtgatagattcctgttagggtctagtgtaagctttcactgcgacgatggctttgtgaagacacaggggagtgaatccattacctgtatcctgcaggacgggaatgtcgtctggtcttccactgttcctcggtgcgaggcgccttgtggaggtcatctgacagcctcctcaggagtaattctgcctcccgggtggccgggctactataaggattccctgcattgcgagtggattattgaggctaagcctgggcactccatcaaaattacctttgaccgcttccagaccgaggtgaactatgataccctggaggtccgtgatggcccagcaagctctagccctctgattggggagtaccacggcacacaggccccccagtttctgatctcaacaggcaacttcatgtatctgctcttcactacagacaactctcgctcctccattggctttctcattcattacgagtccgtgacactagagtctgactcttgccttgatcccggaattcccgtcaacggacacaggcacggtggagattttggcattcgcagtactgtgacttttagttgtgatccaggatatactctgagcgacgacgagccactagtctgcgaaaggaaccatcagtggaaccacgcattaccttcatgcgacgcgctctgcggtggctacatccaaggcaagagtgggaccgtgttaagtccaggcttcccagatttctacccaaacagcctgaactgtacttggaccatagaggtgtcacacggcaagggcgttcagatgatcttccacaccttccatttagagagctctcatgattatctcctgatcactgaagatggatcctttagcgaacccgtggcacggcttacaggatccgtgctgccccacacaatcaaggcgggtctatttggcaacttcactgcacagttgcgatttatttccgacttctctatcagttacgaaggattcaacatcactttttccgagtacgatctggaaccttgcgatgacccaggcgtccccgcgttttccagacgaatcgggtttcacttcggagttggcgacagtcttaccttttcttgttttttgggctacaggttggaaggtgctaccaaactcacgtgcctgggcggcggacgtagagtctggtccgcaccgcttcctcgttgtgtcgccgagtgcggagcctccgtcaaaggcaacgaggggactctgctgtctccgaacttccctagtaattacgacaataaccacgagtgcatttataaaattgagacagaagccgggaaaggaatccatctgagaacacggagcttccagctgttcgagggcgacacactgaaagtatacgacggaaaggacagctcctcccgtccgcttggaacttttacaaaaaacgaactcttggggttgatcctcaattcaacttctaaccatttatggcttgagttcaacaccaacggctccgatacagaccaaggctttcagcttacatatacgtcatttgaccttgtcaaatgtgaggaccctggtatccctaactacggctatagaatccgggatgaaggccacttcacagacactgtcgttctgtatagctgtaatccaggatacgcaatgcatggttcaaacaccctgacctgtctcagtggagatcgaagagtgtgggataaaccactccctagctgtatcgcggaatgtggcggccaaatccatgccgctacctctggtcgaattcttagccctgggtacccagctccatatgacaataacctgcattgcacctggattatcgaggccgacccaggcaagaccataagcctgcacttcatcgttttcgacacagaaatggctcacgacattctgaaggtctgggacggaccagttgatagcgatatcctcctgaaggagtggagtggaagcgcccttcctgaggacattcattctacattcaattcgctcacccttcagttcgactccgatttcttcatttccaagtctggatttagtatccagttctccacatcgattgccgctacttgtaatgaccctggcatgccacagaatggaaccaggtacggggattcacgcgaggctggcgacaccgtgactttccagtgcgaccccggctaccaactgcagggacaggcaaagatcacatgcgtccagctgaataaccggttcttctggcagccagacccacccacttgcatcgctgcttgtggaggcaacctcaccggaccagcgggagtgattctgtcgccaaactatccccagccctaccctcctggcaaagaatgcgattggcgggtcaaagtgaatcccgattttgtcatagcactcatctttaagagtttcaacatggaaccaagctacgattttctgcacatttacgagggggaggactcaaattcccccttaattggctcataccaaggtagtcaggcccctgaacggattgagtcctctggaaatagcctttttctggcctttcggagcgacgctagcgtgggcctgtcagggttcgccattgagttcaaagaaaaacctcgtgaggcctgcttcgatccagggaatattatgaatggcactcgggtgggcacggattttaaacttgggtcaacgattacttatcagtgcgatagtgggtacaaaatcttggacccatcttctatcacctgcgtcattggcgcagacgggaagccatcttgggaccaagtgttgccatcttgtaatgccccctgtggtggccagtataccggaagcgaaggcgtggtgctgtctcctaattacccccataattatacagcaggccaaatttgcttgtattctattactgtaccgaaagaatttgtcgtgtttggccaatttgcctactttcagacagcactgaatgatctggctgagctgtttgacgggacccatgcccaggccagactgctatcatccttgtcaggatcacacagtggtgaaacactgcccctggccacctccaaccaaattctgctgcggttcagtgcaaagagtggcgcctctgccagggggtttcatttcgtctatcaggctgttcctcgcacaagtgatacccagtgctcttcagtgccggaacctaggtatggacggcgcatcggcagtgagttcagcgcaggctctatagtgaggttcgagtgtaacccaggctatctcctgcaaggttctaccgctctgcactgtcagtctgtgcccaatgccttggcacagtggaacgataccataccctcatgtgtggtgccctgcagtgggaactttacccagcgccgtggcactatcttaagccccgggtaccctgagccttacgggaataatctgaattgtatatggaagatcatcgtgactgagggcagcggaatacagattcaggtcatttcttttgcaacagaacaaaattgggactccctcgagattcatgatggtggggacgtcaccgcccctcgtctaggctcctttagcggcactaccgttcccgccctcctaaactcaacaagtaatcaattgtacctccactttcaatcagatatatccgtggctgccgctggatttcatttggaatataaaactgtcgggctggctgcctgtcaggaaccggccctgccaagcaactccataaagatcggagaccgttacatggtgaacgacgtactgtcatttcagtgcgaacccggatatactctacagggcaggagccacatctcctgtatgcctggcacagtccggcgttggaactacccaagcccgctttgtatcgctacatgcgggggcaccctttcaactcttgggggagtgattctttccccaggttttcctggctcttatccgaataaccttgattgcacttggcgcatttcattaccaattggttacggtgcacatattcagtttctcaatttcagcacagaggccaaccacgattttttggagatccagaatggcccttaccatacatcccccatgatcggccagttttcaggtactgatctgcccgccgctctgctgtccaccacccatgagacccttatccacttttactcagaccatagtcaaaaccgacagggctttaagctagcgtaccaggcctacgagctgcagaactgccccgaccctccgccttttcagaatggctacatgatcaacagtgattacagcgtgggccagtcggtgtcttttgagtgctaccctggctatatacttatcggccaccccgtgctcacgtgccagcacggaatcaaccgcaactggaattatcctttccctaggtgtgacgctccctgtggatacaatgtgacatcccagaatgggaccatttattcgcctggctttccagacgaataccccatactgaaagactgcatatggctcatcacagtcccaccaggtcacggggtgtacatcaatttcacacttctgcagactgaagccgtaaacgattacattgcagtgtgggacggccccgatcagaacagccctcagctcggagtttttagcggaaatacagcacttgaaactgcgtactcttcaaccaatcaggttctgctaaaattccacagcgacttcagcaacggtggctttttcgttctaaacttccacgccttccagcttaagaagtgtcagcccccccccgcagtcccccaagccgagatgcttaccgaggacgatgactttgagatcggagactttgtaaagtaccagtgtcatccggggtatacgttggtgggcactgacatcctaacttgtaaactgagctctcaactccagtttgaaggctcactccccacttgcgaggcccagtgccctgctaatgaagtgagaaccggatcttccggcgttatcctgtccccgggatatcctggcaactattttaatagccagacgtgcagctggagtatcaaggtggaaccgaactacaacatcactatttttgtcgacacttttcaatccgaaaagcagtttgatgcactagaggtcttcgacgggtcctcagggcagagtcccctgctggtggtcctgtctgggaatcataccgagcagagcaatttcacgagccgttccaaccagctgtacttgagatggagcaccgatcatgccacatccaaaaaagggttcaaaatccgctacgctgcaccatactgttcccttacccatcccctgaaaaatggtggcatcctcaataggaccgctggggccgtggggtctaaggtccactacttttgcaagccaggctacagaatggtgggacattcaaacgcgacttgtagacgcaacccactggggatgtatcaatgggactccctcacaccactgtgccaagctgtttcctgtggcattcccgagtcgcctggtaacgggagttttaccggtaatgaatttaccctagattcaaaggtcgtgtatgagtgtcatgaaggcttcaagttggagagcagtcagcaagccactgccgtgtgtcaggaggatggtctatggagcaacaaaggcaaacctccgacctgtaaaccagtggcctgtccgagtatcgaggcacaactctcagagcacgtgatctggcgactcgtgtcaggctctctaaacgaatacggagctcaggttctgcttagctgctcccctggctactatcttgaggggtggaggctcctcagatgtcaggcaaatgggacatggaacattggtgatgaacggcctagctgtcgggctggacactgtggatcaccagaccccattgtgaatggtcatatatctggagatggattcagctacagggacacggtggtgtatcagtgcaacccaggcttccgcctcgtgggcacctcagttaggatctgtctccaggatcacaaatggtctggacaaactccagtatgtgtgccgataacgtgcggacatcccggcaatcccgctcatggctttacaaacggttcagagtttaatttgaacgatgtggtcaactttacatgtaacactggatacctgttgcaaggggtcagccgagcgcagtgcagaagtaatgggcagtggtcgtccccccttcccacctgtagagtggtaaactgcagcgaccctggctttgtggagaatgctataagacacggccaacagaacttcccagagtccttcgagtacggtatgagcatcttgtatcattgcaaaaaaggattttacctgctgggatccagtgcattaacgtgcatggccaatggtctgtgggaccgcagcctccccaagtgtttggcgattagctgtgggcatccaggggtcccagccaacgccgtgctcacgggagagcttttcacctatggcgccgtagttcattactcctgccggggatctgagagcctgatcggaaacgacacaagggtctgtcaggaggattcccattggagtggcgcactcccccactgcaccggcaacaacccaggcttctgcggagaccccggaacgccagcacatggaagcaggctcggcgacgattttaaaaccaagagtttgctgcgattttcttgcgagatgggccaccagctcagaggttcaccagagaggacatgtctccttaacggcagctggtccggactccagccggtctgcgaggctgtgctgtgtccccagcctccccctgtacagaatggcactgtggagggctctgacttcagatgggggtcatccatctcttacagctgcatggacggctaccaactgagtcattccgcaatcctgagctgcgaaggccggggcgtgtggaaaggggaaattcctcagtgtctgcccgtattctgtggcgatccgggcatccctgctgagggccggctgagcggcaaatccttcacttataaatcggaagtgtttttccagtgcaaaagcccttttatcttagttgggagcagcaggcgcgtatgtcaggcggatggaacttggtccggaatccagcccacctgcattgaccccgcacacaatacatgtccagatcccgggacccctcacttcgggatccagaacagttccaggggctacgaagtgggcagtacagtgttttttcggtgtaggaagggatatcacatccagggcagtaccacccgtacatgcctcgccaatctgacatggagcggaatccagactgagtgtattcctcacgcttgccggcagcctgagactcccgcacacgccgatgttcgcgctatcgacctgccaaccttcgggtatacattggtgtacacgtgccatccaggttttttcctggctggcggctccgaacatcgcacctgtaaggccgacatgaaatggacgggcaaaagccccgtgtgcaagtccaaaggcgtgagggaagtaaacgagacagtcaccaaaacacctgtgccaagcgacgtgttctttgtaaatagtctatggaagggttattacgaatacctgggcaagcgccagcccgcaaccctgactgtggactggttcaacgcaacaagcagcaaggtcaatgccacattttcggaggcttcccccgtcgagctgaagctgactggcatatacaagaaggaggaggcgcatctgcttcttaaagccttccaaattaagggccaggccgacatattcgtgagcaagttcgagaacgacaactgggggcttgatggttacgtcagctccggcctcgaacgggggggcttcacgttccagggagacatccacggcaaggattttggtaagttcaagttggagaggcaggacccgttaaaccccgatcaggacagctcttcacactaccacggaacatccagcggcagtgtcgctgcggccatcctagtcccatttttcgccctgatactaagtggatttgccttctatctgtacaaacatcggacaagacccaaggtgcagtataacggctacgccggacacgaaaactcaaacggtcaggccagctttgagaacccgatgtatgatacaaacctgaaacctacagaggctaaggctgttaggttcgacaccaccctcaacacagtgtgcacagtggtgtag

SEQ ID NO: 113311 - DNA, 10464 bp, synthetic construct
  misc_feature 1..10464: note = Description of Artificial Sequence: Synthetic coding sequence
  source 1..10464: mol_type = other DNA
atgagattaatctctatcgcacctggcccacgatggcaggttcagtcacaccatccacgttctgccggtcaaaattgcacattccagctacacgggcccaacggaaccgtggaaagcccaggtttcccatatgggtatcctaactacgcgaactgtacctggactatcacagctgaagaacagcaccgcatccagttagtctttcagagtttcgcactggaggaggactttgacgtcttaagtgtcttcgacgggcctccccaaccggaaaatctgcggacccggctgacaggattccagctgcctgccactattgtttccgccgctacaaccctcagtcttcggctcatctccgattacgcagtctccgcccagggatttcacgccacttatgaggtgctcccatctcatacgtgtggtaatccaggacggctgccaaacggaatccagcagggcagtacgttcaacctgggcgataaggtccgctattcttgcaacctgggcttcttcctcgagggacacgcagtcctcacctgccacgcaggcagcgagaatagtgctacctgggattttcctctccccagttgcagagctgacgatgcgtgtgggggcacattgcgaggccagtctggcataattagtagcccgcacttcccatccgagtaccacaataatgccgactgtacttggacaatcctggcagagttaggcgatacaatcgcattggttttcatcgacttccagctggaggacggctacgattttctagaggtaacggggaccgaagggtcctccctgtggttcaccggcgcgtctctgcccgcacctgtgataagctccaagaactggctgcggctgcattttacctcggatgggaaccacaggcagcgggggttctccgctcagtatcaggtgaaaaaacaaatcgaactcaagtctagaggggtcaagctcatgccctcaaaggacaattcgcaaaagacctccgtgctgactcaggtcggagtctcccagggccacaatatgtgcccagaccccggtatcccggaacgcggcaagcgcctgggctccgatttcaggttggggtcaagcgtacagttcacctgcaatgaagggtacgacctacaaggctctaagcggatcacgtgtatgaaagtgtccgacatgttcgctgcttggtctgaccacagacccgtctgccgagcgcgcatgtgtgatgcacatttgagaggaccaagcggcatcatcacctcccccaactttccgattcagtacgacaataatgcccactgtgtgtggattatcacggctctgaacccttctaaggtgatcaaacttgcatttgaagaatttgacctggagcgggggtatgataccctgaccgtcggcgacggcgggcaagatggcgatcagaagacagtgctgtacatattgactggcacatccgtgcctgatctgatcgtgtccaccaatcaccagatgtggctgctcttccaaacagacggctctggctcctctctggggtttaaggccagttatgaagagattgaacaggggagctgtggggaccctggcatccctgcttatggacgccgcgagggatccagatttcatcacggtgacacgctgaagttcgaatgtcagcccgccttcgagctcgtgggacagaaagctatcacctgccaaaagaataatcagtggagtgctaaaaagcccggctgtgtgttttcatgttttttcaatttcaccagcccatctggagtagtcctttcacccaactaccccgaggactatggcaaccatctgcattgcgtttggttgattctagccaggccagagtcacgaattcatctagccttcaatgacatagacgtggagcctcaatttgatttcttagtgatcaaggacggggcgacggccgaggccccggtgctcggaactttttctgggaatcaactgccatcatccatcaccagcagtggccacgttgccagacttgagtttcagaccgaccatagcacaggcaaaagggggttcaacataacatttactacattcaggcataacgaatgccctgatcccggcgtccctgttaatgggaagaggtttggtgactcgctgcagctggggagctctatatctttcctgtgcgatgagggctttcttggcacgcagggcagcgaaacaattacctgtgtactgaaggaaggatccgttgtgtggaatagcgcagttctccgatgcgaggctccgtgcggcgggcacttaacgagcccaagtggtacaattctgagtccagggtggcccgggttctacaaggacgcccttagctgcgcttgggttatcgaggcacagccaggctacccaatcaagattaccttcgacaggtttaagacagaagtgaactacgacacactggaagttcgtgacggtaggacatactccgctccgctgataggagtctaccacgggacccaggtgccccagttcctgatcagtacgtccaactatctgtacctcctattcagcaccgacaagagccatagcgatattggtttccagcttcgctatgaaacaatcactctccagtcagatcactgtttggatcctgggattcccgtgaacggtcagaggcacgggaatgatttttacgtcggtgcactggtgacattctcatgcgactctggatatacactgagcgacggagagcctctggagtgtgaaccaaatttccagtggtctcgtgcccttccctcatgtgaggcactctgcggcggtttcatccaaggttcatctggaaccatcctctctcctgggttccccgacttttatcctaacaacttgaattgcacgtggatcatagaaacttcccatggtaagggagtgttcttcactttccatactttccatttagagagcgggcacgactacctgcttatcaccgaaaatggctcttttactcagcctttgaggcagctgaccggttcaaggctgcccgccccaatctccgccgggctgtatgggaattttaccgcgcaagtcaggtttatctccgacttctccatgtcttacgaagggtttaatatcacattcagcgagtacgacctggaaccttgtgaagagccagaggtccctgcgtattccattcggaaaggcctgcagttcggcgtcggtgataccctgacgttttcatgttttccaggatacagactggagggaactgcccggataacctgtcttggtggaaggcgtcggctttggagtagcccgcttccaagatgtgtggcggagtgcggcaacagcgtcaccggcacccagggcacccttttatcacctaattttcccgtcaattacaacaacaaccatgagtgcatctacagcattcaaactcaacctggaaaaggaattcagttgaaggcaagagcgtttgaactgtctgagggcgatgtgcttaaggtttacgatggcaacaataattccgctaggctcttgggggtcttttctcatagtgaaatgatgggagttacgcttaacagtacatctagctccctgtggctggactttatcacagacgctgaaaacaccagtaaggggttcgaactgcatttctcttcctttgagctgataaaatgtgaagatcccggcacaccaaagttcggatataaagtgcatgatgaaggacacttcgccggcagcagcgtgagttttagttgcgatcctgggtattccctccgcggttccgaagaactgctgtgcctgtctggcgaaaggcgaacgtgggacagaccactgcctacttgtgtcgccgaatgcggggggactgtgcgaggcgaggtctccgggcaggtcctgagcccagggtaccccgctccctacgaacacaacctcaattgtatatggaccatcgaagctgaagctgggtgtacaatcggcttacactttcttgtctttgatacagaagaagtgcacgatgtgttgcgcatttgggacggaccagtggagtccggcgtgttgctgaaagaactctctggacccgcactgccgaaggaccttcatagcaccttcaattctgtggtattgcaattctcaacagacttctttacctcaaaacaaggcttcgccatccagttcagcgtgtctactgcgaccagctgtaatgatccagggatcccccaaaatggatccaggtcaggagactcatgggaggctggggactctacagtattccagtgcgaccccggatatgcactccaaggttcagccgagatctcttgcgtcaagattgaaaacaggtttttctggcaaccttctcctccaacgtgtatcgcaccatgtggcggggatttgaccgggccatctggagtcattctgagccctaactacccagaaccttacccacccggaaaggagtgtgattggaaggtgacagtctctcccgactatgttattgccctggtgtttaatatatttaatctggaacctggttatgacttcctccatatctatgacggccgggactccctcagcccgctgataggcagtttttatggctctcaactgcccggtagaattgagtcatccagtaactccctgttccttgccttccgtagcgatgccagtgtttccaacgcaggctttgttattgattatacagagaatccccgcgaatcttgttttgatcccggctctattaagaatggcacccgggtaggtagtgacctcaaactcggaagttcggtaacctattactgtcatggcggctatgaagtggagggaacttctactctctcctgcatcttaggtcctgatggcaagcctgtgtggaataatccccgtccagtgtgcaccgccccttgtggaggccagtacgtgggatcagatggcgttgtgctgtcaccaaactatccccagaattacacgtccgggcagatttgtctgtactttgtgaccgtgcccaaggactacgtggtatttggccagtttgcctttttccacacggccttgaatgacgtcgtggaggtgcatgacgggcacagccaacacagtcggttactgtcttcgcttagcggctctcacactggtgagagtctgcccctggcaaccagcaaccaggttttgattaagtttagtgccaaggggcttgccccggcccgcgggttccattttgtgtatcaagccgtgccaaggacttctgcaacacagtgttcctccgtgcccgaaccgcgctatggcaagaggctaggttctgactttagcgtgggggcaatcgtacgctttgagtgcaacagtggttatgcactgcagggatctcccgaaattgagtgtcttccagtgccaggtgccctagcacagtggaatgtttctgcaccgacttgtgtggtgccatgtgggggaaacctgactgagcgaaggggaaccattctgtcacctggcttccctgaaccgtatctgaacagtctgaactgcgtctggaagatcgtagtaccagaaggtgctggaatacagattcaggttgtgtcttttgttaccgaacagaattgggattctctggaggtattcgatggagctgataacacagtgactatgctgggtagcttctccggcacaacagtcccagcgctgctgaatagtacatccaatcagctgtatcttcatttttactccgacatctctgtgtcggcggccggcttccatctcgagtacaaaactgtgggcttgtcttcctgtcccgaaccggcagtcccatcaaatggagtcaagaccggcgaacggtatctcgttaacgacgtggtgagctttcagtgtgagcctggctacgcactccagggtcacgcccatatttcttgcatgccgggcaccgttcggcgctggaactaccctccacccctgtgtatagcgcaatgcggagggactgtggaagagatggaaggggtaatccttagtccaggcttccctggtaactatccttccaatatggactgcagctggaagattgccttgcccgtcgggtttggagctcacatacaattcctgaacttctcaacggagccaaatcacgactatattgagatccgcaacggcccttacgaaacaagccggatgatggggagattctctggctccgaactgccctcaagcttgctgtcaacaagtcatgagaccacagtctattttcactccgatcatagtcagaacagacctggctttaagctggaataccaggatctgacctatagtcaccaaatttcatccttcctgaggggttttgatctgtctgaactggagcggactaattccactccgccggtggccgctagctatgtttgggatttggatccggggtgcgaggcttacgagctgcaggagtgccctgaccctgagccgttcgctaatggaatcgtcagaggggctggctataatgttggacagtctgtgaccttcgagtgcctgcctgggtatcagctcacgggccatccagtacttacttgccagcacggcaccaaccggaattgggaccaccccctcccgaaatgtgaggtgccatgcggggggaacatcactagctcgaatggaaccgtctacagtcccgggttcccctccccttattcatcaagccaagattgcgtgtggctcattactgtgcctattggacacggagttcgcctgaacctgagcctgctgcagacggaaccgtctggagattttattaccatatgggacggacctcagcagaccgcaccaaggctcggagtgttcactcgatccatggcaaaaaaaaccgtgcaaagcagcagcaatcaggtcttgttgaaatttcatagagacgctgctaccggcgggatattcgccatcgccttctctgcgtatcccctcacaaaatgcccaccacccacaatcctcccaaatgccgaggtggtgaccgagaatgaagagttcaacatcggagacatcgtgcgctacaggtgtctgccgggtttcacactggttggaaacgagattctgacatgtaaacttggcacctacctacagtttgaggggcctccacctatatgcgaggtgcactgccccaccaacgagttattgacggattcgaccggagtgatcttatcacagagctaccccggatcttatccccagttccaaacatgttcttggctggtccgagtagagcctgattacaacataagcctgaccgtggaatatttcctctcagagaagcagtacgacgagttcgagatctttgacgggccttcaggccaatcgcctctgctgaaggcactctctgggaattactctgctcctttgatcgtcacctcaagttcaaacagcgtctacctccgttggagtagtgatcacgcatacaaccggaagggctttaaaatccggtattccgcgccatattgttcactgccccgcgctccactgcacggatttattttaggccaaacatcgacccagcctgggggttcaatccacttcggatgtaacgccggctaccgtctggtgggacactctatggctatctgcacgaggcaccctcagggctaccatttgtggtcggaggcgattccgttgtgtcaggccctgagctgtggtcttccagaggcacctaaaaacggcatggtcttcgggaaggagtacacagtgggtacaaaggctatgtattcatgcagtgaagggtaccacctgcaggctggcgccgaagcaaccgccgaatgtcttgacacaggactgtggagcaatcgcaatgttccccctcaatgcgttccagtaacatgccctgacgtgagcagtatatccgttgagcatggccggtggaggttgattttcgaaacccagtaccagttccaggcccaactgatgctgatatgtgaccccgggtactattatacaggtcagagggtaatccgctgccaggccaacggtaagtggtcacttggcgattcaactcctacctgcaggattatatcatgcggagaactgccaatcccaccgaacggccatcgtatcggcaccctgtcagtatacggcgctacagctatattttcgtgtaatagtgggtacactctggtagggtcaagggtgcgggaatgcatggcgaatggcctctggtccgggagcgaggttcggtgtctggctgggcactgcgggactcctgagcccatcgttaatggtcacataaacggcgaaaattacagctatcgaggttctgttgtttaccagtgcaatgctggctttcggctgattggaatgtcagtccggatctgtcagcaagatcaccactggagcgggaaaacccctttctgcgtgttggtgtcttgcgggcaccccggctccccccctcactctcagatgagcggagacagttatactgtcggggctgtggtgagatatagctgtatcggcaagcgcacactcgtcggcaattcaactcgcatgtgcggactagatggccactggactggctctctgcctcattgcagcgggaccagcgtaggcgtctgcggggacccgggtatccctgctcacggaatccgcctgggagactcctttgacccggggaccgtgatgagattttcatgcgaggccggccacgttttgcggggttcctctgaacgcacctgtcaggcaaacggttcatggtccggctcccaaccggagtgcggggtgatctcgtgtggaaatccgggcaccccttcaaatgccagggtagtgttttcagatggactggtgttctcgtctagcatcgtgtatgagtgtcgtgagggctactatgcaacgggcctcctgtccaggcattgtagcgtaaatgggacatggacaggtagtgaccccgaatgtctggtcattaattgcggggatcccgggatcccagctaatggcctccggctgggaaatgactttagatacaacaagacggtaacctaccagtgcgttcccggttacatgatggagtcacacagggtgtctgtgctctcatgtaccaaagaccgcacatggaacggcacgaaacctgtttgtaaagctctgatgtgcaaaccaccacccctcatacctaacggcaaagtggtgggcagtgacttcatgtggggatcgtcagtcacgtatgcctgtttagagggctatcagctgtcccttcctgctgtgttcacctgtgaagggaacggttcttggaccggtgaactcccccagtgctttcccgtgttttgtggcgatcccggagttccatcgcgtggccgcagagaagatcgcggattctcttatcgcagctccgtgagctttagctgtcatccccctcttgtactggtgggcagccctaggcgtttctgtcaaagcgacggcacctggtcaggaacccagccatcctgcatcgatccaactctaaccacctgtgccgacccaggcgtgccccagttcgggattcaaaataactctcaagggtaccaggtcggaagcactgttcttttccggtgccagaaagggtaccttctccagggctctaccactcggacgtgcctcccaaacctgacgtggtctggaactcccccggattgcgtgccccatcactgccggcagcccgagacaccaacacacgcaaatgttggtgcgctcgatctgcccagcatgggctatactcttatctactcatgtcaggaaggcttttccttgaaaggggggtcggaacatcgcacttgtaaggccgatgggtcttggacaggtaagccacccatttgtcttgaagtgcgccccagtggccgtcccatcaatactgcccgcgagcctccactaacccaggctcttatccctggagatgtctttgccaagaatagtttgtggaaaggcgcttacgaatatcagggtaagaagcaaccagcaatgctcagagttaccggctttcaggtggcaaactctaaagtgaatgcaactatgatcgatcacagcggggtggagctccatctggctggaacctacaagaaggaggactttcacctgctgctccaggtttatcaaatcaccggacccgtggagatttttatgaataaattcaaagatgaccactgggccttggatgggcatgtgagctcagagtcatccggagctactttcatttaccagggcagtgttaagggccaaggatttggtcagttcggcttccagcgtcttgatctgagattgctcgaatcggatccagagtccatcggaaggcattttgccagcaactctagttcggtggctgcggccatcctggttcctttcatagcactcataattgcaggtttcgtcctctacttgtacaaacacagacggaggccgaaggtaccctttaacggttatgccggtcatgaaaataccaacgttcgggcaaccttcgaaaatcctatgtacgatcggaatatacagccaaccgatatcatggcctccgaggctgaatttaccgtaagcaccgtgtgcacagccgtgtag

SEQ ID NO: 113312 - DNA, 678 bp, synthetic construct
  misc_feature 1..678: note = Description of Artificial Sequence: Synthetic coding sequence
  source 1..678: mol_type = other DNA
atgtgtgatgctcatctgcggggcccttccggcataatcaccagtcccaacttcccaattcaatacgacaacaatgcccactgtgtgtggataatcactgcactcaacccatctaaggccggaggagatcccggcaacatccagtgtaacaaggaggggctgagcgtggaaacacagagtctgagactgcggaatcggtcatgcttattgggaaacagtaaggacaacggctgttgtgttcccaaccccgttcatggaacgggcctgcaggtcatcaaactggccttcgaggagttcgatttagaacgaggatatgacactctcaccgtgggagacggtggacaagacggggatcagaagactgtgctatacattttaaccggcacatctgtgccagacttgattgtctctacaaatcaccagatgtggctattattccagactgacggcagtggctctagtttgggattcaaggcctcttacgaggaaattgaacaggggagttgtggcgatccaggaatccccgcctacgggcgccgggagggttctcggttccaccacggcgacactctgaaattcgaatgtcaacctgcctttgaactggtcgggcagaaagcaatcacttgtcagaagaacaaccagtggtccgcaaaaaaacctggttgcgtgtgtaaatag

SEQ ID NO: 113313 - DNA, 1281 bp, synthetic construct
  misc_feature 1..1281: note = Description of Artificial Sequence: Synthetic coding sequence
  source 1..1281: mol_type = other DNA
atgctgggctctttcagcggtactactgtgcccgccctgctgaactcaacttcgaaccagctgtatctgcacttttactctgacatctctgtgtccgccgccggctttcacctggagtacaaaaccgtgggtctctccagttgtcctgaaccagccgtgccatcaaacggggtcaagacgggcgaacggtatctggtgaatgacgtagtgtcttttcagtgtgaaccaggctacgccttacaaggtcacgctcacatctcctgtatgccaggcacagtgaggaggtggaattaccctccaccactctgcatagcccagtgtgggggaaccgtcgaagaaatggagggtgtcattctgtcccccggcttccctggtaactacccttccaacatggattgctcttggaaaatcgctttgcctgtcggattcggcgctcacattcaattccttaacttttccactgaaccaaaccacgactacattgaaatccggaacggcccctatgagacttctagaatgatggggagatttagtggatccgagctcccctccagtctgctcagcacatctcacgagactaccgtgtatttccatagcgatcattcgcagaataggcctggatttaagttggaatatcaggcctatgagctgcaggaatgtcccgacccagaaccctttgccaatggaatcgtgagaggggcaggctacaatgtgggacagagcgtcacttttgagtgcttgccgggctatcagttgactggtcatcccgtgttaacctgtcaacacggaacgaatcgcaattgggaccacccccttcctaagtgtgaagtgccgtgtggcggcaatattaccagctccaacggtacagtgtattcccctggctttccatctccatatagctccagccaggattgcgtgtggctgatcacagtacccatcggtcatggtgttcggctaaacctatcattgttacaaaccgagccatctggcgactttatcacaatctgggacggaccacagcagaccgcgccacggctgggtgtattcacccggtctatggctaagaagacggtacagtccagttccaaccaggtgctactgaaattccaccgggacgcagcgacaggaggaatctttgctatagcgttctctgatcactgccgatacttcaatcagaagagtgggaaactggactttacccctagctccaccctcggacagctctgtaaaacgctgcacagatccttaccacacctgcggctccaatttctgcacctctag

SEQ ID NO: 113314 - DNA, 3504 bp, synthetic construct
  misc_feature 1..3504: note = Description of Artificial Sequence: Synthetic coding sequence
  source 1..3504: mol_type = other DNA
atggtcattgttatcttgttccctgccgagtgcggcaacagtgtcaccgggacacagggcaccctccttagtccaaacttcccagtgaactataacaacaatcatgagtgtatttatagtatccagactcagccaggcaaggggatccagctgaaagctagagcatttgagttatctgaaggtgacgtgttgaaagtgtatgacggaaataacaacagcgcgcgcctcctgggtgtgttctcccacagcgaaatgatgggggtaacactgaacagcacatcatcaagtctgtggctggacttcattactgacgctgaaaatactagtaagggattcgagctgcatttttccagcttcgagctgatcaaatgcgaagatcctggcactcccaagttcggttataaggtccatgacgagggtcacttcgctgggtcgtccgtgagtttcagctgcgacccaggttactctttgcggggatccgaggaactcttgtgtcttagtggcgaaaggcgaacgtgggatcgacccctgccaacttgtgtcgctgaatgtggaggcacagtgcggggagaggtctcgggacaggtgttgagcccagggtatcctgcgccctacgaacataatcttaattgcatctggactattgaggccgaggctggctgcactatcggccttcattttctggtgttcgacaccgaggaggttcatgacgtgctgcgcatctgggacggccccgtggagagtggcgtactgttgaaagagctgtccggccccgcattaccgaaagatcttcactctaccttcaatagcgtcgttctgcaattttctaccgatttcttcacctctaaacaaggcttcgcaatacagttctccgtcagtactgcgaccagttgtaatgaccccggtataccccaaaatggcagccgtagcggagacagctgggaggctggcgattccactgttttccagtgtgaccctgggtacgccctgcagggctccgcggaaataagctgtgtaaaaattgaaaacaggttcttttggcaaccctcaccccccacatgtattgccccatgcggcggcgacttaactggcccgtcaggcgtgatcttgagtccgaattatcccgaaccttatccaccaggcaaagaatgtgactggaaggttactgtgagtccagactacgtcatcgccctggtctttaacatttttaacctggaacccggatatgacttcctccacatttacgatggccgggattccctgtcaccgctcatcggctctttttatggctcacaactgcccggccgcattgagtcatcgtctaacagcctgtttctagccttcaggagcgatgctagtgtgtctaacgcaggcttcgtgatcgattacacagagaatcctcgtgagagttgtttcgacccaggatccataaaaaatggtacgcgtgtcggatctgacctgaaattaggcagtagcgtcacctattactgccacggcggatacgaggtcgaaggaaccagcacactaagctgcatcttggggccagatggcaagccggtgtggaataatccacgcccagtctgcacagcaccatgtggaggtcagtatgtgggtagtgacggtgtggtgctgagccctaattatccacagaattatacatccggacagatctgtctctacttcgttacagttcctaaagactatgtggttttcggccagttcgctttttttcataccgcactgaacgacgtggtggaggtgcacgacgggcacagtcagcattcccggctactcagctccttgtcggggtctcacacaggcgagtcactaccactggccacaagcaatcaagtgcttatcaaatttagcgctaagggactcgcgcccgctcgcggcttccatttcgtataccaggccgttcctcggacctcagcaacacaatgctcttcagtcccagaaccgcgatatggaaaaagattgggctccgattttagtgtgggagccattgtaagatttgagtgtaattcagggtacgccctgcagggcagtccagagatcgagtgtcttccggtaccaggtgccctggcacaatggaacgtgagcgcccccacctgtgtcgtgccttgtggcggaaatctcacggaacgacgaggtacgatcttatctcctggattcccggagccttatctgaactccctcaattgtgtgtggaaaattgtagtgcccgaaggcgctggaatccagattcaggtcgtgtctttcgtcacagagcagaattgggattcactggaggttttcgacggagcagataatacagtgactatgctcggcagcttttctggcacaaccgtgccagcactcttgaactctacgtccaatcagctgtacttgcacttctattcagacatctccgtgagcgccgccggcttccacctcgaatacaaaacagtcggcctgagctcctgtccagagccagccgtcccatctaatggggtaaagaccggagagcgctatctggtgaatgatgttgtgtccttccagtgcgaacccgggtatgctcttcaggggcatgcccatatcagctgcatgcccggcaccgtgagacgatggaactacccacctccactctgcatcgcccagtgtgggggcacagtcgaggaaatggagggagtgatcctgagccccggatttcctggaaattacccatccaacatggactgttcctggaaaatagctttgcctgtgggatttggtgcacatattcagtttttgaatttttcaacagaaccaaaccacgattacatcgaaattcgcaacggtccatacgaaaccagccgaatgatgggacggtttagcggatccgaactgccttccagtctcctctcaacaagccatgagacgacagtgtattttcactctgatcactcgcagaacagaccaggattcaagttagaatatcaggcatacgagctccaggagtgtcctgatccagagccctttgctaatgggattgtcagaggtgccgggtacaatgtgggtcaatcagtgacattcgaatgccttcctggataccagttgaccggacatccagtgctgacttgtcagcacggcacgaatcgcaactgggatcatcccttacccaagtgtgaagtcccatgcggcggcaacattaccagctccaacggcacagtttactcccccggcttcccaagtccctactcttcttcccaagattgtgtctggttaatcactgtccctatcggccacggagtccggctgaatctgtcgctcctgcagaccgaaccctcgggagatttcattacaatctgggacggccctcagcagaccgcgcccaggttgggcgtgttcactcgaagcatggccaagaaaactgtccagtcttcaagtaaccaggttcttctgaaattccatagagacgccgctaccggaggcatcttcgctatagcattctcaggacacctcgcagcagtgtgtacactttag

SEQ ID NO: 113315 - DNA, 10896 bp, synthetic construct
  misc_feature 1..10896: note = Description of Artificial Sequence: Synthetic coding sequence
  source 1..10896: mol_type = other DNA
atgccccgttcgcggggcagggaactcggacggtgtggctgccccgctggcagggccaggggcgagaccgggattagcgcattggtacctggagccggcagcaggtggggccgaccgcctcctccaacccctcccccactcctgctgctcttgggttgcgggcttctgtctgtttctgctgccgccggccaaaattgcacttttcaactgcacgggcccaatggaacggttgaaagcccaggcttcccctatggctaccccaattatgctaattgcacctggacaatcactgcagaggaacaacacaggattcagcttgtgttccaaagtttcgctctcgaagaggattttgacgtgctctctgtgtttgacggtcctccccaaccagaaaatctgcgcacaaggctcacaggtttccaactccccgccacgatcgtgtcagctgctaccactctcagtttgaggctgatctctgactacgccgtgagcgctcagggatttcatgcgacatacgaggtcctcccctctcacacctgcggaaacccaggtagactcccaaatggaattcaacagggcagcaccttcaatctgggcgacaaagtcaggtactcctgcaatctgggcttcttcttggagggtcacgccgtgcttacctgtcacgcagggtcggagaacagtgcaacgtgggattttcctctgccaagctgtcgggcagacgacgcctgcggcggcactctgcgagggcagtcgggtattatttcttcacctcattttccttccgagtaccataataacgccgactgtacctggactattcttgccgagctgggtgatactatagcactagtcttcatcgactttcaacttgaggacgggtacgatttcctggaggttaccggcaccgagggcagttctctttggttcaccggagcctcattaccagctcccgtcatcagcagtaaaaattggctgcgcttgcattttacatcagatggaaaccatagacagcgtggcttcagtgctcagtatcaggtcaagaagcagatcgaattgaagtctcggggggtgaaacttatgccatcaaaggataattcccagaagacctccgtcttgacccaggtgggggtttctcagggtcacaatatgtgtccagatcctggaatcccggaacggggtaagaggctgggctccgacttccgccttggttccagcgtccagttcacatgtaatgaagggtatgatttgcagggttctaaacggattacttgtatgaaggtgtcagatatgttcgcagcatggagtgatcaccgaccagtttgtcgggcacggatgtgcgatgcacacctgcgaggaccaagtgggataatcacctctccaaacttccctatccaatacgataataacgcgcactgtgtctggatcattacagcgcttaacccctcaaaggtcatcaagctagccttcgaagagttcgacttggaacggggctacgacacacttactgtgggagacggtggacaggacggtgatcaaaaaaccgtcctgtacatactcactggcaccagcgtccctgacctgatcgtgtctacgaatcaccagatgtggctgctcttccaaaccgacggaagtggaagctccttaggttttaaagcttcctatgaggaaatagaacaaggctcctgtggcgaccctggtattcctgcttacgggcgacgggaagggtcccgcttccatcacggcgacacactgaagttcgaatgccagccagcttttgagttggtggggcagaaggctattacctgccagaagaacaaccagtggagtgccaagaaacccggctgcgtctttagctgcttcttcaacttcacctcaccctcaggcgtggtgctctctcctaactatcccgaagattatggcaatcaccttcattgtgtgtggttaatcctagccagacctgagtctagaatccatctggcatttaacgatatcgacgtggaaccacaatttgattttctggtgatcaaagatggagccacagcagaagctcctgtactgggtaccttcagcggaaaccagctgccatcctcaataacatccagtggtcacgtagcccggctggagtttcagactgatcactcaaccgggaagagaggcttcaacatcacgttcactacattccggcataatgaatgtccagaccctggggttcctgtcaatggaaagcgattcggggattctctccagttgggatctagtatcagcttcctctgcgatgaagggttcctgggcactcagggttcagagacaatcacatgcgtcttgaaagagggaagtgtggtgtggaattcagccgtgctgcgttgcgaagcaccatgcgggggccacctgacttctcccagcggcaccatcctttcccccggatggccaggcttttacaaggacgccctaagctgcgcctgggtgatcgaagctcagccaggttaccccatcaaaatcaccttcgacaggttcaagactgaggtgaactacgacaccctggaagtacgcgatgggaggacctactccgcacctttaattggcgtctatcatggaactcaggtcccccaatttctcattagcaccagtaattacctgtacttattattttccactgataagagccactccgacatcggattccagctgcggtacgagactatcactctgcagagcgaccattgcctggatccaggaatccccgtgaatgggcagaggcatggcaacgatttttacgttggcgcactggtgaccttcagctgcgacagtggctacacactgagcgacggtgagcctctcgagtgtgaaccgaattttcagtggtcaagggcactcccatcctgtgaggcactgtgcggtggcttcatccagggatccagtggcaccatcttgagccccgggtttccggatttctaccctaacaacctgaattgcacctggatcatcgaaactagccatgggaagggggtctttttcacctttcacacgttccacttggagagcggacatgattatctcctaatcacggagaatggaagtttcactcaacctctgcggcaactgacaggcagtagactacctgctcccatctccgcagggttgtacggtaacttcaccgcccaggtgcgtttcatttctgactttagtatgagttacgagggattcaacataacctttagcgagtatgacctcgagccttgcgaggagccagaggtgccagcctatagcatccggaagggactgcagttcggggtcggggatactctgaccttctcctgtttccccggatacaggctagaaggaactgctaggatcacctgcctcgggggaaggcgccggttatggagttcacccctccctaggtgtgtagccgaatgcggaaactcggtcacggggactcagggaactctgttgagcccgaactttcccgtgaactataacaataaccatgagtgtatatacagcatacagacccaacccggcaaggggatccagttgaaagcccgagctttcgaattaagcgaaggcgacgtattgaaagtgtatgacggtaacaacaactccgccaggctgctcggagtgttttcccattctgagatgatgggcgtcacactgaattccacaagttctagcctgtggctggactttattactgatgcagagaatacatcaaaaggcttcgagttacacttctcctcgttcgaactcattaagtgtgaggacccaggaactccaaagtttggttacaaggttcatgacgagggccacttcgcggggtctagcgtgagtttttcatgtgaccccggttacagcctgaggggttcagaggaacttttatgtctctccggtgagcgccgtacctgggatcgcccactccctacatgcgtagcggaatgtggaggtaccgtcagaggggaagtgagtggccaggtgctgtcacccggatacccagctccttacgaacacaacctgaactgcatttggaccatcgaggcggaggcgggatgcaccatcggactgcattttctggttttcgacactgaggaggtgcatgacgtcctgcggatctgggatgggcccgtggagtctggggttctactgaaggagctgagcggccccgccctgccaaaagatctgcactcaaccttcaatagtgtagttctgcagttctccaccgacttttttaccagcaagcagggatttgccattcagttttccgtgtctaccgctacttcctgcaatgatccaggcattccgcaaaacggcagtagatctggcgatagttgggaagccggagactccaccgttttccagtgcgacccaggatacgccctgcaagggagtgctgaaatttcatgcgtgaagatcgaaaaccggttcttttggcagccctcaccacccacctgcatcgccccttgcggcggcgacctcacaggcccttctggagttattctgagcccgaattaccctgaaccttaccctcccggcaaagaatgcgattggaaagtcacagtatcgcctgattatgttatagctctggtttttaatattttcaacttggagcctggatacgattttcttcatatttacgatggccgcgattcattgtcaccattgatcggtagcttttacggctcacagctcccaggcagaatcgagtctagttccaatagtttatttctggcatttcggagcgacgcgagcgtgtccaacgccggctttgtgattgactatacagagaacccaagggaaagttgtttcgatccaggttccatcaagaacggtactcgagtcggttcagacctgaagcttggctcatcagttacgtactattgccacggcggctacgaagtggaggggacatcaaccctcagctgtatcctgggacccgatggcaagcctgtatggaacaatcctaggcctgtctgcacggccccgtgtggcgggcagtatgtgggaagtgatggtgttgtattatcgcccaactatccccaaaactacacgtcaggccaaatatgcctgtactttgttactgtgccgaaggactacgttgtctttggccagtttgccttctttcatacagcgctgaacgatgtggttgaggtgcacgatggacatagtcaacacagcaggctactgtcctcattatccggctcacatacaggtgaaagtctgcctctcgcgactagtaatcaggtcttgatcaagttctctgcaaaaggactggcccctgctcggggctttcactttgtctaccaggcggtgccccgcaccagcgcaactcagtgttccagtgtacccgagcctcggtacggcaaacgactgggatccgacttctctgtaggtgccattgtgcgcttcgaatgtaatagcggttatgcattgcaggggagccccgagattgagtgcctgcccgtgcctggcgctctggcgcagtggaatgtttcagctcctacatgcgtggtgccatgtggcggaaaccttactgaacgacgtggaaccatactctcacccggcttccccgagccgtatttgaactctctgaattgcgtgtggaaaatcgtggtcccagagggcgcaggaatacagatccaggtcgttagtttcgtgactgagcagaattgggacagtctggaggttttcgacggtgccgacaatacagtgaccatgctgggctcctttagtggcacaacagttccggccctgctcaatagcacatctaaccagctgtatttgcatttttattctgacatttccgtctctgcggctggctttcacctggaatataagacagtaggtttatcttcctgcccagagcctgcagtgccatcaaacggcgtgaaaacaggagaaaggtacctggtgaacgatgtggttagctttcagtgtgagccaggctacgcccttcaaggacatgctcatatcagctgcatgcccggcaccgtccggcggtggaactatccaccgcccctgtgcattgcccaatgtggagggactgtggaggaaatggaaggcgtcattttatccccgggatttcctgggaactatccttccaatatggactgctcatggaagatcgccctgcccgttggttttggcgcacacatacaattcttgaacttctccaccgagccaaaccacgattacatagaaatccgcaatggtccttacgaaacttctcggatgatggggcgatttagtggcagcgagctgccaagctccttgctttcaacctctcacgagaccacagtttattttcacagtgatcattctcagaatcgcccgggatttaaactagaataccaagcatatgagctgcaagagtgccctgatcccgagccttttgctaatggcatcgtccgcggagccgggtacaatgtcgggcagtctgtgacctttgaatgccttcctggataccagctcaccggtcaccctgtgctgacctgtcagcatggcaccaatcgaaactgggaccaccctcttcctaagtgcgaagtgccctgtggaggaaatatcacctcctccaacggcaccgtctactctcctgggttcccgtcgccctacagttcatcccaggattgtgtttggctgataaccgtgccaataggtcacggggtgcgcctgaacttgagcctgttgcaaaccgaaccctcaggagatttcatcacaatctgggatggccctcagcagacagcacctcggttaggggtcttcactagatctatggcaaaaaaaactgtacagtcgagctccaaccaggtgctcctgaaatttcatcgggacgctgccaccggcgggatctttgccatagcatttagcgcctatcccctgaccaagtgcccgccccctactatcctgcccaatgccgaggtggtgacagagaatgaggagtttaacattggcgacattgtgcgctacaggtgcctgcctggcttcacgctagtaggcaatgagatacttacatgcaaattggggacatatttgcagttcgagggccctcctcccatctgcgaagtgcactgcccaactaacgaactgctgaccgactcgaccggcgtgattttgtcccaatcataccctggctcttacccccaattccagacgtgttcttggctggtgcgagtagaaccagactataacatcagcttgaccgtcgaatattttctgtctgaaaagcaatacgatgaattcgagatcttcgatggcccctcaggccagtccccactccttaaggcgttaagcggaaactattccgccccactcatcgtcacttccagctcaaacagtgtgtaccttagatggtcatctgatcacgcctacaaccggaaaggttttaagatcaggtactccgccccctactgttctctgcctagagcacctttacatggcttcatactgggccaaacatccactcaacctggtggtagcattcactttggatgtaatgccgggtatcggcttgttggacactccatggccatctgtacacgtcacccgcaaggctaccacctgtggtcagaagcaattccgctgtgtcaggccctgtcctgcgggctccctgaagcccctaagaacggaatggtcttcggaaaggaatacaccgtggggactaaggccatgtacagttgctccgaagggtaccacctgcaggccggtgccgaagcaaccgctgagtgcctagatacaggcctgtggtctaatagaaacgtaccaccacagtgcgtacccgtgacctgccccgatgtcagcagcattagcgtggagcacggtaggtggaggctgattttcgaaacacagtaccagttccaagcgcaactgatgcttatctgcgaccccggttattattatacaggtcaaagagttatccgttgccaagctaatggaaagtggtctttaggcgacagcaccccaacttgcaggattatctcctgtggggagctgcccattcctccaaatggacatagaatcggcacgctttccgtatatggagctacggccatttttagctgcaattcagggtatacgctcgttggatccagagtccgagaatgtatggctaacggtctgtggagtgggagcgaggtacgatgtctggctacgcagacaaagctccacagtatcttctacaagctgctgtttgatgttctgtcctccccctcactgactaaggcaggtcactgtggcacacctgagccaatcgtcaacgggcacattaatggagagaattacagctacagagggagtgtcgtataccagtgcaatgccggattccgtttgattggaatgtctgtgcgtatctgccaacaggaccaccactggtctgggaaaacacctttctgcgtgcccattacctgtggccatcctggtaatccggtgaatggcctcacgcaaggaaaccagttcaacctgaatgatgtagtgaaatttgtatgtaaccccggttacatggccgagggggccgccaggtctcaatgcttagcctcaggtcaatggtccgatatgttacccacatgtcggattattaactgcacagatccaggccaccaggagaactccgtgcgtcaggtccatgctagcggaccacacagattcagcttcggcaccaccgtgtcctaccgctgtaaccacggtttctatttacttggcaccccggtgcttagctgtcagggagatggaacctgggataggccccgtccccagtgcttgctggtatcatgtggtcatccaggcagccctcctcattcccagatgtcaggtgattcttatacagtgggggccgtggtacgctattcatgtatcggcaaacgcacactggtgggtaatagtactcgaatgtgcggtctggatggacattggaccggcagtctgccgcactgtagtgggacatccgttggcgtgtgtggagaccctggcattccagcacatgggataaggctgggtgactccttcgaccccggaaccgttatgaggtttagttgcgaggctggccacgtgctccggggctcaagcgagagaacatgccaggccaacgggtcatggagcgggtcacagcccgagtgcggagtcatatcatgcgggaatccaggcacaccttccaacgccagggtggtgttctctgatggcctggtgttcagctcttctattgtgtacgagtgtcgagagggctattatgctactggtctcctttcaaggcattgttcagtgaatggaacatggacgggctctgaccctgaatgtctggtgatcaactgcggggatccagggatccctgccaacggcctaaggctgggcaatgactttcggtataacaaaactgtgacataccaatgcgtgcctggttacatgatggaatcccacagagtctcagtgctcagctgcacgaaagatagaacctggaacggcaccaaaccggtctgtaaggctttgatgtgcaagcccccccccctgatccccaacgggaaagtggtgggcagcgacttcatgtggggctcttccgttacgtatgcctgcctggagggataccagctgtcattgcccgctgtcttcacctgcgagggcaacggatcatggaccggagagcttccccagtgcttccccgtgttttgtggagatccaggcgtgccatctagggggcggagagaggataggggcttctcgtatcggagctccgtgagcttctcttgtcatccacccctggtgcttgtcggatcccccagacgcttctgccaatctgatggaacatggtctggaacacagccctcgtgcatagatccgaccctgactacctgtgcagatcccggagtcccccagttcggtatccagaataacagtcaaggatatcaggtgggatctactgtactttttaggtgtcagaaggggtacctgctccagggctccactacccgcacgtgcctcccgaatctgacgtggtccggcacaccaccagattgcgtcccccatcactgtaggcaacccgaaactcccacacacgctaatgttggagctctcgaccttccatctatgggttacacacttatatactcttgtcaggagggcttctcgctgaaaggtggatctgaacaccgcacctgtaaggcagacgggagttggacgggaaagcctccaatatgcctggaggtgcggccttcaggcaggcccatcaacacagctcgagaaccccctctgacccaggccctgatacccggtgatgtctttgccaagaatagcttgtggaaaggtgcatacgagtatcaaggcaagaagcagcctgccatgctgagggtgacgggattccaggttgctaattccaaagtgaacgcaaccatgattgatcattcaggcgttgagctccacttggctggtacttacaagaaggaagattttcacctgctcctgcaggtctaccaaatcaccggccctgtggagatttttatgaataaattcaaagacgaccactgggctctggacgggcacgtcagtagtgagtcaagcggtgccacatttatctaccagggtagcgtaaaaggccagggcttcggccagtttggattccagcggctggacctacgcttgctggagtctgacccagagagtattgggcgccacttcgcctccaattctagttccgtcgccgccgccatcctggttccatttattgccctaattatcgcaggcttcgtgttgtacctctataaacatagacggaggccaaaagtgcccttcaacggatatgccggacatgagaacaccaatgtgcgcgcgaccttcgagaatccaatgtatgataggaatatccagccaactgacataatggcctctgaggcggaattcactgtgtcaaccgtgtgcactgctgtttag

SEQ ID NO: 113316 - DNA, 1281 bp, synthetic construct
  misc_feature 1..1281: note = Description of Artificial Sequence: Synthetic coding sequence
  source 1..1281: mol_type = other DNA
atgctggggagtttctccggaactactgttcccgcactccttaattcaacaagcaaccaactctatctgcacttttattctgatatttcagtgagcgccgcaggctttcatctcgagtacaaaacagttggactgtcgtcttgtcccgagcctgccgtccctagcaatggtgtcaagacaggcgaacggtatctggtgaacgacgtagtctcgtttcagtgcgaacccgggtatgcccttcaggggcatgcacacattagctgtatgcctggaaccgtcaggcgatggaactacccaccgcctctgtgcattgctcaatgtggcggcaccgtggaagagatggagggagtgattctttccccggggttccccggtaactacccttcaaacatggattgctcctggaagatcgctctgccggtgggtttcggagcacacattcagtttttaaacttctcaacagaacctaaccacgattatatagagatccgcaacggcccatacgagactagccgtatgatgggacgcttttccgggagtgaattgcctagcagtctcctgtcaacgagtcatgagaccaccgtgtactttcactcagatcatagtcagaatcgacccggtttcaaacttgagtaccaggcgtacgagctccaagaatgtcccgatcctgagccctttgcaaacggaattgtgcgcggcgcaggctataatgtcggacaatcggtcacatttgagtgcctgcctggctaccagctcaccggccacccagtgctcacgtgccagcatgggacaaatagaaattgggatcatcccctgcccaaatgcgaagttccatgcgggggcaacatcactagcagcaatggaacggtgtactctccgggcttcccttccccgtactcctcttctcaggattgtgtctggctaattaccgtgcctatcggtcacggtgtccgtctgaatcttagtctgttgcagacggagccttctggagactttattaccatctgggatggaccccaacagactgctcccaggctcggagtcttcactagatcaatggccaaaaaaactgtgcaaagttcatccaaccaggtccttctgaagtttcaccgcgacgccgccaccggtgggatctttgccattgctttcagtgaccactgtcgatatttcaatcagaaatctggtaaattggactttaccccctcctctaccctgggtcagctctgcaagactctccatcgttctttgcctcacctccggcttcagtttttgcatctctag

SEQ ID NO: 113317 - DNA, 11124 bp, synthetic construct
  misc_feature 1..11124: note = Description of Artificial Sequence: Synthetic coding sequence
  source 1..11124: mol_type = other DNA
atgaagggcatcaggaaaggcgagtcccgagctaaagaatcaaagccctgggaaccaggaaagagaaggtgtgccaagtgcgggaggctcgatttcatccttatgaagaagatgggcattaaatccggcttcacattctggaatctggtctttctgctgaccgtttcttgtgttaagggctttatctatacttgcggaggaacattgaaagggctgaacgggaccatcgaatctcctggttttccgtacgggtacccgaatggagccaactgtacctgggtgatcattgcagaagaacggaaccgcatccaaatcgtgtttcagagttttgctctagaagaggagtacgactacctatccctttatgacggtcatccgcaccccaccaacttccgcacgagattgactggcttccatctgccccctccggtgactagcacgaagagcgttttctccctgaggttaaccagtgactttgcagtctcagcgcatggattcaaggtttactacgaggaactgcaaagctcctcctgtgggaaccccggggtgcctcccaagggcgtcctttacgggacaaggtttgacgtcggcgataagatcagatattcttgcgttaccgggtatatcctggatgggcacccacagctgacatgcatcgcgaactctgtgaacacagcctcttgggactttccagtcccaatctgcagagccgaagatgcctgcgggggaactatgagaggatcttccgggatcatctcctccccctcctttcccaacgaataccataacaacgccgactgtacctggaccattgtggctgagccaggcgacactatctcgctgatctttaccgatttccagatggaagaaaagtatgattacctggagatcgaaggatctgagccccccaccatttggctgtccgggatgaacatacctccacctataatttccaataagaactggctgaggttacacttcgtcacggattctaaccacagataccgggggttttctgcaccctatcagggctcgtcaaccctgacgcacacaactagcacaggtgaactggaggaacataatagaacaaccacaggggctattgccgttgcttcaactccagccgatgtgaccgtgtcctctgtcacggcagtgacgatccacaggctgtcggaggagcagcgtgttcaggtgacttccctgcgaaacagtggcctggacccgaatacgtcaaaagacgggctctccccgcacccggcagacacacagtccacacggcggcggcctagacacgctgaacagatcgaacgtacaaaagaactggccgtggttactcatagagtgaagaaggctatcgatttcaagtccagagggttcaagctgtttcccggtaaggataacagtaacaaattctcaatcctcaacgagggaggcattaagactgctagtaacctctgccctgaccctggcgagcccgagaacggaaagaggatcggctctgatttcagcctgggaagtacggtgcaattctcctgtgatgaagattacgtgctccaaggagcaaaatctataacgtgccagagaattgctgaggtgttcgccgcatggtctgaccacaggccagtgtgcaaggtcaaaacctgtggtagcaatcttcagggaccgagtggcacatttacatctccgaattttccttttcagtatgactccaatgctcaatgtgtctgggtaattacagccgttaatacaaataaggtcatccagataaatttcgaggagttcgaccttgaaatcggttacgacacgttaaccatcggcgacgggggagaggtcggggatcctcgcacagttctgcaggtcctcacgggaagttttgttccagatttaatagtatcgatgtcgtcacagatgtggctacatttgcaaaccgatgaaagcgtgggttcagtcggcttcaaagtgaattataaggaaattgagaaggagtcttgtggtgacccgggcactcctctctatgggatcagggaaggcgatggattcagcaatcgagacgtccttcgatttgaatgtcagtttggcttcgagctgataggcgagaaatccattgtttgtcaggaaaacaatcagtggtctgccaacattcctatttgcatctttccctgtctcagcaatttcaccgcgcctatgggaactgtgctgtcacccgattaccccgagggatacggcaacaatctgaactgcatttggacaattatctcggaccccggttcccgtatccacctgtccttcaacgattttgatctggagtcccagttcgacttcttggccgtcaaggatggagactccccagagagtcccatcctgggaaccttcacgggcgcggaggtgccatcacatcttacctctaactctcacatactgaggcttgaatttcaggcagaccattccatgtccggaaggggctttaacatcacgtacaatacttttggacataatgaatgtccagacccagggatcccaattaacgctaggagattcggggacaatttccagctgggaagctctatttctgttatttgtgaggagggattcatcaagacccagggaactgagaccatcacgtgcatcctcatggatgggaaagttatgtggtcaggcctgatccccaaatgtggagctccatgtggaggccattttagtgctccatccggagtgatattaagtcccggctggccaggctattacaaggactcccttaattgtgaatgggttatcgaggctgaacctggccactcaatcaagattactttcgagcgtttccaaacagagctcaattatgacgtgctggaggtgcacgacggcccaaaccttctcagcccgctgctcgggtcatataacggcacccaggtcccccagtttctgtttagcagcagcaatttcatctacctcctttttacgacggacaattcaagaagtaataacggtttcaaaatccactatgagtcggtgaccgtcaacacctacagttgcctggacccgggaatacccgtgcatggtagacgctatgggcacgacttttccatcgggagtacagtgtctttctcttgtgactctggatatagactgtcccacgaggagcccctgctgtgcgagaaaaaccattggtggtctcatcctttacccacgtgtgacgcactgtgtgggggagatgtgagaggaccctcaggtaccatcctaagtcctggatatcctgagttctacccaaactccctaaactgcacttggacggtggacgtgactcacggaaaaggagtgcagtttaactttcacacctttcatctcgaggaccatcacgactatcttctcatcaccgaaaacggtagcttcacccaacctctggcccggctgaccggaagcgacctgcccccgaccatcaacgctggactctacggcaatttcagggcccagttacgattcatctctgatttttcaatcagctacgaggggttcaacatcacatttagcgagtacaaccttgagccctgtgaagaccccggcattccccagtacggctctcgtatcggcttcaactttggaattggcgacactctcacgttctcatgttcatcagggtatcggctggaagggacttcggagatcatctgcctcggcggcggcaggcgggtttggagtgctcccttgccacgctgtgttgcagagtgcggagccagcgcgaccaataatgaggggattctgctgtctcccaattatccattgaactacgaaaataatcacgaatgtatttacagtattcaagtccaggcaggcaaggggataaatatcagtgcacgaacattccacctggcccagggagacgtgctgaaaatctatgatggcaaagacaagacaacccacctactgggagcgttcacaggtgcaagtatgagagggctgactctgagctctaccagcaaccagctctggctcgagttcaactctgacacagaaggcaccgacgagggattccaacttgtctacacttcttttgagttgagccattgcgaagaccctggtatcccacagttcggatacaagatctctgaccaaggtcattttgcgggatcaactatcatttacggatgcaatcccggatacacactgcatggtagctcgttgctgaagtgcatgaccggggagcggcgggcttgggactaccctttaccttcgtgtatcgctgaatgcggcgggcggttcaagggagaaagcagtggcagaattctctccccagggtatccgttcccttatgataataatttgaggtgcatgtggatgattgaagtggatcctggcaatatcgtgtcactgcagttcctggcgttcgacacagaagccagtcacgacatcctgcgggtctgggacggacccccggaaaatgatatgctacttaaggagatctcgggttcgctgatacctgaaggtatccactctactctaaatatcgtgaccatacagtttgacacagatttctacattagtaagagcggatttgccatccagttctccagctccgtggccacagcctgtcgcgacccaggcgtgcccatgaacggaacccggaatggtgacggtcgggagccaggagacaccgtggtttttcagtgcgatcctggctacgagttgcagggcgaggaaagaataacttgtatccaggtggagaatcggtatttctggcagccctcaccgcctgtgtgtatagcgccctgtggtggaaacctaacaggtagttctggcttcattctaagtcctaacttcccacatccttacccgcacagcagagattgtgattggacgatcactgtcaatgctgactacgtgatttccctcgccttcatcagtttctccatcgagccgaactatgacttcctatacatctatgacggtcccgactcgaactctcccctgatcggcagttttcaggatagcaagctgcctgaaagaatagaatcatctagcaatacaatgcacttagccttccgctccgatggctccgttagctacaccggcttccatcttgagtacaaggctaagctcagggaatcctgcttcgatccaggaaacataatgaatgggacaagactagggatggactacaagttggggagcacggtcacatactactgcgacgccggctatgtgctccaggggtattcaacgctgacttgtatcatgggtgatgacggacgtcccggatggaatagggcgctgcctagttgccatgccccatgcgggtccaggtctaccggcagcgagggcaccgtgcttagccccaattacccgaagaattactctgtgggccataattgcgtgtactctatagccgtaccaaaagagttcgttgttttcggccaattcgttttcttccagacgtcgctccatgacgtagtggaagtttacgatggcccgactcagcagtcctccctgctgtcgagtctctctggcagtcatagtggggagtctttacctctatctagtggaaatcagatcactatcaggtttactagtgtgggacccatcacagccaaaggattccacttcgtctatcaggcagtaccccggacttccagtacacagtgcagttccgttcccgagccccggtttgggaggcgaattgggaacgagtttgcagttggttcctcagttctgtttgattgcaatcctggatacatcctccacgggagtattgccatcaggtgtgaaactgtacccaattctttggctcagtggaacgattccctcccaacctgtattgtaccctgcggcggcatcctgacaaaaaggaaaggcactatcctgtcacctggatacccagagccctatgacaataatttgaattgtgtctggaagatcaccgtgcccgagggggctggtatccaggtccaggttgtgtccttcgctactgaacacaactgggactccctggatttctatgacgggggtgacaacaacgcgccacgcctcggctcgtactccggcacgaccatcccacatctcctgaatagcacttcaaataacctgtatctcaattttcagtctgatataagcgtatcggccgctgggtttcacttagagtataccgccatcggcctggacagctgtcctgagcctcagacgccttctagcggaattaaaataggagaccggtacatggtgggtgacgtcgtgagctttcagtgcgaccaaggctatagcctccaggggcattctcatattacgtgcatgcccggacctgtgcgcaggtggaactaccctatccccatctgtctcgcccagtgcggtggcgctatgtctgatttctcaggcgttattctttcccccggatttcccggtaactatccctcaagccttgattgcacatggaccatcaatctgcccattggattcggggtgcatctgcagtttgttaatttctctacagagacaatacatgactaccttgaagttagatcaggttcctcagaaacctcaactgtgattggaagactttccggccctcaaatacccagttctttattctccaccacccacgagacatccctctacttccactctgactatagccagaataagcagggcttccacatagtgtaccaggcctaccagttgcagagctgcccggacccacggccttttcggaacggttttgtaattggaaatgactttactgtcggccagaccatttcattcgagtgcttcccaggatacaccttgatcggaaacagtgccctcacatgtctgcatggcgttagcagaaattggaatcacccgctacctcggtgcgaggctctctgcggaggtaacatcactgcaatgaatgggacaatttatagtcccggataccccgatgagtacccaaatttccaggactgtttttggctggttagggtgccacccggcaacggcatatacattaactttaccgtgctgcaaacagaaccaatctatgattttatcaccgtttgggacggccccgatcagaattccccacagatagggcagttcagtggcaataccgccctggagtcagtttatagcacctctaaccaaatcctcatcaaattccacagtgattttaccaccagcgggttcttcgtcctgtcttatcatgcgtatcaactgagagtgtgtcagcctcctccccccgtacctaatgccgagatcctcaccgaagatgacgagttcgagatcggggatattatacggtaccagtgtctgcctggattcaccctggtcggaaacgcgatacttacttgtcggttaggagagcgcttgcaaatggacggtgcgcctccagtttgccaggtattatgtccggctaacgagctcaggctcgactcaaccggcgtgatcctttctcccggatatcccgactcttatccaaacctgcagatgtgcgcttggtctatctctgtcgaaaaaggatacaacatcactatgttcgtggaattcttccagaccgaaaaggaatttgatgtgttacaggtctatgacggtcccaatattcagtcccccgttttgatctcccttagtggcgactactcctccgccttcaacattaccagtaacggccatgaagtattccttcaatggtccgctgatcacggtaataataaaaaaggtttccgaattcgctacatagctttctactgttccactcctgaatcccctccccacgggtatattatatctcagaccggaggccaactcaacagtgtggttcgatgggcatgcgatcgcggatttagacttgtgggaaagtcctccgcagtttgccggaagtcttcctatggatatcacgcctgggacgccccagttcctgcttgtcaagccatctcttgcggtattcctaaggcgccaaccaacggcggaatcttgaccacagactacttagtaggcactcgagtcacgtacttctgcaacgacgggtacagattgtcctcaaaagagctaaccacagctgtttgtcagtccgacggcacctggtcaaatcacaacaagacccctagatgcgtggtcgtcacctgtccaagtattaactctttcattctggaacacggacgctggcggatagtgaacggaagccattacgagtataaaactaaggtggtgttttcatgtgatcccggataccacgggttgggcccagcaagtatcgagtgtctccctaatggcacttggtcctggcgtaatgaacggccatactgccaaattataagttgtggcgagcttcctacccctccgaacggcaacaaaattggaacccaaacgtcgtacggctccaccgccatcttcacatgcgatctgggtttcatgctcgtggggagcgctgtgcgcgaatgcctgagcagcggattatggagcgagagcgagacaaggtgcctcgccggacactgtggaatccctgagcttatcgtgaatggccaagttatcggggaaaattacggctatcgcgacactgtagtgtatcagtgcaaccctggattcagattaatcggctctagtgtgcgcatctgccagcaggaccacaactggtctggacaactgccctcctgtgttcccgtctcctgtggccacccaggttctcccatctacggacggacgtctggtaatggcttcaattttaatgatgttgtcactttttcgtgcaacatcggatacctgatgcagggacccactaaggcacagtgtcaggccaaccgccagtggtcacatccaccacccatgtgtaaggtcgtgaactgttccgaccctggaattccagctaattccaagcgggagagcaagatcgagcacggcaattttacctacggcacggtggtgttctacgattgcaaccccggatacttccttttcggttcgagcgtcctgatctgccagcccaacggccagtgggacaagccgctgcccgagtgcataatgattgactgcggccaccccggcgtgcctccaaacgctgttttgagcggggaaaagtatacattcgggtcaacagtccactactcctgcacggggaaaagaagcttattgggtcaatccagccgcacatgccaacttaatggccactggagtggctctcagcctcactgctctggcgacgctaccggaacctgcggtgaccccggcacccccggccatgggtcccgacaggagagcaatttccgtaccaagtcgactgtccgctacgcatgcgacactggctatatactgcatggaagcgaggagcggacttgcctggcaaatgggtcttggacaggtcgacaacctgagtgtaaggcggtgcagtgtggcaatcccggtacaaccgcgaacggcaaagtcttcagaattgacggaaccacctttagtagttcagttatctactcttgtatggaagggtacatcctctccggtccaagcgtgaggcaatgcaccgccaatggtacatggagtgggaccctaccaaactgcacaatcatcagctgcggggaccctggaatccctgccaatggtctccgttacggtgatgactacgtggtgggtcagaacgtgtcctacatgtgtcaacctggatacaccatggagctgaacggaagtagaatccgaacatgcactattaacggaacctggagtggagttatgccaacatgtcgggctgtgacttgtcctacccccccccagatatccaatgggagattagaaggcaccaactttgattggggattcagtatctcctatatctgctctcccgggtacgagttatccttccctgcagtgctgacctgcgttggaaacggaacctggtccggtgaggtccctcagtgcttaccgaaattctgcggcgatccaggcatcccagcacaggggaaacgagaaggcaagtcttttatttaccagtctgaggttagtttttcttgtaatttcccattcatcctggttggcagctctactagaatttgtcaggccgacggtacctggtccgggtcatctccgcattgcatcgaacccacacagacatcctgtgaaaatcccggggtgccgcggcacgggagccagaacaacacatttggcttccaagtgggttccgttgtgcaattccactgcaaaaagggacaccttctccaaggatcaaccacaagaacctgcttgccagacctaacatggtccggtattcagcccgaatgtattcctcatagctgtaagcagcctgagacacccgctcacgccaacgtggttggtatggatctgcctagccacgggtacacgctaatttacacatgccagcccggattttttctcgccggagggaccgagcaccgcgtgtgtaggtctgataatacttggacaggcaaagtgccaatctgtgaggctggatccaaaatcttggtgaaggacccgaggccagccttgggaaccccgtcaccaaagctgagcgtgcctgacgacgtcttcgctcagaattacatttggaagggttcctataactttaaagggagaaagcagccgatgacactgaccgtgacgtcattcaacgccagcactggacgcgtgaacgccactctgagcaactctaacatggaactgctgctgagcggcgtgtacaagtcccaagaagcccgcctgatgttacgcatttacctgattaaagtccccgcccacgcctctgttaagaaaatgaaggaggaaaattgggcaatggacggattcgtgagtgccgagcctgatggcgccacatacgtgtttcagggctttattcagggtaaggactatggtcagttcggcttacagcggctgggattaaacatgagtgaaggatccaattccagcaatcagccacatggtacgaactcttcctccgtggctatcgccatcctcgtcccattcttcgcccttatattcgccggatttggattttacttgtataaacaacggaccgctcccaaaacacagtatacaggatgtagcgtacatgaaaataataacggccaagctgcatttgaaaaccctatgtacgacaccaatgccaagtccgtggagggtaaggccgtgcggttcgaccctaacttaaatactgtttgtacgatggtgtag

SEQ ID NO: 113318 - DNA, 11004 bp, synthetic construct
  misc_feature 1..11004: note = Description of Artificial Sequence: Synthetic coding sequence
  source 1..11004: mol_type = other DNA
atgtggtcttggtttctttgttggaagccagttcagctggatcgccagaccgctagtgggtttatctatacctgcgggggcacactgaaaggcctcaatggaacaattgaaagtcctggattcccttacggttacccgaacggggcaaattgcacgtgggtaattatcgcagaagagaggaacagaatacagattgtgtttcagagcttcgccctggaggaagaatatgattacctgagtctctatgacggtcacccccacccaacaaattttaggacccgcctgactggcttccacttgccaccgccggtaacgtctacaaagtctgtattctctctgaggctaacatctgactttgctgtgagcgcacatggttttaaggtgtactatgaggagcttcagtcatcaagttgcgggaacccgggagtgcctcctaagggagtactttacggcacaagattcgatgtgggagataaaatacgctatagctgcgtgacggggtacatcctagatgggcatccacagctaacctgtattgcaaactcggtaaacacagcaagctgggacttcccggttcccatttgcagagccgaggatgcatgcggaggcaccatgcgcggctctagtggaatcatatcatccccatcttttcccaacgaataccacaacaacgctgactgcacctggacaatcgtggcggaacctggggacactatctccttaattttcacggactttcaaatggaagaaaaatacgattatctggagatcgagggatccgagccgcccactatttggctgtcaggaatgaacattcccccccctataattagcaataagaactggctacgacttcacttcgtaaccgacagcaaccatcgctacaggggcttttcagctccataccaaggtagcagcaccctgactcacacaaccagcactggagaactggaagagcataaccgtaccactactggcgctatagcagtcgccagcacacccgcagacgtgactgtttctagcgtgaccgcagtgaccatccacagactttccgaagagcagagagtgcaagttacctctctccggaattcagggctcgaccctaatacgagtaaggacggccttagtcctcatccggcagatacacagtccactagacggagacctaggcatgccgaacagatcgaacgaaccaaggagctggctgttgtaacccatagagtcaaaaaggccatcgactttaagagcagaggcttcaagctgtttccagggaaagacaacagcaataagttctcaatcctgaacgagggaggcatcaaaactgcaagtaatctatgcccagacccgggagaacccgagaatgggaagcgtatcggcagcgatttcagcctgggcagcactgtgcaattctcatgcgatgaggactacgtactgcagggcgctaaatccatcacttgccagcgcattgctgaggtcttcgccgcctggtcggaccacaggccagtctgcaaagtgaaaacctgtgggtcaaatttgcagggaccaagtggtactttcacaagtcccaatttcccttttcaatacgactccaatgcccaatgtgtgtgggtaataacagctgttaatacaaacaaagtgattcaaattaattttgaagagttcgatcttgagatcggatatgacaccctgaccatcggagatggcggagaggtgggcgaccctcgaaccgtgctccaggtcctcacgggatctttcgttcccgacctgatcgtttcgatgtcatcacagatgtggcttcacctgcaaaccgatgagagtgttggtagtgtcgggtttaaagttaactacaaagagatcgagaaggagtcgtgtggggatccaggaacacccttatatggtatcagggagggggatggcttctccaatcgcgatgttctccggtttgagtgtcagtttgggttcgaactgattggtgagaagagtattgtttgtcaggaaaacaaccaatggagcgccaatatcccaatctgcatctttccctgcttatccaactttactgcccctatggggactgttctgtcacctgactacccggaagggtacggcaataatcttaattgcatctggactattatatccgatcctggatcccggatccatctcagcttcaatgatttcgacctggaaagccagttcgatttcctggctgtcaaagatggcgattcacctgaaagtccaatcctagggacatttacgggggccgaagtgccctctcacctaactagcaatagccatatcctgcgcttggaatttcaggctgatcactcaatgtctgggcggggattcaacattacatataatacattcggtcacaatgagtgtccagatccgggtattcccatcaacgctcgcagattcggcgacaacttccagctcggatcctctataagcgtgatttgtgaagaagggttcatcaagacacagggaacagagacgattacatgtattctaatggacgggaaggtcatgtggtccggcttgattccaaagtgcggtgccccttgcggagggcatttttccgccccaagcggagtgattctttcaccaggatggcctggctattacaaggactccttaaactgcgagtgggtgatcgaggctgagcctgggcatagcataaagatcacctttgaaagatttcagactgaactcaactatgacgttctggaggtgcatgacgggccgaatctcctttctcctctgttaggctcctacaacggcactcaggtgccccagttcctcttttcctccagcaattttatttacctgttattcactacagataatagtcgaagtaataatggcttcaagatccactatgaatcagtcacagtgaacacctatagctgcctcgatcctggaattcctgtgcacggtagaaggtacggccacgatttcagcattggcagcaccgtaagtttcagttgtgactcagggtaccgtctgagccacgaggaaccccttctctgtgagaaaaatcattggtggagccaccccctcccaacatgcgacgccttgtgcggcggggatgtgcgggggcctagcggcaccatactgtctccaggttatcccgagttctacccgaactccctgaactgtacttggactgtcgacgtgacccacgggaaaggagtgcaattcaactttcacacattccacctggaagatcatcatgactatctgcttatcaccgaaaacggctcattcacccagcccctggcgcgcctgaccggaagtgatttacccccaactataaatgcagggctctacggtaattttcgtgcccaactgaggtttatctccgatttcagcatttcatatgaggggtttaacattaccttctccgagtacaatctggagccctgcgaagacccgggcattccacagtacggatcccgaatcggtttcaactttggcattggagatacccttactttctcgtgttctagtggctacaggttggaaggcacgagtgagatcatttgcctgggcgggggtcgaagggtatggtccgctcccctgccacggtgtgtggcagaatgcggtgccagtgcgaccaataatgaaggtatcctgctgagtcccaactacccacttaattatgagaacaatcatgagtgcatttacagcatccaggtccaggccggcaaaggcattaacatcagtgctaggacctttcatctggctcagggagatgttctcaagatttatgacggtaaggacaaaactactcacttacttggggcgtttacgggagcctctatgaggggtcttactttgtctagcacctcaaatcagctgtggctggaattcaactccgatacagaaggcactgacgagggctttcagctcgtatacactagctttgagctctcgcactgtgaggatccaggaattcctcaatttggctataagatcagcgatcaagggcattttgctggttcaaccattatctacggctgcaatcctggatatactcttcacgggtcttcactgctgaagtgtatgacaggagagcgtagagcatgggattacccactgccgagctgtatagccgagtgtggtgggaggtttaaaggtgaaagctcaggcagaatcctaagccccggctaccctttcccatacgacaacaacctgcggtgcatgtggatgattgaggtagaccccggtaatattgtttcgctccagttcctcgctttcgacacagaagcaagtcacgacatcttgagagtgtgggacggtccccctgaaaacgatatgcttttaaaggaaatttccggcagtctgattcctgaagggatccacagtactcttaacatcgttactatccaattcgacacagatttctacatttctaaaagcgggttcgccattcaattttcctcgtccgtagcaaccgcatgccgggatcccggagtgcctatgaatggcacgagaaacggcgacggaagggagccaggcgacaccgtggtcttccaatgtgatccggggtacgagctacaaggtgaagaacgtatcacctgcattcaagtggagaaccgctacttttggcagcctagccccccggtgtgcatcgctccctgtggtggcaaccttaccggatccagtggattcattctcagcccaaacttcccacacccttacccacattcaagggactgcgattggactattaccgtgaatgctgattatgtcatttcacttgccttcatctcattctcgatcgagcccaattacgactttctttatatttacgatgggcctgactccaattcccccctgatcggcagtttccaggattcaaaactgcctgaaagaattgagtcttcttccaatacaatgcatttggccttccgatccgacgggagcgtgagctacaccggcttccatttggaatacaaggccaagctgcgggagagctgcttcgaccctggcaatatcatgaatggaacaagactgggaatggactataaactcggctccactgttacttattactgcgacgctggatacgttctgcaggggtactctactcttacgtgtataatgggcgacgacggacggcctggatggaatcgcgcacttcctagttgtcatgccccgtgtggcagtagatcaactggctctgaagggaccgtgctgtcccctaattaccccaagaattacagcgttggccacaactgtgtatactctatagcagtgcctaaggagttcgtcgtctttggacagtttgtgttcttccagactagcctccatgatgtcgttgaggtatacgacggaccaacacagcagtcatctctcctctcaagtctttcaggttcacattcgggcgaatccttacccctgtcgtccggtaatcagataactatcagatttacatcggtgggtcccattacggccaaaggctttcactttgtttaccaggccgtgccacgcacgtcctcaactcagtgttcgagcgtgcccgagccgcgctttgggagacggatcggcaacgaattcgccgtcggttcttccgtgttgttcgattgtaatcccggatacatactccatgggagcatagccataagatgcgagaccgttccaaatagcctggcccagtggaatgattcactcccaacttgtattgtcccttgtggaggcatcctgactaagagaaaaggaactatactaagccccggttaccctgagccctacgataataacttaaattgtgtctggaaaattaccgtgcccgagggtgctggtatacaggtccaggtcgtgagctttgctacagagcacaactgggactcgcttgacttttacgacggcggagataacaatgctccccggctgggaagctattctggtactaccattccacatctgctcaacagtactagcaacaatctctacttgaatttccagtccgatatttctgtgtccgcagcagggttccacctcgagtacaccgcaatcggacttgacagctgtcctgaaccacagacgccatcttctggcatcaagatcggggaccggtatatggtcggcgatgtagtttcctttcagtgtgatcagggttactccctacagggacattcccacataacctgcatgccaggaccagtgcgcaggtggaactatcctatccccatttgccttgctcaatgtggcggcgccatgtccgacttctcaggcgttatactgagtcccggatttcctggtaattatccctcatcattggactgcacctggacgatcaatctgcccataggcttcggcgtacatctccagtttgtgaatttttcaacagagacgattcatgattacctggaggtgcgctctggaagctccgaaacttctacagtgatcggtaggcttagtggtcctcagattccatcctccctgtttagtactactcatgagacaagtctatacttccactccgattactcccaaaacaaacagggcttccatatagtctatcaggcctaccagctgcagtcctgccctgaccccagacccttccgaaatggcttcgtgataggcaacgatttcaccgtgggccagacgatctcctttgaatgtttccctgggtacaccctcatagggaactctgcccttacctgtcttcacggagtcagccgcaattggaatcacccccttccaaggtgtgaggctctttgcggggggaatatcaccgccatgaacggaacaatctatagcccgggttatcccgatgagtatcccaatttccaggattgcttctggcttgtgagggttccacctgggaatgggatctacataaacttcaccgttctgcagaccgaacctatctatgactttatcacagtatgggatggcccggaccagaactccccccagattggacaattctccggaaacacagccctagagagcgtgtactcaacgagcaaccagatcctgatcaagttccactccgacttcacaacgtccgggttctttgtgctatcttatcatgcttaccagctccgggtttgtcaaccaccaccacctgtccccaatgccgaaatcctcacagaagacgatgagtttgagattggagatattataagataccagtgcctgccaggttttacactcgtcggaaatgcaatcctgacttgcaggctgggcgagagacttcagatggatggtgcaccccctgtatgccaagtcctgtgccctgcaaatgagttgcgcctggactctactggtgttatcctctcccctggttacccagattcctacccaaacctgcagatgtgtgcatggtccataagtgtagagaagggctacaatatcaccatgtttgtcgagtttttccagaccgaaaaggaattcgacgttctccaggtctatgatggacctaatattcagagcccagtcctaatttccctcagtggtgactatagctcagcctttaacattacttcgaatgggcacgaagtattcctgcagtggtctgcagatcatggcaacaataagaaagggttcagaattaggtacattgccttttattgttctacccccgagagcccccctcacgggtatatcatcagccaaaccggcggtcaactcaatagtgtagtgcgctgggcctgtgaccgaggttttaggctcgtgggcaaaagcagcgccgtatgtagaaaatcctcttatggctatcatgcctgggatgcccccgttccggcttgtcaggccatcagctgcggtatccccaaagctccaacaaacggaggtattctgactaccgactatttggttggcacacgggtgacatacttttgtaacgacggatatcggctttccagcaaagagctgacgactgctgtgtgccagtctgatggaacgtggtcaaaccacaataaaaccccacgatgcgtagttgtgacgtgcccatctattaacagttttatcctggagcacgggcgctggaggatcgtgaatggcagtcactacgagtacaagacaaaagtagtattctcgtgtgacccagggtaccatggtttaggccccgcctctatagagtgtttacccaacgggacctggagctggcggaatgaacgcccctactgccagattattagttgcggggagcttccgactcctcccaatggaaataaaatcggcactcagacgtcctacgggtctacagcgatcttcacgtgtgacctgggttttatgctggtaggttctgcagtgagggagtgtctaagtagcggactctggtcggaaagtgaaacacgctgtctggcgggccactgtggtataccagagctgatagtaaacggccaagtgatcggcgagaactacggctaccgagacacagtcgtatatcaatgtaatcctggtttcaggttgatcggctcctcggtccgcatctgccagcaggaccataactggtcgggccagctgccctcatgcgtgccagtttcttgcgggcaccctggaagccccatttacggccgcacatcagggaatggcttcaactttaacgatgtagtaaccttctcttgcaacatcgggtatctcatgcagggaccgactaaggcgcagtgccaggcaaacagacaatggagccaccctcccccaatgtgcaaggtggtcaattgctccgaccctggaattcctgcgaactccaagagagaatcaaaaatcgagcacggcaactttacttacgggacagtcgtcttctatgattgcaacccgggttattttttatttggcagtagtgttttgatctgtcagcccaatggccagtgggataaacccctgccggagtgtataatgatcgactgcgggcaccctggcgtcccccctaatgcggtgctgagcggagaaaagtacaccttcggctccacggtgcactattcttgcacgggcaagagatcccttcttggacagtctagtcgaacttgccaacttaacggacactggtccggatcacaaccccactgttctggagacgctactggcacctgcggagacccaggcacacccgggcacggctcacgtcaggagtctaatttccgcacaaaaagcacagtgcgatacgcatgcgatacaggctacatcctgcatggaagcgaggagcgcacttgcctcgccaacggatcttggactggtcggcagcctgaatgcaaggctgtgcagtgtgggaatcctggcacgacagccaacgggaaggtgtttcgcatcgacggcactaccttctcctcttccgttatctattcttgtatggaaggctacatcctctccggcccaagtgtgagacaatgcactgctaatggcacatggtctggaacactccccaactgtactataatttcatgcggagaccccggcattccagcgaatgggctgcgttatggagatgactatgtcgtgggccagaatgtgtcctatatgtgccaacccggatataccatggaactgaacgggagtcgcattcgtacgtgtacgataaatggcacgtggtcgggtgtaatgcctacttgtcgagctgtgacgtgccctacccccccccagatctccaatggccgtctggaggggaccaactttgactggggattttcaatcagttatatttgtagcccagggtacgagttgtccttccctgccgttctgacttgcgtcgggaatggcacctggagcggggaagtcccacagtgtctgcctaaattttgcggggatcccgggatccctgctcagggaaagcgcgaagggaaaagctttatctaccagtcagaggtgtcattttcttgtaactttcccttcatcctggtgggctcgtccactaggatctgtcaggctgatggaacttggtcaggatccagcccacactgcatcgaaccaacacagacaagttgcgaaaatccaggcgtgccacggcacgggagccagaacaatacttttggcttccaagtaggtagtgtggtacagtttcattgcaagaaaggacatctgctccaaggttccaccactcgcacgtgtttacccgacttgacctggtccgggattcaaccagagtgtattccccactcatgcaagcagcctgagaccccagcacatgctaatgtggtgggtatggacctgccctctcatggttatacgttaatctacacatgtcagcccggttttttcctggctggcggcactgaacatagggtctgccggtcagacaacacttggacaggaaaggtgcccatctgcgaagcgggtagcaagattctggtcaaagacccgaggcccgcactgggcactccttccccaaaactctcagtgccagatgatgtgtttgctcagaactatatttggaagggaagctacaatttcaagggtcgcaagcaaccgatgactctgaccgttacgagctttaatgcctctaccggacgcgtcaatgccacgctttctaatagcaatatggagttgctcctgagcggagtgtacaaatctcaagaagcgcggctgatgctgcgcatctacttaataaaggtgccggcccacgcgtctgtcaaaaaaatgaaggaggaaaattgggctatggacggcttcgttagtgcggaaccggacggcgcaacttacgttttccagggcttcattcagggcaaagactacggtcagttcgggctgcaaagactggggctgaatatgtctgaagggagcaacagctctaatcagcctcacgggacaaattccagcagcgttgccatcgctatcttggtccctttcttcgccctaattttcgctggatttggcttctatctatacaaacagcgcaccgcacccaaaacccaatacactgggtgttcagtgcatgaaaacaataacggacaggcagccttcgaaaatcccatgtacgatactaacgctaagtctgtggagggtaaagcggtgcgcttcgaccccaatctcaataccgtgtgtacgatggtgtag

SEQ ID NO: 113319 - DNA, 10914 bp, synthetic construct
  misc_feature 1..10914: note = Description of Artificial Sequence: Synthetic coding sequence
  source 1..10914: mol_type = other DNA
atgaagggcattagaaagggcgaatctcgggccaaggaaagcaagccttgggaacctgggaaacgaaggtgtgccaagtgcgggcggctggacttcatccttatgaaaaagatgggaataaaatccggattcaccttctggaatctagtgttcctcctcaccgtcagttgtgttaagggcttcatctatacctgcggcggcaccctgaagggactcaacggtactatcgaaagcccgggcttcccttacggatatcccaacggagccaactgcacttgggtgataattgcggaggagagaaataggatccagatcgtcttccagagttttgcccttgaggaggagtatgattacctctccctgtacgacggccatccccacccaactaattttaggaccagactcaccgggtttcacctgcccccacccgtgacatcaacgaagagcgtgttcagcttaagactgaccagtgattttgccgtaagcgcccatggatttaaagtatactacgaagagttacagagcagctcgtgtggcaaccctggtgtcccacctaaaggtgtcttgtacggaacccgttttgacgtgggagacaagattagatactcctgcgtcaccggttacatcctcgatgggcaccctcagctgacatgtatcgccaactccgtgaatacagcatcttgggatttccccgttccgatatgccgagccgaggatgcgtgtggcggtaccatgcgcggctcctcagggatcattagctctcctagcttccctaacgagtatcataataacgctgactgcacatggactatagtggccgaacccggtgacaccatctccctcatcttcactgactttcagatggaggagaaatacgattatctggaaattgaaggctcagagccgccaacaatttggctgagtggaatgaacatccctcccccaattatttcaaacaaaaattggctgcgactgcactttgtcaccgattctaatcacagatatcggggcttcagcgcaccttaccaaggtagtagcacgttaactcacacgacgagtacaggtgaactggaggagcataacagaactaccaccggagccattgcagtggcttctacgccggctgatgtgaccgtcagcagtgtaacggccgtgaccatccacaggttgtctgaagaacagagggtgcaggtcactagtctacgcaattctgggctcgatcctaatacatccaaggatgggctgagtccccatcctgccgacacacagtctactaggcggcgcccccgccatgccgaacaaatcgaaaggacaaaggaactggccgtggtgacccatagggtgaagaaagcgatcgacttcaagagccgaggctttaagctgttcccaggcaaggacaattccaacaagttctctatactgaacgaaggaggcataaagactgcttccaacctctgcccagacccgggtgaacccgaaaacggcaaaagaatcggatctgacttcagccttggaagtaccgttcagttcagttgtgatgaagactatgtactgcagggcgcgaagagcatcacttgccaacgaattgctgaagttttcgctgcctggagtgaccaccgtccggtgtgcaaagttaagacgtgcggatccaatctgcagggcccctccggaactttcacctccccaaattttccctttcagtacgatagcaacgctcaatgcgtgtgggtgatcaccgccgttaacaccaacaaagtcattcagattaacttcgaagaattcgatctggaaatagggtacgatactctgaccattggcgacggaggcgaagttggagatcccaggactgtgctgcaggttctcaccgggagctttgtgcctgacctgatcgtatccatgagcagccagatgtggctgcatttgcagactgacgaaagtgtgggaagcgttggattcaaggtcaactacaaggagatcgagaaggagtcctgtggggacccagggacccccctgtatgggatacgcgaaggtgatggatttagcaatagagacgttctgcgcttcgaatgccagtttggctttgagctgatcggagaaaagtccattgtgtgtcaggagaataaccagtggtcagcaaatatccctatatgtattttcccctgcctttctaacttcacagcccctatgggtaccgtgctgtctcccgattatcccgaaggatacggcaataacttgaattgcatctggaccatcatcagcgaccctggctcaaggattcatctgagtttcaacgattttgatctggagagtcagttcgacttccttgcggtgaaagatggcgactctcccgaaagtccgatccttggcaccttcactggggccgaagtcccctcccatctgaccagcaacagtcatatcctcagactggaatttcaggcagatcattcgatgagtgggagaggattcaatatcacctataatacattcggtcacaatgagtgtcccgaccccggaattccaataaatgccagaagattcggtgataacttccagcttggatctagcataagcgtgatttgcgaggaggggtttatcaagacacaagggaccgagacgatcacctgtatcctcatggacggcaaggtgatgtggtcgggccttattccgaagtgcggagccccatgtggaggtcacttttcggcaccatctggtgtcattttaagcccggggtggccagggtattataaggactccctaaactgtgagtgggtgatcgaagccgagccaggacacagtataaaaatcaccttcgagagattccagaccgaactgaactatgatgttttggaagtgcacgacggccccaatttgctctccccactgcttggaagctacaatgggacccaggtcccccaatttctgttttcctcaagtaattttatttacctcttattcactactgacaactcccgctctaataacggcttcaagatccactatgaaagcgtgacagtcaacacctatagctgtctggatcctgggatcccagtgcacggaagaaggtacggccatgattttagcataggctcaaccgtgtcattctcctgtgatagcgggtatagactttcacacgaggaaccactgttgtgcgaaaaaaatcattggtggagccaccccctgcctacttgcgatgccttgtgcggcggcgatgtgagaggcccctctggcaccatcctgtctcctggttatcctgaattctacccaaacagtcttaattgcacgtggactgtggatgtaacccacggcaagggcgttcagtttaacttccacacgtttcaccttgaggaccaccacgactacctgctgatcaccgagaatgggtctttcacccagcccctggctcggctgacgggaagcgatttacccccaacaataaacgcaggcctgtacggcaattttcgcgctcagctacgctttattagcgactttagcatttcttatgaggggttcaacatcacgttcagcgaatataatctggaaccctgtgaagatccgggcatccctcaatacggtagccgtatcggcttcaactttggtatcggtgatactctgacgttctcctgcagtagcggataccggctagaagggacgtccgaaatcatctgcctgggtggtggccgccgggtgtggagcgcccccttgccacgttgtgtcgccgaatgtggtgcaagcgctacgaacaatgaaggaatcttgctcagcccgaactatcctctcaattatgagaataatcatgaatgtatttattctatacaagtgcaggcaggaaagggcatcaatatctccgctcgaacgttccacctcgctcaaggcgatgttctcaagatatacgatggcaaagacaagaccacccacctgctaggcgcttttaccggggcgtccatgcggggcttgacactctcctctacatccaatcagctctggctcgagtttaactctgacaccgagggtaccgatgaagggttccagctggtgtacacctcatttgagttgtcacattgcgaagatccaggaattccccaattcgggtacaagatttcagaccagggacacttcgctggaagtacgattatatatggatgcaatcccgggtataccctacacggatctagcttgcttaagtgcatgactggggaaaggcgtgcttgggattaccctcttccgtcctgcattgccgagtgtggcggccggtttaaaggcgagagtagtggccgaatactctccccaggataccccttcccctacgataataacctacgttgtatgtggatgattgaggtggacccagggaacatcgtctccctccagtttctcgcctttgacacggaagcttcccatgatatcttacgcgtgtgggatgggcctcctgagaacgacatgcttctgaaagagataagtggctcgctgatccccgaaggaatccattccaccctgaatatcgtgacaatccagttcgacaccgatttttacatatctaaatctggatttgctatccagttttcgtcctccgtcgccacggcctgtagagacccaggggtgccaatgaatggtacacgcaacggggacggaagagagcctggagacacagtggtctttcaatgtgatcccggatacgagctgcaaggggaggaacgcataacttgcatccaggtggagaaccgctacttctggcagcccagccctcccgtctgcatcgctccttgtgggggaaacttaacagggtcatctgggttcattctctcaccgaatttcccacacccttacccacacagtcgtgattgcgattggaccatcaccgtaaatgccgattatgtgatcagtctcgccttcatcagctttagcatcgaacctaattacgatttcctgtacatctacgatgggcccgactccaatagccctctgataggctccttccaagactccaagttaccggagcgtattgagtcttcttcaaacaccatgcacctggcatttcgcagtgatggttctgtatcttatactgggtttcatctggagtataaagctaaactgcgggaatcttgtttcgaccctgggaatatcatgaacggcacacggctaggcatggactataaattggggtctacagtgacctactattgcgatgcgggctacgtgctccagggctactcgactctgacttgtattatgggcgacgacggacggcctgggtggaacagggctctgccttcttgccacgccccttgcgggagtcgatccactggtagcgagggcacagtgcttagtccaaactacccaaagaattactccgttgggcataactgcgtctattctattgccgtgcccaaagaattcgctgtccctcgcacaagcagtacccagtgctcttcagtgccagaacccaggttcggaagacgcattggtaacgaattcgctgtcggaagttccgtactctttgattgcaatcccgggtacatcctgcacgggtccatcgctatacgctgtgagaccgtgcctaactcattggcgcagtggaatgactcactcccaacctgcattgtgccctgcggcggcatccttactaaacgcaaggggaccattttgagccccggatatccagagccttatgataacaacctcaactgcgtctggaagatcactgtgccagaaggcgctggcattcaggtacaggtggtgtccttcgccacagagcataattgggattctctggatttttatgacggcggcgacaataacgcccccagactgggttcctatagcgggaccaccatccctcatttgctgaacagtacgtccaataatctttatcttaatttccaaagtgacataagtgtcagcgcagccgggttccatctggagtataccgccattgggctggactcgtgtccggaaccgcaaaccccttcctccggaattaagattggagataggtatatggtaggggacgttgttagctttcagtgcgatcaagggtacagcctacaaggccactcccatataacgtgcatgccagggcctgtgcgtcgatggaattaccctatccctatttgtctagcccagtgcggaggtgctatgtcagacttttcaggcgtaatcctcagccccggattcccagggaactatccatcttccctggattgtacgtggacaatcaacctgcccatcgggttcggcgtccacttgcaatttgtgaacttctctacagagacaatccatgactatctagaggttaggtctggcagctccgaaacctcaaccgtcataggcagactatccggtccccagattccttccagtctgttttccaccacccatgagacatctctgtatttccattccgattattcccagaacaaacagggcttccacatcgtctaccaggcataccagctgcagtcttgcccagatccaagaccctttcgcaacggctttgtgatcgggaacgactttactgtggggcagacgatatcattcgagtgttttcctggctacacattgatcgggaactccgcactaacatgcctccacggagtgtcgcgcaattggaatcacccactcccccgctgtgaggccttgtgcggcggtaacatcactgccatgaacggcaccatctactctccagggtaccctgatgagtaccccaattttcaggattgcttctggttggtgcgtgtgcctcccggaaacggaatttacattaattttaccgttctacagaccgaaccaatctacgactttattaccgtttgggacggccccgatcaaaactccccgcaaatcgggcagttcagtggaaatactgccctggagtctgtttactcaacttcgaaccagatcttgattaagttccatagtgactttaccacgtctggcttcttcgtcctttcctaccatgcttatcagttgcgggtctgtcagcctcctcccccagtccccaatgccgaaattctaacagaggatgacgaattcgaaatcggcgatatcattaggtaccagtgtctccctggcttcacccttgtgggaaatgccatcctgacttgtcgcctaggggagcgcctccaaatggacggcgctccccctgtatgccaggtgctctgtcccgcaaacgagctgcgcctggattctacaggcgtcatattaagccctggatatcccgactcctacccgaatcttcagatgtgcgcatggtccatttcagttgagaagggttataacatcactatgtttgtagagtttttccagactgaaaaggagttcgatgtgctgcaagtttacgatggtccgaacatccaaagcccggtcctgattagcttgtcgggagactactccagcgccttcaacataacttcgaatggccatgaggtgtttctgcagtggtctgccgatcatggcaacaacaagaaaggttttcgaattcgttacatcgccttctattgcagcactcccgagtccccaccgcatgggtacatcatttcacagaccggcggacagcttaattccgtggtaaggtgggcgtgtgatcgaggtttccgtctcgttggcaagtcctcagctgtgtgtaggaagtctagctatggatatcatgcatgggatgcccccgtgcctgcttgtcaagctatctcatgtgggattccaaaagctcccaccaacgggggaatccttacgacagactatctggttggaacaagggtcacctatttttgcaatgatggttatcgcctatcttcaaaagaactaactaccgcagtctgtcagtcagacgggacttggtcaaatcacaataagactcccaggtgcgttgtcgtcacctgtccaagtatcaacagtttcatccttgaacacgggcggtggagaatcgtgaacggtagccactatgagtataagaccaaggtggtattttcatgcgacccaggctaccacggactgggacctgcttctattgaatgcctgcctaatggcacatggagttggagaaatgagagaccttattgccagatcatctcctgtggggaacttcctactcctccaaatggcaataaaatcgggacgcagacttcttacggcagcacagccatctttacttgtgacctgggcttcatgctggtcgggtcagctgtccgggaatgtctcagctccggactttggtctgagagcgaaacccgatgtcttgccggccattgcggaatcccagaactgatcgtgaacgggcaggtgattggtgagaactacggatatcgcgatacagtcgtgtaccagtgcaacccaggcttcaggttaatcggatccagtgtccgaatttgccagcaggaccacaattggtctgggcagctgccctcatgtgtccccgtgagctgcggtcacccaggatcgcccatctacggaaggacttcggggaacggtttcaactttaatgatgtggtgaccttctcttgtaatatcggatacttgatgcaagggccgaccaaggcccaatgccaggccaatcgccagtggtcccatcccccgcctatgtgtaaagtagtgaactgtagcgaccccggtatccctgccaatagcaaaagggagtccaagatcgaacacgggaacttcacatacggaactgtcgtattctatgactgcaacccgggttattttttattcggttcttcagtcctgatctgccagcctaacgggcaatgggacaagccactgcccgagtgcataatgattgactgcggccacccgggggtgccccctaatgctgtgttatcaggtgagaaatacacgtttggttcaactgtccactactcgtgtaccggaaaacgctctctgctgggccaaagctcgcgcacctgccagcttaatggccattggagtgggtcccagccacattgttctggcgatgccaccggaacttgcggagatcccgggacccctggccacgggtcccgtcaggagagcaacttccggacgaaaagcacggtcaggtacgcgtgcgatacgggctatattctgcacggctccgaagagcggacttgcctggcgaacggttcatggactggcaggcagccagagtgtaaggctgttcaatgcggtaaccctgggaccacggctaatggcaaagttttccgcatcgacgggacaaccttttctagctcagtgatttatagctgcatggagggatatattctcagcggtccctccgttcgccagtgtactgctaatgggacctggagtggaacgctgcctaattgcaccattatctcttgcggcgatcctggaattcctgcgaacggccttagatatggggatgattatgttgtgggccagaatgtctcatacatgtgccagccgggctatactatggagctgaacggctcccgcattagaacctgcactattaatggaacttggtccggggtcatgcccacgtgcagggccgtcacttgtcctacccccccgcaaatcagcaatgggaggctcgaaggaacaaactttgattggggctttagcatatcctatatttgctccccaggatatgagctgtcttttccagccgtgctaacctgtgtcggtaatggcacttggagcggggaagtgcctcaatgtctgccaaaattttgcggcgatcccgggatccccgcacaaggaaagagagaaggcaagtctttcatatatcaatccgaggtgagttttagctgtaacttcccattcatcctggtcgggagttcgacccggatctgtcaggcagatggcacctggagtggcagcagtccgcactgcatcgaacccacacagacgtcctgtgagaatcctggggtgccacgccatggcagccagaataatactttcgggtttcaagtcggctcagtggtgcagttccattgtaaaaaggggcatctgctgcaaggaagcaccacacggacatgtctcccagaccttacatggtccggcatacagcctgaatgtatcccccacagctgcaagcaaccagagaccccggcacacgccaacgtggtgggaatggacctgccctcacatggctatacactgatatacacgtgccaacctggctttttcttggccggcggcaccgagcatagagtgtgccggagcgataacacctggacgggcaaggtgcccatttgtgaggctggatcgaagattttagttaaggacccacgacccgccctggggaccccctcaccaaaactatcagtgcccgacgatgtcttcgctcagaactacatctggaaggggtcttacaattttaaggggcggaagcagcctatgacactcaccgtgactagctttaacgcctccactggtagagttaatgccacactctccaatagcaatatggaactcctgttgagcggggtatataagtcccaggaggctagactaatgctgcgcatctatctcatcaaagtgcctgctcatgctagcgtgaagaaaatgaaagaggagaattgggcaatggatggatttgtctctgccgaacccgatggggcaacttatgtgtttcagggcttcatccagggaaaggactatgggcagttcggtctgcagagactcggtctcaatatgtccgagggttccaactcaagcaaccaaccccatggcacaaacagttcctccgtcgctatcgcgattcttgttccattcttcgccctgatttttgccggatttggcttctacctatataagcagcggacagcgcccaagacacagtacacgggctgcagcgtgcacgagaacaacaatggacaggccgcattcgaaaatccaatgtatgatacgaatgctaaaagcgtggaaggtaaggcggtgagatttgaccccaatctcaatacagtgtgcactatggtgtag

SEQ ID NO: 113320 - DNA, 10617 bp, synthetic construct
  misc_feature 1..10617: note = Description of Artificial Sequence: Synthetic coding sequence
  source 1..10617: mol_type = other DNA
atgaaaggaattcggaaaggcgaaagtagggccaaagagagtaagccttgggagcccggtaagagaaggtgtgcaaagtgcgggcggttggatttcatactgatgaagaagatggggatcaagtccggatttaccttctggaatctagtgtttctcctgaccgtgtcctgtgtgaaaggtttcatctatacttgtggcgggacattaaaaggactcaacggcacaattgagagccccggtttcccctatggctatccgaacggagccaattgcacttgggtcattatcgccgaggagagaaataggatccaaatagtctttcagtccttcgccctggaagaggagtacgattacctctccctctatgatgggcatccccatccaactaacttcagaacacgcctgactggttttcatcttcctccccccgtaacttcaactaagagcgtattcagcctcaggttgactagcgattttgctgtcagcgcgcacggattcaaggtgtactatgaagaactccagagcagttcatgtggaaatccaggggtcccacctaaaggcgtcctgtatggtacccggttcgacgtcggcgacaagatccggtattcttgtgtaaccggttatattcttgatggccatcctcagctcacctgcattgccaacagcgtcaatacagcctcctgggacttcccggtgccgatctgcagagccgaggacgcatgcggaggtaccatgcgcggctccagcggaattatctctagcccttcattccccaacgaataccacaataacgccgactgcacctggacaatcgttgctgaacctggcgacactatcagcctaatcttcacggattttcagatggaagagaagtatgactacctggagattgagggctcagagccccctaccatatggctctcagggatgaacattccacccccaataatttcaaataaaaactggctgaggttgcactttgtcactgattccaaccaccgttaccggggctttagtgcaccttatcaggtcaagaaagcgatagatttcaagtcacggggttttaaactcttccctggaaaagacaattctaacaaattcagtatattgaatgagggggggatcaaaactgcctccaacctgtgccctgaccctggagaacctgaaaacgggaaaaggataggaagtgatttctccctgggttctaccgtacaattcagctgcgacgaggattacgtgctgcagggcgccaagtccattacctgtcaaaggatagccgaggtgtttgccgcatggtctgaccaccgccctgtgtgcaaagtgaaaacttgtgggtcaaacctgcaggggccatcaggcacgtttacttctcctaacttcccgtttcagtacgacagtaacgctcaatgcgtgtgggtgatcactgccgtgaataccaacaaagtcatccagatcaatttcgaggaatttgaccttgagatcggctatgacactctgacaatcggagacgggggcgaggtgggagaccctcggaccgtcctacaagtcctgacagggtcgttcgtgcccgacttgattgtgagtatgagttcccagatgtggcttcaccttcagaccgatgaatccgtgggcagcgtggggttcaaggtgaattataaggagatcgaaaaggaaagctgcggcgacccggggacgcccttatacggtatacgcgagggagatggctttagcaaccgagacgtgcttcggtttgaatgtcagtttggctttgagctcattggggaaaagagcattgtgtgccaggaaaacaatcagtggagtgccaacatcccgatctgcattttcccctgtctcagcaacttcactgctccaatgggcacagtgctatctcccgattatcctgagggctatggtaataacttaaactgtatttggacaataatctctgaccctggaagccgaattcacctctcattcaatgattttgacctagagtcccagttcgactttttagcagtgaaggacggggacagccctgaatcccctattctggggacttttacaggtgcagaggtgcccagtcacctgactagcaactcccacattctgcgcttggaatttcaggctgaccactcaatgtccggtcgggggtttaatatcacatataatacctttggacataacgaatgccctgatcctgggatcccaatcaacgcccgaaggtttggtgacaattttcagcttggatctagcatttccgtaatttgcgaagaaggctttattaagacacaaggcactgaaaccattacttgcattttgatggacggtaaagtgatgtggtcaggccttattccaaagtgtggcgcaccgtgcgggggacactttagcgctccctccggcgtcattctctctcctggttggcctggctactataaagattctctgaactgtgagtgggtgatagaggctgagccaggccactccataaagatcactttcgagaggttccagacagagctcaactatgatgtgctggaggttcacgatggccctaacttactctcacccctcctgggttcttacaacggcacccaggtgcctcagttcctgttttcatcctccaattttatctaccttttattcaccaccgataattccaggtctaacaacggattcaagatccattacgagtcagtcacagtgaacacttattcatgtctggatcctggtatccccgtgcatggccgccgatacggtcacgacttttccataggttctaccgtttcttttagctgcgacagtggttaccgcctgagtcacgaagaacctttgctttgcgagaagaaccactggtggtcccatccactacctacttgcgacgcactgtgtggaggcgatgtgcgagggcctagcggcaccattctgtctcctgggtatccagaattttaccctaacagccttaactgcacctggacagtcgatgtgactcatggtaagggggtgcaattcaatttccacaccttccatttggaggatcaccacgactacctcctgataactgagaatggcagctttacccagccactggcacggcttacaggttcagacttaccgcccactatcaatgccggactgtacgggaattttcgagcacagctgagattcatcagcgatttctcaattagctacgaaggattcaacatcacattctctgaatataacctggagccgtgtgaggatccaggcattccacaatatggctctcggatcgggttcaactttggcataggggatacattaactttctcttgttcttcaggatacagacttgaagggacatccgagattatttgcctgggaggcggaaggcgggtttggagcgccccactccccagatgcgtggctgagtgcggggctagtgctactaacaatgaaggcatcctgctctcccccaattaccccctgaattatgagaacaatcacgagtgtatttactcaatccaagtccaagccggcaagggtatcaacatcagtgcccgtaccttccatttagcccagggtgatgtattgaagatatacgacggaaaggataaaacaacgcacttgctgggcgctttcacaggggcctcgatgcgaggacttacccttagctccaccagtaaccagctctggctggaattcaacagcgataccgagggtaccgacgaaggttttcagctggtatacaccagcttcgaactgagccattgcgaggatcctggcatcccccagtttggctataaaatttccgaccagggtcacttcgctggttcgactataatttatgggtgcaaccccggatatacactgcacgggtcaagcctcttaaaatgtatgaccggcgaaagaagggcatgggactatccactgccctcatgcattgcagaatgtggcgggcgttttaaaggcgaatcctccggtagaatactgagtcccgggtatcccttcccttatgataacaacctccggtgcatgtggatgatcgaagtggatcccggaaatatcgtcagccttcaattccttgcttttgataccgaggccagccacgacatcctgcgggtgtgggatggaccccctgagaacgatatgttgctgaaggagatctcaggttcccttattcctgagggcattcattctactttaaacattgtaaccattcagtttgatacagacttctatatatcgaaatcagggttcgccatccagtttagttcttcagtagccactgcctgtagggaccccggcgtcccgatgaacggtacacggaacggagacggaagagaacccggcgacactgtcgtgtttcagtgtgatccgggatacgaacttcagggggaggaaaggattacgtgtatccaggtagaaaaccgctacttctggcaaccttctccacctgtgtgtatcgctccttgtggcggaaacctgactggatcatccggcttcattctgagcccgaactttcctcacccttatcctcatagcagagattgtgattggactattaccgtcaacgctgattacgtgatcagcctggcttttatcagctttagcatagagcccaactacgattttctctacatctatgatggacctgattcaaatagccccttgataggctctttccaggactccaagcttcccgaacgaatcgaatcatcctctaatactatgcatttagctttccgatccgatggttcagttagttacactggcttccacctggagtacaaagcaaaactgcgcgaaagttgtttcgacccagggaatataatgaatggtactagattggggatggattacaagctcggcagtacggtgacctactactgcgatgccgggtatgtcctgcagggttatagcacgcttacctgtattatgggggacgacgggcggcctggttggaaccgtgcactgccgagttgtcacgctccttgtggctctcgaagtacaggcagcgaaggcacagttctgtccccgaactatccaaagaactacagtgttggccacaactgcgtgtatagcattgccgtacctaaggagttcgttgtattcggtcaattcgtgttcttccagaccagcctccatgacgtggtcgaagtgtacgacggccccactcagcagtcctcattattgtcctccctgtccggcagccactccggcgagagtctgcctctgtcatccggcaaccagatcactattagattcaccagcgtaggccctatcaccgctaaaggctttcacttcgtgtatcaggccgttccacggaccagcagtacgcagtgcagctctgtgcctgaaccgaggtttggccgaaggattggaaatgagttcgccgtgggctcttccgtcctgttcgactgtaatcccggatatatccttcatggtagcatcgccatccggtgtgagactgtgccgaattctctggctcaatggaatgatagcttgcctacatgtattgtcccttgcgggggaatactgaccaaaaggaaaggcaccattctctcaccaggataccccgaaccctacgacaataacttgaactgtgtatggaaaatcaccgtgcctgagggggctggtatacaggtccaggtggtgtccttcgcaaccgagcataactgggatagcttagacttttatgacggaggtgacaacaatgccccgcggctcgggtcatactccggcactacaataccgcatctgctgaactcaacgtcaaataatttgtatctgaacttccagtccgatatctcagtatccgcagccggtttccatctggagtataccgctattgggttggattcgtgccccgagccacagactccgtcctctggtattaagatcggagatcgctatatggtgggggatgtggtgtcctttcagtgcgaccaagggtattccttgcaaggccactctcacattacatgtatgcccgggcctgtgcggaggtggaactatcctattcctatctgtttggcccagtgcggcggtgctatgtccgatttcagcggggtgatattgtcacctgggttccctggcaactacccctcttccctcgattgcacatggacaataaacctccctattggattcggcgtgcacctgcaattcgtgaatttcagtacagagactatccatgactacctggaagtgaggagtggctcaagtgaaaccagcactgtgattggccggctcagtggcccacagattccttcttcactatttagcacgacccacgagaccagcctgtacttccactcagactactcgcagaataaacaaggtttccacattgtgtaccaggcctatcagctgcagtcttgtccggacccaagacctttcaggaacgggttcgtgatcggcaacgatttcacagttggtcagaccatcagcttcgaatgcttcccaggctataccttgatcggaaacagcgctctgacatgtctgcacggcgtttcccgcaattggaaccatcccctgcccagatgcgaggctttatgcggcggcaatataaccgcgatgaatggcaccatctattcacctggataccccgacgaatatcctaattttcaggactgcttctggctggtgcgagtccccccagggaatgggatctatattaatttcacggtcctccagaccgagcccatatacgactttatcaccgtctgggacgggccagaccagaattccccacaaatcgggcagttcagcggcaatactgccctcgaatccgtctatagtacgagcaaccagatcctcatcaaattccactccgactttactacatccggattctttgtgttgtcttaccatgcttaccagctgcgggtgtgccaacctccgcctcccgtgcctaacgccgagatcctcactgaggacgacgaatttgagatcggtgatatcatccggtatcaatgtcttcctggctttacccttgttggcaacgctattctgacctgccggctaggtgaaagacttcagatggacggggcgcccccagtttgtcaggtcctgtgtcctgccaacgagctcaggctggactccaccggggtgattctcagcccgggctatccagattcatatccaaacctgcagatgtgcgcatggagtatcagcgtggagaagggatacaatataaccatgttcgtagaattttttcagacagagaaggagttcgacgttttacaggtctacgatggtcccaatatccagagtccagtactgatttctctgtccggggattactcctcagctttcaacattactagtaacgggcatgaagtgttcctccagtggagtgctgaccacggaaacaacaaaaagggttttcgtatccgatatatcgcattctattgtagcacccctgaaagtccaccccatgggtatatcatatcacagaccgggggccaactaaattcggttgtgaggtgggcctgcgatcgaggcttcagactcgtgggaaagtcctcagcggtttgcaggaaatcatcctatggttatcacgcttgggacgcgccggtccctgcctgtcaggcgatcagctgtggcattccaaaagcccccaccaatggtggcattctgactacagactacctggtgggtacacgggttacttacttttgtaatgatggatacaggctaagtagcaaggagcttacaacggccgtctgtcagtctgacgggacatggtctaaccataataagacaccacgctgcgttgtgatatcatgcggggaactgccaactcctcctaacgggaacaaaatcggcacacaaacatcctacgggtccaccgctatcttcacgtgcgacctcgggttcatgttagtgggctctgccgtgcgcgagtgcctgtcaagtggtctgtggtcagagagtgaaaccaggtgtctcgctggccattgcgggatccccgagttaatcgtgaacggtcaggttataggagaaaattacggctatcgggacacagtggtttaccagtgtaatccaggatttaggttaatcggatcttccgtgaggatctgtcagcaagatcataattggtcagggcaactgcctagctgtgtacctgtgagttgtggacacccaggttccccgatttacggccggaccagcggaaatggattcaactttaatgatgtagtcaccttctcatgcaacatcggctatctgatgcagggccccacaaaggcgcaatgccaggccaatcgacagtggtcacaccccccaccaatgtgcaaggttgtgaattgctcggatcctgggattcccgctaactcgaaacgcgaatcaaaaatcgaacacggtaacttcacctatggcacggtggtgttctatgactgcaaccctggctatttcctgttcggatcgtccgtcctaatatgccaacctaatggacagtgggataaaccactccctgagtgtatcatgatcgactgcggacatcccggcgtgccaccaaacgctgttctctctggtgaaaaatatacctttggatccaccgtgcattattcatgtaccgggaagcgctctctccttggacaatcttctcgtacctgccagttgaacggccactggtctggtagccagccgcattgcagcggagatgccaccggaacgtgtggcgatcccggaacccccggccatggcagccgccaggagagcaactttcgcactaagagtacagtgagatatgcttgtgatactgggtatattctgcatggctctgaggagaggacctgtctagctaatggctcatggaccggtcgccagcccgagtgtaaggctgtgcagtgcggaaatccggggaccacagccaacggaaaagtgttcagaatagacggtacaacattctccagttctgttatatattcttgtatggagggatacatactgtcaggtccgagtgtgaggcagtgcaccgctaacggaacatggtctgggactctgccaaactgcacgattattagctgcggggacccagggattcctgcgaatggactgcggtacggcgatgattacgtggttgggcagaacgtttcttatatgtgccagcctggatataccatggagctcaatgggtcccgcatacgaacctgcactatcaacggcacctggagcggcgtgatgccgacctgtcgtgctgtgacatgtcctacaccgccacaaatctctaatggtcgtttagaggggactaactttgattggggcttcagtatctcttacatctgttccccaggatacgagctctcctttcctgccgtgctgacgtgtgttggaaatggaacctggtctggagaggtgcctcagtgccttcccaaattctgtggcgaccccggcattcccgcccaaggtaagcgagaggggaagtcctttatctatcagtcggaagtgagtttttcatgtaacttccccttcattctggtcgggagctccaccagaatctgtcaggcagacgggacctggtccggtagctcaccacactgcatcgagccgacacaaaccagctgtgagaatccgggggttcctagacatggttctcagaataacactttcgggtttcaggtaggaagcgtggttcagtttcattgtaaaaaaggccatctgctgcaaggctccacaacgagaacttgcttaccggacttaacatggtccgggatccagcctgagtgtatccctcactcttgcaaacagccagaaacacccgcacacgccaacgttgtgggtatggatttgccctcacatggctacaccctgatctacacctgccagcccggcttcttccttgctggtgggacggagcaccgcgtttgcagatccgataacacatggacaggaaaagtgcctatatgcgaagcggggtcaaagattctagttaaggatccccgccccgcactcggcacccccagccctaaactatcagtgcccgacgatgtgtttgcgcagaactacatttggaaggggagctacaacttcaaggggcgcaagcagccaatgaccctgacagtgacgagttttaatgcaagtaccggcagagtgaatgctaccctgtctaactccaacatggaactcctgctgagcggtgtttacaaatcgcaagaggcccgccttatgcttcgcatctacctgatcaaagttccggcacacgcttctgtgaagaagatgaaagaggagaattgggcgatggacgggttcgtgtcagctgaacctgacggagctacctacgtgttccaagggttcattcagggaaaggactacggacagtttggactgcagaggctagggctcaacatgtctgaaggatcaaactctagtaaccagcctcacggcacaaactcttcatcagtggccatcgccatcctggtgccattctttgctctcatctttgctggatttggattctacctgtataagcaaagaactgcaccaaagacccaatataccggctgttcagttcacgagaacaataatggccaggccgccttcgaaaatccgatgtacgacactaacgcaaagagcgtagaaggaaaagccgtcaggttcgatcccaatttaaatacggtctgcacaatggtgtag

SEQ ID NO: 113321 - DNA, 2511 bp, synthetic construct
  misc_feature 1..2511: note = Description of Artificial Sequence: Synthetic coding sequence
  source 1..2511: mol_type = other DNA
atggcaggtctcaattgtggcgtctcgatagccctgctcggcgttttactgctcggggcagcccgactgccacggggggccgaagccttcgaaattgcactacctcgggaaagcaacatcaccgtcctcatcaagctcgggacgcccaccctgctggccaagccgtgttacatagtcatcagcaagcgacatataactatgctgtccatcaagagtggcgagagaatagtgtttaccttttcttgccagtctcctgagaaccatttcgtgattgaaatccagaaaaatattgattgcatgtcaggtccttgtccattcggggaggtgcaactgcagccatctacatctttacttcctaccctgaatagaaccttcatctgggacgttaaggcgcataaatcaattggcctcgagctgcagtttagcataccccgcctgcgacagatcggccctggagagtcgtgtccagacggcgtcacccactccatcagtggtagaattgacgccactgtagtgcggattggcacgttctgttcaaatgggacagtgagccgaattaagatgcaggagggggtcaagatggcacttcatctgccttggttccatccgcgaaacgtgtctggcttttcgattgcgaatcggtctagcatcaaacgtctctgtattatcgaatctgtctttgaaggcgaaggctcggccactctgatgagtgctaactatcctgaaggattcccggaagatgagctgatgacctggcaattcgtagtgcccgctcacttgcgtgcatcagtgtcattcctgaacttcaatctaagtaactgtgagcggaaggaggaaagggtcgaatattatattcctggcagcaccactaaccccgaggtttttaaacttgaggacaagcagccaggcaacatggcgggtaacttcaatctgagtctccaaggatgcgatcaggacgctcaaagccccggaattctccggttacagtttcaggtgttggtgcagcatccacagaacgaatctaacaaaatttatgtcgtggacctgagtaatgagcgggccatgtccttaactatcgaaccacgacccgtgaaacagtctcgcaaatttgttccgggatgctttgtttgcctcgaaagcagaacgtgctcgagtaatctcaccctgaccagcggaagcaaacataaaattagtttcctatgtgatgacctgactaggttgtggatgaacgtcgaaaagaccatttcctgtacagatcatcgatattgccagagaaagtcgtatagcctacaagtgccgagcgatatcctccacctcccagttgagctccatgatttttcctggaagctgctcgtaccaaaggatcggctgtcactggtattggtccccgcgcagaaactacagcagcacactcatgagaaaccatgtaatacgtccttttcttacctggtggcatctgcaatacctagtcaggatctgtacttcgggtctttctgtcccggtggaagtataaagcaaatccaggttaaacagaatatcagtgtcaccttgcgcacattcgctccaagcttccaacaggaggcatcacgtcagggccttacggtcagcttcataccatactttaaggaagaaggcgttttcaccgtaaccccagacaccaaatcaaaggtctatcttagaaccccgaattgggatagaggtttgccgagtctgacgagtgtatcctggaatataagtgtcccccgtgatcaagtcgcttgcttgaccttttttaaggaacgcagcggagtggtgtgtcagactggccgggctttcatgataattcaagagcaacggacgagagcagaggagattttttctcttgacgaagatgtcctgcccaaaccttcgttccatcatcactcgttctgggttaacatttcaaactgtagtcctacatcaggcaaacagctcgacctacttttttccgtcacccttacaccgaggacggtagacctcactgtgatcctgatcgccgctgtgggcggcggcgttcttctactgagcgcacttggcctcatcatatgctgtgtgaaaaaaaagaagaaaaaaaccaataagggtcccgccgtgggaatctacaacgacaacattaatactgaaatgccacggcagcccaagaagttccagaagggcagaaaagacaacgacagtcatgtgtacgccgtgatcgaagatacgatggtctacggacatctcctccaggattcctctggatcatttctgcagcctgaagttgacacatatagaccttttcaggggaccatgggggtgtgccccccctccccacctactatatgtagccgtgccccaaccgcaaagctcgcaaccgaggaaccaccacccaggtcccctcccgagtccgaatcagaaccctacactttttctcaccccaacaacggtgacgtatcaagcaaggacaccgacattccacttctcaatactcaggaacccatggagcccgccgagtag

SEQ ID NO: 113322 - DNA, 1032 bp, synthetic construct
  misc_feature 1..1032: note = Description of Artificial Sequence: Synthetic coding sequence
  source 1..1032: mol_type = other DNA
atggctggtctcaattgcggagtctcgatcgccttgctaggcgtgctcctcttaggcgctgcaagactgccacggggggctgaggccttcgagattgccctcccccgcgaaagcaacataacagtgctgattaagctgggaactcccacactgctagctaagccgtgttacatcgtgatatccaaacgtcacattaccatgctgagtatcaagagcggtgagcgaattgttttcactttctcttgccagagtcccgagaaccacttcgtaattgagatccagaagaatattgactgcatgagcggcccttgcccattcggtgaagtacagcttcagccaagcacttcattgctccccactcttaaccgtacttttatctgggacgtaaaagctcacaagtctatcgggctggagttacagttttcaattcctcggttacgacagatcggtccaggcgagtcctgcccagacggcgttactcattcaatcagcggtcgtatcgacgctacagtggtaagaatcggcactttctgttccaatggaactgtgagcaggatcaagatgcaggaaggtgtgaagatggccctgcacctgccttggtttcacccccgtaacgttagcggcttctccattgcaaaccggagttccattaagaggctgtgcatcattgagtctgtctttgaaggggaggggagtgccaccctgatgtccgccaattaccctgaggggttcccagaggacgaactgatgacctggcagttcgtggtgcccgcccacttgcgcgcctcagtgagttttctgaacttcaatttgagtaactgcgaacggaaggaggaaagagtcgagtactatatccctggctccacaaccaatccggaggtattcaagctagaggataagcagcccggtaacatggccggaaatttcaatctctccctccaaggttgcgatcaagacgcccagagccccgggatcctccgcctacagttccaggtactggtccagcatccccaaaacgaaagctcggagtag

SEQ ID NO: 113323 - DNA, 513 bp, synthetic construct
  misc_feature 1..513: note = Description of Artificial Sequence: Synthetic coding sequence
  source 1..513: mol_type = other DNA
atgatgaacatgagtcttccttttctgtggagtctcctcacactactcatctttgctgaggtcaacggcgaagcaggcgaacttgaattgcagaggcagaagaggtccattaatctgcagcaaccacggatggccaccgagagagggaacctcgttttcctcaccgggtccgcccagaacatcgagtttagaactggttcgctggggaaaattaaactgaatgatgaggacctttctgagtgtctccaccaaatccaaaagaataaagaagatattatagagctgaagggtagtgctataggactaccacagaacatttccagccagatctaccaactaaattccaagttggtagacttggagaggaagtttcagggcctgcagcaaacagtcgataagaaagtgtgcagctctaacccgtgccaaaatggcggcacctgtctcaatcttcacgactcattcttttgcatctgtcctccacagtggaaggtttcccatctgcttttcggctag

SEQ ID NO: 113324 - DNA, 10872 bp, synthetic construct
  misc_feature 1..10872: note = Description of Artificial Sequence: Synthetic coding sequence
  source 1..10872: mol_type = other DNA
atgatgaacatgagccttccattcctgtggtcgctgctcacacttctaatcttcgcagaggtgaacggagaggctggtgaactcgagctccagcgccagaagaggtcaatcaaccttcagcagccccggatggcaaccgaacgaggcaacctcgtcttccttaccggctcggctcagaatatagaattcaggaccgggagcctcggcaagatcaaattgaacgatgaggatttgagcgaatgcttgcaccagatccagaagaacaaagaagacattatcgagctgaaagggtcggccatagggctgccacagaatatcagctcgcagatctaccaattgaacagcaaacttgttgacttggaacgaaaatttcagggtcttcagcagacagttgacaagaaggtgtgttctagcaatccatgccagaacggcgggacttgccttaaccttcacgattcctttttttgcatctgtccaccgcagtggaagggaccactgtgtagcgccgacgttaacgaatgtgagatctactccggtaccccgttgtcttgtcagaatggggggacttgcgtcaatacaatgggaagctatagctgccactgcccacctgaaacatatgggcctcagtgcgcatccaaatacgacgactgcgaagggggatccgtagcaagatgcgtccatgggatctgcgaagacctgatgcgtgaacaggccggggagcccaagtactcttgtgtgtgtgacgctggatggatgttcagccccaattcacctgcttgtacacttgacagggatgaatgctcgttccagccgggcccatgttctacgcttgtccagtgcttcaatactcaggggtctttttactgtggggcttgccctacaggttggcagggcaatggttacatctgcgaggacattaacgagtgtgaaatcaataatggcgggtgctccgtggccccaccggtggagtgcgtaaacacccctggctcatcccactgccaggcctgcccgcccggataccagggtgatggtagggtgtgcaccctgacagatatctgtagcgtttcaaatggcggctgccaccctgatgctagctgttcaagcaccctaggctcccttccactctgtacgtgtttgcctgggtatactggtaatggatacggccctaacggatgcgtgcagctgtcgaacatttgtctgtcccacccctgcttgaacggccagtgtatagacactgtatccggttatttttgcaagtgcgactccggatggaccggtgtgaattgcaccgagaatattaacgagtgtctgtccaacccatgtctgaacgggggaacctgcgtggatggtgtggacagctttagctgtgagtgtacacgcttgtggaccggtgccctgtgtcaggtaccacagcaggtgtgtggggagtccctttccggtatcaacgggtccttttcgtatcgatctccagacgttgggtacgtacatgatgtgaattgcttttgggtgatcaagacagaaatgggtaaagttctacggataacgtttacatttttccggctcgagagtatggataactgtcctcacgaatttctgcaggtatacgatggtgacagctccagcgctttccagctcgggcggttttgcggctcatccctaccccacgagctattgtcgagtgataacgctctgtactttcacttgtactccgaacatctccggaatggtcgcggatttacagtgagatgggagacccaacagcccgagtgtggcggtatccttactggtccttacggcagtattaaaagtcctggataccctggaaactaccctccggggagggactgcgtatggatagtggtaacgagtcctgatctactggtcacatttaccttcggcacccttagcctggaacaccatgatgactgcaacaaggactacctggaaatccgagacggaccactgtaccaggatccccttttaggcaaattttgcactactttcagtgttccgcccctgcagaccacggggccctttgctaggattcacttccactccgactcccagatctctgatcagggcttccacattacatatctgacatcccccagcgacttaaggtgcgggggaaactacaccgacccagaaggagaactgtttcttcccgagcttagtggacctttcacgcacacccgccagtgcgtttacatgatgaaacaaccccaaggcgaacaaattcagatcaattttacacacgtggagctgcaatgccagtccgatagcagtcaaaattacatcgaggtgcgcgacggggagacccttctcggaaaggtgtgtggtaacggaacaatttctcatatcaaatctatcactaattcagtctggattcgctttaagattgacgctagtgtggagaaggcaagttttagggcagtctaccaggtcgcttgtggggacgagctgaccggagaaggcgtgattcgcagtccattcttcccaaatgtgtaccccggggagcgcacctgcaggtggacaatccaccagcctcaatcacaggtgatcctgctcaacttcactgtattcgagattggctcttctgcacattgtgaaacagattacgtggagatcggctctagcagcatccttggatcccctgagaataagaagtattgcggaaccgatatcccaagtttcatcacttcagtatataactttctgtatgtgaccttcgtgaagagcagttccactgagaatcacggctttatggccaaattttctgcggaggacctggcatgcggcgagatcttgactgaatccaccggtactatacagagcccaggtcaccctaatgtgtatccccatggtattaactgtacatggcacattctggtgcagcctaaccatctcattcatctgatgtttgaaacatttcatctggagttccactacaactgcacaaatgattatctagaagtctacgacacagattctgaaacctcattaggcaggtactgtggtaagtcaatcccaccatccctcacatcgtctggcaactcacttatgcttgttttcgtcactgacagtgatcttgcctacgaagggtttctaatcaattatgaggcaatctccgccgctacagcgtgtctgcaagattatactgatgatttggggacatttacctcccccaatttcccgaataattaccctaacaactgggaatgcatctacagaatcaccgtgagaaccggtcaattgatcgcagtccacttcacaaatttctcactcgaagaggccatagggaactattatacagattttctcgaaataagagacggcggctacgagaagtcccccctcctgggtatcttctatggatcaaacttgcccccaactatcatttcccatagtaacaagctgtggctgaaatttaagtccgaccagattgatactcgttcaggattcagcgcctactgggacggtagttcgactggttgtggtgggaacttaacaaccagcagtggcacttttatcagtcccaactatcctatgccatactaccactcaagtgagtgctactggtggcttaagagctctcatggctcagcctttgaactcgagttcaaagattttcatctcgagcaccatcctaattgtactcttgattacttggcagtgtatgatggtccaagctccaacagtcacctgcttacccagctctgcggagatgagaagcccccactgattcggagctccggcgattccatgttcatcaagctgcgcaccgatgaagggcagcagggccggggctttaaagccgagtataggcaaacttgcgaaaacgtcgtgatagtgaaccaaacatacggcatcttggaatctatcggctaccccaatccttattccgaaaatcaacactgtaattggaccatcagggccacgactggcaacacagtcaattacacttttctcgctttcgacttggaacaccacatcaattgtagcactgactacttagagctttacgacgggcctcgacagatggggagatattgcggcgtggatctgccacctcccgggtccactacatcgtctaaactccaggtactgcttctgacagatggggtcggaagacgagaaaaaggctttcagatgcagtggtttgtttacgggtgcggcggggaattatctggggcaacaggaagtttcagttctcccgggtttccaaataggtacccccccaacaaagagtgcatctggtatatcaggacagatcctggaagtagcattcagctcaccatccatgacttcgacgttgaatatcactcaagatgcaacttcgatgtcctcgaaatttacggaggcccagattttcattcaccgcggatagcccagctgtgtacccagagatcccccgaaaaccccatgcaagttagttcaacaggtaatgagcttgctattcggtttaagacagatttgagcatcaatggaaggggattcaatgccagttggcaggctgtgaccggagggtgtgggggcatcttccaggcccctagtggcgagatccacagccctaattatccatctccttacagatccaatacagactgttcctgggtgatcagggtcgaccgaaaccaccgcgtcctgctcaattttactgatttcgatctggagccacaggacagctgcatcatggcctacgatggacttagcagcacgatgtctcgactggcacgaacctgtggtagagagcagctggcaaatccaatagtctcctcaggcaatagcttgttcctaagatttcagagtggaccctcccggcagaacaggggatttcgcgcccagttcaggcaggcctgcgggggacacattctgacttcctctttcgatacagtaagctcccctcgctttcctgccaattaccccaataaccaaaactgctcttggatcattcaagctcagccgcctctcaaccatatcaccctttcgtttacccactttgaactggaaagatccacaacgtgcgcaagagacttcgtggagatcctggatggggggcacgaggatgctccattacgcggacgatattgcgggaccgacatgcctcatccaatcacatccttcagtagcgccttaacacttagattcgtgtctgactcctccatctcagccggagggttccataccaccgttaccgccagcgtgagcgcctgcggaggaacattctatatggctgaagggatttttaacagtccggggtacccagacatttatcccccgaacgtggagtgtgtgtggaacatcgtatctagtcccggcaacagactgcagctgagcttcattagtttccagttggaggactctcaggactgctcccgcgatttcgtggaaatacgtgaaggaaatgcaacaggacacctcgtgggaagatactgtggcaattcatttccgctgaactacagctccatcgtgggccatactctttgggtgcggtttatcagtgacgggtcagggagtggcacaggttttcaggcaaccttcatgaagatatttggcaacgataacatcgtgggcacgcatggtaaggtggcaagccctttctggcccgaaaactacccgcacaactcaaattaccaatggacagtgaacgtgaacgccagtcacgtcgtgcacggacgcattctagagatggatatcgaagaaattcagaactgctattatgataagctccgaatatatgatgggccatcaatccacgccaggctgataggggcttattgcggcactcagacggagtccttttcctctaccggcaattcactgacgtttcacttttactccgatagttcaatctccggcaaggggtttttacttgagtggttcgcggttgacgccccggacggcgtcttgcctactatcgcccccggtgcatgcgggggctttctgcggactggggatgccccagtgttcctgttttccccaggctggccagattcctactccaatagagtggactgcacttggctgattcaggccccagattcgactgtggagctgaacatcctgtccttggatatcgagtctcaccgtacctgcgcttacgatagcttagttattagggatggagataacaatcttgctcagcaacttgccgttctctgcggcagggaaattcccggacctattagaagcacaggtgaatatatgttcatacgcttcacttctgactccagtgtgacgagagcaggcttcaacgcaagcttccacaaatcatgcggcgggtacctgcacgctgatagaggaataattacaagccccaaatatccggagacctacccaagcaatctcaactgcagctggcatgtgttagtgcagtccggtctcaccatcgccgtgcacttcgagcaaccctttcagattcctaatggagatagctcctgtaaccagggcgactatctcgttttgcgcaacgggcccgatatttgctcccctcctctgggcccccccggtgggaatgggcacttctgcggcagccatgccagctccactctgtttacatcggacaaccaaatgtttgttcagttcataagcgatcactcgaacgaaggccagggatttaagatcaagtacgaagctaagtctcttgcttgcggtggaaacgtctatatccacgatgcggactctgctggatatgttacatctccaaatcacccccacaattatcccccacatgcagactgcatctggattcttgccgccccccccgagactcgcattcagttgcagtttgaggacagatttgacatcgaggtcacccctaattgcacatccaactatctcgagttgagagacggcgttgactcagatgccccaattctctcaaaattttgtggaacttctttgcccagctcccagtggtcctctggagaagtcatgtacctgcgatttcggtccgacaattcacctacccacgtgggttttaaagccaagtactcaatcgcacagtgcggagggagagttcccggacagtctggggtggtggaatctatcggccaccctaccctcccttacagagacaacctgttctgcgagtggcacctgcaagggctgtctgggcactacctgacaatctctttcgaggacttcaatctccaaaatagtagcggatgcgaaaaagatttcgtcgaaatttgggataatcacactagtgggaatattctcggacgatactgtgggaatacaatccccgatagtatcgacactagcagcaacacagccgtcgtccgatttgtaacagatggtagtgtcaccgcctcgggattccggctgcgttttgagagctccatggaagaatgcggcggtgacttgcagggatctattggcacctttacctcccctaactacccaaatcctaacccccacgggcgcatttgcgaatggcgcatcacagctccagaaggcagaaggatcacgttaatgtttaataacctgaggcttgccacgcacccaagctgcaacaacgaacatgttatagtgtttaatggcataagaagcaattctccccagttggagaaattgtgttctagcgttaacgtctctaacgagatcaaaagttctggtaacacaatgaaggttatcttctttactgacgggagcagaccatatgggggtttcaccgcgtcctacacctcttccgaggatgccgtgtgcggcggatcactgcctaacaccccagaggggaactttacaagccctggatacgacggagtccggaactattcccgtaacctgaactgcgagtggaccttgtcaaaccctaatcagggcaactcttccatcagtatacattttgaagacttctatttggaatcacaccaggattgccagtttgacgtactcgagttcagagtcggcgatgcagatggacctctgatgtggcgcttgtgcggcccttcaaaacctaccctgccactggtgatcccttactcgcaggtgtggatacattttgtaaccaatgaaagagtggagcatattgggttccatgcaaagtactcattcaccgactgcggcggtatccagatcggtgatagtggagtgatcacaagccccaactatcccaacgcatacgatagtctcacacattgtagctctctgctggaggcgcctcagggacacaccatcacgctgaccttttccgattttgacatcgaacctcacactacgtgcgcttgggactctgttaccgtgagaaatggagggtcaccagaatctcccatcatcggacagtattgcggtaactcaaatccccggacaatacagtccggttctaatcagttagtcgtgacctttaatagcgaccactccctccagggaggggggttctatgcgacttggaatacacagactctcggctgtggcggaatttttcattctgacaacggaacgattcgaagccctcactggcctcagaattttcccgagaattccagatgttcttggaccgctatcacgcacaaatccaagcacttagagataagcttcgataacaatttcctgatcccaagtggggacgggcagtgtcagaactcctttgtcaaagtctgggccggaaccgaagaagtggataaggccctgctggccactggatgtgggaacgtggccccaggcccggtgatcacgccgtcaaataccttcaccgctgtctttcagtctcaggaggcccccgcccaagggttctctgccagcttcgtctcccgctgcgggagcaactttacagggccaagcggttatatcatttctcccaactaccctaagcagtatgacaacaacatgaattgcacctacgtgatagaagccaaccctctctccgtagttctgctgacgtttgtgtctttccatctcgaggcacgctcagctgtgaccggaagctgcgtcaatgacggcgtccatatcattaggggatactcggttatgagtactccttttgcaacagtgtgtggcgatgagatgccagcacccctgacaatcgctgggccagtactgcttaacttctacagcaatgaacagatcacagactttggttttaaattttcctatcggatcattagttgcggtggcgtttttaacttctcgtctggcatcatcacctcccctgcatacagctacgcagattacccgaacgatatgcactgcctgtacaccattactgtgtcggatgataaagtcattgaactgaagttcagtgacttcgacgtggtgccctccaccagctgttcacacgactatctggctatatatgacggcgccaatactagcgaccccctgcttggaaagttttgtggttccaaacgccctcctaatgtgaaatcctccaataacagcatgctccttgttttcaagactgatagttttcaaaccgcaaaaggttggaagatgtcctttaggcagactttgggaccccagcagggctgtgggggctatctgactgggagtaacaataccttcgcttcgcctgatagtgatagtaatggcatgtacgacaagaacctcaattgtgtgtggattattatcgcaccagttaacaaagttattcatcttaccttcaatacttttgcactcgaagccgccagtacccgccagaggtgtttgtacgactacgtcaaactctatgacggcgatagcgaaaacgccaatctggctgggactttctgcggctcaacggttcccgcaccatttatttcttctggaaactttctcaccgttcaatttatctctgatctgacattggagcgggagggttttaacgctacgtacactatcatggatatgccttgcggaggtacttacaacgcaacatggaccccccagaacataagttcccccaactcttctgacccggatgtcccattctcaatctgcacctgggtgatcgacagccctccccatcagcaggttaaaattactgtgtgggccttacaactgacttcacaagattgcacccagaactatttgcagctgcaagactcgcctcaggggcacggtaactctcgctttcagttctgcggtcggaatgcgtctgctgtgccagtcttctattccagcatgagcacagccatggtgattttcaaatcaggtgtagtcaataggaacagccgcatgtcatttacctaccagatagccgactgcaatcgcgactatcataaagctttcggtaacttacggtctccgggttggcctgacaactacgataacgacaaggactgcacagtgaccctaaccgcgccccagaatcacaccatctcattgttttttcactctctgggcattgagaacagtgtggaatgtaggaacgactttctggaagtgagaaatggcagcaattcaaattcacctctgctcggcaagtattgtggtacgctgttgccgaaccctgtgttttcccagaataacgaactgtaccttcggtttaagagcgattccgttacatctgacagagggtacgaaatcatttggactagctcaccatcagggtgtggaggcaccctttacggagatagaggctcttttacatctcctggataccctggaacataccccaataatacctactgcgagtgggtgctcgtggctccagccggccgactcgttacaatcaatttttattttatttccattgacgaccctggcgactgtgtgcagaattacctgacactctatgacggtcccaacgctagctccccttcgagtggtccatattgtggtggggacacaagtattgcgcccttcgtggcttcttccaaccaggtgttcatcaagtttcatgctgactacgccagaagaccttccgcattcaggctgacctgggacagctag

SEQ ID NO: 113325 - DNA, 318 bp, synthetic construct
  misc_feature 1..318: note = Description of Artificial Sequence: Synthetic coding sequence
  source 1..318: mol_type = other DNA
aacagtaaattggtggatctggagcgtaagtttcaagggctgcagcagaccgtggataagaaagtgtgctcttcgaatccttgtcagaacggcggcacatgtttaaacctgcacgatagcttcttttgtatttgccctccccagtggaaaggccctttgtgtagcgctgatgttaacgaatgcgagatttatagtggtaccccgctgagctgccagaatggagggacatgcgtgaacaccatgggtagctacagaaacccgtgtagcaacattccgaaagaaccagaggagggaagtcgcgattggcatagagagtag

SEQ ID NO: 113326 - DNA, 267 bp, synthetic construct
  misc_feature 1..267: note = Description of Artificial Sequence: Synthetic coding sequence
  source 1..267: mol_type = other DNA
tcaacgggaaatgagcttgcgatacgtttcaaaacggacctgagtatcaatggccgcggctttaacgccagctggcaggcagttactggtgggtgcggagggatttttcaggctcccagcggagagatccatagcccaaactatccgtccccctacagatccaacaccgattgttcgtgggtgatcagagtggatcgtaaccaccgcgtgttactgaattttacggattttgatctcgagccacaagactcttgcatcatggtgtag

SEQ ID NO: 113327 - DNA, 1395 bp, synthetic construct
  misc_feature 1..1395: note = Description of Artificial Sequence: Synthetic coding sequence
  source 1..1395: mol_type = other DNA
atgtctcattcgtggaatgttctgtggctaaccttttgctccgattcaaatggcatgtatgataagaacctaaactgtgtttggatcatcatagcccctgtgaacaaggtgattcatctgaccttcaataccttcgccctggaggcagctagtaccaggcagcggtgtctatatgattacgtcaaactgtacgacggcgactctgaaaacgcaaatctggccggaaccttctgcggaagtactgtgccggctcccttcatcagttcgggcaactttctcacagtgcaattcataagcgacctgaccttagagagagagggctttaacgctacctatacaattatggatatgccttgtggtggcacttataatgccacatggacgccccagaacatttccagtccaaactcaagcgaccctgacgtccccttctctatctgtacatgggtcattgattccccccctcaccaacaggtaaaaatcaccgtgtgggcgctgcagctcacttctcaggattgtacacagaattatctacagttacaggactcccctcagggccacgggaacagccgttttcagttctgtggtaggaatgcttccgctgtgcctgtattttactcaagcatgtcaacagcaatggttatcttcaagagtggggtagtcaatcgcaatagccggatgtctttcacatatcagattgccgattgcaacagggattaccataaggctttcggtaacttgcgctcacctggctggccagacaactatgacaatgacaaggattgcaccgtgactctcacagcgccacagaaccacactatcagcctgtttttccactcactagggatagaaaattctgtagaatgcagaaacgatttcttggaagttcggaatggctccaattccaattcccccctgttggggaaatactgtggtacactgctgcctaaccctgtgttcagccaaaacaatgaactgtacttaaggttcaagtcagattcggtcacttccgatcgcgggtacgaaataatctggacatcctcaccttcaggttgcggcgggactctctacggcgatcgaggaagctttacctcacctggatatcccggtacgtatccaaacaatacatactgtgaatgggtgttagtggcgccggcgggccgacttgtcacaatcaatttttattttattagcatcgatgaccctggcgactgtgtgcagaattacctgacattatacgacggccctaacgctagcagtccgtcctctggaccctattgcggtggagacacatctatagcgcctttcgtcgcctcttccaaccaagtctttattaaattccatgcggactatgcccggcggccatccgcatttcgcctgacctgggacagctag

SEQ ID NO: 113328 - DNA, 864 bp, synthetic construct
  misc_feature 1..864: note = Description of Artificial Sequence: Synthetic coding sequence
  source 1..864: mol_type = other DNA
atggagctagagcgcatcgtgtctgctgccttgttggcctttgtgcagactcatctaccggaagccgacctttctgggttagatgaggtgatcttttcttatgtccttggagttctggaggacctcgggcccagtggcccatctgaagaaaactttgatatggaagctttcaccgagatgatggaagcttatgttccgggctttgctcatattcctcgtggcaccattggtgacatgatgcagaagctttcaggccagctctctgacgcccgcaataaagagaacctgcagccccagtccagtggcgtgcagggccaggtgccgatctcacctgaaccactgcagcgcccagaaatgctgaaagaagagacaagaagctctgctgccgcagctgccgatacccaggatgaggcaacaggagctgaggaagagctcctgcctggagttgacgtgcttctcgaggttttccccacatgcagtgtggaacaggcacagtgggttcttgcaaaggcccgaggcgacctggaggaagcagtgcaaatgctggtcgaaggtaaggaagaaggacctgccgcatgggagggccctaatcaggaccttccgcggcgtctacgaggaccccagaaggacgaactcaaaagttttatcctccagaagtacatgatggttgatagcgccgaggaccaaaagatacaccgcccaatggcccccaaggaagcacccaaaaagctgattcgatatatcgacaaccaagtagtctccactaaaggtgagcgcttcaaagacgttaggaaccctgaagcggaggaaatgaaggccacatacatcaacttgaaacccgctcgtaaataccgcttccactag

SEQ ID NO: 113329 - DNA, 1365 bp, synthetic construct
  misc_feature 1..1365: note = Description of Artificial Sequence: Synthetic coding sequence
  source 1..1365: mol_type = other DNA
atggctgctgccccaggagggtccgctcagcccgccgggcccggaccacgcctggggttcagtacagctgacagcggggtggggatgtcaggcctgaaccctgggccagccgtccccatgaaggaccatgacgccatcaagctgtttgtcggccagattcccaggggcctcgacgagcaggatctgaaaccactcttcgaggagttcggcagaatttacgagctgacagtacttaaggaccgcctcacaggcctgcataagggctgtgctttcctgacatattgcgcacgggattcagcactgaaggctcagtcagccctccatgagcagaaaactttacctggtatgaacaggcccattcaagtgaagccagcggcctcagaaggacgcggagaggaccgaaaactgttcgtcggaatgctgggcaagcagcagggagaggaggacgtgaggagattatttcagcctttcggacacattgaggaatgcactgtgctccgctcgccagatggaacaagcaaaggctgtgccttcgtgaagttcggatcgcagggtgaggctcaagcagcaatacggggtctccatgggtctcgcaccatggccggggccagttcctcactggttgttaagttggcggatacagatcgcgagcgagcattaagacgaatgcagcagatggccggacatctgggcgctttccaccctgcacctctgcctttgggcgcctgcggcgcttatacaacggcaatcctgcaacaccaggccgccctccttgctgccgcccaaggtccaggactcggacccgtggctgcagttgctgcacagatgcagcacgtcgccgcctttagcttggtggccgctcccctgttgcctgctgcagccgccaacagtcctcctggcagcggccccggtactttgcctggtttacctgcccctatcggcgtgaacggattcgggccactgactccccagacaaacggtcaacccggttcagacaccctgtacaacaacgggctgagtccctacccggcgcagtcaccaggcgtggccgacccattacagcaggcgtatgcaggaatgcatcattacgcaggtcccgaagggtgtaacctgtttatctatcatctgccccaggaattcggcgacgctgaactcatccagacttttctcccatttggggccgtcgtgtccgcgaaagtgttcgtcgaccgcgcaactaatcagtcaaaatgcttcggtttcgtatcctttgataatccaacctccgcccagaccgccatacaggccatgaatgggttccagatcgggatgaagcgcctgaaggttcagctgaaacggcccaaggacgccaacaggccctattag

SEQ ID NO: 113330 - DNA, 1398 bp, synthetic construct
  misc_feature 1..1398: note = Description of Artificial Sequence: Synthetic coding sequence
  source 1..1398: mol_type = other DNA
atgaaagaacccgatgcaatcaaattgtttgtgggccagattccacgtcatctcgaagaaaaggacctcaaacctatattcgaacagttcgggagaatctttgaattgaccgtgataaaagataagtacacaggattgcataaggggtgcgccttccttacctactgcgcaagggatagcgccctgaaagctcaatccgcgctgcacgagcaaaaaacgctgccgggcatgaatcgtcccattcaggtgaagccagccgattcagagtcccgaggagaagacagaaaactgttcgtagggatgttaggcaagcagcagacggacgaggacgtgcggaagatgttcgagcctttcggcaccatagatgagtgtaccgttctgcggggtccagatggtaccagcaaggggtgtgcttttgtgaaattccagacgcatgcagaggctcaggccgctatcaacacattacatagttcccggacattaccgggtgccagctcgtcactcgtggttaagtttgcagatacagaaaaagaaaggggcttgagacggatgcaacaggttgcaacacagcttggaatgttttccccgattgctctgcagttcggggcttatagtgcgtatactcaagcactaatgcagcagcaggctgccctggtggccgcgcactccgcatatctctccccgatggctacaatggctgccgtgcagatgcaacatatggcagccattaatgcaaatgggctcatcgcgactccaatcacaccctccagcggaacttcaacacctcctgccatcgcagccacacccgtgtcagctatacctgctgccctcggcgtgaatggctacagccccgtgcccacacagcccaccggccagcctgcaccggacgccctctatccaaacggggtccacccatatcccgcccagtcccctgccgccccggtggatcccctccagcaagcctacgccgggatgcaacactataccgccgcttaccctgccgcatattccttggtggcacctgccttccctcagccccccgctctcgtcgcacaacaaccacctcctccccctcagcagcagcagcagcaacagcagcagcagcagcagcagcagcagcgtgagggtcctgatggctgcaacatctttatttaccacctccctcaggaattcacagatagcgagattctacaaatgttcgttcccttcggccacgttatatccgcgaaggtatttgtagaccgcgctactaatcaaagcaaatgcttcggctttgtgagctttgacaatccagcatccgcccaggccgcaatccaggcaatgaatggttttcaaattggcatgaaaaggcttaaggtgcagctcaaacggccaaaagacgcaaaccggccttattag

SEQ ID NO: 113331 - DNA, 1248 bp, synthetic construct
  misc_feature 1..1248: note = Description of Artificial Sequence: Synthetic coding sequence
  source 1..1248: mol_type = other DNA
atgaaagaacctgatgctattaagctatttgtggggcagatccctcggcaccttgaggaaaaagacttaaagccaatcttcgagcaattcggcaggatattcgaactgactgtgattaaagacaagtacactggactccacaaagggtgtgccttccttacatattgcgcacgggattctgccctaaaagcccagtcggccctccatgaacagaagaccctaccaggaatgaacagacctatccaagttaaaccagcagattcagagagccgaggtgaggaccggaaactgttcgttggcatgctgggtaagcaacagacagatgaggacgtacgaaaaatgttcgagccgttcggcactatcgacgagtgtaccgtgttgagaggccccgatggtacctctaagggctgcgccttcgtgaaattccaaactcacgcagaggctcaggccgccataaatacactgcatagctctaggaccctccctggcgcctctagttcccttgtcgttaagttcgctgataccgaaaaggagcgcggactgaggcgcatgcagcaggtggcgacacagcttggaatgttttctccgattgccctacagtttggagcatattctgcgtatacccaggcactgatgcaacagcaggctgcgcttgtagctgcacattctgcttatctgtctcccatggcgaccatggccgccgtgcagatgcaacacatggcagccattaatgcaaacggccttatagctacccccatcacaccttcatccgcacagtccccggccgctcccgtggaccccctgcaacaggcctacgccggcatgcagcactatacagcagcatatccagctgcctacagtctggtggcaccggctttcccacagccccctgccttagtggcgcagcagcctccgccccctcctcagcagcaacagcaacaacaacagcagcagcagcagcaacagcagagggaagggcccgacggatgcaacatctttatttatcacctgccacaggagtttacagacagcgaaatacttcaaatgtttgtgccatttgggcacgttatctcagccaaagtgttcgtcgacagggcaactaaccagtccaaatgttttggttttgtttctttcgataatccggcttccgctcaagccgcgattcaggcaatgaacggcttccaaatcggtatgaaacgcttgaaggtgcaactgaaacggcccaaggacgccaatcgaccctattag

SEQ ID NO: 113332 - DNA, 900 bp, synthetic construct
  misc_feature 1..900: note = Description of Artificial Sequence: Synthetic coding sequence
  source 1..900: mol_type = other DNA
atgaaggaacccgacgcgatcaaactgttcgtgggtcagattccacggcatctggaagagaaagaccttaaacctatcttcgaacaattcggtagaatttttgagctaactgtaattaaggataagtacaccggcctgcataagggatgcgcttttctaacatattgcgcgcgggatagtgctctaaaggcacagtccgcactgcacgagcagaagacactgcccggaatgaacagacccatacaagtgaaacccgcggactcagaaagtagaggggacagaaagctgtttgtcggaatgttgggtaagcagcaaaccgatgaggatgttcgaaagatgttcgaaccatttggaactattgacgagtgcacagttctccggggcccagatgggacaagcaaggggtgtgcattcgttaagtttcagacacacgccgaagcccaggccgcaattaacacactacactccagtcggaccttgccgggcgcctctagcagtctcgtcgtcaagtttgctgacaccgagaaagaaaggggtttaagaagaatgcagcaggttgctactcaactgggtatgttctccccaatagccttgcagtttggcgcctactccgcttacacccaagctctgatgcagcaacaggctgctctggtggcagcccatagcgcttacctctctcctatggccactatggcggccgtacaaatgcagcacatggccgctattaatgccaatggcctgattgccacacctatcactccctcaagcgcaaaaggtcacggctatgcttccctagccccccgcgcccatttcctactagatgccctgttggcattcgtgcgggaaagaggtaccggcagcaaggctccagggtacctgccctccgccggattactgtag

SEQ ID NO: 113333 - DNA, 783 bp, synthetic construct
  misc_feature 1..783: note = Description of Artificial Sequence: Synthetic coding sequence
  source 1..783: mol_type = other DNA
atgcagcaagtggcaactcaactcggcatgttctctcccatagccttgcagtttggcgcatattcggcctatactcaggcccttatgcagcaacaggccgcactggtggctgcacactcagcctacctatcccctatggcaaccatggctgcagttcaaatgcaacacatggccgcaatcaatgccaatggtctgatagctactcccatcactccatcgtctggaacctcaacaccccccgccatcgccgcaacccccgtcagtgctatacccgctgccttaggtgtgaatggctactcacccgtacccacgcagccgacgggacagcctgcaccagatgccctgtatccaaacggtgttcacccataccctgcagcatacccagcagcatatagcctggtcgcgcccgcattcccacagccacctgctctcgtggctcaacagccaccaccccctccccagcaacagcaacagcagcagcagcagcagcagcagcagcagcaacgcgaaggcccagatggctgcaacatattcatatatcacttgcctcaggaattcacagacagcgaaattctccagatgtttgtccctttcggacatgttatatccgccaaggtgttcgtggacagagctacgaaccaaagtaaatgcttcggctttgtatcctttgacaatcctgcatcagcacaggccgctatccaggccatgaacggattccaaattggtatgaagagactgaaagtacagttaaaacgccctaaagacgccaaccggccttattag

SEQ ID NO: 113334 - DNA, 1401 bp, synthetic construct
  misc_feature 1..1401: note = Description of Artificial Sequence: Synthetic coding sequence
  source 1..1401: mol_type = other DNA
tgagttgaggaatcagccgcaggcgaacaaagcagcggtacccagatcccccggcatctggaggagaaagacctgaaacccatctttgagcagtttggtagaatattcgaacttacggtcattaaagacaagtatacggggttgcacaaggggtgtgcttttctgacttactgtgccagggatagcgcgcttaaagcccagagcgcccttcacgaacagaaaaccctcccgggtatgaacaggcccatccaggtcaaacccgctgatagcgagtcccgaggggaccggaagctttttgtaggcatgctagggaagcagcagacagacgaagatgtacgcaaaatgtttgagccattcgggaccatagatgagtgcacggtactgcggggccctgatgggacatctaaaggctgcgcctttgtcaagtttcagactcacgccgaagctcaggcagccattaataccctgcactccagcaggacactgcctggcgcatcatctagtctggtggttaagtttgccgacaccgagaaggaaagagggcttaggaggatgcaacaggtggcaactcagctagggatgtttagcccaatagccctccagttcggggcctattccgcatatacacaagcactcatgcaacagcaggctgcactggtggctgctcacagtgcttatctgtcaccaatggctaccatggccgcagttcagatgcagcacatggccgcgataaacgccaacggcctgattgccacaccaattactccctcctcaggcacctctactcctcctgcaattgcagctacacctgtttcggccatacccgccgccctgggagttaatggttattcgccagtacctacgcagccaaccggtcagccagcccccgacgccctttacccaaacggagtgcatccctaccccgctcagtccccagccgctcctgtcgaccccctgcagcaggcttatgccggcatgcagcactacaccgccgcgtacccagcagcctactccctcgtggcgcctgcatttcctcagccgccagcactggtggcacaacagcctccccctcccccccagcagcagcaacaacagcagcagcagcagcagcaacagcagcagcgggagggacccgatggctgcaatatctttatttaccatctgcctcaggaattcacagactcggagatactgcaaatgttcgtgccctttgggcatgtgatctccgctaaggtttttgttgatcgggccaccaatcaaagcaaatgcttcggatttgtgagttttgacaatccagcctccgctcaggccgccatccaagccatgaacggttttcaaatcggcatgaagcggctaaaagtgcagctcaagagacccaaagacgcaaatcgaccttattag

SEQ ID NO: 113335 - DNA, 1347 bp, synthetic construct
  misc_feature 1..1347: note = Description of Artificial Sequence: Synthetic coding sequence
  source 1..1347: mol_type = other DNA
atgtacattaagatggcgactctggccaatggacaggcagataacgcttctctctcaaccaacggcctggggtccagcccaggcagcgcagggcatatgaacgggttatctcactctccaggaaacccctcgaccatccctatgaaggaccatgatgcaatcaagcttttcattggacagattcctaggaaccttgatgaaaaggatttgaaaccactgttcgaggaattcggtaagatctatgaactcactgtgctgaaagaccgctttaccggtatgcataagggctgtgcctttctaacctactgtgagagggagagtgcccttaaggcccagtccgccttgcacgagcaaaagactctgcccggcatgaacaggccaatccaagtgaaacctgcagattcagagtctagaggagaggaccgaaagctgttcgtgggcatgctgaataagcaacaatcggaggacgatgttcgtagactttttgaagcgttcggcaatattgaggaatgcaccatacttcgcgggccagacggaaattcaaaaggatgcgcctttgtgaagtattccagtcatgccgaggcgcaagccgcaatcaatgccctgcacggcagccagactatgccaggggctagcagcagcctcgtcgtcaaattcgctgacacagataaagagcgcactatgcgccgaatgcagcagatggcaggacagatggggatgtttaatcctatggcaattccttttggggcatacggcgcatacgcccaggcactcatgcagcaacaggctgccctcatggcatcagtggcccagggaggctatttaaatcctatggctgcttttgccgcagctcagatgcaacagatggctgcattaaatatgaatggcctggccgctgctcctatgaccccaacgtcgggtggttccacgccacctgggattactgcgcctgctgtccccagcattcccagtcccataggggtcaacggcttcaccggtttgcctccgcaggccaacgggcagcctgcagctgaggctgtgttcgccaatgggattcacccatatccagctcagtcacctacagccgcagatcccctccagcaggcctatgctggcgtgcagcagtacgcaggccctgctgcctatccagctgcctatggacagatatctcaagctttcccccagcccccaccgatgattcctcagcagcagagggaggggttcgtgtccttcgacaatccagcctcggcccagaccgctatacaagcaatgaacggattccagatcggcatgaagagattgaaagtccagctcaagcgaccgaaagacgccaacaggccctactag

SEQ ID NO: 113336 - DNA, 639 bp, synthetic construct
  misc_feature 1..639: note = Description of Artificial Sequence: Synthetic coding sequence
  source 1..639: mol_type = other DNA
gtgagcgctgagggccccgagagggccgcacgagcagaggacagcgctagagatgagcctgccgaccccggtgaagcatgtggacagagggaacccaaggataggaagctgtttgtgggtatgctgaacaagcagcaatcagaggacgatgtacgaaggttgttcgaagccttcggcaacattgaagagtgtacaatcctcagagggcccgatggcaactcaaaagggtgtgcctttgtgaagtactcttctcatgctgaggcacaggctgcaatcaacgcgctgcacggctctcaaacaatgcctggcgctagcagttctcttgttgtgaagtttgcagataccgacaaagaaagaactatgagaaggatgcagcagatggcgggccagatggggatgtttaatccaatggctatcccttttggagcctatggcgcttatgcacaggcgcttatgcagcagcaggccgccctcatggcctctgtcgcccaaggtggatatttgaatcccatggctgcgttcgccgccgcgcagatgcagcagatggcagcacttaacatgtggcccggcggaagaacctacgaccctaatctccgatggcagcatccgtccgggcatcattgcacaagcagggcctag

SEQ ID NO: 113337 - DNA, 1461 bp, synthetic construct
  misc_feature 1..1461: note = Description of Artificial Sequence: Synthetic coding sequence
  source 1..1461: mol_type = other DNA
atgtatatcaagatggcgaccctggccaatggacaagctgataatgctagcctgtcgaccaatggactcggttctagtcctggctctgctggccacatgaatggcctctcccattctcccggaaatccctctactattcctatgaaggaccacgatgccatcaaactttttattgggcagatcccacgaaacttagatgagaaagaccttaaaccactcttcgaagaattcgggaagatctacgagctcaccgttttgaaagaccggttcacggggatgcacaaggggtgcgcttttctgacttattgtgaaagagaaagcgcactcaaagcccaatccgctctccatgaacagaagacattaccagggatgaaccgccctattcaggtcaagcctgccgactctgagtcgcgtggcggtagtagctgtttgaggcagccaccctcacaggatagaaaactatttgtcgggatgcttaacaaacagcagagcgaagacgacgttcggagactgtttgaggcatttggaaatatagaagagtgcactatactgaggggtccagacggcaactctaaggggtgtgcatttgtgaaatatagcagtcacgcagaggcacaagctgccatcaacgcactgcacggttcccagaccatgcctggggcaagttcaagcctcgtagttaaattcgctgacacggacaaggaaaggaccatgcggagaatgcagcagatggccggccagatggggatgttcaatcccatggccatcccgttcggtgcatatggtgcctatgctcaggctctaatgcaacagcaggccgcgcttatggcctccgtagctcaggggggttacctgaaccccatggccgccttcgccgctgcacaaatgcagcagatggccgccctcaatatgaacggactggccgccgccccaatgaccccgacttctggtgggagtacccctccagggattaccgctccagctgtgccatcaattccatctccaatcggggtgaacggctttaccgggctacctccacaggccaatggacaaccagccgccgaggccgtctttgccaacggcattcacccctaccctgctcagagtcctactgctgccgatcctttgcaacaagcttatgctggggtccagcagtacgctgggcctgctgcctacccagccgcctatgggcagatctcacaggctttcccacagccaccaccaatgataccccaacaacagagggagggacctgagggctgcaacctgttcatctatcacctccctcaggagttcggggatgcagaactgatgcagatgtttcttccatttggatttgtatcattcgataaccctgcctccgcccagactgctatccaggccatgaatggatttcagattggaatgaaaaggctaaaggttcaactgaagaggccaaaggacgcgaataggccatattag

SEQ ID NO: 113338 - DNA, 1458 bp, synthetic construct
  misc_feature 1..1458: note = Description of Artificial Sequence: Synthetic coding sequence
  source 1..1458: mol_type = other DNA
atgtatattaagatggccacattggccaatggacaagccgataatgcctcactctctaccaatggtcttggcagcagcccagggtctgcgggccacatgaacgggctgtcccattcccctggcaacccaagcacgattccaatgaaagatcacgacgccatcaaattgttcatcggccagattcctcggaaccttgacgaaaaggacttgaaacctcttttcgaggagtttggcaagatatacgaattgacggtactgaaggacagatttaccgggatgcacaaaggttgcgcgttcctgacctactgtgagcgcgagagtgccttaaaagcacaatcagcgcttcatgaacagaagacccttccaggaatgaatagacccatccaggtgaaacccgccgatagcgagtctagaggtggttcctcctgcttgaggcagccaccgtctcaggaccgcaagctgtttgttgggatgctaaataagcaacaatcagaggatgacgtgcggaggcttttcgaagctttcggtaatattgaggagtgcacgatccttaggggccccgacggaaatagtaagggatgtgccttcgtcaaatactcttcccacgcagaagcccaagctgccataaacgccctgcatgggtcacagactatgcccggagcctccagttcacttgtagtaaagtttgccgatacagataaggaacgaaccatgagaagaatgcaacagatggccggccaaatgggtatgtttaatcccatggcaattccctttggggcatacggtgcttacgcccaagctatgcagcagcaagctgccctgatggcgtctgtcgcccagggcgggtacttgaatcccatggctgcattcgctgccgcccagatgcaacagatggccgctttgaatatgaatggtcttgccgccgcacccatgactccgacctccggaggtagcacacccccaggcataacagctccagcggtaccaagcatccccagtccaatcggggtcaacggctttactggtctgccacctcaggctaacgggcagccagcagcagaggccgtgtttgccaatgggatacacccatatccggctcagagcccaaccgccgcggaccctctccagcaagcatacgcgggagttcaacagtacgccggtccagcagcctaccccgccgcatatggtcagatcagtcaagcctttccccaaccacccccaatgattccccagcagcaaagagaagggccagaggggtgtaacctgtttatctaccatcttccccaggaatttggtgacgctgaactgatgcagatgttcctaccttttggcttcgtgagtttcgataaccccgcaagtgcacagaccgcaatccaggccatgaatggcttccagattggcatgaagagactcaaagtgcagctaaagagacccaaagatgctaatcggccttattag

SEQ ID NO: 113339 - DNA, 1455 bp, synthetic construct
  misc_feature 1..1455: note = Description of Artificial Sequence: Synthetic coding sequence
  source 1..1455: mol_type = other DNA
atgtatatcaagatggccaccctcgccaacggacaggctgacaatgcctcactcagtaccaacgggttagggagctctccaggctcggccggtcacatgaacggactttcccactctcccgggaatcccagtactatcccaatgaaggatcacgacgctattaagctgtttatcggccaaatccctcgcaatctcgatgagaaagacctcaagcccttatttgaagaatttggtaaaatctatgagttgacagtgctcaaggataggttcactgggatgcataaggggtgcgccttcttgacgtattgcgaacgtgaatccgccctaaaggcccagtctgcactgcacgagcagaaaaccctgccgggtatgaaccgacccatccaagtgaagcctgccgactcagagagtcgcggagggtcttcctgcttgagacagccgccatcacataggaagttattcgtcggcatgcttaataagcaacagtcggaggacgacgtccgccgactgttcgaggcttttgggaatattgaggaatgcactatcctcagaggacctgatgggaactccaagggctgcgcgttcgtgaaatatagtagccacgccgaagctcaggccgccataaacgcacttcacggttcccagaccatgcccggtgcttcttctagccttgtggttaaatttgcagacacagataaggagcgtacaatgcgtcgcatgcagcagatggcaggccagatggggatgttcaacccaatggcgatccctttcggcgcctacggcgcctatgcccaagctatgcaacagcaggccgccctgatggctagcgttgctcagggcggctacctgaacccaatggccgcctttgccgctgcccaaatgcaacagatggccgccctgaacatgaacggcctggccgctgcaccgatgaccccaaccagcggggggagcacaccaccaggaattacagcgccagcagtcccatctatccccagtcccatcggggtaaacggattcactggcctaccacctcaggcaaatggccagcccgccgccgaggccgtcttcgcgaatgggatccacccctatccagctcagtctcccaccgcagcagatccacttcagcaggcctacgctggcgtccagcagtatgctggccctgccgcttaccctgccgcgtatggccaaattagtcaggccttcccacaaccaccacccatgatacctcagcagcagagggagggtccagaggggtgtaatctatttatctatcacctcccgcaggaatttggggacgccgagctgatgcagatgttcctcccttttggtttcgtgtctttcgataacccggctagtgcacagacggcgatccaagccatgaatgggttccagatagggatgaaacgcctaaaggtacagttaaaaaggccgaaagacgctaatcggccttactag

SEQ ID NO: 113340 - DNA, 1458 bp, synthetic construct
  misc_feature 1..1458: note = Description of Artificial Sequence: Synthetic coding sequence
  source 1..1458: mol_type = other DNA
atggcaaggctcactgaaagcgaggcaaggaggcaacagcagcagctgctacagccacgccccagtccggtgggaagttcaggaccagagccccccggcgggcagcctgacggtatgaaggatttagacgcaatcaaactattcgtgggtcagattcctaggcatttggacgaaaaagacctgaaaccgctgttcgaacagtttggtagaatctatgagctcaccgtgttaaaggacccgtatacaggtatgcataagggatgtgcctttctcacgtactgtgcacgggactccgctatcaaggcccagactgctctgcacgaacagaaaacccttccaggcatggcacgtccgatccaggtcaagcctgctgatagcgagtcccgcggcggcagagatagaaagctgtttgtgggaatgctgaataagcagcagtccgaagaggacgtcctgcggctgtttcagccatttggagttatcgatgaatgcaccgtactcagaggccctgatggtagcagcaaggggtgcgctttcgttaaattctcaagtcataccgaggcccaggccgctatacatgccctccacggcagccagaccatgcctggcgctagctctagcctcgtggtgaagttcgccgacacagataaagaacgaaccctgaggcggatgcagcagatggtcggccagctcggcatcctgacccccagcctgacattaccgttctcgccatacagcgcgtatgcccaggctctgatgcagcagcaaaccactgtcctcagcactagtggatcatacctgagtcctggagttgcctttagtccctgccatattcaacagatcggagccgtgtcattaaacgggttgcccgccacgccgatagcccccgcctcagggcttcactctcctccactccttggcaccacagctgtccccgggctggtggctcccatcacaaatggctttgcaggcgtcgttccttttccgggcgggcaccccgccttagaaactgtatatgcgaacggactggtcccctacccagcacagtcccccaccgtggccgagactctgcacccggccttcagcggagtgcaacagtacactgccatgtatcctactgcggctattactccgatcgcccactctgtcccgcagccaccacctctgctgcaacaacaacaaagggaaggcccagaaggttgcaacctctttatttatcacctgccccaggaattcggagacactgagctgacacagatgttcttacctttcgggaatattatttcttcaaaggtcttcatggatagggccaccaaccagagtaagtgcttcggattcgtttccttcgacaaccctgcctctgcccaggcagcaattcaggcgatgaacgggttccaaattggtatgaaacgcttgaaggtccagctgaagcggcccaaggacccaggccatccttactag

SEQ ID NO: 113341 - DNA, 963 bp, synthetic construct
  misc_feature 1..963: note = Description of Artificial Sequence: Synthetic coding sequence
  source 1..963: mol_type = other DNA
atggcacggcctatacaggtgaagccagcagacagcgagagcaggggaggccgcgacaggaaacttttcgtgggcatgcttaacaagcagcaatcagaagaggatgtactccgcctctttcagcccttcggcgttattgacgaatgtacagttctacgagggccggacggcagctccaaggggtgcgcatttgtaaaattcagttcccatacggaggctcaagctgcaattcatgccttgcatgggagccagaccatgccaggggcatctagttcgcttgtggttaaatttgccgatactgacaaagagcgaacactgagaagaatgcaacagatggtgggccagctcggaattctgactccgtctctgacactgcctttctctccttacagtgcctacgctcaagccctgatgcagcagcagactactgttctcagtacctccggctcttatctctccccaggggtcgcattcagtccatgccatatccagcagatcggtgccgtgagcctgaatggcctgccagcaacacctatcgccccagcttccgggctgcattctcccccactgttggggactactgccgtgccgggactagtggcccccattacaaacgggtttgccggggtggttccgtttcctggtgggcacccagccctagaaacagtgtacgcaaacggcttggtgccataccccgcgcagagtccaacggtcgccgaaaccctacacccagcttttagcggcgtgcagcagtacactgcaatgtaccctactgcagcaattaccccaatagcacacagcgtaccccagcctcctccattactccaacagcagcaacgggagggggtttggcggcacggggccgatgctgatgtccctactttgcgacaatatcacttccttcagggcgtgtacggaagttcatatcagcctgagcaggtgttcaggctgcgggagctctag

SEQ ID NO: 113342 - DNA, 1230 bp, synthetic construct
  misc_feature 1..1230: note = Description of Artificial Sequence: Synthetic coding sequence
  source 1..1230: mol_type = other DNA
atggccagactcacagagagtgaagccaggaggcagcagcagcagttgctgcagcctaggccttcccccgtgggctcctctggacccgaaccaccaggtgggcagcccgatggcatgaaggacttggatgcaattaagctgtttgtgggccagatccccaggcacctggacgagaaagacctgaagccgctgttcgagcagttcggacggatttacgaactcacagtgctgaaggatccttacaccggcatgcacaaaggatgcgcctttctcacttattgtgcacgcgactctgccatcaaggcccagacagccctccatgagcaaaagacgttgccaggaatggcacggcccatccaagttaaacctgctgactctgagagccggggcggcagagaccggaaattatttgtggggatgctgaataagcagcagtctgaggaagacgtgctaagacttttccagccattcggagtcattgacgaatgcacggtattgagggggccagatggatcttcaaaaggctgtgccttcgttaaattcagtagtcatactgaagcccaggccgcaatacatgcactgcacggtagtcagacaatgcctggagctagctcgtctttggtggtcaagtttgcggacacagacaaggagcgtactctgcgacggatgcagcaaatggtggggcagctgggcattctgacacctagcctcaccttgcccttctcaccctactcggcatacgctcaggcattgatgcaacagcaaacgaccgtactaagcacaagcggatcctatctgagccccggagttgctttctctccatgtcacattcagcaaatcggagcggtctccctcaatggtctcccggccactccgattgctcccgcatctggcgttgtgccctttcctggggggcatcccgccctggaaaccgtttacgcaaacggcttggttccataccctgctcagagcccaactgtggctgagaccctgcacccagcattcagcggcgtgcagcagtataccgctatgtaccctacagcagcgataacacccatcgcgcatagtgttcctcaaccacctcccctgctccagcagcagcagagagaaggagtatggaggcacggtgcagacgccgacgtcccaaccctaaggcagtaccattttttgcaaggggtgtatggatctagctatcaacccgagcaggtctttaggctgcgcgaactgtag

SEQ ID NO: 113343 - DNA, 1446 bp, synthetic construct
  misc_feature 1..1446: note = Description of Artificial Sequence: Synthetic coding sequence
  source 1..1446: mol_type = other DNA
atggcagcggccccaggtgggtctgcccagccagctggccccggaccgcgccttggattctctacagccgacagcggtgtaggtatgagcgggttgaatccagggcctgccgtccctatgaaggatcacgatgcaattaagttgtttgtcggtcagatacctcgcggccttgatgaacaggatttgaagcccctgttcgaagagtttgggagaatctacgagcttaccgtgctgaaggaccgacttacgggcctacacaagggctgtgcatttcttacgtactgtgcccgagactctgccctcaaagcccaaagcgcactccatgagcagaagaccctgcccgggatgaaccggcctatccaggtcaaaccagctgcctccgagggtcggggcgaagacagaaagctctttgtgggaatgctgggaaaacaacaaggcgaggaggacgtgagaaggctatttcagccattcggacatatagaagagtgcaccgtgcttcgatctcctgatggcacctcgaaggggtgtgcctttgtaaaatttggctcccaaggagaggcgcaggccgcaatcagaggcctccacgggtcacgaactatggccggagcctctagtagcttggtggtcaagctggctgacactgatagggagcgggcactcaggcggatgcagcagatggccggtcacctgggtgccttccatcccgccccactgccgctgggggcgtgcggggcgtacacaaccgctattctccaacatcaggctgcactgctcgcagccgcccaaggccccgggctgggtcccgtggccgctgttgccgcccagatgcagcatgtcgccgcattcagcctcgtggctgccccactacttcccgccgccgcagctaattctccccccggaagtgggcctggcacactgccgggactcccggcgcctattggtgtgaatggattcggccctctgacaccacagactaacggccagcccggatccgatacactgtacaacaatgggctgtcaccctaccctgcccagtctccaggtgtggccgatccccttcagcaggcttacgccgggatgcatcattacgctgctgcttatccctccgcctacgctcctgtttcaaccgcatttccacagcagccttctgctctaccgcagcaacagcgcgagggtccagagggatgtaacctgtttatttaccatctgcctcaggaatttggggacgccgaattgattcagacatttctgccttttggtgccgtggtgtcggctaaggtgtttgtggaccgcgccacgaatcagtctaagtgcttcgggtttgtgtcatttgataatcccacctctgcccagacggcaattcaagccatgaacgggttccaaattggcatgaagagattaaaggttcaactgaagaggcctaaagacgccaacaggccctattag

SEQ ID NO: 113344 - DNA, 1107 bp, synthetic construct
  misc_feature 1..1107: note = Description of Artificial Sequence: Synthetic coding sequence
  source 1..1107: mol_type = other DNA
atgatctcggatcctccttccaataactcttggaatagcgtgctctacctgctggaagacaggaagctgttcgtgggcatgctaggcaagcagcagggcgaagaggacgtgagaaggctctttcaaccctttgggcatatagaggagtgcactgtgctaagaagccctgatggcacctccaaaggatgtgcctttgtgaagttcggttcccagggggaagcacaggcggccattagaggtctgcacggtagcagaacaatggcgggcgcatcttcctctctcgtggtcaaactggccgacactgaccgagagagagccctcaggagaatgcaacagatggctggacatctcggggcatttcaccccgcgccactgcccctgggagcctgtggggcttacactacagccatccttcagcaccaggctgccctcttggcagctgcacagggaccaggattaggcccagttgcagccgtagctgcacagatgcagcatgttgctgcctttagtttggtcgctgccccgctgcttcccgctgcagcagcaaattccccgccgggaagtggtcccggcacactccccggccttccagctccaattggcgtcaacggttttgggccccttacgccacagaccaacggacagccaggcagcgacacactctataacaacgggctgtcgccttatcccgcacaatccccgggcgtggcagatcccctgcaacaggcgtatgctgggatgcaccactacgccgccgcgtacccatccgcttatgcaccggtttctaccgccttcccccagcagcccagcgccctcccccaacagcagcgcgaggggcccgaggggtgcaacttattcatctatcacctcccccaggaattcggcgatgctgaactaattcagacctttctgcctttcggtgcggtcgtctcggccaaagtgttcgttgatcgtgcaactaatcagtccaagtgttttggctttgtgtcatttgataaccccaccagtgctcagaccgctatacaggcaatgaatggatttcagattgggatgaagagactcaaggtgcagttaaagaggcctaaggatgccaacaggccatattag

SEQ ID NO: 113345 - DNA, 1365 bp, synthetic construct
  misc_feature 1..1365: note = Description of Artificial Sequence: Synthetic coding sequence
  source 1..1365: mol_type = other DNA
atggctgctgccccggggggcagcgctcagccagcagggccaggcccccggctggggttcagtacggcagacagtggagtaggaatgtcgggcctgaacccaggcccggcggtccccatgaaggatcacgatgctatcaaactgttcgtggggcaaattccccgcggactggatgaacaggacctcaaaccccttttcgaagaattcggccggatttacgagttgaccgtactcaaggacagactcaccggactgcacaaggggtgtgcttttttgacttactgtgccagagacagtgccctgaaagctcaatcggccctccacgaacaaaagactctgcccggaatgaaccggcctatacaagtcaagcccgcggcatccgagggccgcggagaggaccgcaagctgtttgtggggatgctcggaaagcagcagggagaagaggacgtcagaaggctattccaacctttcggccacatcgaggagtgcacagtgcttaggagcccagatgggacaagtaaagggtgcgcctttgtgaagttcggatcccaaggggaggcccaggcggccatccgtggcctccacgggagcaggaccatggccggggcctccagctcactggtcgtgaagttggccgatacagatcgcgaaagggctctccgacggatgcagcaaatggctgggcatctgggtgcttttcatcccgcccctctcccactgggagcttgtggagcctacactactgctatcctgcaacaccaagcggctctgctggctgccgcacaaggcccaggactgggtccggttgctgcagtggcagctcaaatgcagcatgttgctgccttctccttagtcgctgccccccttctacctgcagcagcagccaattccccccctgggtccggtccaggaaccctacccggtctccctgcccccatcggcgtaaacggcttcggacccttgacccctcagaccaacggtcagccagggtcagatacattatataacaacggccttagtccttatccagcccagtctcctggcgtggcagacccacttcagcaggcgtacgccggcatgcatcattacgcaggccccgaaggctgcaatttgttcatttatcacttacctcaggagtttggagatgcagagcttattcaaacctttctccccttcggcgccgttgtgagcgcaaaggtgttcgttgatagggccactaaccaaagcaaatgctttggttttgtctctttcgacaatccaacgtcagctcagaccgccatccaagcaatgaatggattccagattggcatgaaaagactcaaagtgcagctgaaaaggccaaaggatgcaaaccggccctactag

SEQ ID NO: 113346 - DNA, 1029 bp, synthetic construct
  misc_feature 1..1029: note = Description of Artificial Sequence: Synthetic coding sequence
  source 1..1029: mol_type = other DNA
atgctaggaaagcagcagggtgaagaggacgtgagaaggctctttcagccattcgggcacattgaagaatgcactgtgttacgctcacccgacggaacatccaaaggatgcgcttttgtgaagtttgggagccagggcgaagcgcaggctgccatcagaggactgcacgggtcacggacaatggccggcgcctcatcatcattggtcgtcaaactggccgacactgatcgggagagagccctccggaggatgcagcagatggctggccacctgggggccttccaccccgcccctttgccacttggagcatgcggggcttatactacagccattctccagcaccaggctgcactgctggctgcagcccagggcccaggactgggccctgtggccgccgttgccgcacagatgcagcatgtggctgcttttagcctggttgctgcaccattgctgccagctgccgccgccaattccccaccgggatcaggaccagggactctcccgggcttgccggctcccattggggtcaacggctttggacccctcacaccacaaactaacggccaaccaggaagtgacacactctacaacaacgggctgtctccatacccggctcaatcccctggagtcgctgaccctcttcaacaggcgtacgcagggatgcaccactatgccgcagcctatccaagcgcatacgccccagtatctacggcatttcctcagcagccctctgctctgccgcaacagcagcgggaaggcccggagggctgtaacctgttcatctatcatttaccccaggaatttggcgatgccgagctcatccaaacgttcctgccctttggcgccgtggtgtcagccaaagtgttcgttgatcgtgcgaccaaccagagcaaatgctttgggttcgtatcatttgataaccccacctcagcacagaccgctattcaggccatgaacggatttcaaattgggatgaaacgcctaaaggtgcagctgaaaagacccaaggacgcgaacaggccctattag

SEQ ID NO: 113347 - DNA, 1035 bp, synthetic construct
  misc_feature 1..1035: note = Description of Artificial Sequence: Synthetic coding sequence
  source 1..1035: mol_type = other DNA
atgaatcgacctatacaggttaagccagccgccagtgagggacggggcgaagataggaaactcttcgtcgggatgcttggcaagcagcagggagaggaggacgtgcgccgcctgttccaaccctttgggcatatcgaggaatgtactgtgctgcgctcacccgacggtacctcaaaggggtgcgcctttgtgaaattcgggagccagggagaggcccaagctgcaatccggggcctgcacgggtcacgcaccatggcaggagcatcctctagtctggtcgtcaaacttgcggacaccgaccgagagcgtgccctgcgcagaatgcagcagatggccgggcacctgggtgcattccacccagctcccctgccattgggcgcctgtggagcctacactacagccattctccagcatcaggcagctctgttagctgctgcacaggggcctggcctgggccccgtagcggccgtcgccgcccaaatgcagcatgtggctgccttcagcctagtggctgcacctcttcttcccgcagctgctaacagcccacctgggtcgggccccggcaccctgccaggcctgcctgctcctatcggtgttaacggattcggtcccctcaccccacagacaaatgggcagccaggctccgataccctgtacaataacgggttgtcaccttaccctgcagcatacccatcagcttacgcacccgtgagcacggcatttccccagcaacccagcgcactaccgcagcagcagcgagagggcccagagggctgtaatctgtttatttaccacctgccccaagaatttggcgatgcagaactgatacagacattcttgcctttcggggcggttgtgtcagccaaagtctttgtcgatcgagcaaccaaccaatctaagtgtttcggatttgttagctttgacaatccgacttccgcacagaccgccattcaggcgatgaacggattccaaattggaatgaagagactaaaggtgcagctgaaacgtcctaaggatgccaacagaccgtattag

SEQ ID NO: 113348 - DNA, 1980 bp, synthetic construct
  misc_feature 1..1980: note = Description of Artificial Sequence: Synthetic coding sequence
  source 1..1980: mol_type = other DNA
atgctatacaagcagttacggcaggcttgtgaagaccacgtccaagctcagatactgcccttccgcgaagactctttagatagcgtgctcttcttgaaaaagatcaacacttgctggcaggatcactgccggcagatgatcatgatccgctctatattcctctttttggaccggacctacgtcttacaaaactctaccctcccaagtatctgggatatgggtctcgagttatttagaacacacattatcagcgataaaatggtgcagtctaaaaccatcgacgggatcctgctcctgatagagagggagcgaagcggcgaagctgttgataggtcattgcttagatccctcctcggaatgttaagcgatctccaagtgtacaaggatagcttcgaactcaagtttctggaagagaccaactgcttgtatgcagcagagggccagaggttgatgcaggagcgggaggtgccagaatatctgaaccacgtctcaaagcggctggaggaagagggcgaccgggttatcacctatctcgaccattctacgcagaaacctctgattgcctgtgtggaaaagcagctgttgggtgaacatctgactgccattctgcagaagggcctggaccacctgttggatgagaatcgcgtccctgatctcgcgcagatgtatcaactctttagtagagtacgggggggtcagcaggccttactgcaacactggagtgaatatattaaaacattcggaacagctatagtcattaaccctgagaaagacaaagacatggtgcaagacctactggatttcaaggacaaggtcgaccacgtaatcgaagtatgttttcagaagaacgagcgattcgtgaatctaatgaaagagagctttgaaacatttataaacaagcgaccaaacaaacctgcagagctcatagcaaagcatgtagattcaaaactgcgcgctggtaataaggaagccacagacgaggagctcgaacgcacgctggataagataatgatcttattcaggttcatacatggcaaagatgtctttgaggcattctacaaaaaagacctggccaaacgacttcttgttggcaagtcagcgtctgttgacgctgaaaagtcaatgctgagcaagttaaagcacgaatgtggcgccgcgttcacatctaaactggaggggatgtttaaagatatggagctaagtaaggacatcatggttcactttaaacaacatatgcagaaccagtctgattccgggcccatcgatcttaccgtgaacatcctgacgatggggtactggcctacttacacccccatggaagtgcacctcacccccgaaatgatcaaactacaagaagtattcaaagctttctacctcggtaagcactccggacgaaaactgcaatggcaaactactctcggccacgctgtgctaaaggcggagttcaaggagggcaagaaggaattccaggtctctctcttccaaaccttggtcctgctgatgtttaacgaaggggacggcttcagctttgaagagatcaagatggccactggtattgaagatagcgaattaaggcggaccctgcagagtctggcttgtggtaaagcaagggtgctgattaagtctcccaagggcaaggaagttgaagatggcgataagttcatattcaacggcgaattcaaacacaagttgttccggataaagataaatcagatacagatgaaagagacagtcgaagagcaagtaagtacaacggaaagggtctttcaggacagacaatatcaaatcgacgctgcaatcgttaggataatgaagatgcgtaagacactgggtcataaccttcttgtcagcgagctgtataatcagctaaaattccccgttaagcctggagaccttaaaaaacgaatcgagtccctaatcgacagagattatatggaaagagataaagataatcctaaccaatatcattacgtggcatag

SEQ ID NO: 113349 - DNA, 2280 bp, synthetic construct
  misc_feature 1..2280: note = Description of Artificial Sequence: Synthetic coding sequence
  source 1..2280: mol_type = other DNA
atggccgacgaggccccgcggaaggggtccttttccgccctggtggggcggacgaatggtctgaccaagcccgcagcactggcagcagccccagccaaacctgggggggctgggggcagtaagaagctggttattaaaaactttagagacaggccacgattgccggacaactacacacaagatacatggcggaaacttcacgaggcggtgcgagccgtccaaagctccactagtatccgatacaacctcgaagagctgtaccaggctgtggagaatctgtgcagccataaggtgagtcccatgctgtacaaacaactacggcaagcttgtgaggatcatgtccaggcccagattttacctttccgcgaggactccctggacagcgtgctgttcctgaagaaaattaacacttgttggcaggaccactgccgccagatgatcatgatcagatctatctttctgttcctggaccgcacctatgtgttgcagaactccaccctgccttctatctgggacatgggtcttgaactgtttcgcactcacattatctctgataaaatggtgcagagcaaaactattgacggaatccttttgctgattgaacgagaacgcagcggggaagccgtcgaccgcagcttattgagaagtttgctcggaatgctgtcagaccttcaggtgtataaagactcgtttgaactcaagtttctcgaagagacaaattgcctctatgcagccgagggccagcgcctgatgcaagaacgggaagtgcccgagtacctgaaccatgtgtctaagcgcctggaagaagagggggatagggtgatcacctacctggatcactccactcaaaagcctctcattgcatgcgtcgagaagcaactgttgggagaacacctgacagctattcttcagaagggactggatcacctcctggatgagaatagagtcccagacctggctcaaatgtaccagctttttagcagagtgcgcggcgggcagcaggcactgctgcagcattggtccgagtatatcaagacattcgggaccgctattgtcatcaaccctgagaaagataaggatatggtccaggatctacttgactttaaggataaagttgaccacgtgatcgaggtctgctttcaaaaaaacgaaagatttgtgaacctgatgaaggagagttttgaaacctttattaacaagcgaccaaataagcccgcagaactgatcgccaagcacgttgacagtaaactcagggcaggcaacaaggaggccacggacgaggagctcgagagaactctcgataaaataatgatacttttcaggtttatacacggtaaagacgtctttgaagctttctataagaaagacctggccaagcggcttctggtcggcaagagtgcgtctgtagatgccgagaagtctatgttaagcaaattgaaacatgaatgtggtgccgcattcacttcaaaactcgaaggaatgtttaaagacatggaactgtccaaggatatcatggtgcatttcaaacaacacatgcagaatcagagcgactcaggcccaattgacctgactgtcaatatcctaacaatggggtactggcccacctatacccctatggaagtccacctcacaccagaaatgataaagctgcaggaagtgttcaaagctttctatcttgggaagcacagcggaaggaagctgcagtggcagactacactcgggcatgccgtgttaaaagctgaattcaaagagggcaagaaggagtttcaggtgagtctttttcagacactagtccttctgatgttcaatgagggtgacggtttttctttcgaagagatcaaaatggccaccggtattgaggatagcgaacttagaagaacgctacagagcctggcatgtggcaaggccagggtgctgatcaaatctcccaagggtaaagaagttgaagacggtgataaatttatcttcaatggagagtttaagcataaactattccggatcaagataaatcagattcagatgaaggaaacagtagaagaacaggtgagcaccactgaaagggtgtttcaggaccgccagtaccaaattgacgccgccattgtcaggatcatgaaaatgcgtaagacactcggccataatctgctagtaagcgaattatataatcagctgaagtttccagtgaaaccgggcgacctaaagaaacggatagagagtctgatcgacagggattatatggaacgggataaagacaaccctaatcagtatcattacgtggcctag

SEQ ID NO: 113350 - DNA, 1980 bp, synthetic construct
  misc_feature 1..1980: note = Description of Artificial Sequence: Synthetic coding sequence
  source 1..1980: mol_type = other DNA
atgctgtacaaacaactgagacaagcttgcgaagaccatgtgcaggcccagatacttccttttagggaggatagtttggacagcgtcttgtttctgaagaagatcaacacatgctggcaggatcattgccggcagatgatcatgatcagatccatattcttattcctggacagaacgtatgtgctgcaaaatagcacgctgccatcaatctgggacatgggcctggagttatttagaactcacattattagcgataagatggttcagtctaaaaccatcgatggcatccttcttttaatcgagagggagcgctctggagaagcggtcgatcgcagtctgctgcggagccttctaggtatgctctcggacttgcaggtatataaggattccttcgagctcaagttcttagaggagacaaattgtctgtacgcagcagaagggcaacgcctgatgcaggaaagggaagtacctgagtatttaaaccatgtgtccaaacgcctggaagaagagggcgaccgggtgattacatatcttgatcactccacccagaagcctcttattgcctgcgtcgagaaacaactgctgggggaacatctgactgccatactgcagaaagggctcgaccacctgctcgacgaaaacagggtccctgaccttgcacagatgtaccagcttttttcacgcgtgcgcggaggacagcaggcactactgcagcattggagcgagtacatcaagacttttggtaccgccatcgtaatcaatccagagaaagacaaggacatggtacaagatctccttgacttcaaagacaaggtcgaccacgttatcgaagtgtgcttccaaaagaatgaaaggttcgtgaacttaatgaaagaaagcttcgaaacctttatcaataagcgtcctaataagcccgctgagttgatcgccaaacacgtagatagcaagctgcgggcggggaacaaggaggctactgatgaagaattagaacgtaccctcgacaagataatgattctgttccggttcatacacggcaaggacgtgtttgaagctttttataaaaaagatctggctaagcgcctgctggtggggaagtccgcaagcgtggacgctgagaagagtatgttaagcaagctgaaacatgagtgcggggcggcctttaccagtaaacttgaggggatgttcaaggatatggagttgagcaaagacatcatggtgcacttcaagcagcacatgcaaaaccagtccgacagcggacccattgatctgactgttaatatattgacaatgggctactggccgacctatactccaatggaagtgcatctcacaccagaaatgattaagctccaggaggtgtttaaagcattttatctgggcaaacattcaggtagaaagcttcagtggcagaccacgcttggccatgccgtgcttaaggctgagtttaaagaggggaaaaaagagtttcaggtgagcctctttcaaaccttggtgctcctgatgttcaacgaaggagatggcttttctttcgaggaaatcaaaatggctaccggaatagaggactctgagttacgacgcaccctgcagtccttggcatgcggaaaggctcgggtcctgatcaaatcacccaaagggaaggaggttgaggacggagataagttcattttcaatggagaatttaaacacaaactgtttaggattaagattaatcaaattcagatgaaagaaactgtggaagagcaagtgtcaactacagaacgagtgttccaggataggcagtatcagatcgatgctgcaatcgtccgcataatgaaaatgcggaaaactctgggacataatttactcgtgtcagaattgtataaccagctgaagtttcctgtgaagcctggcgacctgaaaaagaggattgagtctctgatagaccgggactacatggagagagacaaggataatccaaatcagtaccattacgtcgcctag

SEQ ID NO: 113351 - DNA, 1980 bp, synthetic construct
  misc_feature 1..1980: note = Description of Artificial Sequence: Synthetic coding sequence
  source 1..1980: mol_type = other DNA
atgctttataagcaactccgtcaggcctgcgaggaccatgttcaggcgcagatcttgccattcagggaagattctcttgattctgtgttgttcctgaaaaagattaatacctgctggcaggaccactgccgtcagatgataatgattcgtagcatttttcttttcttggatagaacatacgtgctccagaacagcactctgccaagcatatgggatatgggactggagctctttagaacccatataatatctgacaaaatggtccagtcgaaaacgatcgacggcatccttcttctgattgagagagaacgctctggcgaggcagttgacagaagcttgctaaggtcccttctgggtatgctctccgatctgcaggtctacaaggactcttttgaattgaaatttctggaggagacaaattgcctgtatgctgcagagggtcagcgacttatgcaagaacgagaggtaccagaatacctcaatcacgtgagtaagcgcttggaagaggagggcgacagggttatcacctacttagatcattccacacagaaaccgttgatcgcatgcgtggagaagcagctgttgggagaacaccttaccgctatactgcagaaaggtctggaccatctcttggacgaaaaccgggtgcccgatctggcccagatgtatcaactgttttctcgggtgagagggggtcaacaggcgctcctgcagcattggagcgagtatattaagacttttggaactgcaatcgtcatcaacccagagaaggacaaggacatggtccaggacctgctggatttcaaagacaaggtcgaccacgtcattgaggtgtgcttccagaagaatgaacggttcgtcaacctcatgaaagagagctttgaaacattcattaacaaaaggcccaacaaacctgccgaacttattgcaaaacatgtggacagtaagctgcgggccggcaataaggaagccacagacgaggagctcgagagaacactcgataagatcatgatactgtttcgcttcatccatgggaaagatgtttttgaagctttttataagaaggacctcgcaaaacggctgctggtggggaaatccgctagcgtcgacgccgagaagtcaatgctgagcaaacttaaacacgagtgcggtgctgccttcacatcaaaactcgaaggaatgttcaaagacatggagctgtccaaagatataatggtgcactttaaacagcacatgcagaatcagtcagattctggaccaattgatctgactgtgaatatcttgacaatgggctactggcccacgtacacccccatggaagtgcaccttactcctgaaatgataaagctacaggaggtgttcaaagccttttatttagggaaacatagtggccgcaagctccagtggcagacaacactgggccatgccgtcctgaaagccgagtttaaggagggcaagaaagagtttcaggtctccctcttccagactctggtacttcttatgtttaacgaaggtgatggattctcctttgaagaaataaagatggccacgggaatagaggatagcgagctgcggaggactctgcagagtctggcgtgcggtaaagcccgggtgttaataaagagtcctaaaggcaaggaggttgaggacggcgacaagttcatctttaacggtgagttcaagcataagttgtttcgtattaaaattaatcagattcagatgaaggaaaccgtggaagagcaggtgtccacgaccgaacgtgtattccaagataggcagtaccagatagacgcggccatagtgcgtatcatgaaaatgaggaagaccctgggacataatctgctggttagcgagttgtataatcagttgaagtttcctgttaagccaggggacctgaagaagagaatcgaaagtctgatcgatcgagactacatggaaagggataaggacaatcctaatcaatatcattatgtggcatag

SEQ ID NO: 113352 - DNA, 2703 bp, synthetic construct
  misc_feature 1..2703: note = Description of Artificial Sequence: Synthetic coding sequence
  source 1..2703: mol_type = other DNA
atgaagagcgtgtgccctgtgacttcaggatttagcagccctagtccctcagccgccgccgctgcgcaggaagtcagatcagcaactgacggtaatacctccaccactccacccactagcgcaaaaaaaaggaaactgaatagttccagttcgtcctcctctaatagctccaacgaacgcgaggattttgactcgacctcgagttcgagcagcacgccccccctgcagcctcgggactctgcaagccccagcaccagctcattctgccttggagttagcgtggcggcatccagccacgtgcctattcagaagaagcttcggttcgaagatacgctggagttcgtcgggttcgacgcaaagatggccgaggaatcctccagttccagcagctccagctccccaaccgccgcgacctcacaacagcagcagctcaagaacaaatccattctaatttctagcgtggcgtctgtgcaccacgctaatggactggcaaaatcttccaccaccgtttcatcttttgcaaactcaaagcctggatctgctaaaaagttggtgataaagaacttcaaggacaagcccaaactccctgaaaactacaccgatgaaacctggcagaagttgaaagaggctgttgaggccatccaaaatagcacttctataaagtacaacttagaagaactctaccaagccgtggagaacctgtgctcctacaaaattagcgccaatttgtacaaacagctgcgccagatctgtgaggaccacattaaggcccagattcaccagtttcgagaagactctctcgattccgtgctgttcctaaaaaagattgaccggtgttggcaaaatcactgccggcaaatgattatgattcggtctatattcctgtttttggatcgcacatatgtgcttcagaactcgatgctaccctctatctgggacatgggcctcgaactctttcgcgcccacattattagcgaccagaaagtccagaataaaactatagacggcatactgctcctaattgagagggaacggaatggcgaagcgattgatcggtccctgctgagatctctgctcagtatgttaagcgatttacagatataccaggactctttcgagcaacggtttttggaagagactaaccgcctgtatgccgccgaggggcagaaactgatgcaggagcgtgaagtgccggagtacctgcaccatgtgaacaaacgcctcgaagaggaggcagacagattgataacgtacctcgaccagaccacacagaagagtttaatcgcaaccgtagagaagcagctcctgggggagcatctaaccgccattttacagaaaggtttgaacaatctattagacgaaaatcgcattcaggatctcagtctcttatatcaacttttttcgcgcgtgcgcggcggggttcaggtcctgctgcagcagtggatcgagtacataaaggccttcggcagtactatagttatcaaccccgagaaagacaagacaatggtgcaggagttgcttgacttcaaggacaaggtggaccacattatcgatatttgttttctcaagaacgaaaaatttatcaatgctatgaaggaggcctttgaaacattcataaataagaggcctaataagccggcggagctgatcgcgaagtacgttgatagcaagttgcgcgctggcaataaggaagcaaccgacgaggaactggagaagatgctggacaaaatcatgatcatctttaggtttatctacggcaaagacgtgtttgaggcattttataagaaagatctggctaagagactactggtcggaaagagcgcctcagtggatgctgaaaagtcaatgctctcaaaattgaaacacgaatgtggcgccgccttcacctctaaattggagggaatgttcaaagacatggagctcagcaaggatatcatgatccagttcaaacagtatatgcagaaccaaaacgtccccggcaatatcgaactgacagtcaacattctgacaatgggctactggcccacctatgtgcctatggaggtccacctcccccctgagatggtgaaactgcaggaaatcttcaaaacattctatctggggaagcatagcggcaggaagctgcagtggcaaagcactctcgggcactgcgtcctgaaagcggagttcaaggagggaaaaaaagaactccaggtaagtctatttcagacattggtgttgttgatgtttaatgagggtgaagagttctctctggaagagatcaaacaggctactggaattgaggacggggaactgaggcggacactgcagtccctggcttgtggcaaggctcgcgtgcttgccaaaaatccaaaaggaaaggatattgaggacggcgacaagttcatctgcaatgacgatttcaagcataagttgtttcgaattaaaataaaccaaatccagatgaaggaaacagttgaagaacaggccagcaccacggaacgagtatttcaggatcgccagtaccagatagacgcagccattgtgcggatcatgaagatgcgcaagactctatctcataacctgctggtgtcagaggtgtataatcaattgaagtttccagtaaaacctgctgatttgaagaagcggatcgagtctctaatagatagagactacatggagcgagataaggagaaccctaaccagtacaactatatcgcctag

SEQ ID NO: 113353 - DNA, 2688 bp, synthetic construct
  misc_feature 1..2688: note = Description of Artificial Sequence: Synthetic coding sequence
  source 1..2688: mol_type = other DNA
atgtttcccaccgggttcagctccccttctccttctgccgccgctgcagcccaggaggtacggtcggctacagatggcaacacatcgaccacgccccccacctctgccaagaaacggaagctgaacagctctagtagcagctccagcaatagctccaatgaaagagaagacttcgacagcacgagttccagtagcagtaccccacctctacagcctagggacagcgctagtccatccactagctctttttgcctgggcgtttccgttgccgcctccagccacgtgcctatccagaagaaattgcggttcgaggacaccttggaatttgtgggattcgatgccaaaatggcagaagagtcttccagctctagctctagcagttcgcccactgctgccacatcccagcagcaacagctgaaaaacaagagcatcctgatctcatcagtcgccagcgtgcaccacgccaacggcctggccaaatcctcaacaacggtttccagtttcgcaaattccaaaccaggttccgcaaagaaactagtgatcaaaaactttaaggacaaaccgaaactccctgaaaactacacagacgaaacatggcaaaagctgaaggaggctgtggaagccattcagaatagcactagtattaaatataacctggaggagctttatcaagcggtggagaacctgtgttcttataaaatctcagccaacctatacaaacagctgcgtcagatatgcgaggatcacattaaggcacaaattcatcagtttagggaagactcgctggactcggtgctttttctgaagaagatagaccgctgttggcaaaatcactgtagacaaatgatcatgattcgaagcatcttccttttccttgaccgaacttatgtgctacaaaattccatgctcccttcaatctgggatatgggcttagagctgtttcgggcacatattatcagtgaccagaaggtccagaacaagacgatcgacgggatacttcttttgatagagagggagcgaaatggggaggctatcgaccggagtctgctgaggagcctcctgtcaatgctcagcgacctccagatataccaggatagctttgaacaaagatttttggaggagacgaatcggctctacgcagcagagggtcaaaagctaatgcaggagagagaagtacctgaatacctccatcatgtgaacaaaagacttgaagaagaggctgacagattgattacctatctggatcagacaactcagaaatcactcatagctaccgtggagaaacaattgcttggagagcaccttaccgccatcctgcagaaagggctcaataaccttttggacgagaaccggatccaagacctctctctcctataccagctgttttctcgtgtccgaggtggagtacaggttcttctgcagcaatggattgaatatatcaaagcattcggcagcactatcgtgattaatcccgagaaggacaagaccatggttcaggagctgctggatttcaaggacaaagtggaccacattatcgatatctgcttcctcaaaaacgagaagttcatcaatgccatgaaggaggcatttgagactttcattaacaagcggccaaataaaccggcagagcttattgcgaaatatgtagattctaagcttcgggctgggaacaaagaagccactgatgaagagttggagaagatgctggataaaatcatgatcatctttagatttatatatggtaaagatgttttcgaagcattctacaagaaggatctcgccaagcgcctgctggtagggaaatcggcaagcgtggacgcagaaaagtcgatgctcagtaaactaaagcacgagtgcggagcagccttcacttccaagcttgaaggtatgttcaaagatatggaattaagtaaagatatcatgatacagttcaagcaatacatgcagaaccagaacgtcccgggcaacattgagctgaccgtaaacatcttaacaatgggttactggcccacctatgtcccaatggaggtgcatctgccacctgagatggttaaattgcaggaaatcttcaagacattctatttgggcaaacatagtgggaggaagcttcagtggcaatctactttgggacactgtgtgttgaaggctgagtttaaagagggcaagaaggagctccaagtctcacttttccagaccctggtgctgcttatgttcaacgagggcgaagaattctctttagaagaaataaagcaggccacggggattgaggacggtgagcttaggcggacgctgcagtcattggcatgcggtaaagccagggtgctggctaaaaatcccaagggcaaggacattgaggacggggacaagttcatttgcaacgatgacttcaaacacaaattatttagaattaagataaatcagatccagatgaaagagacagtagaggagcaagccagcaccacagaaagagtgtttcaggatcggcaataccaaatcgacgctgccatagtgcggatcatgaagatgagaaagacattgagccacaacctgctggtttccgaggtctacaaccagctcaagttcccggtgaagccagctgacctgaaaaagagaatcgaatccttgatagaccgcgactacatggagcgggataaagaaaatcctaaccaatataactatatcgcgtag

SEQ ID NO: 113354 - DNA, 705 bp, synthetic construct
  misc_feature 1..705: note = Description of Artificial Sequence: Synthetic coding sequence
  source 1..705: mol_type = other DNA
atgattgatccagacttcgcggataagcccaaactgcccgagaactacaccgatgaaacctggcaaaagcttaaggaggctgttgaggctattcagaatagcacatcaattaagtataacctcgaggagttatatcaggctgttgagaatctgtgtagctacaagatctccgctaacctgtacaaacagctgaggcagatctgtgaagaccatataaaagctcaaatccatcagtttagagaggactcccttgactcagtgttgtttctcaagaagatcgataggtgctggcagaaccattgtaggcagatgatcatgattcgctccatttttctcttcttggatcgcacatacgtcctgcaaaactctatgctgccgagcatatgggatatgggtctcgagttgtttcgagctcacatcatctccgatcaaaaagtgcagaacaagacaatagacggtattctgctgctgatcgagagagaacgtaacggggaagcaattgacaggagtctgttacggtcactccttagtatgctgtcagacctgcaaatctaccaggattcgtttgagcagcgctttcttgaggagaccaaccgactgtacgctgccgagggtcagaagttaatgcaggagcgggaggtccccgagtatttacatcacgtgaataaaagactggaagaggaggcagataggctcataacatag

SEQ ID NO: 113355 - DNA, 2742 bp, synthetic construct
  misc_feature 1..2742: note = Description of Artificial Sequence: Synthetic coding sequence
  source 1..2742: mol_type = other DNA
atgatgtcacagagcagcgggtccggcgatggaaacgatgatgaagccacaacttccaaagacgggggcttctcctcccctagtcccagcgccgctgcagccgcgcaggaagtcagaagcgccactgatggaaacacgtctaccactccccctactagtgctaaaaagaggaaacttaattcctccagcagcagcagtagcaactcgagtaacgagcgagaggatttcgactctacctccagttcatcttccactccacctctacaacctcgtgacagtgcctctccaagcacgtcctccttctgcctgggagtgagtgtggccgcgtcttcccacgtccctatccagaagaagctgagattcgaggacacgctggagtttgtgggcttcgacgccaaaatggcggaggaaagttcgagctcctcaagcagctcttcccccacggcggctacttcacagcagcagcaactaaaaaacaagtctatactgatttcgagcgttgcatcggtgcatcacgcgaatgggttagcaaaatcatcgaccacagtgtctagcttcgccaacagtaaaccaggaagcgccaaaaaactcgttatcaaaaattttaaggataaaccaaagctgccggaaaattataccgacgagacctggcagaagctcaaggaggctgtcgaagccatacagaattccacaagcatcaagtacaacttggaggagctgtaccaagcagtggaaaacctgtgttcttataaaatttccgccaatctttacaaacagctgagacagatctgcgaggaccacatcaaggcgcagatccaccaatttcgggaggacagcctggattcagtgttattcttgaagaagattgaccgatgctggcaaaaccactgccgccagatgattatgatccggtccatattcttgtttctagacaggacatatgtgctgcagaatagcatgctcccatccatctgggatatggggctggagctgttccgggcccatattatcagcgaccaaaaggtgcagaataagaccattgacggcattcttctgctgattgagagggagagaaatggtgaggccattgataggagcctacttagaagcctcttgagcatgctgtcagatctacagatataccaggactcgttcgagcaacgcttcctggaagagactaatcgactgtacgccgcggagggccaaaagctcatgcaagagcgtgaggtgccagagtacctgcaccatgtgaataaacgcctggaggaagaggccgatcggttaatcacatatctggaccaaaccactcagaaatccctcattgctacggtggagaagcagctcctgggggaacatcttacagccattctccagaaaggcttgaacaatctgttggatgagaaccggatccaggacctgtccttgctttatcaattgttcagcagggtgcgtgggggtgtacaggttctgctacagcagtggatcgagtacattaaggcttttggatctacgatcgtcattaacccagagaaagataagaccatggtccaggaattgctggatttcaaggacaaggtggaccacattattgatatttgtttcctgaagaacgagaaattcataaatgcaatgaaggaagcttttgaaacttttataaacaaacgcccgaataagcccgccgaactgattgctaagtatgtcgactcaaaactcagggccggaaacaaggaagcaaccgacgaggaacttgaaaaaatgttggacaaaatcatgatcatctttcggttcatctatggtaaggatgtatttgaggccttctataaaaaggatttggctaaaagactgttagtgggcaaatcagctagcgttgacgcagaaaagtccatgctaagtaaactcaaacatgagtgcggcgctgcctttacaagtaagctggagggcatgttcaaagacatggaattaagtaaggacattatgatccaatttaaacaatacatgcagaaccagaatgtccccggcaatatcgagctaactgtcaacatcttgactatgggatattggcctacctatgtacccatggaagtgcacctgccaccagagatggtcaaattgcaggaaatcttcaagactttttacttgggaaagcactccgggcgcaaacttcaatggcagtccacactgggccattgcgtactgaaggcggagttcaaggaagggaaaaaagaactgcaggtcagcctatttcagactctggtgctcctgatgttcaacgaaggagaagaattcagcttggaagagattaaacaggcaaccggtattgaggatggggagctgcgaaggactcttcagtcactggcctgtggaaaagcccgggtcctggcgaaaaaccccaaggggaaggacatagaagatggggataagtttatctgcaatgatgactttaagcataaactctttcgaataaaaataaaccaaattcagatgaaggagaccgtagaggagcaggctagcacaaccgagcgagtctttcaagaccgacagtaccagatagacgccgccattgtcagaattatgaagatgaggaaaacattgtcgcacaatctgcttgtcagtgaggtgtataatcaactgaagtttcctgtcaagccagccgacctcaaaaagagaattgagagccttattgacagggattacatggaaagggacaaggagaatccaaaccagtataactatatagcttag

SEQ ID NO: 113356 - DNA, 2343 bp, synthetic construct
  misc_feature 1..2343: note = Description of Artificial Sequence: Synthetic coding sequence
  source 1..2343: mol_type = other DNA
atggccacgtcaaacctgctaaagaataaaggctcattgcagtttgaggacaagtgggactttatgaggcctatcgtgctcaaacttttgcgccaagagtctgtgaccaagcagcaatggtttgacctgttctcagatgtacacgctgtatgcctgtgggacgataaagggccagccaaaatccaccaagcccttaaggaagatattctggagttcattaaacaggcccaggcccgggtcctaagccatcaggatgataccgccctgctgaaagcctatattgtagaatggaggaaattttttacacagtgcgacatcctgccgaagcctttttgccagttggaaattacgcttatgggaaagcagggcagtaacaagaaatctaacgtggaggactccattgttcgcaagctgatgcttgacacctggaatgaatcaatcttctctaacatcaagaatcgattgcaggacagcgcaatgaaactggttcacgcagagcgcctgggagaagctttcgattcacaactggttattggagttagagagagctacgttaacctctgctccaacccggaggataaattgcagatttatagggacaacttcgaaaaagcctacttggattctactgagagattctacaggacccaggccccatcctacctacagcaaaacggggtgcagaattacatgaagtacgctgacgctaagctcaaagaagaggaaaagagggcactgcgctacctggagaccaggcgggagtgcaatagtgtggaggctcttatggagtgctgcgttaatgccctggtcacaagcttcaaagagacaattctggccgagtgtcaaggcatgattaaaagaaatgagaccgaaaagttgcacctaatgttctctctgatggacaaggtgcccaatggaattgagccgatgctcaaggatctggaggaacacatcattagtgctgggttagctgacatggtggcagctgccgagactatcacaactgatagcgagaagtacgttgagcagttgctgaccctatttaacaggttttcaaagctcgtcaaggaagcctttcaggatgacccccgttttcttactgccagagacaaggcatacaaggctgtggtcaatgatgccactatcttcaaactcgagttgccactgaaacagaaaggggtcggcctgaagacgcaacccgaatccaaatgcccggagcttctggccaattattgcgatatgcttttacggaaaacccctttatccaagaaactgacgtctgaggagatagaagctaagctgaaagaagtgctgctggttttgaagtacgtgcaaaacaaagatgtgttcatgaggtatcacaaggcccacttgacccgacgattaattctcgacatatctgcggattctgagatcgaagaaaatatggtggagtggctgagagaggtcggaatgcctgccgactatgtcaacaagttagcacggatgtttcaggacataaaagtgtcagaggatcttaaccaggctttcaaagaaatgcacaagaacaacaaactggccttgccagctgactccgtcaatatcaaaatcctgaatgccggcgcttggtcacggagttccgaaaaagtattcgtctcccttccaactgaactggaggacctcatcccggaggttgaggagttttataagaagaaccacagcggccgcaagctgcattggcatcacctgatgagcaacggcatcatcacctttaagaacgaggtgggtcagtacgacctagaggtcactaccttccagcttgccgtgttgtttgcttggaaccaacgtccacgggaaaagatcagcttcgaaaatctgaaactggctaccgaactgccagatgccgaattgcgtcgaacgttgtggagcctggtggccttccctaagctcaagcgtcaggttctcctgtacgaaccacaggtgaatagccctaaggattttaccgagggcacccttttctccgtgaaccaggaattctcactcattaagaacgccaaagttcagaaacgtggcaaaatcaacttaatcggtagactccaactaacgactgagcggatgagggaagaagagaatgagggaatcgtccaactccggattttgcgtacccaggaggccatcatacagattatgaaaatgaggaagaagatctctaacgcacagttgcaaacagaactggtggagatcctaaaaaatatgttcctgccacagaagaagatgatcaaagagcaaattgagtggctgattgagcacaagtacatcaggagggacgagagcgatattaatactttcatctatatggcttag

SEQ ID NO: 113357 - DNA, 2343 bp, synthetic construct
  misc_feature 1..2343: note = Description of Artificial Sequence: Synthetic coding sequence
  source 1..2343: mol_type = other DNA
atggcgactagtaatctgttaaaaaacaaaggttcgctgcaattcgaggacaaatgggacttcatgcgccccatagttctgaagctgttgcgtcaggaatcggttacgaaacagcaatggtttgacctgttttctgatgtgcacgctgtttgtctgtgggacgacaaagggccggcaaaaatacaccaggcattgaaagaggacatcttggagttcatcaagcaggcacaagcgagagtattgtcccaccaggacgacacagctctgctgaaggcctatattgtagaatggaggaagttctttacacagtgcgacatcctccccaagcccttctgtcagctggaaataactcttatgggaaagcaaggttcaaataaaaagtccaacgtggaagatagcatagttcgtaaactgatgttagatacctggaacgagagcattttttctaatatcaagaaccgtctccaagatagcgcaatgaaactggtccacgccgagcgactgggtgaagctttcgactctcagctggtgattggcgtgagagagagttatgtcaacctttgttctaaccccgaggataagttgcagatttatagggacaactttgaaaaggcctatctggactccactgaacgattttatcgtacccaagcgcccagttatctccagcagaacggagtgcagaattatatgaaatacgccgatgccaagctgaaagaggaggaaaagagggccttgaggtatcttgaaacccgtcgggagtgtaatagtgtggaggctttgatggagtgttgcgtgaatgcgctggtaacaagcttcaaagagacaattctagcagagtgccagggaatgatcaagcggaatgaaactgagaaactgcatctgatgttcagcctcatggataaagtgccaaacggcatcgagccaatgctgaaggacctcgaagaacacattattagtgctggtctggcggacatggttgctgcagctgaaacaattactacagactcagaaaaatacgttgagcagttattgacattgtttaaccgatttagcaagctggtcaaggaagcatttcaggacgatccccggtttctgacggccagggataaggcctacaaggcggtggtcaacgacgctacaatcttcaagttggaactgcctctgaagcaaaaaggtgttggcctcaaaacacagccggaatctaaatgccctgaactgttagcaaattattgtgacatgctgctgagaaaaacacctcttagcaagaagctgacgagcgaggagatcgaagcaaagcttaaagaggtcctcctcgtcttgaaatatgttcagaacaaggacgtcttcatgagatatcacaaggctcatctgaccaggcgacttatcctggatatctcagcagactcagaaatagaggagaacatggtggagtggttgcgtgaggtgggcatgcctgccgactacgtcaataagctggctcggatgtttcaggatataaaggtgagtgaggatctgaaccaagccttcaaggaaatgcataaaaataacaagctggccctgcccgccgatagtgtgaacatcaaaattctcaatgcaggcgcttggtcccggtcaagtgagaaagtgttcgtgagcctgcctaccgagttggaggatctgattcctgaagttgaagaattttataagaaaaatcattccggcagaaagttgcattggcaccacctgatgagcaacggtataattactttcaagaatgaagttggacagtacgatctggaggtgaccaccttccagctggccgtgctgtttgcttggaatcaacgaccccgggaaaaaatttcatttgagaacctgaaactcgctactgagctgccagatgcggagctccgtcgcaccctgtggtccctggtagcatttcctaagctcaagagacaggtgctactatatgagcctcaggtgaatagtcctaaggatttcacggaaggcacacttttttctgttaaccaggagttcagtctgatcaagaatgcgaaggttcaaaaacgagggaagatcaaccttatcgggaggctgcagttgaccacagagaggatgcgggaggaggaaaatgagggaattgtgcaactgcgtattctgagaacacaggaagcaatcatacaaataatgaagatgaggaagaagatcagcaacgctcagcttcagaccgagcttgtggagattttaaaaaatatgtttttgcctcagaaaaaaatgatcaaggaacagatcgagtggctgatcgagcacaaatacattcgccgcgatgaaagtgacattaatacctttatctacatggcgtag

SEQ ID NO: 113358 - DNA, 5097 bp, synthetic construct
  misc_feature 1..5097: note = Description of Artificial Sequence: Synthetic coding sequence
  source 1..5097: mol_type = other DNA
atggtcggtgagcttagataccgggaattcagagtacctcttggtccaggactccacgcttaccctgacgagctcatccgccagcgggtgggacatgatgggcacccggagtaccagataagatggttaatattgaggaggggagacgaaggggacggagggtcaggtcaggtggactgcaaagccgagcacattctgctgtggatgtctaaagatgagatctacgccaactgccacaagatgttgggcgaggatggccaggttattggcccctctcaagaatccgccggtgaagtaggagccctggacaaatccgtgctggaagaaatggaaactgacgtgaagagtttaattcagagggcgcttagacaattggaagaatgcgttgggacaattccccccgcccctctcctgcataccgtgcatgtcttgagtgcttatgcatcaatcgagcctctgacgggggtgttcaaggatcccagagtgcttgacttgctgatgcacatgctgtccagccctgactatcagattagatggtcagcgggcaggatgatccaagcactgtcaagccacgacgccggcaccaggactcagatcctgctgtctcttagccagcaggaggcaattgaaaaacacctggactttgactcccggtgtgcactgttagccctgtttgctcaggcgaccctgtcagagcatccgatgagctttgagggcatccagttaccacaagtacctgggagggtgctgttctcactggtgaagaggtatctgcacgttacatcactactggatcagctaaacgattcggcagctgaacctggcgcccagaatacatcagctcccgaggagctcagtggggagcgggggcagctcgaactcgagttttctatggccatgggaacgctgatttctgagctggtgcaggcaatgagatgggaccaggccagcgacaggccccgttccagcgcccggtcgcctgggagcattttccaaccgcagcttgcagacgtgtcacccggtttaccagctgcccaagcacagcccagctttagacgtagccggcgcttccgtccaaggtccgagttcgccagcggtaacacttatgctctgtatgtgagggacacccttcagcctggcatgcgggtaaggatgctcgatgattacgaagagataagcgccggcgacgagggagagttcagacagtccaacaacggcgtaccacctgtgcaggtgttctgggagtctaccgggcgcacttattgggtacactggcatatgctggagattttgggattcgaggaggacattgaggatatggtggaagcggacgaatatcagggagcagtagcgtccagagtactaggtcgtgctctcccagcatggcgctggcggcctatgacggagctgtacgccgtgccatatgtgcttcccgaggatgaagataccgaagaatgcgaacacctcacattagccgaatggtgggagttgctgttcttcataaagaagctggacgggcccgaccatcaggaagttttgcagatcctacaagaaaatctggacggtgagattctcgatgatgagatactcgcagaactggccgtgccaattgagcttgcacaagacctgctcctgacactgccacagcggctaaacgattccgccctgagggatctcataaactgccacgtgtacaaaaagtacgggcccgaggccctggccggcaaccaggcctatcctagtctactggaggctcaggaagatgtcttgcttctggacgctcaagcccaggcgaaagatagcgaagatgccgccaaggttgaggccaaggagccaccgtcccaaagtccaaacacaccccttcagcggctggttgagggatatggtcccgccggtaaaattctgctcgatctggagcaagccctgtcttcggagggaacgcaggagaataaggtaaagcccctgcttcttcaacttcagaggcaacctcagcctttcctcgcccttatgcagagcctagacacaccagagaccaaccggaccctccacctgactgtactgagaatcctcaagcagctggtggactttccagaagcccttcttttgccatggcatgaggcagttgatgcttgcatggcatgccttcgatcccctaatactgacagagaagtcctgcaggaattaatcttctttctccatcgactcacatcggtgagtcgggactatgcagtcgtgctcaaccagcttggagctcgggatgcaataagcaaagctctcgagaaacatctgggaaagcttgagctggctcaagaattaagggacatggtgtttaagtgcgagaagcatgcccatttatatcggaaattgatcactaatatactcggagggtgcatccagatggtgttaggccagattgaagatcaccgacggacgcatcagccaattaatattccgttttttgatgtgtttcttcgctacctctgccaaggttcttccgtggaagtgaaggaagacaagtgctgggaaaaagttgaagtttcgagtaaccctcaccgggcctcgaaactgaccgatcataatcctaaaacctactgggagtctaatgggagtgccggctcgcattacattactcttcacatgcgccgcggcatcttaatacgccagctaaccctgttggtagctagcgaagactccagctatatgcccgcaagggtagtggtatgcggcggggactcaactagcagcctccacaccgaattgaactctgtgaacgtcatgccaagcgcctcacgggtaatcttgctggagaacctgactcgcttttggcctattatccagatacggatcaaacggtgtcagcaagggggtattgacacccgcatccgagggcttgagatcttgggtcctaagccaaccttctggccggtttttcgagagcagctgtgccgtcatactcgccttttttatatggtcagagctcaggcctggtcacaggatatggccgaggacagacggtcactcttacatttatcttcccgtctgaatggagctttgaggcaagaacagaactttgctgacagattcctgccagacgatgaggcggctcaagccttaggaaaaacatgttgggaggctttggtcagcccggttgtccaaaatatcacgagtccagacgaggacggcattagccctctagggtggttgctcgatcagtatttggagtgtcaggaggcagtcttcaacccccaaagcagagggcctgccttctttagcagggttagacggctaactcaccttttagttcatgtggagccttgtgaggctcctccccctgttgtggccaccccacgacccaaggggcgtaaccgctcccacgattggagtagcctcgcaacccgcggcctccccagcagcattatgcgaaacttgacgcggtgctggagggccgtggtcgagaaacaagttaacaacttcctgacaagctcctggcgggacgatgacttcgtccctcggtactgcgagcactttaatatcctccagaacagttcatcagaactcttcgggcctcgggcggccttcctgctcgccctgcagaatggctgcgctggtgccctcctgaagcttccatttttgaaggctgcccatgtttccgagcaatttgcccgccatatcgatcagcagattcaggggtccagaattggcggcgcgcaggagatggaaagactcgcacagctccagcagtgtctgcaggcggtgctgatattctcagggttggaaattgcaacaacctttgaacactactaccaacattacatggctgataggctactgggagtggtatcctcctggcttgagggggcggtcttagaacagatcggaccctgctttccgaatcgtctgccacagcagatgctccagtccctgtccactagtaaggaactccagaggcagtttcacgtttaccagttgcagcaactggaccaagagctgctcaagctagaagatacggagaaaaaaattcaagtgggcctcggcgcctctggaaaggaacataagtcagaaaaggaggaagaggccggagccgcagcagtggtagatgtggcggagggcgaggaggaggaggaggaaaacgaggacttgtactatgagggggctatgccagaggtcagcgtcctcgtgttgtctcgtcatagctggccagtcgcctctatctgtcataccctgaaccctcggacgtgtctgccctcctaccttagggggacattgaataggtactctaatttttacaataagtctcagagccaccccgctctggagagaggctctcagagacgtctgcagtggacctggttgggctgggctgagctgcaatttggcaatcagacacttcacgttagcacagtccagatgtggctgctcctgtatctaaacgatctgaaggcagtctccgtggaatccctcttagcctttagcggactgtctgccgatatgctgaatcaagcaattggacccttgacatcctctagaggtcctttagatctgcacgaacagaaggatatccctgggggagtgctaaaaatccgagacgggagcaaagaaccaaggtcaagatgggacattgttcggctcatccctccccagacgtatctgcaggccgaaggcgaagatggacaaaacttggaaaagagacgcaatttgctcaactgcctaattgtacgaattttgaaggctcatggtgatgaagggctccacatcgatcagctggtttgcctggttctggaggcttggcagaaaggcccttgtccccctagggggttggtgagtagcctcggtaaaggttctgcttgcagcagcactgatgtcctcagctgtattcttcatctcctcggcaagggcaccctgagaagacacgatgacagaccccaagtcctgtcatacgctgtgcccgtgaccgttatggagcctcatactgagtccctgaatccagggtccagcggacctaatcccccgctgacctttcatactctccaaattaggtctcgcggagtgccgtatgcctcgtgcacagccacgcaatcatttagtaccttcagatag

SEQ ID NO: 113359 - DNA, 5349 bp, synthetic construct
  misc_feature 1..5349: note = Description of Artificial Sequence: Synthetic coding sequence
  source 1..5349: mol_type = other DNA
atgagcagaggattctggcttgccgagcctcttgccggaactggcccgcaccctgcgccagtcgctgccgacagtcgtggctgctcatccgtgccccgcagacacgccccatctcgcctctctgtgtcaactccctctaggggtcctggagcgagaatggtgggcgagctccggtacagggagttccgcgttcctcttggcccgggactacacgcctaccccgacgagctgatccgtcagagagtgggccacgatggtcatcccgaatatcaaatccgctggttgatcctgagaagaggagacgaaggcgacgggggttctggccaggttgactgtaaagctgagcacattctcctttggatgtcgaaagacgaaatctacgccaactgtcataagatgctaggggaagatgggcaggtgatcgggccaagccaggagagcgctggcgaagtcggcgcactggataagagtgtgcttgaggagatggaaaccgacgttaagtcactcattcagcgcgcccttcgccagctggaggagtgtgtggggactatccctcccgcccccctgctacacactgttcatgtcctgtctgcttacgccagcatcgagcctctgactggcgtttttaaagatccgcgggtccttgatctgctcatgcatatgctcagcagtccagattaccaaatacggtggtcagctggaaggatgatccaggccctgtcaagtcacgatgccggcgaaggacagtgcggggaagaaggcaaggccggcgaaggcctagggagactacgcgattcacaggacaccgtcgcaggcgcaagtgatctcatcagaacacggacacagatcctcctgtcgctcagtcagcaggaagcgatcgaaaagcatcttgacttcgactcacggtgtgcgctcttggcactcttcgcccaggccactctgtcagaacatcccatgtcatttgaaggaattcagctgccccaggtccctggacgcgtgctctttagcctcgtcaagcggtatttacatgtgacaagcctcctggaccagttgaacgacagcgcggccgagccaggcgcacagaacacatcagcgccggaagagctctccggggaacgcggacaactcgagctggagttctctatggcaatgggcacattaatcagcgaactcgtccaggctatgagatgggaccaagcgagcgaccgcccccgatcgtcggcccgatctccagggagcatttttcagccgcaattggccgatgtgagccccggtttgccagcggcccaggctcagccctcttttagacggagtcgaagatttaggcctaggtctgagttcgcctccgggaacacttacgccctgtatgtgcgcgacacgctccagcccggtatgcgcgtccgaatgctagacgactacgaggagatcagtgccggggatgagggggaattccgtcagagcaataacggggtacccccggtccaagtgttttgggaatccacaggcaggacatactgggtgcactggcacatgttagaaatcctggggttcgaggaagacatcgaggatatggtcgaggccgatgagtaccaaggggccgtcgcctctagagtcctgggacgagctctgccagcttggcgctggcgccctatgaccgagctttacgccgttccttacgtgctccccgaggatgaagataccgaggaatgcgagcacctgacgctggccgagtggtgggaactgctgttttttataaaaaaactagacggccccgatcaccaggaagtgctgcagattctgcaggagaatttagacggtgaaatcttggacgatgaaatcctggccgagcttgccgtccccattgaacttgcacaggacctactattgaccttgccccaacggctgaacgactctgccctgagggacttgattaactgtcatgtgtacaagaaatacgggcctgaggccttggccggcaatcaggcttacccgtccctgctcgaggcacaagaagacgtgctgctgctggatgcccaggcccaggccaaggattcagaggatgccgcaaaagtggaggcgaaggagccacctagccaatctcccaatactccgctccagcgtctggttgagggatatggaccggcagggaaaatactgcttgaccttgaacaagccctgtccagtgagggcactcaagaaaataaggtcaaacctctgctgctgcaactgcagaggcagccccagccgtttctggctctaatgcagagcctggacacaccagaaactaacaggactttgcacctaacagtgctgcggatcttgaaacagttggtcgacttcccagaggccttactgctgccctggcacgaggcggtagatgcctgcatggcctgtttacggagtccaaataccgaccgcgaagtgctgcaggagctgatctttttcttgcacagactgacctccgtgtctcgcgactacgccgtggtgctcaatcagctgggcgcccgcgacgcaatcagcaaagcactggagaaacacctgggtaaactagagctggcccaggagctgagggacatggtcttcaagtgcgaaaaacatgcccatctgtatcgtaagcttatcaccaatatactgggcgggtgcatccagatggtgctcggacagattgaggaccatagaagaacacaccagccgatcaatattcctttcttcgatgtgttcctgagatacctatgtcagggctcgagcgttgaggtcaaagaagataagtgctgggaaaaggtcgaggtcagcagtaacccacatcgggctagcaagctgacggaccataaccccaagacatattgggaaagtaacggttcagcagggtcacactacattacgcttcacatgagacgcgggattctcatccggcaacttacactgttagtggcatcggaggacagcagctatatgccagccagggttgtcgtctgtggtggcgattccacctctagtctgcataccgaactgaatagtgtgaatgttatgccatctgcctcgcgagttatcctcctcgaaaatctaacgaggttctggcccatcatccagatcaggatcaagagatgccagcagggcggcatcgacacccgcatccgaggcctcgagatacttgggccgaagccgaccttctggcccgtgttccgggagcaactctgtagacatacgagactgttctacatggtgagagcccaggcttggtcccaggacatggcggaggaccgcaggtcacttctgcacctctcatcacgcttgaacggcgccctccggcaggagcagaacttcgctgaccgctttctgcctgacgacgaggcagcacaggcccttggcaaaacttgttgggaggcactggtgtctcctgtcgtccagaacataacctctcccgacgaagacggaattagtccgcttggttggcttctggatcaatatcttgagtgccaggaggctgtgtttaaccctcagtcccgaggtccggcattcttttcccgggttcgtcgtctgactcatctgctagtccatgttgaaccctgtgaagcacctccacccgtagtagccactccccgaccgaagggccggaaccgctctcacgactggtcatcattagccactagaggactgccctccagtatcatgcgcaatctgactcgctgctggcgagctgtggtggaaaaacaggtgaacaattttctcacctcttcttggagggacgatgatttcgttccacgttactgcgagcattttaacatcctgcaaaattcctcctcagagctattcgggccccgcgcagcctttctgctggcattacagaatggctgtgctggcgccctgctgaagttacccttcttaaaggcggctcacgtgtctgagcagttcgctcggcatattgaccagcagatccaaggctctcggattggcggcgcacaggagatggagcgcctggcgcaactgcaacagtgtttgcaggcagtactgatcttttccggactggaaatcgcaacaacatttgagcattattatcagcactatatggccgaccgtcttctgggtgttgtgtcgtcttggctggaaggtgcggtcttggaacagattggaccctgctttccgaacaggctgccccagcagatgctgcaatctctcagtacatccaaggagctccagcggcagttccacgtatatcagctgcagcagctcgatcaggaactgctaaaattggaagacactgaaaagaaaatacaggtggggttgggggcctccggcaaagaacacaagtccgaaaaggaagaggaggctggagccgcagcagttgtcgacgtggctgagggagaagaagaggaggaagaaaatgaggacctctattacgaaggcgccatgccggaggtgagtgtgctggtcctctcccggcactcttggccggttgccagcatttgccacaccctgaacccgaggacatgcctgccttcctacttacggggtaccctgaataggtattccaacttttataataagtcacagtcgcaccccgcgctggagcgcggtagccagcgacgtctacagtggacatggttggggtgggctgaattgcagttcggtaaccaaaccctccacgtcagcaccgtgcaaatgtggttgcttttatatttgaatgatttgaaagccgtttctgttgagtcactacttgccttctccggtttgtccgccgatatgttaaatcaggcaattggccctttgacctcctcgcggggccccctggatctgcacgaacaaaaagatattccaggcggagtgctcaaaatccgcgatggctctaaagagcccaggtcccggtgggatattgttcggctcatccctcctcaaacgtacctccaagccgaaggggaagacggccagaacctcgagaagcggcgcaacctgctgaattgtcttattgtgaggattctgaaagcccacggcgatgagggactgcacattgaccaacttgtctgcctggttctcgaagcttggcaaaagggcccatgccctccgcgtggactcgtctccagcctagggaagggctctgcgtgctcctctaccgatgtgctctcctgcattctccatttgcttggtaaaggcacccttcgccggcatgatgaccgcccccaagtactgtcgtatgcagttcctgttacggtcatggaaccccatactgagtccctcaatcccggatccagtgggccaaaccctcccttgacattccatacactccagataaggtctcggggagtcccttacgcttcgtgcaccgccacacagagcttcagcacattcagatag

SEQ ID NO: 113360 - DNA, 435 bp, synthetic construct
  misc_feature 1..435: note = Description of Artificial Sequence: Synthetic coding sequence
  source 1..435: mol_type = other DNA
atgggggttctgcaagtggtcaaacagagcgtgcagattccggtgttcgtgatgatccgaccacgaggtggagatttcctgtatagcgatagagagatcgaggtcatgaaagcggacataagattggccaaactgtacggagccgacggacttgtctttggagccctaacagaagacggacatatcgataaggagttgtgcatgtccctgatggctatttgccggcccctacccgtgacatttcatcgggccttcgacatggtccacgacccaatggctgccctggaaacacttctgactctgggctttgaacgggttctgactagcgggtgcgattcttctgccctagaagggctgccactgattaaaaggctgatcgaacaagccaaggggcgtatcgttgtcatgccaggcggcgggatcactgacaggtag

SEQ ID NO: 113361 - DNA, 822 bp, synthetic construct
  misc_feature 1..822: note = Description of Artificial Sequence: Synthetic coding sequence
  source 1..822: mol_type = other DNA
atgaagaggcagggtgcttcttccgaaaggaagagggcccgaattccatccgggaaagcgggtgctgcaaacgggttcttgatggaagtttgcgtggatagcgtcgagtcagcagtgaacgctgaaagaggcggagcggatcggatcgagttgtgcagtggtctgtcagagggaggaaccactccctcaatgggcgttctccaggtggtgaagcagtcagtacagatccctgtttttgttatgatcaggcctaggggcggtgacttcctttactcagaccgggaaatcgaggttatgaaggccgacatccgactggcgaagctctacggcgccgatggtctcgttttcggagcccttaccgaggatggccacatcgacaaagaactctgcatgtctctgatggctatctgccgcccactgcccgtgacttttcatcgtgctttcgatatggtgcatgaccctatggccgcccttgagaccttgctgacattaggatttgaaagagtcctgacctcagggtgcgactccagcgcccttgagggtcttccgcttataaagcggctcattgagcaggccaagggtagaattgtggttatgcctgggggtggaatcaccgatagaaacctgcagcgcatcctagagggctccggagctaccgagttccattgctcggcccgatccacccgcgattcaggcatgaaattcaggaattcttccgtggccatgggtgcctcactgtcctgctcagagtacagcctaaaggtgacagacgtaactaaagtaaggacgcttaacgccattgccaagaacattcttgtttag

SEQ ID NO: 113362 - DNA, 1122 bp, synthetic construct
  misc_feature 1..1122: note = Description of Artificial Sequence: Synthetic coding sequence
  source 1..1122: mol_type = other DNA
atgtccttgttgctccttcttttgctcgtgtcatactatgtggggacactgggaactcatactgagataaagagggttgccgaggaaaaggtgacgctcccttgtcaccaccaactggggctcccggaaaaagacacactggatatcgagtggctcttaaccgacaatgaagggaatcaaaaagtggtgatcacatactccagcaggcacgtgtataacaacctgactgaggaacagaagggccgtgtcgcttttgccagcaacttcctggcgggggacgccagcttacaaatagaacccttgaaaccatctgacgagggcaggtacacctgtaaggtgaaaaactctggtaggtacgtgtggtcccatgtaatcctgaaagtgcttgtgagaccgagcaagcccaaatgtgagctggagggggaacttacagaaggcagcgacctcacgctacaatgcgaatcctccagcggcacagagccaatcgtgtattactggcaacggatcagagaaaaagaaggagaagatgaacgattaccccctaagtcaagaatcgattataatcaccccggtagggtgctactacagaatctgaccatgagctactctggactgtaccagtgcactgccggcaacgaggccggcaaggagtcttgtgtggttcgagttaccgtacagtatgtgcagagcattggaatggtagctggggcagttactgggatcgtcgctggggctcttttaattttcttgctggtctggctgctcatacgaagaaaagacaaagagaggtacgaggaagaagagcggcctaacgaaatcagagaggatgcagaggcaccgaaggctcgattggtgaagcccagcagttcatccagcggctcccggagcagtaggtctggatccagctctacgcgctccactgcaaattccgccagtcggagtcaaaggacgcttagcacagatgctgctccccagcctggcctggccacccaggcctattcgctggtcggacctgaggtccgaggatctgaacccaagaaggtccaccacgccaatctgaccaaggctgagacaacacctagtatgattccaagccagtctcgcgcatttcaaaccgtctag

SEQ ID NO: 113363 - DNA, 597 bp, synthetic construct
  misc_feature 1..597: note = Description of Artificial Sequence: Synthetic coding sequence
  source 1..597: mol_type = other DNA
atgcaccaccgcaatgattcccagcgactcggaaaggccgggtgccctccagagccatccctgcagatggccaatacaaacttcttgagcaccctgagtccagaacattgccggcctcttgctggcgagtgcatgaacaagcttaaatgtggggcagcggaagccgagatcatgaacttgccagaacgggtgggaacgtttagtgcaattcccgccctgggtggaatatctttgccccccggagtcatcgtgatgaccgctctccattcccctgccgccgcaagtgctgcagtgaccgactcggccttccagattgctaatctggccgattgccctcagaaccattccagttctagctctagttcttctggaggcgcaggcggagcgaaccccgctaaaaagaaacgcaagcgatgcggagtatgtgtaccttgcaagagattaatcaactgtggggtatgctccagttgcaggaatcggaaaacagggcaccagatttgcaagttcaggaaatgtgaagagctgaagaaaaagcccggaacttcactagagagaactccggtgccatcggccgaggcattcaggtggttcttctag

SEQ ID NO: 113364 - DNA, 597 bp, synthetic construct
  misc_feature 1..597: note = Description of Artificial Sequence: Synthetic coding sequence
  source 1..597: mol_type = other DNA
atgcatcacaggaacgactctcagagacttggtaaggctggctgtcccccagagccgagcctccaaatggcgaacactaactttctgagcactctgtcacccgaacattgtcgccctctggcaggcgaatgcatgaacaagctcaagtgcggcgcggctgaggccgaaatcatgaaccttcccgaaagggtagggactttctcagccattccggcgttggggggtatcagcctgccccccggggtgattgtgatgaccgccctgcactctcctgctgccgcgagcgcagcagtcaccgatagtgccttccagatcgccaacctggccgattgcccccagaaccactcctcttcaagctcgtcctcatctggtggcgcagggggtgctaatcctgccaagaagaaacggaagcgctgcggcgtttgtgtgccgtgtaagaggttgattaattgtggggtgtgttctagctgtagaaatcgcaagaccggacaccagatatgtaagttccgcaagtgcgaggagcttaagaaaaagccaggcacatctctggagcgcacgccggtgcccagtgcagaagcctttcgctggtttttctag

SEQ ID NO: 113365 - DNA, 969 bp, synthetic construct
  misc_feature 1..969: note = Description of Artificial Sequence: Synthetic coding sequence
  source 1..969: mol_type = other DNA
atgtctagcctcggaggcggatcccaggatgccggcggatcctccagcagcagtactaatggcagcgggggctctggtagttctggacccaaagcaggagctgccgataagtcagccgtggtggccgccgcagccccggccagtgtggccgacgataccccccccccagaacgtcggaacaagagtggaatcatttctgaacctctgaacaagtccctccgccggagtcgcccactgagtcactatagctcttttggatcctccggtgggtccggcgggggatctatgatgggcggagagtctgcggacaaggccactgcagcagctgccgccgcttccctgctggcgaacggacacgatttagctgccgctatggccgtcgataagagcaatccaacctcaaagcataaatctggagcagtggcttcgctgctgtccaaggccgaacgcgccactgaattggcagccgaaggccagttgacccttcagcagtttgcacaatccaccgaaatgctcaagagagtcgtccaagaacatctacccctgatgtccgaggctggcgccggcttacccgatatggaagccgtagccggtgcagaggccctaaacggccagtccgactttccttatctcggagctttcccaataaatcccggactctttattatgacccctgccggagtatttctggcagagagtgcactccacatggcgggccttgccgagtatcccatgcagggcgagctggcgtccgcaattagcagcggcaagaaaaaaagaaagagatgcggtatgtgtgccccctgtaggagaaggattaactgcgaacaatgctctagctgcagaaaccgcaagactggccatcagatctgtaagtttcgcaaatgcgaggagctcaaaaagaaaccatcagctgcgcttgaaaaggtcatgctgcctactggtgctgcgtttcggtggtttcagtag

SEQ ID NO: 113366 - DNA, 210 bp, synthetic construct
  misc_feature 1..210: note = Description of Artificial Sequence: Synthetic coding sequence
  source 1..210: mol_type = other DNA
atgtcatccttgggaggtgggagtcaggacgccggggggtcatccagctcgagtaccaatgggtccggtgggtctggcagttctggcccgaaagctggcgctgccgacaaaagcgcggttgtcgccgctgcggcacccgcttcagtcgctgacgatactcctcctcctgagagacggaacaagtccggaatcattagtgagccattgtag

SEQ ID NO: 113367 - DNA, 243 bp, synthetic construct
  misc_feature 1..243: note = Description of Artificial Sequence: Synthetic coding sequence
  source 1..243: mol_type = other DNA
atgtcttccctcgggggaggtagtcaagatgcaggaggatcgtccagtagttcgacgaatggtagcgggggtagtggatcatctggacctaaagctggggccgcagacaaaagcgccgtcgttgctgctgcagcccctgcctcggtggcagatgacacccccccccccgagaggagaaacaagagcggaattatttccgaacccctgaataagagtctgcgtagaagtcggccactctcgtag

SEQ ID NO: 113368 - DNA, 546 bp, synthetic construct
  misc_feature 1..546: note = Description of Artificial Sequence: Synthetic coding sequence
  source 1..546: mol_type = other DNA
atgtcgtcacttggaggtgggtctcaggatgctggcggttcaagtagttctagtactaatgggtctggcggttcgggtagctccgggcctaaggccggcgccgctgacaaaagcgctgtcgttgccgcggcagcaccagcctccgtggcagatgacacaccaccgcctgagcgtagaaataaatctggtattatttctgagccgttaaataagtccctgcggagaagccggcccctctcccactattcttccttcggcagttccggaggtagtgggggaggatctatgatggggggagaaagtgctgacaaagcaactgctgcagctgctgccgccagcctacttgcaaatggtcacgacctcgcagccgccatggccgtcgataagagcaaccccacttctaagcataagagcggagccgtcgccagcctcctgagcaaagcggaaagggctaccgagttagccgctgagggacagctgaccctgcagcagttcgcacaatcaacagaaatgctcaaaagggtggtgcaggagcacctgccctag

SEQ ID NO: 113369 - DNA, 252 bp, synthetic construct
  misc_feature 1..252: note = Description of Artificial Sequence: Synthetic coding sequence
  source 1..252: mol_type = other DNA
atgagttccctggggggggggagccaggatgccgggggaagctcctcgtcttccacaaacggcagcggtggaagcgggtcatcgggtcctaaagcaggcgctgccgataagagcgctgtggtggccgcagcggctccggcaagtgtggcagatgataccccaccacctgagcgccggaataagagcggaatcatcagcgagccgcttaataaatccctgagaaggtctcgccccctgtcacattacagttag

SEQ ID NO: 113370 - DNA, 486 bp, synthetic construct
  misc_feature 1..486: note = Description of Artificial Sequence: Synthetic coding sequence
  source 1..486: mol_type = other DNA
atgagctccttaggtgggggcagccaagatgctgggggctcttccagctctagcacaaacggttccggaggctcaggctcttcagggcctaaggctggggctgctgacaaatccgcagtcgtggctgctgcggccccagcctccgtggcagatgataccccaccgcctgaacgccgcaataagtctggtatcatctcggagcctttaaataagagtcttcggcgcagccggcccctctcccactactcctcctttggaagctctggtggaagtggaggcggcagtatgatgggtggagagtccgccgacaaagccaccgccgcagccgcagccgcatcattgctggcgaatggccatgatctggccgccgctatggccgtggataaaagtaatcctaccagcaaacacaagagcggcgcggtggcatctcttctgtcgaaggctgagagagcgacagagctggctgctgaagggcaactgacctag

SEQ ID NO: 113371 - DNA, 309 bp, synthetic construct
  misc_feature 1..309: note = Description of Artificial Sequence: Synthetic coding sequence
  source 1..309: mol_type = other DNA
atgtcttcgcttgggggcggtagccaggatgccggaggaagcagtagcagtagcaccaacggctctggcggctccgggagttctggacccaaggctggcgccgccgacaagtcggccgttgtcgctgccgctgcccccgcctctgtggccgatgacactcctcctccggagaggcgtaacaaatccggcataattagtgaacccctaaataagtccctgcggcgttcaagacccctgagccactattctagtttcgggtcctcaggtggatcaggcggcggttctatgatgggcggcgagtccgcttag

SEQ ID NO: 113372 - DNA, 36 bp, synthetic construct
  misc_feature 1..36: note = Description of Artificial Sequence: Synthetic coding sequence
  source 1..36: mol_type = other DNA
atgtccagcttaggagggggttcccaggacgcttag

SEQ ID NO: 113373 - DNA, 297 bp, synthetic construct
  misc_feature 1..297: note = Description of Artificial Sequence: Synthetic coding sequence
  source 1..297: mol_type = other DNA
atgtcttctcttgggggcggtagccaagacgccggggggtctagtagttcgtcgacaaacggcagcggtggatccggtagttccggtcctaaagccggtgcagccgataagagcgctgtggtcgctgcagccgccccagcatccgttgccgatgatactcccccacctgaacggcggaacaaatctggtattatcagcgagccactgaataaaagccttcggagatcaagaccgttgagtcactattctagcttcggatcctccggcggctctggtggcggttcaatgatgggctag

SEQ ID NO: 113374 - DNA, 969 bp, synthetic construct
  misc_feature 1..969: note = Description of Artificial Sequence: Synthetic coding sequence
  source 1..969: mol_type = other DNA
atgagtagtctgggtggagggtctcaagacgcagggggatcttcttcctcctccacaaatggatccggcgggagtggcagcagtggtccaaaggccggagccgcagacaagtccgccgtggtggctgctgctgcccccgcctctgtggctgacgatacccccccccctgagcgaaggaacaagtctggaattatctctgagcctcttaataaaagcctcagacgaagccgccctttatcacactactcctcctttggatctagcgggggctccggaggcggctccatgatgggaggagaatccgctgacaaggcgacggccgctgcagccgccgccagtctgctggccaatggccatgacttggcagccgcgatggccgtggataagagcaacccaaccagtaagcacaaatctggggcagtggctagcctgctgagcaaggcggaaagggccactgagctggctgccgaggggcagcttacgctgcagcagtttgctcaatcaaccgaaatgctgaaaagagtcgttcaggaacacctgccgctcatgtccgaagcaggagccggactccctgatatggaagctgttgccggagccgaggccctcaatggacagagcgattttccttacctaggggccttcccaattaatcctggtctgttcatcatgacgcctgcaggcgtattccttgccgagagcgctctccatatggccggactggccgagtaccccatgcagggggagctcgcttctgctatctcatctggcaagaaaaagcgcaagagatgcgggatgtgcgccccatgtaggaggaggattaactgcgagcagtgctcttcttgcaggaaccggaagacgggccatcaaatctgcaaatttcggaaatgcgaggagctgaagaaaaagccatccgctgccctggaaaaggtcatgcttcctactggcgcggccttcagatggtttcagtag

SEQ ID NO: 113375 - DNA, 594 bp, synthetic construct
  misc_feature 1..594: note = Description of Artificial Sequence: Synthetic coding sequence
  source 1..594: mol_type = other DNA
atgtcatctttgggaggaggatcccaggacgcagggggatccagctcaagcagcactaacggcagtgggggctccgggtcttccggtcctaaggccggggcagccgataagagtgcagtcgtggccgccgccgccccagcaagcgtggcggacgacacacctccgcctgaaaggagaaacaagtctgggatcatcagcgagcctctgaataaatctctcaggaggtctcggccactgagtcactactcttcttttggcagctctggcggcagcggtggcggctccatgatgggtggtgagagcgccgacaaggccaccgcagccgctgctgccgcgtctcttctcgccaacggccacgacctcgctgccgcaatggccgttgataagagcaatcctaccagcaaacataaatccggtgccgttgcgagcctgctatctaaagcagagcgcgcgaccgagcttgctgctgagggacagctcacgctccagcaatttgcgcaatccacagagatgctcaaacgggtagttcaagagcacttgccactgatgagtgaagccggggccgggctgcccgacatggaagcggtcgcttag

SEQ ID NO: 113376 - DNA, 27 bp, synthetic construct
  misc_feature 1..27: note = Description of Artificial Sequence: Synthetic coding sequence
  source 1..27: mol_type = other DNA
atgagttctttggggggcggaagctag

SEQ ID NO: 113377 - DNA, 222 bp, synthetic construct
  misc_feature 1..222: note = Description of Artificial Sequence: Synthetic coding sequence
  source 1..222: mol_type = other DNA
atgtctagcttggggggcgggagtcaagatgctggaggaagcagcagttccagcactaatggaagtggaggtagcgggagctctggccctaaggccggggccgctgataagtctgctgtggtggccgccgcggctccagcaagtgttgccgacgatactccaccccccgagagacgaaataagagcggcatcatctctgagccccttaataaatcactctag

SEQ ID NO: 113378 - DNA, 414 bp, synthetic construct
  misc_feature 1..414: note = Description of Artificial Sequence: Synthetic coding sequence
  source 1..414: mol_type = other DNA
atgagctctctcgggggcggtagccaggacgccggcggaagctcctccagcagcaccaatggttctggaggatcgggatcatccggacctaaagccggagccgcagataaaagcgcagtggtggctgccgccgctccggccagcgtcgccgacgatacacctcctcccgagaggcggaataaaagtggcatcattagcgaaccactgaacaaaagtctgagacggtctagacctctgtctcactactcctcgttcggaagttctggtggttcgggcgggggtagcatgatgggcggggagtctgccgacaaagcaacagccgcggcagctgccgccagcctgctggcgaatgggcacgatctggcagccgcaatggccgttgataagagtaacccaacctccaagcataagtag

SEQ ID NO: 113379 - DNA, 2073 bp, synthetic construct
  misc_feature 1..2073: note = Description of Artificial Sequence: Synthetic coding sequence
  source 1..2073: mol_type = other DNA
atgaagctgagcatgaaaaataatatcatcaatacacagcagtctttcgtcacaatgccgaatgtaatcgtacccgacatagagaaggagatcaggcggatggaaaacggcgcctgttctagtttctccgaagatgatgatagtgcaagcaccagcgaggaatctgaaaacgaaaatcctcacgcccgcggttccttctcatacaaatcccttcgtaaaggcggcccaagccagcgtgaacagtacctccccggggcgattgccctcttcaatgtgaacaacagtagcaataaagatcaggaaccggaagagaaaaaaaaaaagaagaaggaaaagaagtccaagtccgacgataagaatgagaataagaacgaccccgagaaaaaaaagaaaaaaaaggacaaagaaaaaaagaagaaggaggagaagtctaaggataagaaagaggaggaaaaaaaggaggtagtggtgatcgatcccagcggaaacacctattataattggctcttctgcatcactttgcctgtaatgtacaattggacgatggttatcgctcgcgcctgttttgacgagctccagagtgattatctggaatactggcttattcttgattatgtctccgacatcgtttaccttatcgatatgttcgtgcgcactagaactggatatcttgagcagggcctcctggttaaagaggaattgaaactgatcaataaatataagtctaacctacagtttaaattagatgtactctcgctcattcccaccgaccttctctacttcaaactggggtggaattaccccgagatacggctgaacagactcctgcggttttcaagaatgttcgaattctttcagcggactgaaactagaaccaactatccgaacatctttcgcatcagcaatctggtgatgtacatcgtcataatcatacattggaacgcatgtgtattttattcaatttccaaggccatcggttttggaaacgacacctgggtgtacccagacatcaacgaccctgaattcggaaggctcgcacggaagtacgtgtatagcctgtattggtctaccctcactctgacaacaataggggaaacgcctcctccagttcgggactccgagtacgtgttcgttgtagtagatttcctgatcggcgtcctcatcttcgcgaccattgtgggtaatattggctccatgataagtaatatgaacgctgctagggctgaattccaggctcgtatcgatgcaatcaagcagtacatgcacttcagaaacgtctctaaggacatggaaaagcgtgttattaagtggttcgactatctctggacaaataagaagaccgtcgacgaaaaggaagtgttgaagtacctgcccgacaaattacgtgctgagatagcaattaatgttcacctcgatactctgaaaaaagtgcgcatctttgcggactgtgaggcaggactgctggtggagctggttctgaaattgcaaccgcaggtgtattcgccaggtgactatatttgtaagaagggcgatattgggcgtgaaatgtacataattaaagagggaaagctcgcagtcgtagctgacgatggggtgacacagtttgtggtgctgagcgatggatcatatttcggtgagataagcattttaaacataaaaggttcaaaagcaggtaacagaaggacagccaacatcaagtcaatcggttacagtgacctgttttgtctttccaaagacgacctgatggaggctctgaccgagtatcccgacgcgaagaccatgctcgaggagaaagggaaacagatcctgatgaaggatggcctcctggatctgaacatcgcaaatgccggctctgaccccaaagacctcgaagaaaaggttaccaggatggaaggttctgttgacctcctacagacccgtttcgcacgcatcctggccgagtacgagagcatgcagcagaaactgaagcagcgcttaaccaaggtggagaagttcctcaagcccctaatcgataccgagttctcctccattgaaggccctggcgccgaaagtggaccgattgactctacctag

SEQ ID NO: 113380 - DNA, 2280 bp, synthetic construct
  misc_feature 1..2280: note = Description of Artificial Sequence: Synthetic coding sequence
  source 1..2280: mol_type = other DNA
atggaaagccgcagttccccgcggttggaatgtagcggggcaatttcagctcactgctcactgcatctgcccgattcatcagactttcaactgattttcgtatttcttgttgagatgggattccaccatgtagggcaagcggggctggaactgctaatttcaagtgatctgccaacctccgctagccagtccgcaggcatcacggacatgaaattaagcatgaagaataatatcataaatactcagcaatctttcgtgaccatgcctaacgtgatagtacccgatatagaaaaggaaatcagaagaatggagaacggcgcctgttcctcattctccgaagatgacgattcagccagtacttccgaagaaagcgagaacgagaatccacacgcgagaggcagttttagctacaaaagtttgcggaaaggcggacccagtcagagagagcagtacctccctggcgcgatcgccttgttcaacgttaataatagtagtaataaagaccaagaaccagaggaaaagaagaagaagaaaaaggagaagaaatcaaagtccgacgataagaatgagaacaaaaacgacccagagaaaaagaaaaaaaagaaggataaagagaagaaaaaaaaggaggagaagtcgaaagataagaaggaggaggagaagaaggaagtggtggtgatcgacccgtctggcaacacatactacaactggttgttttgcataacactgcctgtcatgtacaattggacgatggttattgcaagagcctgctttgatgaactccagtccgactatctcgagtactggctgatactcgattacgtgagcgacatcgtgtatcttatagatatgtttgtcagaacccgcactggttaccttgagcagggccttcttgtgaaggaagagctgaagctaattaacaagtataaatccaacctccagttcaaactggacgttcttagcctaataccaacagacctgctgtactttaagctgggatggaattatcccgagatccgcttaaatagattgttgcggttctctaggatgtttgaattcttccagcggaccgaaacccggacaaattaccccaatatcttccggatcagcaacctcgtgatgtatatcgttattattattcattggaatgcctgcgttttctactcaatcagtaaggccatcggcttcggcaatgatacatgggtttatcctgacattaacgatcctgagtttggaagactggcacggaaatatgtttactccctgtattggagcaccttgactttgactaccatcggggaaactccacctcccgtgcgtgactccgaatatgtattcgtggtggtggacttcctgatcggcgtgctcatctttgccactattgtcggcaacattggatctatgatttcaaatatgaacgcagcacgcgccgagttccaggcgcgaattgatgccataaaacagtacatgcattttcgtaatgtttcaaaggacatggaaaagagagttatcaaatggttcgactacctatggaccaacaagaaaacagtagacgagaaggaagttctgaaatacctgccagacaagctgagggccgaaatcgctatcaacgtgcacctggatacactgaagaaggtcaggatatttgccgattgtgaagccggactgcttgtggaactggtgcttaagctccaacctcaagtgtacagtcctggcgactacatctgtaagaagggagacatcggtcgcgaaatgtatattatcaaggaagggaaactcgccgtggtggccgatgacggcgtcacacagtttgtggttttatccgatgggtcctacttcggggaaatttctatcctgaatattaagggaagtaaggccggcaatcggcggacagccaatataaagtctattggatactcagatctattctgcttgagtaaagatgacctgatggaagcattgactgagtaccccgacgctaagactatgcttgaggaaaaaggtaaacagatcctgatgaaagatggacttctggacctgaacatcgctaacgctgggagcgacccaaaagacctcgaggagaaagtgacacggatggagggcagtgtggacttgctgcagacacgtttcgctcggatcttggcagaatacgaatcaatgcaacaaaagctgaagcagaggctgaccaaggtggagaagtttctgaaaccattgatcgacactgaattttcctctattgagggtcccggagcagagtccgggcccatcgactcgacatag

SEQ ID NO: 113381 - DNA, 2073 bp, synthetic construct
  misc_feature 1..2073: note = Description of Artificial Sequence: Synthetic coding sequence
  source 1..2073: mol_type = other DNA
atgaagctcagcatgaaaaacaacatcattaatacccaacaaagcttcgttacaatgcctaatgtaattgtgcctgatatagaaaaggagataagacggatggaaaacggagcctgtagtagtttcagcgaagacgatgactccgcctcaacctctgaagaaagtgaaaacgagaacccacatgctcggggatcgttttcctataagagcctgaggaaaggtggacccagtcaaagagaacagtacctgcctggggctatcgcactctttaacgtcaataacagtagcaacaaagatcaagagccggaagagaaaaagaaaaagaaaaaggagaaaaaatccaagtcggacgacaaaaacgagaacaaaaatgacccagaaaagaaaaagaaaaagaaggataaggagaagaaaaagaaggaagagaaatccaaagataaaaaggaagaggagaagaaggaggtggtcgtcatagatcccagtgggaatacatattataattggttgttctgcataacactgccagtgatgtataattggacaatggtgatcgcccgtgcctgtttcgatgagctgcagagcgactatctcgagtactggctgatcctggactatgtcagcgatatcgtgtatctgattgatatgttcgtgaggactagaactggctatttggagcagggcttactggttaaagaggagcttaaattgattaacaaatacaaatccaatcttcagttcaagcttgacgtgttaagtctcattcctacagacttgctgtattttaagctcggctggaattacccagaaatccgactcaaccgcctgctgaggttcagcaggatgtttgagttttttcagcgaaccgagaccagaaccaattaccccaatatatttagaatctctaatctcgttatgtatatagtcatcataatccactggaacgcatgcgttttttactctatttcaaaggctattggttttgggaatgatacatgggtgtatccggatattaatgatcccgagtttggtcggctggcccggaagtatgtgtattccctatattggtccactctgaccctaacgaccattggagagactccccccccagtgcgagatagcgaatatgtgtttgtggtggttgatttcctcataggggtgttgattttcgctactatcgtgggaaatatcggctcaatgatctctaacatgaatgccgctagagcagagttccaggctcgaatagacgcgataaagcaatacatgcattttcgcaacgtttctaaagatatggaaaagagggttatcaaatggttcgattacctatggaccaacaagaaaacggttgatgaaaaggaggtccttaagtatcttccagataagttacgggcagaaattgccatcaatgttcatttggacactctcaagaaagtgaggatatttgccgactgtgaggctgggctgctggttgaactcgtgctgaagctccagcctcaggtatattcccctggggactacatctgcaaaaaaggggatatcggcagagaaatgtatattataaaagaggggaaactcgcagtggtcgccgatgatggcgtgactcagttcgtagtattgtccgacggatcatacttcggtgagatctcaatcctcaacatcaaggggtctaaggcaggcaaccgcagaacggcaaacattaaatcaatcggttattctgacctcttctgcctgagcaaagacgatctcatggaagcccttactgagtatcctgacgcaaagaccatgctcgaagagaagggcaagcagatactcatgaaagatggcctccttgacctcaacattgctaacgccggatctgatcctaaggacctagaggagaaggtgacacgcatggaaggttcggtggacttgctacaaactcgatttgcccggatcttggcagagtacgagagtatgcagcagaaactcaaacagaggttaactaaggtcgagaagtttctgaagcctttaattgacaccgagtttagtagtatcgagggcccaggcgcggagagcggccctatagattccacctag

SEQ ID NO: 113382 - DNA, 387 bp, synthetic construct
  misc_feature 1..387: note = Description of Artificial Sequence: Synthetic coding sequence
  source 1..387: mol_type = other DNA
atgaagttatcaatgaagaacaacataatcaatacacagcagtctttcgtgaccatgccaaatgtgatcgtgcccgacatcgagaaggagatcagaaggatggagaacggggcttgttctagcttctccgaggacgacgatagtgcctccactagtgaagaatcagaaaacgagaatccacatgcgcggggaagctttagttataagtccctgcggaaaggggggccctcccagagagagcagtacctccccggagccatagcgctgttcaacgtcaacaacagcagcaataaagaccaggagcccgaagaaaaaaaaaagaaaaagaaagaaaaaaaaagcaagagcgacgataaaaacgaaaacaaaaacgaccctgagaagtag

SEQ ID NO: 113383 - DNA, 300 bp, synthetic construct
  misc_feature 1..300: note = Description of Artificial Sequence: Synthetic coding sequence
  source 1..300: mol_type = other DNA
atgaagttgtccatgaaaaacaacatcatcaatacacaacagtcatttgtcacgatgccgaatgtgattgtgccagatatcgagaaggaaataagacgcatggaaaatggggcctgctcttctttcagcgaggatgatgacagcgctagcacatcagaagagtccgaaaacgaaaacccgcatgcgagggggtctttcagctataagtcactgcggaaggggggaccgtcccagagagaacagtacctgccaggcgctatcgccctctttaatgtgaataatagttcaaacaaagattag

SEQ ID NO: 113384 - DNA, 2073 bp, synthetic construct
  misc_feature 1..2073: note = Description of Artificial Sequence: Synthetic coding sequence
  source 1..2073: mol_type = other DNA
atgaaactgagcatgaaaaacaacatcatcaatacacaacaatccttcgtgactatgcccaatgttatcgtgccagatattgagaaggagattaggcggatggaaaacggggcgtgttcttctttcagtgaggatgatgattccgccagtaccagcgaggagagtgaaaacgagaatcctcatgcccgtggtagcttttcctacaagagtctcaggaaggggggcccttctcagcgggagcagtatctgcccggagccatagcactcttcaatgtgaacaatagttctaataaggaccaggaaccggaggagaaaaagaagaaaaaaaaggagaagaaatcaaaaagtgatgataaaaatgaaaacaaaaatgatcctgagaaaaagaaaaagaaaaaggacaaagagaagaaaaagaaggaggaaaagtctaaggacaaaaaggaagaggaaaaaaaggaagtcgtggttattgatccttctggcaatacctactataactggctcttctgcattaccctgcccgtgatgtataactggaccatggtgatagccagggcatgcttcgacgagttgcagtcggattatcttgagtattggctcattctggattacgtcagcgatattgtgtacctgattgatatgttcgtacgaacccggaccggctacctagagcaggggctcctggttaaagaagaattgaagcttatcaacaaatacaagtcaaatctgcaatttaaactggacgttttgtcactgatacccactgaccttctttatttcaagctggggtggaactatcccgagattcgcctgaaccgactgctcagattcagtcggatgttcgaattcttccagagaacggaaaccaggacaaactaccctaatatcttccggatctccaaccttgtgatgtacatcgtgatcatcatccattggaacgcttgcgtgttctatagcatttccaaagcaatcgggtttgggaacgacacatgggtttaccctgatatcaacgacccggagtttggccgactcgctcgcaagtatgtgtattctttgtactggtccacgctgaccctgactaccataggtgagacacctccgcccgtacgcgattcagagtacgtattcgtggtggtggactttcttatcggcgttttgattttcgcaactatcgttggcaatataggatccatgatctcaaacatgaacgccgcacgagccgagtttcaagcacgtatagatgctattaagcagtacatgcactttcgcaacgtgtccaaggacatggagaaacgggttattaagtggttcgattacttatggacgaataaaaaaacagtggacgagaaggaggttctgaaatacctgcctgataaactgcgagcagagatcgccatcaatgttcatttggacacccttaagaaggtgcgcatcttcgctgactgtgaagctggcctcctggtagaattggtgctgaaacttcagccacaagtgtatagccctggagactacatctgcaagaaaggggacatcggacgggagatgtacatcattaaggagggcaaactcgcggtggtggccgacgatggcgtgacccagttcgtggtactgtccgatgggtcctatttcggagagatatcaatccttaacatcaaaggctccaaggccggtaatcgaaggactgccaatattaaatccattgggtattcggatctcttctgcctgagtaaagacgatcttatggaagctctcacagaatatcccgatgcaaagacaatgctggaagaaaaaggaaagcagattttgatgaaggatgggttgctggatctcaacattgcgaatgctggctccgacccaaaggatctggaagaaaaagtgacccggatggaaggctcagttgacctgctgcagactcggtttgcacgtatcttggcagagtacgagtcaatgcaacaaaagttgaaacagcgcctaacgaaggtcgagaaattcctgaaacccctgatcgataccgaattcagcagtatcgagggacccggcgccgaatctggaccaattgatagcacctag

SEQ ID NO: 113385 - DNA, 300 bp, synthetic construct
  misc_feature 1..300: note = Description of Artificial Sequence: Synthetic coding sequence
  source 1..300: mol_type = other DNA
atgaagctcagtatgaaaaacaacattatcaacacccagcagtccttcgtcacaatgcccaacgttattgtcccggacattgagaaagaaattcgaaggatggagaatggtgcgtgctcctcattctccgaggacgacgactctgcctccacatctgaagagtccgagaatgagaaccctcatgctagaggctcattttcttataaatcactgcggaaggggggcccaagtcaacgcgaacagtacttacccggagcaattgcgctgtttaacgtgaataactcatccaataaggactag

SEQ ID NO: 113386 - DNA, 2073 bp, synthetic construct
  misc_feature 1..2073: note = Description of Artificial Sequence: Synthetic coding sequence
  source 1..2073: mol_type = other DNA
atgaagctgagtatgaagaacaacatcattaacactcagcagagctttgtaacgatgccaaatgttatcgtccctgacattgaaaaagaaattaggagaatggagaacggggcgtgttcctctttcagtgaggatgatgattcagcatctacatcggaggagtctgagaacgagaatccccatgctaggggtagcttcagttacaaaagtctgcggaagggcgggccctctcaacgagaacaatatctgccgggagcaattgccctgttcaacgttaacaactcttctaataaagaccaggaacctgaggagaaaaagaagaaaaagaaagagaaaaaatccaagagtgacgacaaaaacgagaataagaacgaccctgaaaagaagaaaaagaaaaaagacaaggagaaaaagaaaaaggaggagaagtccaaagacaagaaggaagaggagaagaaggaggtggtagtcatagatccttccggaaacacctattacaactggctgttctgcatcacactccccgtgatgtacaattggaccatggtgatagcaagggcctgcttcgacgagctgcagtcagattacctcgaatattggctcatcttagactatgttagtgacatcgtgtacttgattgacatgttcgtgcggacacgcactggctatctagagcagggactgctggtgaaggaggagctgaaattaatcaataaatacaaatcaaatctgcagtttaaactggatgtgctgagtttaattcccacagacctgctatactttaagctggggtggaattaccccgagattcgcctcaacagattactgcgcttcagccgtatgtttgagttctttcagcgaaccgagacgcgaaccaattaccccaatatctttaggatcagcaacctcgtgatgtatattgtgattattatccactggaacgcttgcgtcttctattcgatttccaaagcaatcggttttggaaatgacacatgggtatacccggatattaacgatccagagttcggcagactcgccaggaagtacgtttactctctatattggagtaccttgaccctgacaacgattggggaaacacccccccccgtgcgagatagcgagtacgtgtttgtagtcgttgattttctgataggagtgttaatctttgctactatcgtgggtaatataggctctatgataagtaatatgaacgccgctcgggccgaattccaggccaggatcgacgccatcaagcagtatatgcactttagaaatgtaagtaaagacatggagaaacgggtcattaaatggttcgattatttatggactaacaaaaagaccgttgacgagaaggaagtcctgaagtacctcccggacaaactaagagccgagattgctatcaacgttcaccttgatacactcaaaaaggtgcgaatttttgcggattgtgaagctggcctgctggtggaactggtactgaaactgcagccgcaggtttattctccaggcgattacatatgcaagaagggagatattggccgcgagatgtatattatcaaagagggcaaattggccgtcgtcgctgacgacggagtgactcagtttgtggtcctgtccgatgggtcatattttggcgagatatctatcctgaatatcaagggaagtaaggcaggcaaccgtaggacagcaaacattaagtctataggttattctgacctattttgcttgtctaaagacgacctcatggaagccctgactgagtacccggacgccaaaaccatgttggaggagaaaggaaagcagattctgatgaaggacggcctgctcgacctgaacatagccaatgcaggctccgaccctaaggacctcgaagagaaggtaacacggatggagggtagcgtcgacctacttcaaacacgcttcgcccgcattctggcagaatatgaatctatgcaacagaagctgaagcagcgactcactaaagtagagaaattcctgaagcctttgatcgatactgaatttagttcaattgagggcccaggtgctgagtcaggccctattgatagcacctag

SEQ ID NO: 113387 - DNA, 1995 bp, synthetic construct
  misc_feature 1..1995: note = Description of Artificial Sequence: Synthetic coding sequence
  source 1..1995: mol_type = other DNA
atgaccgagaagactaacggggtgaaatctagtccggccaacaaccataatcaccatgctcctccagctattaaggccaatggtaaggacgaccatcgcacatcctctcggcctcactccgctgcagacgatgacacctcaagcgagctacaaagattggccgatgtcgacgccccgcagcaggggcgatcaggctttcgtcggattgtgcgtctcgtcggtataatcagggaatgggccaataagaatttccgcgaagaggaaccgagaccggatagttttctcgaacggttccgtggaccagaactccagactgtgacaacccaggagggagatggaaaaggcgacaaagatggcgaggacaagggtacgaagaagaagttcgagttatttgtccttgatcctgcaggggattggtattactgttggctattcgtgatcgccatgcccgtcttgtacaactggtgcctgctggtggcacgggcttgctttagtgatttgcaaaaaggatattatttggtctggctggttctggattatgttagtgacgtggtatacatagccgacctgtttataagacttaggacaggattcctggaacaagggctgttagtgaaggacaccaagaagctgcgtgacaactatatccacactctgcagtttaaactggacgtggcctccatcatacctacagatctgatctatttcgccgtcgatattcactcgcccgaggtccgctttaatcgcctactgcactttgctcgcatgttcgagttcttcgaccggacagagacgcgcacaaactatcctaatatattcaggatctctaacctggtactgtacattttggtgatcatacactggaatgcatgcatatattacgccataagcaaaagcattggatttggagtcgatacctgggtgtatccaaacatcacagatcccgaatatgggtacctcgcccgagaatacatatactgtctctactggagcacactgacacttactacgataggagagacaccacccccagtcaaggacgaggagtacctgttcgtgatctttgacttcttgatcggggtgctgatctttgccaccatagtcggtaacgtgggcagtatgatcagtaacatgaatgcaaccagggccgagttccaggcaaagatagacgctgtgaaacattacatgcagtttcgcaaggtcagcaaaggcatggaagctaaagttattcgctggtttgactatctgtggacgaataaaaaaaccgtggacgagagggaaattcttaagaatctcccagctaaactccgggcggagatcgccattaatgtccacctctcaacacttaagaaagtaagaatcttccacgactgtgaggccgggctgctggtggaactggtcctcaagctgaggcctcaggttttcagccccggtgattatatctgcagaaagggggatatcggaaaggagatgtatatcattaaagagggaaaactcgcagtcgtcgctgatgacggcgtcactcagtacgcgctgttgtcagctggcagctgtttcggtgagatcagtatacttaacatcaagggttctaaaatggggaataggaggaccgccaatatccgctctcttgggtatagcgacctgttttgccttagtaaggatgatctgatggaagcggtcacagaatatccagatgccaagaaggtcctggaggagagagggcgggagatactgatgaaagaaggacttctcgacgagaatgaagtagctacttctatggaggtggatgtccaggaaaagctcggacaacttgaaactaacatggagaccctatacacccgcttcggcagactgctggctgaatacaccggtgcccagcagaagctgaagcagcggatcaccgtcctggagaccaaaatgaagcagaataacgaggacgactacctttcagatggtatgaattcaccggagctcgccgcagcagatgaaccttag

SEQ ID NO: 113388 - DNA, 2085 bp, synthetic construct
  misc_feature 1..2085: note = Description of Artificial Sequence: Synthetic coding sequence
  source 1..2085: mol_type = other DNA
atggcaaagattaacacccagtatagtcatccgtcacgaacccatctgaaggtgaaaaccagtgaccgtgacctaaacagagccgagaatggactgtcgagagcccatagctctagcgaagaaaccagttcagtactccaacctggtatcgccatggaaacaaggggactggcggattccggccagggctcctttactggccagggaatcgcgagactgtctcgattaatcttcctgttacgcaggtgggccgccagacatgtgcaccaccaagaccagggaccagatagctttcctgatcgcttccggggagctgagctgaaagaggtttcttcacaggaaagcaacgctcaagctaatgttggttcacaggagcctgccgacagggggaggtcagcatggcccctggcaaagtgtaacaccaatacctccaataatactgaggaggagaaaaagactaagaagaaagacgccattgtggtggatccgagttcaaacctgtactataggtggcttaccgctatcgcgctcccagtattctataactggtacctgcttatctgccgggcctgttttgacgagctacagtccgagtacctgatgctgtggctggtgttggactacagcgccgatgttctctatgtgctcgatgtgctcgtaagggcccggaccgggttcctggaacaggggctgatggtctccgacacgaatcggctgtggcagcattataagacaacaacccagtttaaattagatgttctttcgctggtcccaacagacctggcatatcttaaggtgggaaccaattatcctgaggtgaggtttaacagattgcttaaattctcccggctcttcgagttcttcgaccggaccgaaactagaacaaattacccaaatatgtttaggatagggaacttggtgctatacattctcatcatcatccactggaacgcctgcatatacttcgccatctctaagtttattgggtttggcaccgatagttgggtctaccccaatatttctatcccagagcacggaaggctaagccgcaaatacatatattccctctactggtcaaccctgactctgaccacaatcggggagaccccccccccagtgaaggatgaggagtatctattcgtggtggtggattttttggtcggcgttttgatctttgctactatcgtaggaaacgtggggtctatgatcagcaatatgaacgcatctcgcgcagaattccaggctaaaatcgacagcataaagcagtacatgcaattcagaaaagtgactaaagatttggaaacaagggtcatcaggtggttcgactatttatgggctaataaaaaaactgtggatgaaaaggaagtgctcaagtcactgcctgataaattaaaggcagagatagctattaatgtacatctggacacacttaaaaaggttaggatttttcaggattgtgaggcgggcttgctggtcgaactcgtgctgaagttacgacctactgtgttcagtcccggagattatatctgtaagaagggcgacatcggtaaagagatgtacataattaacgaggggaaactggccgtagtcgccgacgacggtgtgactcagttcgtcgttctgtctgacggatcttattttggcgagatcagcatcctgaacattaagggaagtaaaagcggtaacaggagaacggctaatatcaggtccatcggatactcagacctgttctgtttgagcaaggacgatctgatggaagcccttacagagtaccctgaggccaaaaaggccctggaagagaagggaagacagatcctgatgaaagataatttaatcgacgaagaactggcacgggctggagccgaccccaaagacctggaggagaaggtggaacaactcggcagcagtttggacactttgcagacccgcttcgcccgtcttctagcagaatacaatgcaacacaaatgaaaatgaaacaacggctttcacagctggagtcacaggttaagggtggcggcgacaagccccttgccgatggagaggtccctggcgacgccaccaaaacggaggacaagcaacagtag

SEQ ID NO: 113389 - DNA, 2085 bp, synthetic construct
  misc_feature 1..2085: note = Description of Artificial Sequence: Synthetic coding sequence
  source 1..2085: mol_type = other DNA
atggccaagatcaacacacagtactctcatccttcccggactcacttaaaagtcaagaccagcgatagagaccttaatcgcgccgagaacggtctgtcgcgggctcattcctcctctgaggagacgagtagcgtgcttcagcctggcattgccatggagacccgcgggttggccgacagtgggcaaggatcctttactgggcagggcattgcacgcctctctaggctgatattcttgttgcgcagatgggccgcccggcacgtacatcaccaggaccaggggcctgacagctttccagacagatttcggggggcagagcttaaagaggtcagctctcaggaatcgaatgctcaggctaacgttggttcacaagaacctgccgatcgagggaggagcgcttggccactggccaagtgtaatactaacaccagtaataatacagaagaagaaaagaaaacaaagaagaaagacgcgatcgtggtcgatccatcatccaatctttactaccggtggctgacagccattgctctacctgtattttataattggtacttgttgatttgtcgggcatgttttgatgagttgcagtctgaatacctgatgctctggttggtgttagactattctgccgatgtactctacgtgttggatgtcctggtccgagcccgaaccggctttctcgagcaaggcctgatggtgtcggacactaacaggctgtggcaacactataaaacaactacgcagttcaaactcgatgtactctccctcgtgcccaccgatctcgcgtatctcaaagtgggtaccaattatccagaagtgagattcaatcgccttctcaagtttagccgcctgtttgagttctttgatcggaccgaaactcgcacaaattaccccaatatgtttcggattggaaacttggtgctatacatcttaataattatccattggaacgcctgtatctatttcgcaatcagtaagtttatcggcttcggtactgattcctgggtctatccaaacattagcatcccagagcacggcagactttcccggaagtatatttattcactctactggagcactctgacactaaccacgatcggtgaaacgccgcctccggtgaaggacgaagaatatctgtttgtggttgtggacttcttggttggcgtgttaatctttgccaccatagtggggaacgtcgggtctatgatatcaaatatgaacgccagtagggccgaattccaagccaaaatcgattccataaaacagtacatgcagtttcggaaagtaactaaagatctggaaactagagtcatcaggtggttcgattatctctgggctaataagaaaactgtcgacgagaaggaggtgctaaaatccctcccagacaagctgaaggccgaaatcgcgatcaatgtccatctggacacattgaaaaaagtgcggatcttccaggattgcgaagcaggactactcgtggagctggtcctgaaactccggccaaccgtgttcagccctggcgattacatctgcaagaaaggtgacataggaaaagaaatgtatatcatcaacgagggcaagctggccgttgtagccgacgatggggttacccagtttgtcgtattgtcagacggctcatactttggggaaatctccatactaaatatcaaagggagcaaatccggaaacaggaggactgccaacattcggtcaattggctactcggacctgttttgcctgagcaaggacgatctgatggaggcactgaccgaatatcctgaagctaaaaaagctcttgaggagaagggcagacagatcctcatgaaggacaatttaatcgatgaggaacttgcccgcgccggagccgacccgaaggacctcgaagaaaaagtcgagcaattagggtcttcactggacacactgcagacacggtttgctcgccttctggcagaatataatgcaactcaaatgaagatgaagcagagattgagccagctggagagccaggtaaaaggtgggggcgataaaccactggctgacggagaagtccctggggacgctaccaagactgaggataaacagcagtag

SEQ ID NO: 113390 - DNA, 2031 bp, synthetic construct
  misc_feature 1..2031: note = Description of Artificial Sequence: Synthetic coding sequence
  source 1..2031: mol_type = other DNA
atggctaagataaatacacagtacagtcatccttcccggacccacctcaaggtgaaaacgagtgatagagatttgaatcgggctgaaaacgggttatcacgcgcacattcttcgtccgaggaaactagcagcgtgctgcagcccggtattgccatggagacgagaggcttggccgattcaggacaaggatcctttaccggccagggcatcgccagactttcaagactaatttttcttttgcgcagatgggccgctcgtcatgtacaccaccaagaccaagggcctgatagcttccccgaccgattccgcggtgcggaactgaaagaagtgtccagccaggagtcgaatgcgcaggccaatgtgggttcgcaggaaccagctgacagaggccgaaggaaaaaaactaagaagaaagatgctatcgttgttgacccctcctctaatctctactacaggtggcttacagccattgcgctccccgtgttttacaactggtatctgctcatctgtagggcctgctttgacgagctccagagcgaatacctcatgctctggttggtgctggactacagcgccgacgtactctacgttttggatgtcctagtgcgggcccggaccgggttcctggaacaggggctcatggtcagtgacaccaatcggctctggcaacactacaagaccactacacagtttaagcttgatgtgctgtcactcgtgccaactgatcttgcttacctgaaggtgggaacgaactatcctgaggtgcgattcaaccgacttttgaagttctccaggctgttcgagttttttgacagaactgaaacccggacaaactatcccaacatgtttaggataggaaatctcgtgctttatatccttatcatcatccactggaatgcctgcatttacttcgccataagtaaattcatcggattcggaaccgactcttgggtttacccaaatatttctatcccggagcacgggagactgtcaaggaaatacatctacagcctgtactggagtactttgacgcttaccactattggagaaactccgccacccgtaaaggacgaagagtatctgtttgtggtggtggacttcctcgtgggtgtgctgatttttgcaactattgtggggaatgtgggttccatgatcagcaacatgaatgcttccagagctgagttccaagccaagattgattccatcaagcagtatatgcagttcaggaaggtcaccaaggacctggaaactagagtcatcaggtggttcgactatctgtgggctaataagaaaactgttgacgaaaaagaggtactcaaatctcttcccgacaagctcaaggccgagattgccatcaatgtacatctggacactctgaaaaaagttcggatctttcaagattgtgaggctgggctgctcgtggaactcgtactgaaacttcgcccgaccgtgttctccccaggtgactacatttgtaaaaaaggtgatataggaaaggagatgtatattatcaatgagggcaaactggcagtcgttgctgatgacggcgtcacacagtttgtagtgctgtcagacggttcctacttcggcgagatttctatcctaaatatcaagggcagcaagagcggtaaccgcagaaccgccaacatacgaagcatcggatatagcgacttattttgtttgtcaaaagatgatcttatggaggcactgactgagtatcctgaggctaagaaagcactggaggagaaaggccgccaaattttgatgaaagacaatctgattgatgaagagttggcacgagcaggtgctgaccccaaggacctggaggagaaagtggaacaactgggaagctccttggacacgctgcagacacggtttgcccggctcctggccgaatataacgccactcagatgaaaatgaagcaaagattgtctcaattagaatcccaagtcaagggagggggagataaacccctggctgacggagaagtcccgggcgacgccactaaaactgaggataaacagcagtag

SEQ ID NO: 113391 - DNA, 3756 bp, synthetic construct
  misc_feature 1..3756: note = Description of Artificial Sequence: Synthetic coding sequence
  source 1..3756: mol_type = other DNA
atgctgggctgggtccagagagtcttgccgcagccacccggcacgcctagaaaaacaaaaatgcaggaggaggaggaggtggagcccgagcctgagatggaggctgaggtggagccagaacccaacccagaagaggccgaaaccgagtccgaaagcatgccccctgaagagtccttcaaggaggaggaagttgccgtagcagatccctccccccaagaaacgaaggaagcagccttaacttcaacaatcagtctcagggcacagggggcagagatttctgagatgaatagccccagccgaagagtcttaacatggctcatgaaaggcgttgagaaagttattccccagcctgtgcacagcataacggaagatcccgcccagatactagggcatggtagcacaggagatacgggctgcactgatgaacccaacgaggctttggaagcgcaggacacgcgcccaggcctccggctgctgctctggctggaacagaacctcgagcgcgtgctgccccagcccccaaagagcagcgaggtatggagggacgagcccgcagtagccactggcgccgcctccgatccagccccaccgggccgaccacaagaaatgggccctaaactccaggccagagagacgcccagtttgcctactccaatacccctgcaacctaaagaagagcccaaggaggctccagctccggagccacagcccggaagccaggcgcagacaagtagtttgccacctacacgagatcctgccaggcttgttgcgtgggtcttacatcgcctggagatggccctgccgcagcccgtgttacacggcaaaattggcgagcaggaacccgattctccagggatatgtgatgtccaaaccatttccatccttccaggtggccaggtagagcccgacctggtcctagaagaagtagagcccccttgggaagacgctcaccaagatgtctccactagcccgcagggaaccgaggtggtgcctgcttacgaagaagaaaataaagctgtggaaaagatgccccgcgaactgtcccgcattgaagaggagaaggaagatgaggaagaggaggaagaagaggaggaggaggaagaggaagaagaagtcaccgaggtgctgctggacagctgcgtggtatcccaggtgggggtcggccaatcggaagaagacggcactcgtccccagtctacatctgatcagaagctttgggaggaggtaggcgaggaggccaagaaggaggcagaagagaaagccaaagaggaggccgaagaggttgctgaggaggaagccgagaaggagccacaagactgggccgagacaaaagaagagcctgaagccgaggccgaggccgctagctcgggcgttcctgccaccaaacagcatcccgaggttcaggtggaagataccgacgccgacagctgtcccctcatggctgaggagaaccctcccagcaccgttctgcctccaccaagcccggccaaatccgataccctgattgtcccctcttccgcatccggaacccataggaaaaaactccccagcgaggacgacgaggctgaggaacttaaagccctgtcccctgccgagtcgcctgtggtcgcctggtctgatccaactacaccgaaagataccgacggccaggacagggctgcctctaccgcgtccaccaatagtgcaatcataaacgaccggctgcaagaattggtgaaactattcaaggaacggacagagaaagtcaaggaaaagcttattgacccagacgttaccagcgatgaagaatctcccaagccttcccctgccaaaaaggcaccagagcctgcaccagacactaaacctgctgaggcggaacccgtagaggaggaacattactgcgacatgctgtgttgcaagtttaaacaccggccctggaaaaagtaccagtttccacaaagtatcgatcctctgacaaatctgatgtatgtgctctggttattcttcgtggtgatggcttggaactggaactgttggcttattccagtcaggtgggccttcccgtaccagaccccagataatattcaccattggttgctgatggactacctttgtgacttaatttactttttggacataaccgtctttcagacacggttgcagtttgtcaggggaggagacatcataaccgataagaaggatatgagaaataactacctcaaatctcgtagattcaaaatggatctattatctctcttgccattggacttcctctacctcaaagtgggcgtgaatcccctattgcggctgccaaggtgcctgaagtatatggcctttttcgagtttaattcacggttagagtcaatcctgagcaaggcctacgtttaccgcgtcattaggaccaccgcatacctgctgtacagtcttcatctgaacagctgcctgtactactgggccagcgcataccagggcttaggatctacacactgggtctatgatggcgtggggaattcctacatcaggtgctactacttcgccgtcaagactctaatcacaatcggtggcttgcccgatcccaagaccctgttcgagattgttttccagctcctgaattacttcactggtgtcttcgcctttagtgtgatgatcggtcagatgcgggacgtggtgggagctgccacagctgggcagacctattacagaagctgcatggatagcaccgtaaagtacatgaatttctataagatacccaagtctgtgcaaaatagagtcaaaacatggtacgaatatacctggcactctcagggtatgctcgatgaaagtgagctcatggtccaactgccggacaagatgcggttagatctagcaattgacgtgaattacaatatcgtgtctaaggtagcactgttccagggttgtgaccggcagatgattttcgatatgctgaaaaggctccgctccgttgtatatctgcctaatgactacgtatgtaagaaaggcgaaattggacgtgagatgtacatcattcaggctggccaggtccaggtgctgggagggcccgacggaaaatcagtcttggtcactctcaaggcaggttctgtttttggagaaatctcattgctggcggtgggggggggcaaccgccgcacagccaacgtcgtggctcacggcttcaccaatctattcatcctagacaaaaaagacctcaatgaaattctggtgcactatcccgagagtcagaagctgctccgaaagaaggctcgcaggatgttgcgctccaataataagcccaaggaggagaagtcggtcttgatcctacccccccgagcgggaacacctaaactcttcaacgcagctctggccatgacaggcaaaatgggggggaaaggtgccaaaggtggaaaattggcccacttgcgggcgagactgaaggaactggccgccttggaagccgcagccaaacagcaagaactcgtggagcaggctaaatcatctcaggatgttaagggtgaggaggggtcggccgctccagaccaacatactcacccgaaggaagctgccacggaccctcctgcgcctcgcacacccccagagccccccgggtcccccccatccagccctccacccgccagcttgggaaggcctgagggggaagaggaaggtcctgctgagccagaggagcatagcgtccgcatttgtatgagtcccgggccggagcctggagagcagattctctctgtaaagatgcccgaggaacgcgaggaaaaagccgagtag

SEQ ID NO: 113392 - DNA, 900 bp, synthetic construct
  misc_feature 1..900: note = Description of Artificial Sequence: Synthetic coding sequence
  source 1..900: mol_type = other DNA
atgctggggtgggtgcagcgggttcttcctcagccgccggggactccgcggaaaaccaaaatgcaggaggaggaagaggtagagcccgaacccgagatggaagccgaggtcgagcccgaaccaaaccccgaggaggctgagacagaaagcgaaagtatgccccctgaagaaagtttcaaagaagaggaggttgcagtcgctgacccctcaccacaggagacaaaagaagccgctctgacttctacaatctcattacgagcacagggcgcagaaatttccgagatgaactctccatccagacgggtgctaacttggttgatgaaaggagttgagaaagtgatcccacaacccgtgcatagtattactgaggacccggcgcagatcttgggccatggatctaccggggataccggctgtacggacgagccaaatgaggcactggaggcacaggacacgagacctggactacgactgctattgtggctggagcagaatttagaacgtgtgctccctcaacctcctaaaagctccgaagtgtggcgcgatgaacctgcagtggccaccggagcagcttccgaccccgcaccaccggggagaccccaggaaatgggcccaaagttgcaagcccgcgagaccccaagtctccccactccaatccccctgcagcctaaggaggagcctaaagaggcccccgctccagagccccagccggggagtcaggctcaaacctcctccctccctcctacaagggatcctgcaaggctcgtggcctgggtgctgcaccgtttggaaatggctctgcctcagccagtgctgcatggtaagatcggcgaacaggagcccgactccccgggcatttgtgatgtccagacgcgggtcatgggcgctggaggcctgtag

SEQ ID NO: 113393 - DNA, 2430 bp, synthetic construct
  misc_feature 1..2430: note = Description of Artificial Sequence: Synthetic coding sequence
  source 1..2430: mol_type = other DNA
atgttcaaaagtctgactaaagtcaataaggttaagcccatcggcgagaataatgagaacgagcagagctccaggagaaatgaggagggcagccatccctcaaaccaatcccaacaaactacagcccaagaagagaacaagggcgaagagaagagcctcaagactaagtccaccccagtaaccagtgaagaacctcataccaatatccaggataagctgtccaaaaagaacagcagcggggacttaacgaccaatccagaccctcagaacgctgcggaacccaccgggactgtcccagaacagaaggaaatggatcccggcaaggagggccccaacagtcctcagaacaaacccccagccgctcccgtcatcaacgaatacgccgacgcccagctgcacaacttagtaaagcgcatgcgacagcgaaccgccctctataagaagaaattagtggagggagatctgagcagtcccgaagcttcaccccagacagcaaagccaacagccgtgccacctgtcaaggagtccgacgacaagccgacagaacactattataggctgctgtggttcaaagttaagaaaatgcctcttacggagtacctgaagagaataaagctccccaactccatcgacagctataccgacagactgtacctcttgtggctactgctggtaacactcgcctacaattggaactgctgtttcattcctctccgtcttgtgtttccttatcaaaccgccgataacattcattactggctgatcgccgatattatctgcgacataatttatttatacgacatgctcttcattcaacccagattacagttcgtgaggggcggtgatattatcgtagactcaaatgaattaagaaaacattatcggacatcaaccaagttccagctcgacgttgcgtcgatcattccattcgatatctgctatctcttctttgggtttaacccaatgttcagagccaataggatgctgaaatacacgtccttcttcgagtttaaccaccacttggaatccatcatggataaggcctacatttaccgggtgatcaggacgacaggatatctcctctttatccttcatatcaatgcctgcgtatactattgggcctctaactacgaaggcatcggtactacgaggtgggtctacgacggcgagggcaacgagtatcttcgctgctactactgggcggttcgtactctgattaccatcggcgggctgcctgagccacagaccctgtttgagattgtgttccagttgctgaattttttctccggtgtcttcgtgttcagtagcctcatcgggcagatgagggacgtcattggcgccgcgaccgcaaaccagaactacttcagagcctgcatggatgatactattgcttacatgaataactactccattccgaaactagttcagaagagagtgcgaacctggtatgagtatacatgggactcacagagaatgctggatgaaagtgaccttctcaagaccctgcccactacggtccaactagctcttgcaatcgatgtgaatttcagcataatcagtaaggtggatttatttaagggctgcgacactcagatgatttatgacatgctcttgagactgaagtcagtgctgtatctgccaggggactttgtttgtaagaagggcgagatcgggaaggagatgtacatcatcaaacatggggaggtacaggtgcttggcggaccggacgggacaaaggttctggttacactaaaggcaggatctgtgttcggcgaaatatcccttctcgcggccggtggaggaaataggcgcacagccaacgtggttgcacacggttttgccaacttactcaccctcgataaaaagacgttgcaggaaatcctggttcactacccagactccgagcggattctgatgaagaaagctagggttttgctgaagcagaaggcaaagacagcagaagccacgcctccaaggaaggacctagccctgctttttcctccaaaagaggaaactcccaaactcttcaaaacactactcggagggaccggtaaagcttcactggccagactgttgaagctgaaaagggagcaggctgcacaaaagaaagagaatagtgaagggggagaggaggaaggtaaagagaacgaagacaagcaaaaagaaaatgaggacaaacagaaggaaaatgaagacaagggcaaggagaatgaggacaaggataagggacgcgagcctgaagagaagcccttggatcgacccgaatgcaccgcttcaccaatcgccgtagaggaggagccacatagcgtgcgccgcactgtcctgcctcgcggcacaagtcgtcagtctttaatcatttccatggcaccatcagccgagggaggagaggaagtgctgacaatagaggtgaaggagaaagcgaagcagtag

SEQ ID NO: 113394 - DNA, 4188 bp, synthetic construct
  misc_feature 1..4188: note = Description of Artificial Sequence: Synthetic coding sequence
  source 1..4188: mol_type = other DNA
atgctcttaccacttccacctcagtcctccaagcccgtgcccaagaagagccaatcctccaagattgtgcctagtcatcacgatcctagcgaaaaaacaggagaaaattgtcagacaaaaatcagtccatcatccctccaagagtctccgtcctctctacaaggggccctcaagaaacgttctgcctttgaagaccttacaaacgcaagtcaatgtcagcctgtgcagcctaagaaagaggcaaacaaggagttcgtaaaagtcgtgagcaaaaagataaaccgtaacactcacgccctgggccttgctaagaaaaataagcgaaacctgaaatggcacaagctcgaggttacgccagttgttgcctccaccactgtcgtaccaaacattatggagaaacctcttattctggatatttcaacaacttcgaagacccccaatacggaggaggccagtctgtttcgaaaacccctcgtccttaaagaggagcccaccattgaagacgagacgctgataaataagtctctgagcctaaaaaaatgtagcaaccacgaagaagtctcgcttctggaaaaactccagcctctccaagaggaaagtgacagcgatgatgccttcgtcatcgaacctatgacctttaaaaagacacacaagacagaggaggcggctatcacaaaaaaaacactaagcttgaagaaaaagatgtgcgcctctcagagaaaacaaagctgccaggaagaaagcctggcggtgcaggacgtcaatatggaagaggattcatttttcatggagtctatgtcctttaaaaagaagcctaagacagaggaaagcataccgacacacaaactgagcagcctcaagaagaagtgtacgatatatgggaaaatctgccatttcaggaaaccacccgtccttcaaactactatatgcggagccatgtcaagtataaaaaaaccaacgactgagaaagagacccttttccaggaactgagtgtcctgcaggagaagcacactacggagcacgagatgtcaatcctgaagaagtcactagccctgcagaagaccaacttcaaggaagactctctggtgaaagaaagtctagcgtttaaaaaaaagccttccactgaggaagccattatgatgcccgtgatactgaaagaacagtgcatgaccgaagggaagcggtcaaggctgaagcctttggtgctgcaggaaatcaccagcggggaaaaaagcttaattatgaaacccctgtcaataaaagagaagccatccaccgagaaagagagcttttctcaggaaccatctgcgttgcagaaaaaacatacaactcaggaggaggtgtctattttgaaggaaccgagctcgctgctgaaatcccctactgaagaatccccttttgacgaggcactcgcttttacgaaaaaatgtacaatagaagaggcccctcccactaagaaacccctgatccttaaacgtaagcatgccacacagggaaccatgagccacctaaaaaaacccctcatcttacagactacctcaggggaaaagtccctaattaaggagcctctgccctttaaggaggaaaaggttagtttgaaaaaaaagtgcacaactcaggaaatgatgagcatttgcccagagcttctggactttcaagacatgattggcgaagataagaatagcttttttatggagccaatgtcattccgaaaaaacccaaccacggaagaaacagttctgaccaagacaagcctgtcacttcaagaaaagaaaattacacagggtaaaatgtcacacctcaagaagccactggtgctgcaaaaaattaccagtgaagaggaaagtttctataagaagctcctgccgttcaaaatgaagtccacgacggaggaaaagtttttgtctcaggaaccaagcgctctcaaagagaaacatactaccctgcaggaggtgagtctgtccaaagaatctctcgctattcaggagaaggctaccacagaagaagagttctcccaagagttgttttctctccatgtgaagcacacaaacaagagtggctcactgtttcaagaggccctggttcttcaggagaagacagacgcagaggaggacagtctcaagaaccttctcgccctgcaggaaaaatccaccatggaagaggagtcccttataaacaagctgctggctttaaaagaggagcttagcgcggaggcagccaccaatatccagacccagctgagtctgaaaaaaaaaagtacctcccacggtaaggtctttttcctaaaaaagcaattggccctgaatgagactatcaacgaggaagagtttttgaacaagcaacccctggcccttgagggataccctagcatcgccgaaggcgaaacgctgtttaagaaactgctggcaatgcaggaggagcctagtatagaaaaagaagcagtgctgaaggagccaaccatcgataccgaggctcacttcaaggaacctctcgcactacaggaggaaccatccacggagaaagaggccgtgctaaaagaaccctcggttgacacggaggctcactttaaggaaactctggcactgcaggagaaacctagcatcgagcaagaggcactgttcaaacggcacagtgccctgtgggagaagccttccaccgaaaaagagactatctttaaggagagcttagatctgcaagaaaaaccttccatcaagaaggaaaccctactgaagaaaccactggctctgaaaatgtctactatcaatgaggcggtcctattcgaagatatgatagcactcaacgagaagcctaccaccggcaaggaactgagttttaaggagccactagccctgcaggagtcccctacatataaagaagataccttcctgaagacgctcctggtgccccaggtgggaactagtcctaacgtgagtagcacagcacccgagagcattactagtaagagttcaattgctacaatgacatcagtgggaaagtcagggactattaacgaagccttcctattcgaagacatgattacacttaatgagaagcctacaaccgggaaagagctctccttcaaagagccgctggctctgcaggagtcccctacgtgtaaggaggataccttcctggagacctttttgatccctcagatcggaaccagtccctatgtgttcagtaccacgcccgaaagtatcacagaaaagtcctccattgcaactatgactagtgtaggcaaaagcagaaccacgactgagtcctccgcctgcgagtcagcgtcagacaaaccagtaagcccccaagctaaggggacacccaaggaaataacacctcgggaggatatcgatgaggacagttcggatccgtcgttcaacccaatgtacgcgaaagaaatcttctcctatatgaaggaacgcgaagaacagttcattctgacagactacatgaacagacagatcgagatcacaagtgacatgcgggctattctagttgactggctcgtcgaggttcaggtgtctttcgaaatgactcacgaaaccctgtatctcgcagtaaagcttgtggatctgtatctgatgaaagcagtgtgtaagaaggataaactgcaactcttaggtgcaacggcatttatgattgctgccaagttcgaggagcataattcaccccgggtcgacgacttcgtgtacatctgtgatgacaactatcagcggtctgaagtgctgtcaatggaaattaacatactcaatgtgctaaagtgcgatattaatatccctattgcctaccatttcttgagaaggtacgcacggtgcatccataccaacatgaaaacattgacactgagcagatatatctgcgaaatgactctccaagaataccactacgtgcaggagaaggctagtaaactcgccgccgcatccctactgctggcgctgtacatgaagaaactcggatattgggtgcccttcctggaacattattctggctattctatctccgaactgcaccccttagtaagacaattgaataagctcctcacgttctctagctatgattctctcaaagccgtgtactataaatactcccatccagtgttcttcgaagtggctaaaatccctgcgctagatatgctcaaactcgaagaaattcttaattgtgattgcgaggctcaggggctggtcttgtag

SEQ ID NO: 113395 - DNA, 876 bp, synthetic construct
  misc_feature 1..876: note = Description of Artificial Sequence: Synthetic coding sequence
  source 1..876: mol_type = other DNA
atgttgttacctctgccacctcagtccagcaaaccggtaccgaagaaatctcaatcatctaaaatcgtaccgagccaccacgatcctagcgagaaaacaggcgagaactgtcagactaaaatctccccaagtagcctacaggaatccccatcttctcttcagggcgcccttaaaaagaggtctgcattcgaggatttaacaaatgtctcctttgaaatgacacacgaaaccctgtacctggcagtcaagctggttgacttgtacctgatgaaagcagtgtgcaagaaggacaagcttcaacttttaggggcgaccgcttttatgatagcagcaaagtttgaagagcacaacagccctcgggtggatgacttcgtttacatttgcgatgacaactaccagcggtccgaagtattgtcaatggagatcaatattctgaacgtgctgaaatgcgacataaatatcccaatcgcctatcatttcctacgccggtatgctcggtgtattcatacgaatatgaaaacgttgaccctgtcccggtatatctgcgaaatgaccctgcaggaataccactatgtgcaggaaaaggcctcaaagttggcggctgcctccttactgcttgcactctacatgaaaaagctgggttactgggtccccttccttgagcattactcaggctatagtatctccgaactgcaccccttagtgcgacagttaaataaactactgacattctcttcatatgactccctgaaggcggtatattataagtactcccatcctgtctttttcgaggtagcaaagatacccgcccttgatatgctaaaattagaagagattttgaactgtgactgcgaggcccaaggcctggttttgtag

SEQ ID NO: 113396 - DNA, 876 bp, synthetic construct
  misc_feature 1..876: note = Description of Artificial Sequence: Synthetic coding sequence
  source 1..876: mol_type = other DNA
atgttactcccgctgcccccccagtccagtaagccggtgcctaagaagtcccaaagctccaaaattgttccatcccatcatgaccctagcgaaaagactggtgagaattgccagactaagattagcccttccagtctgcaggaatccccttcctccctgcaaggcgctctgaagaaacgatccgctttcgaagacctgactaatgtgagctttgagatgactcatgagacactgtacttagccgtgaagctggttgatctttacttgatgaaagctgtctgcaaaaaggacaaactccagcttctgggtgctaccgccttcatgatcgccgcgaaattcgaggagcacaattcacccagggttgatgactttgtttacatttgcgatgataattaccagcggtcggaagtcctgtccatggagatcaacatactaaacgttctgaagtgcgacataaatattcccatcgcataccatttcctgaggaggtatgcccgctgcattcacactaacatgaagactctgactctgagtcgctatatttgcgaaatgacactgcaagaataccactatgttcaggagaaagcttctaaactggcagcggctagcctgctcttggcgttatacatgaagaaactcggttactgggttccttttttggaacactactctgggtactctatctcagagctgcaccccctggtccgccagctgaataagttactcaccttctcatcgtacgattcactgaaagccgtgtactacaaatattcacacccggttttttttgaggtcgcaaagatccctgccttggatatgttaaagttagaagaaattctcaattgcgattgtgaagcacagggactggtcctctag

SEQ ID NO: 113397 - DNA, 4188 bp, synthetic construct
  misc_feature 1..4188: note = Description of Artificial Sequence: Synthetic coding sequence
  source 1..4188: mol_type = other DNA
atgctgctgcccttgccccctcagtcctcaaaacctgtgcccaaaaagagtcaatcttccaagattgtgccaagccaccacgatccaagcgagaagacaggcgagaactgccagaccaagatatctccgtccagcttgcaggaaagtccttcctctcttcagggggcactgaagaaaagatctgccttcgaggacctgacaaacgcatcgcaatgtcagccagtgcagcccaagaaggaggccaataaagagttcgttaaagtggtcagtaaaaagatcaatcgcaatacacacgctttgggcttagccaaaaagaataaacggaatctaaaatggcacaagctggaggtgacacctgtggtggccagcactacagtcgtgcccaatatcatggagaagcctctgatactcgatatctctaccacctcgaagacaccaaataccgaggaagcctccctgttccgtaagccgctcgttctgaaggaagagcctaccatcgaagacgagaccctcataaacaagtccctgagcctgaagaagtgttcaaatcacgaggaagtctcactcctggaaaaattacagcctctccaggaagaatccgattccgatgacgcatttgtgatcgagccgatgacctttaagaaaacacacaagaccgaggaggccgcgatcacaaaaaaaaccctgtcccttaagaagaagatgtgcgcctctcaacggaaacagagctgtcaggaggagtcccttgctgtgcaggacgtgaacatggaggaggattccttcttcatggaatccatgtctttcaaaaagaagcccaaaacagaagagagtatacccacacacaagctctcctcactgaaaaaaaagtgtaccatttatggtaagatctgccacttcaggaaacctcccgtgcttcagaccacgatttgcggggccatgagcagcatcaagaagccaacgactgagaaggaaaccctgtttcaggaactaagcgtgttacaggagaaacacactacggaacatgaaatgtcaatccttaaaaaaagtttggcactccagaagactaactttaaggaggattccctggtcaaggagtctctggccttcaagaaaaagccctctacagaggaagcaattatgatgcctgtgatattgaaggagcagtgtatgacggagggcaagcgatcccgattgaagccattggtcttacaagaaatcacctctggcgaaaaaagcctcataatgaagcccctatcgattaaagagaaaccaagtacagagaaagagtcattcagccaagaaccgagcgcactccagaaaaagcacaccacgcaggaagaggtttctattcttaaggaacctagttctctgctgaagtcgcccacggaggaatctcctttcgacgaagctttggcattcaccaaaaagtgcaccatcgaagaagccccacccaccaagaaacctctgatcctcaagcggaaacacgcaacacaagggactatgtcccacttaaagaaacctctgatactgcagactacttcgggggagaaatctctgattaaggagcccctgccatttaaggaagagaaagtgagcctcaagaaaaaatgtaccacccaggagatgatgagcatctgccctgaactgcttgactttcaggatatgattggtgaggataaaaactccttttttatggagccaatgtcatttcgcaagaatccgactactgaagagacagtgctcaccaaaacaagcttaagcctacaggaaaagaagatcacccagggaaagatgtcccacctgaaaaagccattagttttgcagaagatcaccagcgaggaagagtccttctataagaaattactgccatttaaaatgaaatcgacaacggaagaaaagttcctttctcaggaaccatctgctcttaaagagaagcacactaccctccaggaagtctcgctcagcaaggagtctctggctattcaggaaaaagcaaccactgaggaagaatttagccaggagctcttctccctccacgttaagcacacaaacaagtctggtagcctgttccaggaagcactggtgctgcaggagaagacggatgcggaagaggatagccttaaaaatttgctggcgttgcaggagaaaagcactatggaagaggagtctctgataaacaaactacttgcacttaaggaagagctgtctgccgaggctgcaaccaacattcaaacacagctgagtctgaagaagaaatctacttcccatggcaaagtattctttctgaaaaagcagttggcactcaatgagacaataaacgaagaggagtttttgaataagcagccactggccctggaaggctacccaagcatagccgagggagaaactctttttaagaagctgctggcaatgcaagaggaaccttccatcgagaaggaggcagtgctgaaagaaccgaccattgatactgaggcccactttaaagaacctctggctcttcaggaagagccaagtaccgagaaggaagctgttctgaaggaacctagcgtagatacggaggcgcactttaaagagactctggccctgcaggagaagccaagcattgaacaggaggcattattcaagagacactcggccttgtgggaaaagccttctacagagaaggagacaatttttaaggaaagtttggacctccaggagaaaccatcaattaagaaagagacactgttaaagaagcctttagcactgaagatgtctaccataaacgaggcagtgctttttgaagacatgatagccttgaacgaaaaaccgaccacaggaaaagagttaagctttaaagagcctctggcactgcaggaaagtccgacttacaaagaggacactttcctgaaaaccctcctcgtgccccaggtggggacaagccccaacgtgtcttctacggcgcccgaaagcatcacatctaaaagctctattgccacaatgactagcgtgggaaaatcagggaccattaacgaggctttcttgtttgaagatatgataaccttgaacgagaagcccactacaggcaaggagctgtctttcaaggagcccctggcattacaagagagccccacgtgcaaggaggatacatttctcgagacatttctcatccctcagatcggcactagtccctacgtctttagcaccactcctgagtcgattacagaaaaaagcagtattgcaacaatgacttccgtggggaagtctcggactactacggagagtagtgcttgtgagagcgcgagtgacaagcccgtttctccccaggccaagggcacccctaaggagattacaccacgggaggacatagacgaggattcttcagaccctagttttaatcctatgtacgcaaaggaaatattcagctacatgaaagaacgcgaggagcaattcatcctcacagattacatgaaccggcagatcgagatcacctccgatatgcgggcaattctggttgactggctcgtggaagtacaggtgtctttcgagatgactcacgaaaccctttacctcgctgttaaactggtggatctgtatctaatgaaagcggtgtgtaagaaagacaagctgcagctgctgggcgctaccgcctttatgattgctgccaagtttgaggagcacaactccccacgggttgacgatttcgtctacatctgcgacgataattatcagcggtccgaagtactatcgatggagataaacattttgaatgtgctgaagtgcgacataaatattcctatcgcttaccactttctgcgcagatatgcccggtgtatccacacaaacatgaagaccctcaccctcagtcgctacatctgtgagatgaccctccaggaatatcactacgtgcaggagaaggcttctaagctcgctgcagcatctcttcttctcgccctgtatatgaaaaaactgggatactgggtcccattcctggagcactactccggctattccatttcagaacttcatcccctcgttcgtcaactgaacaagctgctgacgttttcctcatatgactcactgaaggctgtgtactacaagtacagtcatcccgtctttttcgaggttgcaaagattcctgcactagatatgttgaagcttgaagaaatactcaattgtgactgtgaagcccagggcttagtcctgtag

SEQ ID NO: 113398 - DNA, 336 bp, synthetic construct
  misc_feature 1..336: note = Description of Artificial Sequence: Synthetic coding sequence
  source 1..336: mol_type = other DNA
atgctgttaccgttacctccccagtcctccaagcctgtgccaaaaaaaagccagagctccaagatcgtcccatcacaccatgatccatcggagaagactggcgaaaactgccagacaaagatcagtcccagcagcctgcaagagagcccatcttctcttcaaggagcactcaaaaagcgaagcgccttcgaagacctgaccaacgcctctcagtgccagcctgtgcagcccaagaaagaggctaataaggagtttgtcaaagtggttagtaagaagattaatcggaatacacatgccttaggcctggccaagaagaacaaacgtaacctgaaatag

SEQ ID NO: 113399 - DNA, 1083 bp, synthetic construct
  misc_feature 1..1083: note = Description of Artificial Sequence: Synthetic coding sequence
  source 1..1083: mol_type = other DNA
atggcctccgcaactgcaccggctgcggcagtcccgaccttggcctcacccctggagcagctgagacacctggctgaggagctcaggctgctgcttccccgcgttcgagtaggcgaggcccaggaaacaacagaggaattcaaccgcgaaatgttctggcgcaggctgaatgaggccgctgtgactgtgagccgggaagccaccactctgaccattgtgttcagccaactgcccctgcctagtcctcaggagacacagaagttctgtgaacaggttcacgcggccatcaaggccttcatcgccgtctattatcttcttcctaaggatcaagggatcacccttagaaagttggttaggggagccactttggatattgtggacggaatggcccagctcatggaggtattatcggttacgcccacacaatcccctgagaataacgatctgataagctataacagtgtctgggtggcgtgtcagcagatgccacagatccctcgggataacaaggccgctgccctgcttatgttgacaaagaatgtcgactttgtgaaggatgcccacgaggaaatggagcaggccgtcgaggaatgtgatccatacagcgggttactcaacgacactgaagagaacaacagcgataatcataatcacgaggatgacgtcttgggattcccatccaaccaggatctgtattggagcgaagatgaccaggaactgatcatcccatgcttggccctcgtacgggcaagcaaagcttgcttaaaaaagattagaatgttagtggccgagaacggcaaaaaggaccaggtcgcacagctggacgatattgtggatatctctgatgaaatctctccgtcagtcgatgaccttgccctctccatttaccctccaatgtgtcaccttacagtccgcatcaatagtgccaagctggtgagtgtgctgaagaaggccctcgaaatcaccaaggccagccacgtgacacctcagcccgaggatagttggattccgttactgatcaatgctattgatcattgtatgaatcggattaaggaactgacgcagagtgagttggaactgtag

SEQ ID NO: 113400 - DNA, 600 bp, synthetic construct
  misc_feature 1..600: note = Description of Artificial Sequence: Synthetic coding sequence
  source 1..600: mol_type = other DNA
atgccccagatcccccgggacaataaagctgcagccctgctgatgttgacaaagaatgtggactttgtaaaagatgcccatgaggaaatggaacaggctgtcgaggagtgtgatccctactctggcctactgaacgataccgaggaaaacaattcagacaatcacaatcacgaagatgacgtgctggggttcccttctaatcaggacctctactggtcagaggatgaccaggagcttattatcccctgtctggcccttgttagagccagtaaagcatgtttgaagaagataagaatgttggtggcggaaaacggtaaaaaggatcaggttgcacagctggatgacatagtggacatttccgatgagatttccccaagtgtagacgatctggccctgtcaatttaccctccaatgtgccacttaacagtccggataaatagcgctaaactcgtgagcgtcctgaaaaaggccctggaaattactaaagcctctcatgtaacccctcagccggaagacagttggattccactgttgattaacgcaatcgatcactgcatgaatcgcatcaaggagcttacccaatctgaactcgagctatag

SEQ ID NO: 113401 - DNA, 699 bp, synthetic construct
  misc_feature 1..699: note = Description of Artificial Sequence: Synthetic coding sequence
  source 1..699: mol_type = other DNA
atggcccagctgatggaggtcctgtccgtgacgccgacacagtctcccgagaacaatgaccttatcagttacaattccgtgtgggtcgcctgtcagcagatgccccaaattccacgcgacaataaggctgccgctctactcatgctgacgaagaatgtcgacttcgttaaggacgcacacgaggaaatggagcaggctgtagaagagtgcgacccctatagcggcctgctgaatgatactgaagagaacaacagtgacaaccacaaccatgaggacgacgttctcggcttccctagcaatcaggacctttactggtccgaggacgatcaagagctgatcattccttgcctggcactcgtccgggcttccaaggcgtgtctgaagaagatacgaatgctagtcgccgagaacggcaagaaagaccaggtcgcccagctggacgatattgtagacataagtgacgaaatttctcccagtgttgatgaccttgcccttagtatctacccacccatgtgtcacctaacagtgcgaatcaactctgccaagttagtcagcgtattaaagaaagccctggaaatcacgaaagcatctcatgtgaccccccagcccgaggatagctggatccccctcctaatcaacgccatcgaccattgtatgaacagaattaaagagctgacacagtccgagttagagctgtag

SEQ ID NO: 113402 - DNA, 3936 bp, synthetic construct
  misc_feature 1..3936: note = Description of Artificial Sequence: Synthetic coding sequence
  source 1..3936: mol_type = other DNA
atgtctttactccagtctgccttggatttcctggcgggtccgggcagcttggggggggcctctggccgggaccagtctgacttcgttgggcagaccgtcgaactgggtgagcttcgcttacgcgtgcgccgcgtactggcagaagggggcttcgcatttgtctatgaggcccaggacgttgggagcggacgggagtacgcactaaagaggctcttgtccaacgaggaggaaaagaaccgtgctatcatacaggaggtttgctttatgaaaaagctttccgggcaccccaatatagtccagttttgttcagcggcctctatcgggaaagaggagtcagacacaggccaggccgaattccttttgctgaccgaactgtgcaagggacagctcgtggagtttctgaagaagatggagagccgaggccccctgagctgcgacacagttttgaaaatcttctatcagacctgcagagctgtgcagcacatgcatcgtcagaaaccgcctatcatccatagagaccttaaggtcgaaaatctcctactgtctaatcagggaaccatcaagctctgcgacttcggatctgcaacaacaatatcacattacccagactacagctggagtgctcagagacgggctctagtggaggaggagattacacggaacactacccctatgtaccggaccccagaaatcattgacctgtatagcaactttccaattggtgaaaagcaggacatatgggccctcggttgcatcttgtacctcctctgctttagacagcacccgtttgaggatggagctaagctgcgcatcgttaacggcaagtacagtattccacctcacgatactcagtataccgtatttcactccctgattagagccatgttgcaggtaaaccctgaagagagactatcaatcgcggaagtcgtgcaccaactgcaggagatcgccgcggctcgcaacgtcaatccaaaaagcccaatcacggaactgctggagcagaatggtggttatggatccgcaaccctttctcgagggccaccgccccctgtgggcccagctgggagtggctatagcggtggactggccctagcggagtatgaccaaccttatggcggctttttggatatactgagagggggaacagagaggttgttcaccaatttaaaagacacgagttccaaggttattcagtcagtcgccaattatgctaaaggtgaccttgacatcagctatatcaccagtcgcattgctgtcatgtcttttcccgcggagggcgttgagtctgccctcaagaacaatatagaggacgtacgcctgtttcttgattcaaaacatcccgggcactatgcggtttacaacctttcaccacgaacctacaggcccagccgctttcacaaccgggttagcgagtgcgggtgggctgcgcggcgcgccccacatctgcataccctgtacaatatttgccgtaacatgcacgcctggctaaggcaagaccacaagaacgtgtgtgtcgtgcactgtatggatggcagggccgccagtgccgtggccgtgtgttcttttttgtgtttttgccgcctttttagcaccgccgaggctgctgtatacatgttctccatgaaacggtgtccacccggaatctggccatcccacaagcgctacatcgagtacatgtgcgatatggtggccgaagaacccataacaccacactctaagccaatcttggtccgggccgtggttatgaccccagtaccacttttttctaaacagcggtctggatgtagacccttttgcgaggtctatgtgggtgacgagagggttgcatcaacttcacaggaatatgataaaatgcgcgatttcaagatcgaggacggcaaggctgttatccccttaggcgtcactgtccagggagacgtgctcatcgtcatataccatgctcgcagcacattaggcggccggttgcaggcaaaaatggcttcaatgaaaatgttccagatccaattccataccggattcgtgcctcgcaacgccacaaccgtgaagttcgctaagtacgacctcgacgcctgtgacattcaggagaagtacccagatctcttccaagtaaacctggaggtagaggtggaaccaagagaccggcctagccgcgaagcacctccctgggaaaactctagtatgagaggactgaatccaaaaattctcttctctagccgtgaggagcaacaggacatactctcaaaattcggaaagcccgagctgccacgacagcccggctctaccgcccaatatgatgccggggctggttctcctgaggcagaaccaactgattccgacagccctccctcctcttcagcagacgcgtccagattcctccacactcttgattggcaggaggaaaaagaggccgagacaggcgctgaaaatgcaagcagcaaggagtcggaatccgcactgatggaagaccgcgatgagtccgaagtgagcgacgagggcggaagcccgatttccagtgagggacaggagcctagggccgacccagaacctcccggactcgcagccggcctggtgcaacaggacctcgtatttgaggtagaaacacccgctgtgctaccagagccagtgccgcaggaggacggagttgatctgcttggtctccactccgaggtaggggccggtcctgccgtgcctccccaagcttgtaaggcccccagcagcaataccgatctcctgagctgcctacttggaccccccgaagcagcttcacaaggaccccccgaagatctgctgtccgaggacccattactgctggcatcccccgccccccctctcagtgtccagtccacaccccgtggcggccctccggccgccgccgaccctttcggaccgctcttgccgtcctctggtaacaattcacagccttgctcgaatcccgacctttttggcgagtttctgaactccgattccgtgaccgtcccaccatctttcccttctgcccactctgctcctcctccctcatgttctgccgattttctgcacctgggcgatctgccgggagagcccagcaaaatgaccgcttcttcatctaaccccgaccttttgggaggctgggccgcatggaccgaaactgcagcatcagctgtagcacccacccctgcaactgagggccccttgtttagtccagggggacagccagccccctgcggcagtcaggccagctggacaaaatcccagaatccagatccttttgccgacctcggtgatctgtctagcggcctgcagggatcccccgcgggctttcctcctggcgggtttatacccaaaacagcaaccactccaaagggatcctcatcgtggcaaacctcccggccccctgcacagggcgcttcatggccccctcaggccaaaccccctcctaaggcctgcacccagcctcggccaaattatgcgtctaatttcagtgtgatcggtgccagagaagagcggggcgtcagggcgcccagttttgctcagaagcctaaggtttctgaaaatgattttgaagaccttctgtccaatcaggggttcagcagtcgaagtgacaaaaaaggccccaaaaccatagccgagatgcgaaaacaggaccttgcaaaagatacagacccactaaagctcaaacttctagattggattgaagggaaagagcgaaatatccgagctctgctgagcacgttacacacagttctatgggatggcgagtcccggtggactcctgtggggatggccgaccttgtggctcccgagcaggtcaagaaacactaccgccgggcggtgctagcggttcaccccgacaaagccgccggccagccatatgagcagcacgccaagatgatatttatggaactgaatgatgcctggtctgagttcgagaatcagggtagtaggccattgttttag

SEQ ID NO: 113403 - DNA, 1764 bp, synthetic construct
  misc_feature 1..1764: note = Description of Artificial Sequence: Synthetic coding sequence
  source 1..1764: mol_type = other DNA
atgagtttgctgcaatctgccctagattttttggccggccctggttcactcggcggcgcttccggaagagatcagtccgacttcgtgggtcagaccgttgagttgggagaactccgcctgcgcgtgagacgcgtcctcgcagagggcggctttgcgttcgtgtatgaggcgcaggacgtaggtagcgggcgcgagtacgcgctgaaaaggctcttgagtaatgaggaagaaaagaaccgggccataatacaggaggtctgcttcatgaagaagctatctgggcaccccaacattgtgcaattctgcagtgctgcgtctataggtaaggaggaatctgatacgggccaggctgagttcttgctactgactgagcctccagggctggccgcagggctcgtacaacaggatctggtgttcgaagtcgaaaccccagctgtcctgccagagcctgtaccccaggaggatggcgtggacttgctggggttgcactcggaggtgggagcaggcccagctgtgccacctcaggcttgcaaggccccctctagcaacaccgacttgctttcttgtctgttgggacctcctgaggcagctagtcaggggccacctgaggatctgctctccgaagatcccctcctgctggcctccccagccccacccttgagtgtgcagtctacgccaaggggtggaccacctgccgctgccgaccctttcggtcccctgctgcccagctcaggcaacaactcccagccatgtagtaatcccgatttatttggcgaattcctgaatagcgattcagtcactgtaccaccaagctttccttccgcacatagcgctcctccaccttcatgcagcgcggattttcttcatctcggggatctgccaggggaaccatccaaaatgaccgcgtcgtccagcaaccccgatcttttgggcgggtgggccgcatggacggagaccgccgcaagcgcagttgcacctactcccgccacagagggacctcttttcagcccagggggccagcctgcaccgtgcggcagccaagcctcatggactaagagtcagaatcctgatccattcgcagacttgggggacctgagctctggactgcagggttctcccgcaggcttccctcccgggggatttatccctaaaaccgccaccacccctaaaggctcttcaagctggcagacatcgcgccctccagcacagggagcttcttggcctcctcaggctaagcccccccctaaggcctgcactcagccccgtccaaactacgcctccaacttcagtgtgattggcgcgagagaggagagaggcgtgagggcaccatcctttgcacaaaaacctaaggtcagcgaaaatgactttgaggatctgctgtccaatcaggggtttagcagcaggtcggacaaaaagggaccgaagaccattgcggagatgcgcaagcaagatcttgccaaggacacagaccctctgaaattaaaactactggactggatagagggcaaggagagaaatatccgcgcactgttgagcaccctgcatacagtcctgtgggacggagaatcacgatggacccccgtgggcatggccgatctggtggctcctgagcaggtcaagaaacactatcgcagagctgtgctggccgttcatccagacaaggccgctggccagccttacgaacagcatgctaaaatgatctttatggaactgaacgatgcatggtctgaattcgagaatcagggttctcgcccgctgttctag

SEQ ID NO: 113404 - DNA, 2238 bp, synthetic construct
  misc_feature 1..2238: note = Description of Artificial Sequence: Synthetic coding sequence
  source 1..2238: mol_type = other DNA
atgcccttccccgtaacgacccaaggctctcagcagactcagccacctcagaaacactatggcatcacctctcctatttctctggcagcacccaaggagactgactgcgtcctaacacaaaagctcattgagaccttgaaaccatttggtgtgttcgaggaggaggaagaacttcagcgacgaattctaattctgggtaaactcaacaatttagtgaaggaatggattcgggaaatctccgagtctaagaatctcccccagagtgtcatcgaaaatgtcggaggcaagatttttacttttgggtcctaccggctcggcgtccatactaaaggcgccgatattgacgctttgtgcgtggctccccgccacgttgaccggagtgacttcttcacttccttctatgacaagttgaagctacaggaggaagtgaaggatctgagagccgtcgaagaggccttcgtgccggtcatcaagttgtgcttcgacgggatcgaaatcgatattctgttcgctcgcctggcgctccaaacaattcctgaagatttggacctccgggatgacagtttactgaaaaacctcgacattagatgcatcaggtccctcaacgggtgtcgtgtaactgatgagatccttcatctggtgcctaacatcgacaatttcagattgactcttagagctatcaaactctgggctaaaaggcataacatttacagtaacatactgggatttctcggcggagtttcttgggctatgttagtcgctcggacctgccagctgtatccaaatgctattgcatccacccttgtccacaaattttttttggtctttagcaagtgggagtggcccaaccccgtgctcttaaagcagccggaagaatgcaatctgaatctccctgtgtgggatcccagagtaaacccaagtgaccgctaccatttgatgcctatcatcacgccagcatatccccaacaaaattctacatacaacgtgagcgtgagtacccggatggttatggtggaggagtttaagcaagggctggccatcaccgatgagattctcctgtcgaaagctgagtggagcaaactgtttgaagcacccaatttttttcagaagtacaaacactacatcgtgctcctggcatccgccccgactgagaaacaacgcctcgagtgggtgggcctggtggagtcaaagattcgcatcttggtgggttcgctcgagaagaacgagttcattaccctcgcgcacgtgaacccccagtcattcccagcacccaaagaaaatcccgacaaggaagaattccgaaccatgtgggttataggcctcgtgtttaagaagaccgagaatagcgagaatctctcggtcgatctgacatatgacatccagtccttcaccgacacagtctatcgccaggcgattaactcaaaaatgttcgaagtggatatgaagatagcagcaatgcacgtgaagagaaaacagctgcatcagctgctgccgaatcacgtgcttcaaaagaagaaaaagcattctaccgagggagttaaattaaccgcgcttaacgacagttcactcgacttgtctatggacagcgacaattctatgtccgtgccgtcacctacaagtgcgaccaaaacatctcctttgaacagctctgggtcgtctcagggaaggaactcccccgcccctgccgtcaccgctgcatctgtcacaaatatacaagcaaccgaggtcagcgtaccgcaagtcaactcctctgaatcttccgggggcacatccagcgaaagcatcccgcaaacagctacacaaccagccatcagccctcctccgaagcccaccgtgtcaagagtggtcagttcgacaagattagtcaacccacctcccaggagttctggaaacgcggcaacatccggcaacgctgccaccaaaatcccaactcctattgttggcgtgaagcgaacttcttccccccataaggaggagagtccaaagaaaacaaaaacagaggaagacgagaccagcgaagacgccaactgccttgccctgtccggacacgataagaccgaagcgaaagagcagttagatacagagacatccacaacccaatccgagactattcagaccgctgcctccctcctggcctctcaaaagacgagttcaaccgacctatccgacattcccgcccttcctgctaaccccataccagtgatcaagaactctatcaaacttcggctgaaccgctag

SEQ ID NO: 113405 - DNA, 1080 bp, synthetic construct
  misc_feature 1..1080: note = Description of Artificial Sequence: Synthetic coding sequence
  source 1..1080: mol_type = other DNA
atgaaggaaaacaaagagaacagctcaccatccgtgacaagtgccaacctcgatcacactaagccatgctggtactgggataagaaggatctggcccacacaccaagccaactcgagggcttagatcctgcaactgaagccaggtaccggcgcgagggtgcccgattcatcttcgacgtgggcacgaggctcggcctgcactacgacaccctggccactgggataatatattttcatcggttttacatgtttcatagcttcaagcagtttccccggtatgtgactggggcttgctgcctctttctcgccggcaaagtggaggagacccccaaaaaatgtaaagacattattaagacggctcggagtctgctgaacgatgttcaatttggccaatttggtgacgatccaaaagaagaggtgatggtgcttgagaggatcctcctgcagactattaaatttgacctgcaggtagagcatccataccagttcctgctaaagtatgccaaacagctgaagggcgacaagaacaagattcagaagcttgtgcaaatggcctggaccttcgtgaacgacagaacgtcgctatgcaccactctctccttgcagtgggaaccagagatcatcgccgtggcggtgatgtatcttgccggcagactgtgcaaatttgaaatacaagaatggacctctaagccgatgtatagacggtggtgggagcagttcgtgcaggatgtccctgtggatgttctcgaggatatttgccatcagatcctagatctgtactctcagggtaaacaacagatgccacaccacaccccccaccagcttcagcaacctccttccctgcaaccgactcctcaggtgccgcaggtgcagcagtcccagcctagtcagtctagcgagcccagccagccccagcagaaagacccgcagcagcctgcacagcaacagcagcccgcacagcagccgaaaaagccatccccgcaacccagttctccccggcaggttaaaagagccgtagtcgtctcgcctaaggaggaaaataaagccgctggaaaggcttcccttaagcatacttggtag

SEQ ID NO: 113406 - DNA, 1743 bp, synthetic construct
  misc_feature 1..1743: note = Description of Artificial Sequence: Synthetic coding sequence
  source 1..1743: mol_type = other DNA
atgaaggagaataaagagaattccagcccctccgttacttccgcaaatctggaccatactaagccatgttggtactgggataagaaggatctggcccacactcctagtcaactggaaggactggatcctgctaccgaggccaggtatagaagagaaggggcccgcttcatttttgatgtcgggacccgtctcggcctgcactatgatactctggccacaggcatcatctattttcatcgtttctacatgttccatagttttaagcaatttccccggtacgtgactggcgcatgctgcctgttcctggctggcaaggttgaggaaaccccaaaaaagtgcaaggatatcatcaaaaccgctcgttccctgttaaacgacgtccagttcggccagtttggtgatgacccaaaagaggaggtaatggtcctcgagaggatattactccagaccatcaagttcgatctgcaggtcgaacatccataccagttcctgcttaaatatgcgaaacagcttaagggggacaagaataaaatacagaaactggtacagatggcatggacctttgtgaatgactccctgtgtacaactcttagtcttcagtgggaaccagaaattatcgcggtggccgtcatgtacttagccggccggctctgtaagtttgagatccaagagtggacctccaagcccatgtaccgacgctggtgggagcagtttgtacaggacgttcccgtcgacgtgctagaagatatttgtcatcagatcttagacctctatagccagggcaaacaacaaatgccccaccacacccctcatcagctgcaacagccccctagccttcaacccaccccacaggtcccgcaagttcagcaaagccagccaagccaaagctcagagccgtctcagcctcaacagaaagacccgcagcagcccgctcaacagcaacagcctgcccagcagccaaagaaaccttcccctcagccatcgagcccacgacaggtcaagagagcagtggtcgtcagccctaaggaggaaaacaaagccgcagagcctccgcctcccaaaattcccaagattgaaactacacatcccccgctgccgcccgcccaccctccaccagaccgtaagccccccctggcagcagccctaggcgaggctgagccccctggccctgtggatgctaccgacctgccgaaagtccagattccccccccggcccaccccgcaccagttcatcagccccccccactaccccacagacctccaccccctccgcccagtagttacatgaccggtatgtcaactacatcctcctatatgtccggtgaggggtaccaatccttacagtccatgatgaagaccgagggaccgtcctacggcgctttacccccggcatacggaccacccgcacatctgccttatcatccccatgtgtatcctcccaatcctccaccccctccagtgcctccaccaccagcgagttttcctccgcccgccattccgccgccgacacctggctatcctccgcccccccccacgtacaatcctaacttcccccctcctcctccaaggctgccaccaacacacgccgttcccccacatccacctcccggcctgggtctgccgccagccagctatcccccaccagccgtgcctcccggcgggcagcctccagtgcccccccccattccaccaccagggatgccacctgtgggtggtttgggacgcgccgcctggatgcgatag

SEQ ID NO: 113407 - DNA, 1803 bp, synthetic construct
  misc_feature 1..1803: note = Description of Artificial Sequence: Synthetic coding sequence
  source 1..1803: mol_type = other DNA
atgaaggaaaacaaggagaatagttctccttcagtgacgagcgccaacctggaccacaccaagccttgctggtattgggacaagaaagatttggctcacacccctagtcagctcgagggtctcgaccctgccacagaggctcgctatcgccgtgagggtgctcgattcatcttcgatgtcggtacgagacttggcctacactacgatacgctagccaccggaattatctactttcatcggttctatatgttccattcatttaagcagtttccccgctatgtgaccggagcctgctgtcttttcttggcaggtaaggttgaggaaacgccgaagaagtgcaaagatatcatcaagaccgcaaggtccctgctcaacgacgtgcaattcggacagttcggagatgacccaaaagaagaggtgatggtcctggaacgtatcttactccagactattaagtttgacctacaggtggagcacccttatcagtttcttctgaaatatgccaaacagctaaaaggcgataagaataagattcagaaactggtgcaaatggcctggacgtttgtgaatgacagtctttgtaccacgctctctctccagtgggagcctgagatcattgcagtagcagtaatgtacctggctgggcgcctgtgtaaattcgaaatccaggaatggacatctaagccaatgtaccgcagatggtgggagcaatttgtccaggatgtgcccgtggacgtgctcgaggatatatgccatcagatcctagacctgtattcacaggggaagcagcaaatgcctcaccatacgccccaccagctgcagcagcctccctcgttacaacctacccctcaggtcccacaggtgcaacaatctcagccctctcaatcctcagaaccctcgcagccccaacagaaagatccgcagcagccagctcaacagcagcagcccgcccagcagcctaaaaagcccagccctcagccttctagtcctcgacaggtcaaacgggccgtggtgtctggtttaaagcaggccctcggacgggccggtttccccgggggggggaataccaccgtggttagtcccaaagaagaaaataaggctgccgagcctccaccccccaagatccccaagattgagaccactcacccccccctacctccggcccaccctcccccagatcgcaagccgccccttgccgcagctctgggggaagctgaacctccaggaccagtcgatgcgacagacctccccaaggttcagatcccacctcctgctcatccggctccagttcatcagccgcctccattacctcatcgccctccccctcctcctccctcttcctatatgacgggcatgagtacaacttccagttacatgtcgggagagggctaccagagccttcagtcaatgatgaaaactgagggtccaagttatggcgcactgccacctgcatacgggccaccggcccatttgccatatcatccccacgtttaccccccaaacccaccgcctccgccggttccgccacccccagcgagctttccgcctcccgctataccacctcccacccccggctacccacctcctcctccaacctataatccaaactttccgccgccaccgcccagactcccaccaacacacgccgtgccaccccacccacctcctggtttgggcctcccacctgcctcatacccccctcccgctgtgccaccaggcggtcagccaccagtccccccaccaatacccccccccggcatgcctcccgtaggtggtctagggcgtgctgcctggatgaggtag

SEQ ID NO: 113408 - DNA, 333 bp, synthetic construct
  misc_feature 1..333: note = Description of Artificial Sequence: Synthetic coding sequence
  source 1..333: mol_type = other DNA
atgaaggaaaataaagaaaattcctcaccctctgtgacaagtgctaatttagatcatactaaaccctgctggtattgggataagaaagacctcgctcacaccccaagccaactggaaggcttagacccagctactgaagcacgctaccggagggaaggagccagattcatctttgacgtcggaacaagactgggcctccactacgacacactggccacgggcattatctactttcaccggttctacatgtttcattccttcaaacaatttccacgctacgtgaccggggcatgttgccttttcttggccggtaaagtggaggagacaccctag

SEQ ID NO: 113409 - DNA, 684 bp, synthetic construct
  misc_feature 1..684: note = Description of Artificial Sequence: Synthetic coding sequence
  source 1..684: mol_type = other DNA
atgaaagagaataaggagaattccagtccatccgtgacctctgctaatctcgatcatacgaagccctgttggtactgggacaagaaagacctcgcacacactccttcccagctggaaggattagatcctgcaaccgaggcgaggtaccggcgggagggtgccaggttcatcttcgatgtgggaactaggctgggactgcactacgatacactcgctaccggcattatctatttccaccgcttctatatgttccactcttttaagcagttcccacgctatgtaacaggggcctgttgtcttttcctcgccggaaaggttgaagagactcctaaaaagtgcaaagatattattaagacagcccgttccctgcttaatgacgtgcaattcggccaattcggtgacgatccaaaagaggaggtaatggtcctcgagagaattctgctgcaaaccatcaaatttgatttgcaggtagagcacccatatcaattcttactgaagtacgccaaacagctcaagggggataagaacaagattcagaagctggtacagatggcttggacgtttgtcaacgattctctttgcaccaccctttctttgcaatgggaacccgagataattgcggtggccgtaatgtacctagctggtagattgtgcaagtttgaaatacaagagtggacgagctag

SEQ ID NO: 113410 - DNA, 519 bp, synthetic construct
  misc_feature 1..519: note = Description of Artificial Sequence: Synthetic coding sequence
  source 1..519: mol_type = other DNA
atggcttctgggccacactcaacagcaacagccgcagcagctgcaagttctgcggcaccctcagctggtgggagctcttccggcaccaccaccaccacaaccacaacgacaggcggcatcttgataggggaccggctttatagcgaggtcagccttacaatcgaccacagtctgattccggaggaacggctctcacctactcccagcatgcaggatggactggatttgccttcagagaccgatctacgcattctcgggtgcgagctcattcaggccgcgggcattctcctccggctgccccaggttgctatggcaacaggacaggtgctatttcataggtttttttatagcaaatccttcgttaagcacagcttcgagatcgttgcgatggcttgtatcaacctcgcgagtaaaattgaagaagcccctaggcggattcgagacgttataaacgtgtttcaccatcttcggcaacttaggggaaaatcggatcagctgcacttaccgaagcctgggtag

SEQ ID NO: 113411 - DNA, 1581 bp, synthetic construct
  misc_feature 1..1581: note = Description of Artificial Sequence: Synthetic coding sequence
  source 1..1581: mol_type = other DNA
atggcatctgggccacacagtacagccacggctgccgcagccgcctcgagtgccgcacctagcgccggaggaagttcttccgggaccactactacaactaccacaactactggtggtattcttattggtgaccggctgtacagtgaggtgtccctcaccattgatcactcacttatccccgaggaacgactcagccctacacctagtatgcaggatgggctggaccttccatccgaaacggatctgcgaatcctgggatgtgagctgattcaggccgcgggaattctgttgcgcctcccccaagtcgccatggccaccggccaagtcctcttccatcgatttttctacagcaaaagcttcgtcaagcacagttttgagatagttgctatggcttgcattaacttggcctccaaaatagaagaggccccaaggcgcatacgagacgtgattaatgtgttccatcatctgaggcagctgaggggaaaacggacaccatctccactgatcctggaccagaactacattaacaccaaaaaccaggttataaaggctgagagacgcgtgctgaaggagctgggcttttgtgttcatgtgaagcaccctcacaagataatagtcatgtaccttcaggtgttggagtgtgagcggaatcagacactggtgcagacagcgtggaattacatgaacgactcactacggaccaacgttttcgtccgatttcaaccagagacgattgcgtgcgcatgcatttatcttgccgctcgagcattgcagatcccactacccactagacctcactggttcctactgtttgggacaaccgaggaggaaattcaagagatatgcattgagactctgaggctctatacgagaaaaaagccaaactacgagctgcttgagaaagaagtcgaaaaacgtaaggtagctctgcaggaagccaagctgaaggctaaagggctcaacccggacggcacacccgcccttagcaccctgggaggcttttcccctgcctccaagccctctagtcctagagaagtaaaagctgaggaaaagtctcctatctcaatcaacgtaaagacggttaaaaaagaaccagaggacaggcagcaagcctcaaagagtccatacaatggcgttagaaaagattcaaagcggtcacggaacagccgatcagcttcccgctcacgcagccgaaccagaagtcgctcccgatcgcacactcctagacgacactataacaacaggcggtcccgaagtggcacctattctagtcgatcacggtcaaggagcagatcgcactcggaatctccccgtcgccatcacaatcacgggagccctcatctgaaagcaaagcacacccgggatgatttaaagtcctcaaacagacacggccataagcgcaagaagtcacggtcccggtcccagtctaaatcccgcgaccactcagatgccgctaagaagcacaggcacgagcgcggacaccaccgagaccgtcgcgaacgttctaggtctttcgagcgcagccataaaagcaaacatcacggggggtcgagatctggccacgggaggcacagacgctag

SEQ ID NO: 113412 - DNA, 1563 bp, synthetic construct
  misc_feature 1..1563: note = Description of Artificial Sequence: Synthetic coding sequence
  source 1..1563: mol_type = other DNA
atggcagccgctgcggccgccgctggggctgctggctctgcagctcccgctgcggctgcaggcgctccaggatcaggtggagccccctccggaagccagggagtgctgattggtgaccgtttatatagcggcgtcctcattaccctggaaaactgcctgctgcctgacgacaagcttcgctttacaccttcgatgtcctccggtctggacaccgacacggagacggacttacgtgtggtgggttgtgagttaattcaggcagccggcatactcctgcgtctgccccaggtggccatggcaaccggccaagtactgttccagcggtttttctataccaaaagctttgtgaaacactcaatggaacatgtgtcgatggcctgtgtgcacctggcctctaagatcgaggaagccccgagacgcattcgagacgtgatcaatgtgttccatagactcagacagctcagagataagaagaagccagttcctttgctactggaccaggattacgttaatctcaaaaaccagataataaaagctgaacggagggtcctgaaggagcttggtttttgcgtgcacgttaagcacccccataagatcatagtgatgtacttgcaggtgctggaatgcgagcggaaccagcatctggtgcaaacatcgtggaattacatgaacgatagccttcgtactgatgtgtttgtgaggttccagcccgaatcaattgcatgtgcctgtatttacctcgcagctagaacactggaaattccacttccaaaccgtccccattggtttttgctctttggagccactgaggaagaaatacaagagatctgcctgaagatcttacagctttacgcgaggaaaaaggtggacctaacacacttggaaggagaggtcgagaagcggaagcacgctatcgaagaagcgaaagcgcaggcccgcggcctcctgccagggggcacacaggtgctggatggcacctcggggttcagcccagcccccaaactggtggagagccctaaagaaggcaaggggtctaagccaagccccttgtccgtgaagaacacaaagcgacggctagagggtgcaaagaaagccaaagctgactctcctgtgaacgggctgccaaaaggtcgagagtcacgcagcaggagcagatcaagggagcagtcctactcccgaagccctagccgctccgcctcaccaaagagacgtaagtctgatagcggcagtacctcagggggcagtaagtcccaatcccggtctcggtcccgctctgacagcccacctcgtcaggctcctagaagcgctccttataaaggcagcgaaattcgcggttctagaaagagtaaggactgcaagtacccccaaaagccccataaatcacggagccggtcaagcagccgttcgcgttccaggtctcgtgagcgcgctgacaacccagggaagtataaaaagaagtctcactactaccgcgatcagcgtagagagcggtcaaggtcatatgagcgcacaggtcgaagatatgaacgggaccaccccgggcactctcgacacaggcgttag

SEQ ID NO: 113413 - DNA, 681 bp, synthetic construct
  misc_feature 1..681: note = Description of Artificial Sequence: Synthetic coding sequence
  source 1..681: mol_type = other DNA
atggcagcagctgcagccgcagctggcgccgccggcagtgcagcccctgccgccgcggctggcgctcccgggtctggaggcgcgccatctggcagccaaggcgttctgattggcgatcggctgtactcgggggtccttatcacactcgagaactgcctgcttcccgacgacaaactcaggttcactccgtcaatgagttcaggtctggatacggatacagaaactgatcttagggtggtcggttgtgaactcatccaggcggctggcatccttttacggctgccccaagtggctatggctacaggtcaggttctcttccaacggttcttctacacgaagtcattcgtgaagcactctatggaacacgtgtccatggcctgcgtccaccttgcctcgaaaatagaggaagctcctagaagaatccgggatgtgatcaacgtgtttcaccgtctcaggcagctgagagacaagaagaaacctgtacctctcctgctggaccaagactatgtaaatctgaaaaatcaaatcataaaggctgaacgacgagtgctaaaagaactggggttctgcgtgcacgttaagcacccacataaaatcatagtcatgtacctgcaggtgcttgagtgtgaaagaaaccaacacctagtgcagacctcctgggttgcctcagagggaaaatag

SEQ ID NO: 113414 - DNA, 1044 bp, synthetic construct
  misc_feature 1..1044: note = Description of Artificial Sequence: Synthetic coding sequence
  source 1..1044: mol_type = other DNA
atgaacgacagtctccgaacagatgtgtttgtacgctttcagccggaatctattgcctgcgcgtgtatctatctcgcagcacggacactagaaataccactacctaataggcctcactggttcttgctgttcggagcaaccgaggaggagatccaggaaatctgcttaaagattttgcagctgtatgcccggaaaaaagttgatctaacccatctcgaaggggaagtggagaagagaaaacatgcaatcgaagagggccctagccccgggcctgtggcgtggggacacactggagccggttggtacttaggagttctgagttgcccacaggctggttgttgggattacagcctcgagtgttccggcgccatttgggaccactgcaagcttaggctgcccgattccggcgactcctgtgcatctgcttctcaggtggcaggaatcgcgggagcacatcaccacgcccagagtctggctgttctgccggtggagagccctaaagagggaaaaggtagcaaaccatctccgctatccgtgaagaatacgaagcgcaggctcgaaggagctaagaaagctaaagcagatagcccagttaacggtctgcccaaaggcagggagtcccgctcacgtagcaggtcccgcgaacagtcatacagtcgctcaccctctaggtctgcaagtcccaagaggagaaaatccgactctggttccacatccggagggtctaagagtcaatctagaagccgctcacgtagcgatagccctcccagacaagctccaaggtccgcaccatacaaaggctctgagatccggggcagtcggaagtccaaggactgcaagtatccccagaagccacataagtctcgcagccggagttcatcccgaagccgaagccgatcccgggagcgggccgacaacccagggaagtataaaaagaaaagccattactacagggaccagcgcagagagcggtctcgttcatacgagaggacagggcgccgttatgaaagagatcaccccggtcatagccgtcataggcgatag

SEQ ID NO: 113415 - DNA, 2856 bp, synthetic construct
  misc_feature 1..2856: note = Description of Artificial Sequence: Synthetic coding sequence
  source 1..2856: mol_type = other DNA
atggcagccgcagcagctgcggcggctgccgtgggcgttaggctccgcgattgttgtagtcgcggcgccgttctgcttctgttctttagtctgtctcccaggcccccagccgcggctgcgtggctcctgggcctccgacctgaagatacagcaggagggcgcgtgagtctggaagggggtacattgcgggccgcggagggcacctcctttctgctacgggtctattttcagcccggccctccagcaaccgctgcacctgtgccttcaccgactttaaactccggagaaaatggaactggcgattgggccccgagactggtgtttatcgaggaaccacccggaggcggaggggtggctccgtccgccgtgcctactcgcccacccggaccacagagatgccgcgaacagagcgactgggcttccgatgtcgaggtgcttggccctctccggcccgggggcgtcgccggctccgccttagttcaggtccgagtgcgtgagctccgaaagggtgaagcggagcggggtggcgctgggggagggggcaagctgttctcgttatgcgcttgggacggcagagcttggcaccaccacggggccgcgggcggctttctgctccgggtgaggccccgtctttatggtcccggcggcgatctgctcccaccggcgtggcttcgagcactgggtgcacttctcctgcttgcattgagcgcactgttttcgggactgcgactgagtctgctctccctggaccccgtggaactgcgtgtgctccggaattctggcagcgcagccgaacaggagcaagcacgaagggttcaggcagtccgcgggcggggaacccacctgctgtgtacgctgttgctcgggcaggctggagccaacgccgcattggcaggttggctgtatacaagccttcctcctggatttgggggcaccggcgaggactatagtgaagaagggatccacttcccctggctgcctgcacttgtctgtacaggagccgttttcctgggagcagagatctgcccttactccgtgtgttccagacacggtctggcaatcgcaagccatagtgtgtgcttgaccagattgctgatggccgccgcctttcccgtttgttaccctctgggccgactgctagactgggccttgagacaggaaataagtaccttttacaccagggagaagctcctcgagacgctgagagccgccgacccttactctgatctcgtcaaggaagagttgaatatcattcaaggagccctggagctgagaacaaaggtggtggaagaagtgctcacccccttgggcgactgttttatgctgcggagcgatgccgtcttggattttgccacggtctctgagattctgcgcagtggctacaccaggatccccgtgtatgaaggcgaccagcgtcacaacattgttgacatcctcttcgtgaaggatctagccttcgtcgatccggacgattgcacacctctcctgacagtcacccgcttttataacagaccactccactgtgtgttcaacgacaccaggcttgacacagtgctggaagaattcaagaagggtaaatcccacctggccatcgtgcagagagttaataacgagggggaaggagatccattttatgaagtgatgggaatagtcactctggaagatattatcgaggaaattatcaaaagcgaaatattggatgaaacggacctctacacggataacagaaagaaacagcgggtaccgcagcgtgaacgaaagcggcacgacttctccttgttcaagttatccgacaccgaaatgagggtgaaaatctcaccgcagttactactggccactcatagattcatggctaccgaagtggagcctttcaagagcttgtacttgtccgagaaaattttgctgcggcttctgaaacaccctaacgtcatccaagaactgaaattcgatgaaaagaataagaaagcccccgagcactacctctaccagcgcaatcggcccgtggactatttcgtgctcttactgcagggaaaggttgaggtggaggtcggtaaagagggcctgcgatttgaaaacggagctttcacctattatggggtgcctgcaataatgactacggcgtgctccgataacgacgttcgcaaggtggggtccttggccgggtctagcgtgttccttaaccgctcgccctctcgctgctcagggctcaacaggtcggaaagcccgaatagagagaggagtgattttggcggtagtaacacccagttatactctagttctaataatttatacatgccagattactctgtgcatatcctaagtgatgtgcagttcgtgaaaatcacccggcagcagtaccagaacgctcttaccgcttgtcacatggactcgtcaccccagtcgccggatatggaagcctttaccgatggagatagtactaaggcccccacgactcggggtaccccacaaacaccaaaggacgacccagctatcacccttctgaataataggaactccctgccctgtagccgcagtgacggcctaaggagcccgagcgaagttgtgtacctaaggatggaagagctcgcttttacacaggaagagatgacagatttcgaagaacactctacccagcagctgacactgtccccagccgccgtgcccaccagagcagcgtcggacagcgagtgttgcaacataaatctggatacagagacaagcccatgcagcagcgatttcgaggaaaatgttggcaagaaactattgcggaccctgtcagggcaaaagcgaaagcgatcccccgagggcgaaaggacatcagaagataactctaacctgaccccattgattacctag

SEQ ID NO: 113416 - DNA, 2493 bp, synthetic construct
  misc_feature 1..2493: note = Description of Artificial Sequence: Synthetic coding sequence
  source 1..2493: mol_type = other DNA
atggctgctgccgcagccgccgcggccgcggtaggagttaggttgcgggattgttgcagtcgcggagccgtgctgctgttatttttttcactgtcacctcgccccccggccgcggcagcgtggttactcggcttgaggccagaagacacagcaggcgggcgagttagtctcgaaggcgggacgttacgcgccgccgaggggactagttttcttttacgtgtttatttccagccaggtccaccgagatgtagagaacagagcgactgggcatccgacgtggaggtgcttggcccgctcaggcctgggggagtggctggatccgctctagtgcagctgtttagtctatgtgcctgggatggtagagcttggcatcatcatggagcagctggagggttcttgctaagggtgagacccaggctctacgggccagggggagacttgctacctccggcctggctgagggcccttggagccctccttctcctggctctgtctgccctctttagtggccttcgtctgagcctgctcagtctggatcccgtggaactccgtgtgctccgcaattctggcagcgcagccgagcaggagcaggcccggcgagtacaggcagtcagagggcgcggtacacacctcctgtgcaccctcctgctgggccaagctggagctaatgccgccctcgcggggtggttatatacatctttgccacctggtttcggcggtaccggggaggattactcagaagaaggcatacattttccatggctccctgccctcgtgtgtacaggcgccgtgtttctgggagcagaaatatgcccttactccgtttgtagccgacacggtcttgccatcgcctctcactccgtgtgtctcacaaggcttcttatggctgcagccttccccgtttgctaccctctcgggagattattggattgggccctgcgccaggagatttcaacattttatacaagagagaaactgctcgagacactcagggcggccgacccatattctgatttggtgaaggaagagttgaatatcattcaaggcgccctggagctgcgcacaaaggtggtggaggaagtactgactccactgggcgattgcttcatgctgagaagcgatgctgtgttggattttgccacggtgtcagagattctccgctccggctacactcggattcccgtttacgagggcgatcagcggcacaacatcgttgacatcttatttgttaaggaccttgccttcgtggacccggacgattgcacaccattgttgactgtcactaggttctataaccgcccactgcactgcgtatttaatgacacccgcctggataccgtcctagaggaattcaaaaagggtaaaagtcacctggcaatcgtccaacgggtgaacaatgagggcgaaggcgatcctttctacgaggtaatgggaatcgtgactctggaagatataatcgaagagattatcaaaagcgagatcctcgacgagaccgacctgtacaccgataatcgtaagaaacaacgtgttccgcaacgcgagagaaaacgccacgacttctcgctgttcaaactgtccgacaccgaaatgcgcgtgaaaatcagccctcagctgctacttgcaacacataggttcatggccaccgaagtggaacctttcaaaagcctttacctgtcagagaaaattttgctacgcctactgaagcacccaaacgtgatccaggagctcaaatttgacgaaaagaataaaaaggccccagaacactatctgtaccaaaggaataggcccgtggactacttcgtgttgctcctccagggaaaggtggaggtggaagtgggtaaagagggactccggttcgaaaacggagcctttacttactacggggtgcccgctattatgacaacggcttgctctgataacgatgttcggaaggtaggatccctcgcgggctcctccgtcttcctgaacaggtcgccttcacgctgcagtggcctgaacagatccgagtcgccaaatagggaacgtagcgactttgggggaagtaacactcagctttattcatcaagcaacaacctgtatatgccagactactctgtgcacatcctcagtgatgtgcaattcgtgaagatcaccagacagcagtaccagaatgccctcacggcatgccacatggattcatctcctcagtcccccgacatggaggccttcacagacggggactcgaccaaggctccaacaactcgagggactccgcagacgccgaaggatgatccagccattacccttttgaacaataggaatagcctgccatcctcggattctgaatgttgtaatataaatctggataccgagactagcccttgttcttcagacttcgaagaaaacgttggtaagaagctgttaagaaccctgtctggtcaaaagcggaagagatctccagagggcgaacgcacaagtgaggacaactcaaatctgaccccactaatcacctag

SEQ ID NO: 113417 - DNA, 1824 bp, synthetic construct
  misc_feature 1..1824: note = Description of Artificial Sequence: Synthetic coding sequence
  source 1..1824: mol_type = other DNA
atggcggcggcgtttccagtctgctacccgttagggcggctgcttgattgggccctccgacaagagatatcgaccttttacacaagggagaaactccttgagaccctcagagctgctgacccctactctgaccttgtcaaggaagagttaaatatcattcagggggctctggagctcagaactaaggtcgtggaggaggtcctcaccccgctgggggattgctttatgctgaggtctgatgccgtgctggattttgcaacagtgtctgagatattgaggtcaggttacacacgcatccctgtctatgaaggagatcagagacataatatcgtggacatattgtttgtcaaagatctggcttttgtggatccggacgattgcacccccctcctgaccgtgacccggttttataataggcctctgcactgcgtttttaacgatacaaggctcgataccgtattggaagagtttaagaaggggaagtcccacttggccattgtgcagagggtgaacaatgaaggagaaggcgaccccttttacgaggttatgggcatcgttactctcgaagacatcattgaagagatcataaaaagcgagattctcgacgagaccgatctctacactgacaatcggaagaaacagagggttccccaacgcgaacgcaagcggcacgatttctctctcttcaaactttctgacacggagatgcgagtaaaaatttcacctcagctactgttagctacccacaggttcatggcaacagaggtcgagccctttaagtccctttacctgagtgagaagattctcctgagactattgaagcaccctaatgtcatacaggaactgaagttcgacgagaagaacaagaaagctccagagcattacctgtaccagagaaacagaccagtggactattttgtgctactgttgcagggcaaggtggaggtggaggtcgggaaagaaggcctgcgttttgagaatggtgcatttacctactatggagtcccagctataatgaccacagcatgttccgacaatgacgtccgaaaggtgggttcacttgctggaagttctgtttttttgccagtatctgtctccagaacttttgccgtcagtagaggcgattcactggccggcagtccagtgaaccgatctcctagtaggtgttcggggctaaaccggtccgagtcccccaaccgagagagatccgatttcggagggtcaaacacccagctgtattcttcttcaaataacctctatatgcccgactacagtgtccacatcctcagcgatgtgcagtttgtgaagatcactcggcaacagtaccaaaatgcgctgacggcctgccatatggactcttcgccccagtcacctgatatggaagcgtttacggatggagacagcaccaaggcaccgaccactcggggaactccccaaacccctaaagacgatccggcaattacactgctgaacaatagaaattctctgccgtgctctcggtctgatggactccgttctccatcggaggtggtctatctgcgtatggaagagctcgcatttactcaggaggagatgactgatttcgaagaacatagcacacaacagctgacgttatcgccagctgcagttcccacacgggccgcatcagacagtgaatgctgcaatatcaaccttgatacagaaactagcccgtgctcaagcgatttcgaggagaacgtgggcaagaagttactgcgaacactctcaggccagaagcgaaagaggagccctgagggtgagaggacgtccgaggacaattcaaacttgaccccactgattacatag

SEQ ID NO: 113418 - DNA, 2643 bp, synthetic construct
  misc_feature 1..2643: note = Description of Artificial Sequence: Synthetic coding sequence
  source 1..2643: mol_type = other DNA
atggcagctgccgctgctgctgccgccgccgttggcgtgaggctgagggattgttgttcccgcggtgccgtgctgctcctgttttttagtctgagtcctcgccccccagctgccgccgcctggcttttggggctccggccggaggacacggccggggggcgtgtgtccctggaggggggaacgctacgggcagcagaaggtacctcctttctgctgagagtgtacttccagcctggtcccccgcggtgtcgtgagcaatctgactgggcctctgacgtcgaggtgcttgggccacttaggccgggcggtgtcgccggctcggcactagtgcagcttttctcattatgcgcttgggatggtagggcttggcatcaccacggagcagccgggggctttctcctgcgcgtgcgaccccgcctttatggcccagggggcgatctcctgccgccagcttggctgagagccttaggggcactactgctgcttgcactctccgccttgttcagtggtcttcggttgagtctcctctctttagaccccgtggagcttcgagtgctgagaaacagtggtagtgctgctgaacaggaacaggctagacgggtacaggccgtccgaggcagagggactcatctcctgtgcacattactgttaggacaggctggcgctaacgcagccctggcaggatggctgtatacgtccctaccccccgggtttggaggcacaggcgaggactatagtgaggagggtatccattttccatggcttcccgctctcgtgtgtactggcgcggtcttcctgggggcggaaatctgcccctactctgtttgcagccgccatggtctggcgatcgccagccacagcgtgtgcttaacaaggctactcatggcagccgcattccctgtctgttatccattggggcgactgctggattgggcgttgcgccaggagatctccactttctacaccagggagaagcttctcgagactctaagggcggctgatccctactctgacctcgtaaaagaagagcttaacatcattcaaggagccttggagctgaggacaaaagtcgtcgaggaagtactgaccccgctgggtgattgtttcatgctgaggagcgatgccgtgctggattttgctaccgtaagcgagatactgagatcaggttacacccggataccagtatacgaaggagatcagaggcacaatatcgttgatattctgtttgtgaaggatctggcgttcgttgaccctgatgactgtacccctttgcttacagtgacccgattttataacaggcccctgcactgtgtatttaacgatacccgtctggatacagtcctggaggagttcaagaaaggcaagagccatttggcaattgtccagagagtcaataatgagggcgaaggagatccgttctatgaggtcatgggtatcgtcactttggaggacataatagaagaaattatcaaatcggagatcctcgacgaaaccgacctgtacacagataaccgaaaaaaacagcgcgttcctcagcgggagcgcaagagacacgacttctccttgttcaaactgagcgatactgaaatgagggtcaaaatcagcccgcaattactgctggctactcatcggtttatggctactgaggtcgaaccatttaagagcctgtacctgagcgagaagatccttctcagactgctcaaacatcccaacgtgatccaagaactgaaattcgacgagaagaacaagaaggcaccagagcactatctgtaccaacggaataggcctgtcgattactttgtcctgttgctccaaggtaaggttgaagtcgaagtaggcaaggagggcctgcgattcgaaaatggggccttcacatattacggagtacctgctatcatgacgacagcttgttcggacaatgatgtgaggaaagtcggtagcctggctgggagtagcgtgtttctgaaccgcagcccttcccgatgttccgggctcaacagatcagagtccccaaaccgcgaacgctcagactttggaggcagcaatactcagctgtactccagttctaataacctgtacatgccggattattctgtgcacatcttatctgacgtgcaatttgtcaagataacacgacagcaatatcagaatgctctgactgcatgtcacatggacagctccccccaatccccagacatggaagcatttacagacggagactcaacaaaggctcctaccacccggggcacaccacagactcctaaggacgacccagctattacactgttaaataaccgaaattccttgccttgtagcagaagcgatggcttacgctcaccttctgaggtagtgtacctgcgcatggaagagcttgcctttacccaggaggagatgacggactttgaagaacacagcacacagcagctcaccctgtccccagctgctgtgcctactagggccgctagcgactccgagtgctgcaacattaacttagacactgaaacttctccttgctcgagcgattttgaagagaacgttgggaagaagttgctgcggacactgtcaggccagaaacggaaacgcagccccgagggggagagaaccagtgaggataatagtaacttaacacccttgataacctag

SEQ ID NO: 113419 - DNA, 1215 bp, synthetic construct
  misc_feature 1..1215: note = Description of Artificial Sequence: Synthetic coding sequence
  source 1..1215: mol_type = other DNA
atgggaattgttactctcgaagacatcattgaagaaattataaagtcggagattctcgatgaaactgatttgtacacggacaaccgcaaaaaacagcgggtgccccagagagagcggaaaaggcacgacttctcgctattcaagctgtcagacacagagatgcgcgtgaaaattagtccgcagctgctccttgcaacacacaggtttatggccacagaggtcgagccgttcaagagtctgtacctgagcgagaagattttgttaaggctgcttaaacatcctaacgtgatccaagagttgaagtttgatgagaagaataaaaaagccccagagcattatttgtaccagcgaaaccgaccggttgactatttcgttctactgctgcagggaaaggtggaggtggaagtaggaaaggaagggttgagattcgaaaacggcgcatttacttactacggtgtgcccgccataatgacaaccgcttgcagcgacaacgatgtgcgcaaagttggtagcctggccggctcgtccgtgtttctgaatcggtctccgagccgatgcagcggccttaacagatctgagtccccgaatagagagcgctcggattttggcggatccaatacacagctgtattcctcaagtaataatctctatatgccggactacagtgttcatattctatcagatgttcagtttgtgaaaattacgcgtcagcaataccaaaatgcccttaccgcttgtcacatggactccagtcctcagagcccagacatggaggctttcacagacggcgactccacaaaggcccccaccacaaggggaaccccacagacccccaaggatgaccctgcaatcacactgttgaataatagaaacagcctcccgtgtagcaggtccgatggcttgcggtccccctcagaagtcgtatacctccgcatggaagagcttgccttcacacaggaggaaatgacagattttgaagagcactccacccagcagctgacactaagccctgcagccgtacctacacgcgccgcctctgattccgagtgctgcaatatcaacttggacacagaaaccagtccttgttccagcgattttgaggagaatgtgggaaagaagctgctccgcacactgtccggacaaaaacggaagaggtctccggagggggagcggacttcagaggataacagcaacctaacaccattgatcacttag

SEQ ID NO: 113420 - DNA, 2562 bp, synthetic construct
  misc_feature 1..2562: note = Description of Artificial Sequence: Synthetic coding sequence
  source 1..2562: mol_type = other DNA
atgattggatgcggcgcctgtgaacccaaggttaagatggctggcggtcaggctgctgcggcattgcctacatggaagatggccgcccggcggtctttgtctgcaagaggtcgaggaatcctccaggccgctgcaggtcggctcctgcccctgctgctgttgtcatgttgttgtggtgccggaggctgtgcagcagtcggagagaatgaggagacggtcattattggactgcgcctggaagacacaaatgacgtgtctttcatggaagggggcgccctccgcgtgagtgagagaacacgtgtcaaactgcgggtttatgggcagaatatcaacaatgagacttggtcacggatcgccttcacagagcacgaacgccggaggcactctcccggagagagagggctgggagggcctgctccaccggaaccagacagtgggccgcaaagatgtggcatcagaacctccgacattatcattctaccgcacatcatccttaacagacgcacgagcggcataattgagattgagataaaaccactgcgcaaaatggagaagagcaagagctactatttgtgtacatccctgtccaccccagccctaggtgccggcgggtcaggcagtactggcggggctgtgggggggaaaggcgggtccggcgtcgccggcctgccccctccgccttgggccgaaacgacctggatctatcacgatggcgaggatacaaagatgatcgtgggcgaggagaagaagttcctgctgcctttttggttgcaggtaatttttattagcctactcctttgtctttcaggcatgttctctggcctgaacttggggttaatggctcttgatcctatggagctccggatcgtgcagaattgtgggacggagaaggagaagaactatgccaagcgaatagaacctgtgagacggcaaggtaactatctgctttgcagcctgctactcggcaatgttctcgtgaacacaactctgacaatcctcctggatgatattgcaggctccgggctcgtggcagtggttgtgtccaccattggcattgtgatcttcggagaaattgttccacaggcgatatgcagtaggcacggtctggctgtgggcgcaaacacaatctttcttaccaagtttttcatgatgatgacattccctgccagttaccccgtgtctaagctgttggactgtgtactcggccaggagattggtaccgtgtataatcgagagaagctgcttgagatgctccgagtcacggatccgtacaacgatctcgtcaaggaggagctgaacattattcaaggtgccctcgagctgcgcacaaagaccgtggaggacgtgatgacccccctgcgagattgtttcatgatcaccggcgaggctatattagatttcaataccatgtcagagatcatggagtccggctacactagaatacccgtgttcgagggcgagaggagtaatatcgtagatctgctgttcgtgaaagacttagctttcgtcgacccagacgattgtacaccactcaaaacaatcacaaaattttataaccacccactgcattttgtgttcaacgacacaaaactggatgccatgttagaagaatttaagaaggggaagagccatcttgctatcgtgcagcgtgtgaataacgaaggagagggcgaccccttttacgaagtgctggggatcgtgactctcgaagacgtaatagaggagataatcaagtcggagatcctggacgagaccgacctgtacaccgataacagaactaagaaaaaggtggcccaccgggaaagaaagcaagacttcagcgccttcaagcagactgatagtgaaatgaaggttaagatatctccccagctgttgttggccatgcatcggtttctggctaccgaggttgaagccttttccccatcccagatgtcagagaagattttacttcgcctcctcaagcaccctaatgtcatccaggaacttaaatacgatgaaaagaacaagaaagccccagagtattacttatatcagcgaaacaagccggttgactatttcgtactcattctgcaggggaaagtcgaggtggaagctggaaaagagggcatgaaatttgaagcaagtgctttctcctattatggcgtgatggccttaaccgcaagtccaggggagaataagtcacctcctagaccctgtggtttgaatcactccgattctttatccaggagcgaccggatcgatgcggtgactcccactcttggatcatcaaacaaccagcttaattcatccttactgcaggtgtacattcctgattacagcgtccgcgccctcagtgatctccagttcgttaaaatctcccggcagcagtaccagaatgctctgatggcttccagaatggacaaaacaccccaatcctccgactccgagaatacgaaaattgagctgactctgaccgaactacatgacggattgcccgacgaaacggcgaatttactgaacgaacagaactgcgtgacccactctaaagcgaatcactctctccacaacgaaggtgccatttag

SEQ ID NO: 113421 - DNA, 1659 bp, synthetic construct
  misc_feature 1..1659: note = Description of Artificial Sequence: Synthetic coding sequence
  source 1..1659: mol_type = other DNA
atgattgggtgtggcgcctgtgaaccaaaggttaagatggctggggggcaagccgccgccgctcttcctacctggaaaatggccgctcgtagatcattgtcggcgagggggagggggatcctccaggctgccgcgggccgtctattgccactcctgctgctttcatgctgttgcggcgccggcggttgtgccgccgttggcgagaacgaggagactgtcattattggacttcggcttgaagacactaatgatgtgtctttcatggaaggcggtgcacttagagtgagcgaacgtaccagggtaaagctgcgagtatatggacagaatattaataatgaaacgtggagcaggatcgcattcacggagcacgaacggagaagacatagtcccggcgagcgcggactcggcggccccgccccacccgagcccgactcagggccgcaacgctgtgggattaggaccagcgacatcattatccttcctcacattatcctgaacagacggacttctgggataatagaaatcgagatcaagccattacggaaaatggagaagtcaaagtcatattatctgtgcacttcattgtccacccccgcgctgggcgcaggcggatcagggtctacgggcggagccgtgggtggcaaaggtggatctggcgtggctgggcttccccctccaccttgggccgaaaccacatggatttatcacgacggagaagacacaaagatgattgttggtgaagaaaaaaagttcctgttgcccttctggctacaagtgatctttatctctcttttactttgcctctcgggtatgtttagtggacttaacctgggcctcatggcactggacccaatggagttgcgcattgtgcagaattgcgggacagagaaggagaagaattatgctaaaaggatagagccagtaaggagacaggggaactatctgctatgctcactactgcttggtaatgttctggtaaacacaacgttgacgattctgctcgacgatatcgccggctcagggctggtagcagtagtggtatccactatcgggatcgttatcttcggagagatcgtgccccaggctatatgcagtcgccacggtctggcagtcggcgctaacactatctttctgaccaaatttttcatgatgatgacatttccagctagctaccctgtcagcaaacttctggactgcgtcctgggccaagagatcggtactgtgtataatcgtgagaaacttctagaaatgctccgggtcacagatccctataatgacctggtgaaagaggagctgaacatcattcagggcgcccttgagctgcgcacgaagaccgttgaggacgtgatgacacccctccgcgactgctttatgattaccggcgaggctatcttagacttcaacactatgtcagagataatggaaagcggttacacccggatccccgtttttgagggtgagcgtagcaatatagtcgatttgctgtttgtgaaggacttagcattcgtcgaccctgacgactgtactcccctaaagacgattaccaaattttacaaccacccgctacattttgtttttaacgacaccaaactggacgccatgcttgaggagttcaaaaaggagcacaccaataaaaagccaaagtcctatcagcactag

SEQ ID NO: 113422 - DNA, 2628 bp, synthetic construct
  misc_feature 1..2628: note = Description of Artificial Sequence: Synthetic coding sequence
  source 1..2628: mol_type = other DNA
atgattggatgtggtgcctgtgagcccaaggtcaaaatggcagggggccaagcagctgccgctctgcccacatggaaaatggctgctagaaggagtctcagtgcacgagggcgtgggatcttgcaggccgcggctggccgactccttccactcctgctgctgagctgttgttgtggggccggaggttgtgctgcggtgggagagaatgaggaaaccgtcattattgggttgaggcttgaagacaccaatgatgtgagcttcatggaagggggcgctcttcgggtctcagaacggactagggtgaaacttagggtatatggacagaatattaacaatgaaacatggtcccggatcgcctttacagaacacgagaggagaaggcattctcccggtgaaagggggctgggaggccctgcccctccagagccagattcaggcccccagcgatgcggtatccggactagtgacattattatactgcctcacattatccttaatcgtcgcacttctggcatcattgagattgagatcaaaccactccggaagatggaaaaatctaaatcatactatctttgtacctccctaagcactcccgccttgggcgccggaggatctgggagtactggtggagcggtcggcggaaaaggcgggagcggagtggctgggctacccccgcctccatgggccgaaactacatggatctatcatgacggagaggatacaaaaatgatagtgggagaggagaaaaaatttctgcttcccttttggttacaggtcatttttatttccctgctgctgtgccttagcgggatgttctctgggttgaacctcggcctgatggccttggaccccatggagcttaggatagtccagaattgtggcacagagaaagagaaaaactacgcaaagcggatcgagccagttaggagacagggcaattacctgttatgtagcctgctcctgggaaatgttctagtcaacacgaccctgacgatcctgttggatgacatcgcaggatcgggtctggtcgctgtggtagtgagcactataggaattgttattttcggcgagatcgtgcctcaggcaatctgctcccgtcacggactcgccgtgggagccaacaccattttcctcacgaagttttttatgatgatgacctttccagcctcctaccctgtttctaaacttctggactgcgtgttaggacaggaaatagggaccgtgtacaaccgagagaagctgctggagatgctgagggtcacggacccgtacaacgacctggtaaaggaggagttgaatataatccagggagccctggagctgagaaccaaaacggtagaagatgtgatgaccccgctcagggattgctttatgatcacaggagaagctatcctggatttcaacactatgtccgagattatggaaagtggttacaccagaatcccggtgtttgagggggagcgctccaacatcgtggacctgctgtttgtgaaggatctggccttcgtggacccggatgactgtacaccgttgaaaaccattaccaaattctataaccaccccttgcacttcgtcttcaacgacacaaaacttgacgcaatgctggaagagtttaaaaaaggcaaaagccacctggccatcgtgcagagggtaaataatgaaggtgaaggcgatcctttttatgaggttttaggcattgtgaccctggaggatgttattgaagaaatcatcaagagtgaaattttagacgaaactgacttatataccgacaaccgtaccaagaagaaagtggcccacagagaacgaaagcaggactttagtgctttcaagcagaccgactccgaaatgaaggtcaaaatctcccctcaactcctgcttgcaatgcacaggttccttgctacagaagtagaggcattctcccctagtcagatgagtgagaaaatactgttgcgcctactcaagcatcccaacgtcatccaggagcttaaatacgatgagaaaaacaaaaaggctccagagtactacctgtaccaacggaacaaaccagtcgactacttcgttttgatcctacaggggaaggtggaggtggaggccggtaaggaaggcatgaagttcgaggcctccgccttttcttactatggcgttatggcactgactgcatctccagtgccgctgtcactctctagaactttcgtggtgtcacgaacagagttacttgcagcaggctccccgggagagaataaatcgccaccccgcccttgcggtctgaaccactcagattccctgtccaggagtgaccgcattgatgccgtcactcccacgctggggagcagcaataaccaactcaattcaagcttactgcaggtatacattccggattattcggtgagagcactgtccgatctgcagttcgttaagatctctaggcagcagtaccagaatgctcttatggctagtagaatggacaagactccacagtcctcggatagtgagaacacgaagatagagcttactttaacagagctgcatgacggactgccggacgaaacagctaacctgcttaacgaacagaactgtgtgacccacagtaaagccaaccactctctccacaatgagggggcgatatag

SEQ ID NO: 113423 - DNA, 2565 bp, synthetic construct
  misc_feature 1..2565: note = Description of Artificial Sequence: Synthetic coding sequence
  source 1..2565: mol_type = other DNA
atgatcggttgtggggcttgtgaaccgaaagtgaaaatggcaggggggcaggctgccgccgcgttgcccacatggaagatggccgccaggagatcactttccgctagagggagaggtattctgcaggcagctgccggtcgactgctcccgctactgctcctcagctgttgttgcggcgccggcggctgcgccgccgtgggagaaaatgaggagaccgtcattatcggcctgcgcctcgaagacacaaacgatgtgagcttcatggagggtggtgctctgagagtgtctgagcggaccagggtaaagctgagggtgtatgggcagaatataaacaatgagacctggtccagaattgcatttacagagcatgagagacggaggcactctcccggtgagcggggcctcggtggacccgctccacctgagccggattccggtccccaacggtgcggcatcagaacctccgacatcataatcctcccccacatcattctgaataggaggacttcgggaatcatcgagatagaaattaaacccctaaggaaaatggagaaatccaagtcctactacctgtgcacatcactttccacaccagccttgggcgcaggtggcagcggctcaacagggggggccgtcgggggtaaagggggtagtggcgtagcaggactcccacccccgccttgggctgagacaacctggatttaccacgacggggaagacactaagatgatcgtgggcgaagaaaagaagttcctgctgcccttttggttacaggtgatttttataagcttgctgctatgtctgtccgggatgttcagcgggctgaaccttggactgatggctctagacccaatggaattgaggatcgtgcagaattgcggaactgaaaaagagaagaactacgcaaaacgcattgaacccgttcgaaggcaaggaaattatctgttatgctcccttcttctcggcaatgtactggtaaacacaacactcacaattctgttagatgacatcgccgggtctgggctggtagccgtcgtggtgtcaacaattgggatagtgatcttcggggagatagtgccccaggctatatgttctaggcacgggttagccgtcggtgctaacacaatcttcttgaccaagttttttatgatgatgacattccctgctagctacccagtcagtaagctcctcgattgtgtgcttgggcaggagatagggaccgtctacaatcgagagaagttgcttgagatgctgagagtgaccgatccttacaatgacctcgtgaaggaggagctcaacatcatccagggcgctctggaattgaggaccaaaaccgtcgaggacgtcatgactccgctgcgggactgctttatgattacgggtgaggccatcctcgactttaacaccatgagtgagatcatggaaagcggctacacacgaatccccgtttttgagggagagcggtctaatatagtcgatcttctctttgtgaaggatctggcattcgttgatcccgacgactgtactcccttaaaaactatcacaaaattttacaatcatcccttgcatttcgtgtttaatgataccaaactggacgccatgttggaagaatttaaaaaaggaaagagccatctggcaatcgtacaacgcgttaacaacgagggagagggagaccctttctatgaagttctcggaatagtcaccctcgaggatgtcatcgaggaaattatcaagtccgaaatcttagatgagacagacctgtatactgacaaccggacgaagaagaaagtggcacatagagaacggaaacaggacttttcagcctttaagcagacagactccgaaatgaaggtaaaaatctcccctcaactcttattggccatgcaccttgttttcatttccattgaagtagaagccttttccccatcccagatgtcggaaaagatcctcctgcgtctgctgaagcaccctaatgtcatccaagagctgaaatatgacgaaaaaaacaagaaggcaccagaatattatctatatcaacgaaacaagcccgtggactatttcgtcctcatcttgcaggggaaagtggaggtagaggcaggcaaggaaggcatgaagtttgaggccagtgcattcagctattatggtgtcatggctctgaccgcaagtccaggcgaaaacaagtcccccccacgaccgtgtggcctgaatcacagcgattcactgtcccgctctgataggatcgatgctgtcacacctacccttgggtctagcaacaaccagctgaacagttcactgctgcaggtgtacattccagattattctgtccgggccctgagtgatctgcagttcgttaaaatctctaggcagcaatatcaaaacgcgcttatggccagccgcatggacaaaacacctcaatctagtgactcagaaaacacaaagatcgagctgaccttaacagagctgcatgacggtctacctgacgagactgccaatctgctgaatgagcaaaactgcgtaacccattcaaaggccaatcatagccttcacaatgagggggctatatag

SEQ ID NO: 113424 - DNA, 2631 bp, synthetic construct
  misc_feature 1..2631: note = Description of Artificial Sequence: Synthetic coding sequence
  source 1..2631: mol_type = other DNA
atgatcggttgtggggcttgtgagccaaaggtcaagatggccggcggacaggccgcggctgccctccccacctggaaaatggccgctcgcaggagtctgagcgcacgaggacggggcatcttacaggcagctgcagggcggctcctccctctactgttactgtcctgctgttgcggagccggcgggtgcgctgccgtaggagagaatgaagagactgtgattatcggccttcggttggaagatacaaacgatgttagtttcatggagggaggcgctctccgcgttagtgaacgcacaagagtcaagctgagggtctacggccagaatattaacaacgaaacatggagtagaattgcattcacagagcatgagaggcgaagacacagcccgggtgaacggggtttggggggacctgctccccccgaaccagacagtggaccccagcggtgcgggatccggacatccgacatcattattctaccccacattattctcaatagacgcaccagcgggattatagagatagaaatcaagccactgagaaagatggagaagtccaaaagttattacctctgtacgtctttatccacacctgccctgggcgccggggggtctggctctacagggggtgccgttggcggcaaaggaggatcaggtgtagcagggcttcctccccccccttgggccgaaactacatggatctatcacgatggtgaggatactaagatgatcgtgggggaggagaagaagtttctcctgcccttttggctgcaggttatcttcatatctttgctgctttgccttagcggcatgttttccggtctcaacctggggcttatggccctagacccaatggagctaaggattgttcagaactgcgggactgaaaaagaaaaaaactacgctaaacgaattgaaccagtccggagacaggggaattacttgctttgctctcttcttttgggtaatgtgctcgtgaataccacactaacaatcctcctggatgacatcgccggcagcggtctggtggctgtcgtcgtgagcacaatcggcattgtgatcttcggcgaaattgtgccgcaggctatttgttctaggcacggactagctgtgggagctaatactatcttcctcaccaagttttttatgatgatgaccttcccggccagctacccagtgagtaaacttctggactgcgtgttggggcaggagattggaaccgtgtacaacagagagaagctgttagaaatgttgagagttacagatccttataatgatcttgttaaagaagagctgaatatcattcagggcgctctcgagctgaggaccaaaactgtcgaggacgtgatgaccccactccgagattgttttatgatcactggggaagccattttagactttaacacaatgtccgagatcatggagtccggctacactaggatacctgtttttgaaggcgaaagaagcaatattgtggatctcttgtttgtgaaagacctcgccttcgtcgacccagacgactgtacaccgctcaaaactatcacaaagttctataaccatcccctgcacttcgttttcaatgacacaaaactcgacgcgatgctggaagaattcaagaagggcaagtctcatttggctattgtacaaagagtgaataatgaaggcgagggggacccattctatgaagtgctggggattgtaacccttgaggacgttatcgaggagatcatcaaatccgagatccttgatgagacagacctatatacagataatcgcacaaagaagaaagttgctcacagggagcgcaaacaggatttttccgccttcaagcagactgacagcgagatgaaggtcaaaattagcccacagttattattggccatgcacctagtgttcataagcattgaagtcgaagcctttagcccctcccagatgtcggagaagattctcctgaggctcttgaagcacccgaacgtcatacaggagctcaaatatgatgagaagaacaaaaaagcgcctgagtattatctctaccagcgaaataagccagtggattatttcgtgttgatcttgcaggggaaagtggaagtcgaagccggcaaggagggaatgaagtttgaagcgtctgccttctcgtattacggcgtgatggccttgacagcatctccagtccccctgtcgctgtcacgcacctttgtcgtatctagaacagagctgctggccgccggaagtccgggggagaataaatccccacctcggccatgcggcctgaatcactcagactcactctccagaagtgatcgcatcgacgccgtgacacctactcttggtagctccaataatcagctgaattcaagcctcttacaggtgtacatcccagactacagcgttcgagcattatctgacctacagttcgtgaagattagtagacagcagtaccagaatgccttgatggcatctagaatggataagaccccccagtcctccgatagcgaaaacacgaaaatagagcttaccctgacagaactccacgatgggctccccgatgaaacggccaatcttcttaatgaacaaaattgcgtcactcattctaaagctaaccacagtttacataatgagggggccatttag

SEQ ID NO: 113425 - DNA, 1725 bp, synthetic construct
  misc_feature 1..1725: note = Description of Artificial Sequence: Synthetic coding sequence
  source 1..1725: mol_type = other DNA
atgatcggatgcggggcttgtgagcctaaagtgaaaatggccgggggccaggccgccgccgccctcccaacctggaaaatggcggcgcgtcgcagcttaagcgctcgcggcagaggaattcttcaggcagccgcaggacgattgctcccattactgctgctttcctgctgctgcggagccggagggtgcgctgcggtaggcgagaatgaggaaactgtgatcattggactccgtttagaggatacaaatgacgtcagtttcatggagggcggcgcattgcgggtgtcagagcgcacaagagtgaagcttcgcgtgtacggacagaacattaacaatgaaacctggagtcgcatcgcatttacagaacacgagcggagaaggcacagtcccggtgagcgcggccttggaggaccggctccacctgaaccagattccgggcctcagagatgcggcatccgtacctccgatatcattatcctaccgcatattatcttaaatagaaggacatccggcataatagagattgaaatcaagcctctgaggaagatggaaaaatccaagagctattatctatgcacatctctgtcaacaccagctcttggagccggggggtccggctcaacgggcggcgcggtcggcgggaagggcgggtctggtgttgccggactccccccccctccctgggccgagaccacttggatctaccacgatggagaggacacgaagatgatagtaggggaggaaaaaaaattcctcctccctttctggctgcaggtgatcttcatttcgctactgctatgtttgtccgggatgtttagcggattgaacttgggccttatggcacttgatcctatggagctgcgtatcgtgcagaattgtggcacagagaaagaaaagaactatgcaaaacgcatcgaaccagtgaggagacagggaaactaccttctatgctccctattgcttggcaacgtcttagttaacacaacactgaccattctgcttgacgacatcgctggaagcggacttgtagccgtggttgtgtccaccattggcatagtgatctttggtgaaatcgtaccacaggctatttgttctagacatggtcttgctgtgggcgctaacactatcttcctaactaaattcttcatgatgatgacctttcctgcctcctaccccgtttccaagctgttggattgtgtactaggtcaggagatcggtacagtgtacaatcgcgaaaaactgttggagatgttacgagtgactgacccatataatgatctcgttaaagaagaactcaatatcatccagggagcactggaattgcggacaaaaacggtggaggacgtcatgacccccttacgagattgtttcatgattactggagaggctatcctggacttcaacaccatgtctgagattatggaatccggctatacccggatccctgtattcgagggggagcgctcaaacatagtggacttgctgtttgtgaaggatctggcgtttgtggacccagacgactgcacgccgctgaagacaattaccaagttctacaatcatcccctgcatttcgtctttaacgacacaaaactggacgcaatgttggaggagtttaagaaagagcataccaataagaaaccaaaatcatatcaacactgcaacgaacaaaactgcgttacccatagcaaagctaatcattcgctgcataatgaaggcgccatttag

SEQ ID NO: 113426 - DNA, 2124 bp, synthetic construct
  misc_feature 1..2124: note = Description of Artificial Sequence: Synthetic coding sequence
  source 1..2124: mol_type = other DNA
atggccgcagccgttgccgcagccggcagactggggtggctcttcgcagccctatgtctgggtaacgccgcaggcgaggctgctccgggcccccgagtcctggggttttgcctggaggaggatggagccgcaggcgcgggatgggtgagaggcggcgccgcgcgggacacaccagacgccacattccttctgaggttatttggtccaggcttcgcgaattcatcatggtcttgggtggccccggaaggcgccggctgtcgggaggaggcagcctcaccagccggggagtggagagctctgcttcgtctacgcttacgagccgaagccgtacgcccccatagtgccctcctggccgttcgggtcgagcccggcggtggagctgctgaggaagctgcacctccatgggcgttgggacttggggcggctgggctgctggcacttgcggctctagctagagggctccagttgagcgctctggccttggcaccggcggaagtccaggtacttagagagtccggcagcgaagcagagcgggctgccgcacgaaggctggagcccgccaggcggtgggcgggctgtgccctgggcgctctattgctgctcgcttccttggcccaagccgcactggctgtccttctttatagagccgcaggccagcgtgccgtgcctgcagttctgggctcagcgggactggtcttcctggttggagaggtcgtgcccgccgccgtatcagggcgctggaccctcgctttggctccacgtgcccttggcctgtctcggctggccgtgctgctcacattgcccgtggccttacctgtggggcagctgctcgaacttgcagctaggcccggtcgattgcgggaacgcgtcctggagttggcccgagggggaggggatccatactctgacttgtctaaaggggtgttacggtgtcgaactgtggaagacgtcttgacgccattggaagactgctttatgcttgatgccagtacagtgctggattttggagttctggcaagcataatgcagtctggtcacactcgtatacctgtctacgaggaggaaagatcaaatattgttgatatgttgtacctgaaggacctagccttcgttgaccccgaggattgcacaccacttagtacaatcaccagattctacaaccatcctctgcacttcgtttttaatgatacaaaacttgacgccgtgctagaggagttcaagagaggcaagtctcaccttgctatcgtacagaaagtgaacaatgagggagagggagatccattttatgaggttctgggtttggtgacactggaagatgtgatcgaagaaattatcaggtctgagatcctggacgagtccgaagactacagggacacagtggtcaagcggaagcccgcgtccctcatggcccccttaaaaagaaaggaagaattttcactgtttaaggtaagcgatgacgagtacaaggtcaccatcagccctcagctgctgctggcaacacaacggtttctgagtcgcgaagtcgacgtgtttagcccccttaggatctcagagaaggtgttgcttcatctccttaagcatccatctgtgaatcaagaggtgcggttcgatgaaagcaatcgtctcgccacacatcactatctctatcagcgttcccagcccgttgactactttattttgatactgcagggacgtgtcgaggttgaaattggtaaagaaggattgaagttcgagaatggggctttcacatactacggagtcagcgccttgacagtaccgtccagcgtgcaccagtcccctgtatcctctctgcagccaataaggcacgaccttcagcccgatcccggagatggcactcactcgtctgcctattgtccagattataccgtccgagccctctctgatttacagctaatcaaagtgactcgcctgcagtacttgaacgcccttcttgccacccgcgcacagaacctccctcagagcccggaaaacactgatttacaggtaatacctggatcacaaactcgactcctgggagaaaaaacaactacagctgctggcagctcccactctagacccggagttcctgtcgagggtagccctggccgcaatccaggcgtgtag

SEQ ID NO: 113427 - DNA, 1980 bp, synthetic construct
  misc_feature 1..1980: note = Description of Artificial Sequence: Synthetic coding sequence
  source 1..1980: mol_type = other DNA
atggccgccgccgtggccgctgctggaagactcgggtggctgtttgctgccctttgtcttggtaatgcggcaggagaagccgccccagggccaagagtgctgggtttttgcctggaagaggatggcgcagctggggccggctgggtgcgaggcggcgctgccagagatacacccgacgcaacgttcttacttaggttgtttggtccagggtttgccaattcttcatggagctgggtggctccagaaggagccggatgccgggaggaagctgcctccccagcaggcgagtggagagccttactccggctgcgccttagagcagaggctgttcgtccgcattctgctctgctggctgtccgggtcgagcctggtggcggggcagcagaagaagccgcccccccctgggccctcggcctcggcgccgcaggacttcttgccttggccgccctggcgcgagggctgcagctgtccgctctggcgctggcgccggccgaggtccaggtgctgcgagaatccgggtccgaggcagagcgggctgcagcacgccgtttggaacccgctcgtagatgggcgggttgcgctctgggtgctctgttgctattagcgtccctggcccaggctgccttagcggtgcttctctacagggccgctggccagcgtgccgtgccagcagtgctagggagtgccggcctggtgtttctggtgggagaagtcgtgcccgctgccgtgagcgggagatggacgctggcacttgcgcctcgcgctctggggttgagcaggctggccgtattgttaaccctgcccgtggctctgccagtgggacagcttttggaactggcggctagacccgggagactacgagagagagtgttagagctagctagaggtggaggagacccttacagcgacctgtccaagggagtgctaaggtgccgcaccgtagaggatgtgctgaccccacttgaagattgtttcatgctggacgcatctactgtgttagactttggagtgttagcctcgataatgcagtcgggccacacccggattcccgtctatgaagaggaacgctcaaatatcgtcgacatgctgtacttgaaagatctcgcctttgtggaccctgaggactgtaccccactgtccacaattacccggttctacaatcaccctttgcattttgtgtttaatgacaccaaacttgatgcggtgctggaggaatttaaacggggcgatactgttgtcaaaaggaaacccgcttccctgatggccccgctgaagagaaaagaagagttttccctctttaaagtatctgacgatgaatacaaggtcactatctctcctcagctgcttctggctactcagaggtttttgagtagagaggtggacgtcttttctcccttgaggatcagtgagaaggtgctgttacatcttctgaagcacccctccgtgaaccaagaggtgcggtttgatgaaagcaatcgcttagcaacccatcactatttataccagaggagccaacccgttgactattttattctcattttgcaggggagagtggaggttgaaatagggaaggaaggcctcaaatttgagaatggcgctttcacctattatggtgtgagcgccctcacagtaccttcctccgtgcaccaaagcccagtgtccagcttgcagccaattcggcacgacctccagcctgatcccggcgacgggacacactcttctgcctactgcccagactacactgtcagggccctgagcgacttgcagctcatcaaggtgacacggcttcagtacctgaacgctcttctagccactcgggcacagaatctcccacaatcacctgaaaacacagacctccaggtaatccccggatctcaaacccggttactgggtgagaaaactaccaccgctgctggcagtagccattcccgccctggggtcccagtcgaggggtctcctggcagaaacccaggcgtgtag

SEQ ID NO: 113428 - DNA, 2043 bp, synthetic construct
  misc_feature 1..2043: note = Description of Artificial Sequence: Synthetic coding sequence
  source 1..2043: mol_type = other DNA
atggccgccgctgtggctgctgccggaaggctgggctggcttttcgccgccttgtgtctgggcaatgccgcaggcgaggccgcacctggacctagagtgttaggtttctgtctcgaagaagacggggcagctggggccggctgggttagggggggcgccgcgcgggacactccggatgccacctttctgctccgcctgtttggaccggggtttgctaactctagttggtcatgggtagctcctgagggcgccggttgtcgggaagaggcagcctctccagcaggcgagtggagggccctcctgagacttcgtcttagagctgaggccgttcgccctcatagtgccctgttggccgtccgagttgagcctggtggaggagcggcagaggaggccgctcccccatgggccttgggcctgggcgcagccggcctcctcgccctcgctgctctggctagggggctgcaattgtccgcactcgcacttgcacccgcagaagttcaggtactaagagagagcggatctgaggcagagagggccgccgccagaaggctggagccagcacgccgatgggctggctgcgccctgggggccttgttgctgttggccagccttgcccaagccgcccttgccgtactcctgtacagggcggccggtcagcgggcagtgccagcagtactcggaagcgccgggcttgtgttcctcgtgggcgaagtggtccccgccgccgtctcaggcaggtggaccttagccctggccccccgtgcactgggcctatccaggctggcagtgctactcaccctccccgtggcactacctgtcggccaacttcttgaactggccgcccggccaggtcgtttacgcgagagagtactcgaactagccagagggggcggagacccttattccgatctgtccaaaggcgtgttgaggtgcagaacagtagaggacgtgttgacccctctggaggactgctttatgttggatgcaagtaccgtgctggatttcggggtactggcttctatcatgcaaagtggccatactaggattcctgtttatgaagaggaacgctcaaatattgtagatatgctatacttaaaggaccttgcctttgtggaccctgaagattgtacgccgctctccaccataaccagattctataaccaccccctgcatttcgtgttcaatgatactaagttggacgcagtgctcgaagaattcaagcggggggataccgtcgtgaagcggaaacccgcttcactgatggctcccctcaagagaaaggaggaattctccctgtttaaagtcagtgacgacgagtataaggtgaccatctctccccagctgctgctagctactcagaggttcctatcccgggaggtggacgtctttagcccactccgcatttctgagaaggtgctcctgcacttgcttaaacatccatctgttaaccaggaagtaaggtttgatgaaagcaatcgcctggcaacccaccactatctttaccagcgtagtcagccagtggactattttatacttatactccagggtcgggtggaagtggagattggcaaagaagggttgaaattcgagaacggtgcttttacctactacggcgtgtctgcacttacggtgccttcttctgtccaccagagtcctgtatcaagcttacaacccatccgacatgatctgcagcccgatccaggagacggcacccactccagcgcctactgcccagactatacggtgcgcgccttgtccgacctgcagcttattaaggtgaccagattgcagtatctgaatgcattgttggcgactcgggcccagaacctacctcagtcaccagaaaacacagacctccaggtgattcctgggagccagactcgattactgggcgagaagaccaccacagccgccggaagcagccactccaggcctagcctgcctcttcttccacgcggtagagacagtgctgcttacagtgattcggacctattcggactctcccacctagtctcagccgtgacagcttttgtttggccatag

SEQ ID NO: 113429 - DNA, 2328 bp, synthetic construct
  misc_feature 1..2328: note = Description of Artificial Sequence: Synthetic coding sequence
  source 1..2328: mol_type = other DNA
atggcacccgtgggcggcggtggcagaccggtggggggacccgcgaggggtcgcctgctgttagccgctcccgttctgctcgttctgttatgggcacttggagcaagaggacagggcagccctcagcagggcacaatcgtcggcatgcgtttggccagctgcaataaaagttgcggcaccaatccggacggaataatctttgtttccgaagggagcaccgttaacctgcggctttacggctactctttgggcaacatttctagtaatctgatatcctttaccgaggtcgatgacgcagagaccctgcataagagcacctcctgtctggagctcaccaaagacctcgtggtacagcagctggtaaatgtgagtagaggaaatacgtcaggtgttttagtggtcctgaccaagttccttcggaggagcgagagcatgaagctgtatgcgctgtgcacccgtgctcagcccgacggcccttggctgaagtggacagacaaagatagcctcctatttatggtagaagaacctggaaggtttttgccgctttggctgcacattctcctgattacagtgctcctggtcttgagcggaatttttagcggccttaacctcgggctgatggcgttggaccctatggagctacgtatagtccagaattgcggaaccgagaaggagcgaagatacgccaggaaaatcgagccaatcaggagaaaagggaactatctgctgtgcagtctgctgcttggtaacgtactggtaaatacatccctgactatactgcttgacaacctcatcggatcaggcttaatggccgtggcctcctcaactatcggaatcgtaatttttggagaaatcttgccacaggccctgtgttctagacacgggcttgcggtgggtgccaatacgatcttgctcaccaaattcttcatgctgctgactttccctctgtccttccccataagcaagcttctcgacttctttctgggccaggaaatcaggacagtctacaatagagagaagttgatggagatgcttaaggtgacagaaccatataatgacttggtaaaggaagaactgaacatgattcagggggctttagaactccgaactaaaactgtcgaggacatcatgactcagctgcaggactgtttcatgatccgctctgatgcgatactggatttcaatacaatgagcgagataatggagagcgggtatactcgcattcccgtgttcgaggatgaacaaagcaatattgttgacattctttacgtgaaggacctagcttttgtggacccagacgactgcacacctctgaagactatcacaaggttctacaaccacccagtgcatttcgtgttccatgatactaagttggacgctatgctggaggaatttaagaagggaaaaagtcatctcgcaattgttcagaaggtcaacaatgagggagagggagacccgttctacgaagtgctaggcttggttaccctcgaggatgttatagaagaaattattaagtcagaaatcctggatgaaagtgacatgtacactgataaccgttccagaaagagggtctccgaaaagaacaaacgagattttagcgcattcaaagacgccgacaacgagctgaaagtgaaaatctcgccccagttactcctcgccgcccatcggtttcttgctacagaggtcagccagttttcaccctctttaatcagcgaaaagatcctgctccggttgttgaagtaccccgacgtgatacaggagctaaaattcgatgaacataataagtattacgctcgccactatttgtatacacggaataagcccgctgattattttatcctgatcctccagggcaaagtggaagtggaggcgggcaaggagaatatgaaatttgagacgggggcgttctcatactatggcacaatggcccttactagcgtcccttcagacagatcccctgcacaccctacacctttatcaagatccgcctctctctcataccccgataggactgatgtgagcacggctgcaactctcgccggctcttccaatcagtttggctcttcagtgctggggcagtacatctccgatttttcagtccgcgcactggtggatctgcagtacatcaaaatcacccgccagcagtatcaaaatggactgctggcatcgaggatggagaattccccccaattccctattgatggctgtacgactcacatggaaaatcttgccgaaaagtccgagctgcccgtcgtcgatgaaaccacgacacttctgaatgagcgtaacagccttcttcataaagcatcacacgagaatgcaatatag

SEQ ID NO: 113430 - DNA, 792 bp, synthetic construct
  misc_feature 1..792: note = Description of Artificial Sequence: Synthetic coding sequence
  source 1..792: mol_type = other DNA
atgtataccgacaacagatctcggaaaagagtctcagagaagaataagagggactttagtgctttcaaagatgctgataatgaactgaaggtcaagattagccctcaactgctgctggcagctcaccgattcctggccaccgaggttagccagttttctcccagtttaatctccgagaagatccttttgcgactgctgaaatatcccgacgtgatacaagagctcaaattcgatgaacacaacaagtactacgctaggcactacctgtacactcgaaacaagcctgccgattattttatccttatactgcagggtaaggtggaggtggaagctggtaaggaaaatatgaaatttgagaccggagcattcagctactatggaaccatggctctgacatcggtgcccagcgaccgctcccccgctcaccctacaccgctatcacgaagtgcctccctcagctacccagaccggaccgacgtgtctacggcagctactcttgcaggaagtagcaaccagttcggcagtagcgtactaggacagtacatatcagatttcagcgttagggccctggtggacttacagtacattaagccccagtcctggccctgcttctcacggccaggtgatcgagtgtgcttacccgcacccccgtctatgaatagctccctaccgcacgcagaccactctgccgcggtaccagagagagccgccggattttcccacggagaacagcctagcgtcagtcaccgcagagtacatcatccgcatggagagcttgggagggaagtgtag

SEQ ID NO: 113431 - DNA, 2193 bp, synthetic construct
  misc_feature 1..2193: note = Description of Artificial Sequence: Synthetic coding sequence
  source 1..2193: mol_type = other DNA
atggcatcggggaggggtgcgtctagcagatggttctttactcgggaacagctggagaacactccatcccgccgatgtggagtggaggctgataaagagttgagttgtagacaacaagccgccaatctaatacaggagatgggacagaggctcaacgtgtcgcagctgaccatcaatacagccatagtctacatgcaccgcttctatatgcaccactccttcacaaagtttaataaaaacataatctcttccacagcactgttcctggctgccaaagtcgaagagcaggcgagaaagctcgagcatgtgattaaggtggctcatgcatgtctgcacccactggaacccctgctggatactaaatgtgatgcatatttacagcagactcaggaactcgtaatactggagaccattatgctacagactctcggttttgaaatcaccatcgagcatccgcatactgacgtggtgaaatgtacacaactggtgcgggcttccaaggatcttgcgcagacatcctattttatggccaccaattccctccacctgacaaccttctgcctgcagtacaagccaacggtgattgcctgcgtgtgtatacatctcgcctgtaagtggtcaaattgggagatcccggtgagtactgatggtaaacattggtgggaatacgttgatccaaccgtaaccctcgaattgctggatgagctcacccatgaatttttgcagatcctggagaaaacgcctaacaggctcaagaagatccggaattggcgcgcaaaccaggccgcacgaaagccaaaggtggacggacaagtcagcgagacacccttgctgggctcgagtctggtgcagaatagtattctagtggactccgtcactggggtgccaactaacccgtcatttcaaaaaccttcaacttccgctttccccgctcccgtcccattgaatagcggcaacatctcagtgcaagactcgcatacgtccgacaatctgagcatgctggctactgggatgccctcaacgtcttacggcctctcttcccaccaggagtggcctcagcaccaggactcggctcgcacagagcagctgtattcacaaaagcaggagacttcactgtccggatcacaatacaatatcaactttcagcaggggccctctatcagtctgcatagcggcttacaccataggcctgacaagattagcgatcatagctccgtgaagcaggagtacactcacaaagcaggctctagcaaacatcacggccccattagcacaacacctggcattatccctcaaaagatgtcgctcgacaagtacagggagaagcgaaagctggaaaccctggaccttgacgtgagggaccattacatcgccgcacaggttgaacagcagcacaagcagggccagtctcaagcagcctctagcagttccgtaacatcccccataaagatgaagatcccaatcgcaaacacggagaaatacatggcggataaaaaggagaaaagcggcagcttgaaactaaggatccctatcccccccaccgacaagagcgcatcgaaggaagagttaaaaatgaaaataaaagtcagcagctctgagcgacactcctccagcgatgaagggtccggcaagtcaaagcactccagtccacatatctcccgagaccataaagaaaagcataaagaacacccaagcagccgccatcatacatctagccataaacattctcactcccacagtggctcttcctcgggggggagtaaacacagcgcagacggtatcccaccaaccgtacttagatcccccgttggcctcagctcagatggcatttccagcagcagttcctccagccgaaagcgtctgcacgtcaacgacgcaagccacaatcaccactccaaaatgagtaaaagcagtaaaagcagtgggtccagcagctcctccagctcctctgtgaagcaatacattagttctcataatagcgtgtttaaccaccccttaccacccccaccacctgtcacctatcaggtgggttacggacatctgtccacattagtcaaactggacaaaaaacccgtcgaaaccaatggccccgatgctaatcacgaatattcaacttccagccagcacatggactacaaagatactttcgacatgttggacagcctactgtccgcccaaggcatgaatatgtag

SEQ ID NO: 113432 - DNA, 1992 bp, synthetic construct
  misc_feature 1..1992: note = Description of Artificial Sequence: Synthetic coding sequence
  source 1..1992: mol_type = other DNA
atggcttccggaagaggtgcttcaagtcgttggttctttacgcgagagcaactcgagaacacaccaagtagaagatgtggtgtcgaggctgataaagaactcagctgcagacagcaggccgcaaacttgattcaggaaatgggccaacgcctgaatgtgagccagctaactataaatactgctatcgtttatatgcataggttctacatgcaccacagctttactaaattcaacaaaaatattatatccagtacagccctgtttctagctgccaaagtggaggaacaggcccgcaaactggaacacgtaatcaaagtcgctcacgcctgcctacaccccctggaacccctgctggacactaagtgcgatgcttacctccagcagacccaggagctggtaatcctggagactattatgctccagactttaggttttgaaatcactattgaacacccgcacacagatgtcgtgaaatgtacgcagttagttagggcaagcaaagacctagcccagacgtcctatttcatggccacaaattctctgcacctgactacattctgcctgcagtataagccgaccgtaatagcctgcgtatgtattcatttggcttgtaaatggagcaactgggagatccctgtgagcaccgacggcaaacactggtgggagtatgtagatccaaccgtgaccctagagctgctggatgagctaacccacgagttcctgcagattctggagaagacaccgaacagattaaaaaaaattcggaattggcgtgccaaccaggcagcccgtaaacccaaggtcgatggccaggtgtctgagacacccctgttgggctcttctttggtgcagaatagcatcctcgtagactctgtcaccggggtccccacaaacccatcctttcagaaacccagtaccagcgcttttcctgccccagttcctctgaattcagggaacatctctgtgcaggattctcacacttccgacaatctaagcatgctcgcgaccgggatgccctctacctcttacgggcttagcagtcaccaagagtggccacagcaccaggacagcgcacgtacagagcagttgtactctcagaagcaggagactagtcttagcggttcccagtacaatattaacttccagcaggggccttctatttcactgcattcaggacttcatcaccgaccagataagatatccgatcactcatccgttaaacaggagtatacacataaagcggggtcaagtaagcaccacggccccatcagcaccacccccgggattatcccgcagaagatgtcgttagacaagtatagagagaaacgcaagcttgaaaccctcgacttggacgtccgcgaccattatatcgccgcccaggtcgagcagcagcacaagcagggtcaatcacaggctgcctctagcagctccgtcacctcccctatcaagatgaaaattcctatcgctaatactgaaaaatacatggctgataaaaaggagaaatcagggtcactcaaactgcggatacctatcccaccgacagataagagtgcgagcaaagaggagctcaagatgaaaatcaaggtctccagtagcgagcgtcatagctccagcgacgaaggcagtggcaaatcaaagcactcatccccacatatcagccgagatcataaagagaagcacaaagaacacccctcttccaggcaccacacctccagccacaagcattctcattcccactcagggagctcctccggaggatccaaacattcagccgacgggatcccccccaccgtgctcaggagccctgtggggctgagtagtgacggtatctctagttctagttccagctccaggaaacgcctccatgttaacgacgcctcacataaccatcacagcaagatgtcaaaaagtagtaagtcatccggagggctccgtactagccagcatcctcgcgaaaccgggcaagaggcctccggggaccagcggtcttag

SEQ ID NO: 113433 - DNA, 1467 bp, synthetic construct
  misc_feature 1..1467: note = Description of Artificial Sequence: Synthetic coding sequence
  source 1..1467: mol_type = other DNA
atggccactaatagcctccatctgaccacattctgcttgcagtacaagcctacagtaattgcttgtgtatgtatccacttggcctgcaaatggtcgaattgggagattccggtgtctaccgatggcaagcactggtgggagtatgttgaccctactgtgaccctggaattacttgacgaacttacccacgaatttctgcagattctagagaagacacccaacaggctaaaaaagatccgcaactggcgtgctaatcaggctgcccgcaagcccaaggtggacggccaggtctctgaaacccccctcctaggatcttctcttgtacagaactcaatcctggttgactccgtcacgggggtcccaacaaatccatcatttcagaagccgtctacctccgctttccctgcaccagttccactaaactccggcaacatttccgtccaggattcccatactagtgataacctctcaatgcttgccactggaatgccaagcacaagttatgggctgtcttctcaccaagagtggcctcaacaccaggattccgctagaactgagcagctatactcacagaaacaggagacctccctatccggctcgcagtacaatataaattttcaacagggcccttccatctccctgcatagcggccttcaccatagacctgataagatatcagaccattctagcgtgaaacaggagtatactcataaggccggctctagtaaacaccatggacctatcagcacgacaccgggcattatccctcagaaaatgagcctggacaagtatcgtgagaagagaaagctggaaaccttggatctggatgtccgggaccactatatcgctgctcaggtggagcagcaacacaaacaggggcagtcccaggcagcaagtagttcctccgtgacctcccccataaagatgaaaattcccatcgctaacaccgaaaagtatatggccgacaagaaggagaagtcaggttcactcaagctccggataccaatcccccctacagataagagtgccagtaaggaggagctgaagatgaagattaaagtgtcctcatctgagcggcatagcagtagcgacgagggaagtggtaaatcaaaacattctagtccacacataagtcgcgaccacaaagagaaacacaaggagcacccgagttcacggcaccacaccagttctcataagcacagccatagccatagtgggagttcctcaggagggtctaaacattccgcggacgggatccctcctacagttctgcggtcaccagtgggccttagtagcgatggtatctccagctcatcaagttcttcccgaaagcgcctccatgttaatgacgcgagccataatcaccattccaaaatgagcaagtcctccaaaagttcaggcggccttcgcacgtcacagcatccaagggagaccggtcaggaagcctccggggatcagcgctcctag

SEQ ID NO: 113434 - DNA, 864 bp, synthetic construct
  misc_feature 1..864: note = Description of Artificial Sequence: Synthetic coding sequence
  source 1..864: mol_type = other DNA
atggagttcaacccaagtgatcacccgcgggcctcaacgatcttcctttccaaatctcagaccgatgtcagggaaaagcgcaagtccctgttcataaaccatcatcctccaggtcaaattgcacgaaaatactcttcatgctcgactattttcctcgacgactccaccgtttcgcaacctaatttaaagtacaccattaaatgtgtggcactggccatctattaccacattaagaatagggatcccgacggtcggatgctgttagacatctttgacgagaacttacaccccttaagcaaatcggaagtcccccccgactacgacaagcacaaccctgaacaaaagcaaatctacagattcgtgaggacgctgttttcagcagcccagcttaccgccgagtgcgccatagtgacattggtgtacctggaaagactgctgacttatgccgagatcgacatttgccctgccaattggaagagaatcgtgctgggagccatcctactcgcttccaaggtgtgggacgatcaggccgtatggaatgtagactactgccagattctgaaggacataacagtggaggacatgaacgaactggaacggcaatttttggagttgttgcagtttaatattaacgtgccttcttccgtctacgctaaatattactttgatctccgatcattggcagaagccaataatctcagctttccactagaaccactctctagagaaagagcccacaaattggaggcaattagtaggctttgtgaggacaagtacaaggatctaagacgcagtgcccgcaagaggagcgccagcgcagacaacctgacattacccagatggtctccggcaatcattagttag

SEQ ID NO: 113435 - DNA, 951 bp, synthetic construct
  misc_feature 1..951: note = Description of Artificial Sequence: Synthetic coding sequence
  source 1..951: mol_type = other DNA
atgggtaatacaacctcttgttgtgtgtcttctagtccaaagctgcgtcggaacgctcattccagactcgaatcctataggcccgacaccgatctgtctcgggaggatacaggttgcaatttgcagcacatctccgatcgcgagaacattgatgtaagggaaaaacggaagtcattgtttatcaaccatcacccacctggccagatagcaaggaaatattcgagttgtagcaccattttcctggacgatagcacagtctcacaaccaaatttgaaatacaccattaaatgtgttgcgttagcaatttactaccacattaagaatcgcgatccagatggacgtatgctgcttgatatctttgacgaaaatctgcaccccctgtcaaaatctgaagtcccgcccgactacgataagcataaccctgaacagaagcagatttaccggttcgtgcggaccctcttctccgctgcccagctgaccgcagaatgtgcaattgtcaccttagtgtacctagaacggctcctgacctacgccgaaattgacatatgccccgccaattggaaaagaatcgtattgggagccatcctcctggcctccaaggtgtgggatgaccaggcggtatggaacgtggattattgtcagatcctgaaagatataactgtggaggacatgaatgagttggaaagacagttcctcgagctgttgcagttcaatatcaacgtgccgtcttctgtgtacgcaaaatactacttcgacttgcgatcactggccgaggccaacaatctgtcattccccctggaacccttgagcagggaacgggctcataagttggaagcgatttcccggctatgtgaggacaaatataaggaccttagaagaagtgccagaaagaggagcgccagtgctgacaatctgaccttaccccgctggtccccagcaatcatctcgtag

SEQ ID NO: 113436 - DNA, 1026 bp, synthetic construct
  misc_feature 1..1026: note = Description of Artificial Sequence: Synthetic coding sequence
  source 1..1026: mol_type = other DNA
atgggaaacacaacctcgtgttgcgtctcgtcatccccgaagctgcggagaaatgcacacagccggctagaaagctatcgccccgacaccgacttaagtagagaagacaccggatgcaatctccagcacattagcgatagagaaaacatagatgaccttaatatggagtttaatccaagtgaccatccccgcgcaagtacaatcttcctcagcaaaagccagacagatgtcagggagaaacggaaatctctgttcattaatcatcacccccctggccagattgcccggaagtactccagctgttctaccatcttcctggacgacagcacagtttcccagccgaacctcaaatacacaattaaatgcgtcgcacttgccatctactatcatattaaaaatagagaccccgacggtcggatgctgctggatatctttgacgaaaacctccaccccctgtccaaatccgaagtgcctcccgactacgacaagcacaaccctgagcagaagcagatctaccgctttgtaaggacactgttttcagccgcccagctcacagccgagtgtgccatcgttacgctcgtttacctggagagattgttgacgtatgcagagattgatatctgccccgccaactggaaacgaattgtcctgggggccattctgctggcatcaaaggtgtgggacgatcaagccgtttggaatgtcgattattgccagatccttaaggacatcaccgtggaagatatgaatgagctcgaaaggcagttcttggagctattacagttcaacatcaatgtcccatcaagcgtgtacgccaagtattactttgatctgcgtagtttggccgaggccaacaacctctcatttccactcgagcctcttagtagagaaagagcccataaactcgaggcaataagcaggctgtgcgaggacaagtacaaggaccttaggcgaagcgcacggaaacggagtgcctccgctgataacctgaccctcccacgctggagccctgccattatctcctag

SEQ ID NO: 113437 - DNA, 864 bp, synthetic construct
  misc_feature 1..864: note = Description of Artificial Sequence: Synthetic coding sequence
  source 1..864: mol_type = other DNA
atggagttcaatcccagcgaccatccaagggcctctacgatattccttagcaagtctcagacagacgttcgtgagaaacgcaagagtttgtttattaatcaccacccacctggacagattgcccgtaagtatagtagctgtagcactatatttttggatgacagcaccgtgagtcaacccaacctcaaatacactattaagtgtgtcgccctggccatctattaccacatcaagaaccgagatccggatggcagaatgcttctggacatctttgatgaaaacctgcatccgctgtctaagagcgaggttccgcctgattatgacaaacacaatcctgagcagaaacagatttaccgctttgttagaactctgttttccgcggcgcagctaactgctgagtgcgctattgtgactctggtttacctggagcggctgctcacatacgccgaaatcgacatctgtcccgcgaattggaagcgcattgtactgggtgctatcctgttagccagcaaggtctgggatgatcaggccgtttggaatgtagactactgtcagatcctgaaagacatcaccgttgaggatatgaacgagctagagcgtcagtttctagaacttctgcaattcaatatcaatgtgcctagcagcgtgtacgccaagtattatttcgatttgagaagcctggctgaagctaacaacctgtcttttccactggagcctcttagcagggagcgggctcataaactcgaagctattagtaggctgtgtgaggacaagtacaaggatctccggaggtcagcaaggaagcgtagtgccagcgcagataacctcacactgcccaggtggtcccctgccatcatttcgtag

SEQ ID NO: 113438 - DNA, 627 bp, synthetic construct
  misc_feature 1..627: note = Description of Artificial Sequence: Synthetic coding sequence
  source 1..627: mol_type = other DNA
atggatccggatggaaggatgctgcttgatatctttgacgagaatctacacccactttctaaatccgaagtgccgccggactatgacaaacacaatcccgagcagaaacagatttaccgctttgttcgcacgctgttctctgccgcccagttgaccgccgagtgtgcaattgttaccttggtctatctggagaggctgctcacctatgccgaaattgacatctgcccagccaactggaagcgaatcgtgctgggcgcgatcctgttagccagtaaggtttgggacgaccaggctgtgtggaacgttgattactgtcagattcttaaggatatcactgtcgaagacatgaatgaactcgagaggcagtttcttgagctgttgcaattcaatattaacgtaccctcaagtgtgtatgccaaatattattttgacctgagatcactggcagaagcaaataaccttagctttcccctggagcctctctctcgagagagggctcataagctggaggcaatcagccgactctgcgaggataagtacaaggatctcagacggagtgccaggaaacgcagcgcctccgcagataaccttaccctgcctaggtggagccccgccattattagctag

SEQ ID NO: 113439 - DNA, 1026 bp, synthetic construct
  misc_feature 1..1026: note = Description of Artificial Sequence: Synthetic coding sequence
  source 1..1026: mol_type = other DNA
atgggaaataccacaagttgctgcgtgtcatcatcgccaaaactccgacggaacgcacattctaggttggagagttatagacctgataccgatttgtcccgggaagataccggttgcaacctgcaacatatttctgatcgggaaaacattgatgatctcaacatggagttcaaccctagcgatcacccccgggcttctacgatctttctgtctaaaagccagacagacgtgcgtgaaaagcgcaaaagcttgtttatcaatcatcatccccccggccagatcgcccgtaaatactcaagctgtagcacaatcttccttgacgattccactgtgtcacagccaaacctgaaatacaccatcaaatgcgtagcactcgcgatatactaccacatcaagaatagagaccccgatggacgaatgctgcttgatattttcgacgagaacctgcacccgctgagtaaatccgaggtccctcccgactacgacaagcataatccagagcagaagcagatttaccgttttgtgagaacgctcttctctgctgcacagctaaccgccgagtgtgccatagtgaccttggtctacctggaaagactgctgacctatgccgagatcgacatctgtcctgcgaactggaaaaggatagtcctgggggctattctgctggcatcaaaagtatgggacgaccaggccgtgtggaatgtcgactactgtcaaattctgaaagacataactgtggaggacatgaacgagctcgagcgtcagtttctagaacttctgcaatttaatatcaacgtcccatcttccgtgtatgccaagtactattttgatctgagatccttggctgaggctaataatttatccttccctctagagcccctctctagggagcgcgctcataagcttgaagcaattagtcggttgtgtgaggacaaatacaaggacctccgcagatctgcacgcaaaagaagtgcctcagctgataatctgactctccctcggtggtcgcctgccataatttcctag

SEQ ID NO: 113440 - DNA, 942 bp, synthetic construct
  misc_feature 1..942: note = Description of Artificial Sequence: Synthetic coding sequence
  source 1..942: mol_type = other DNA
atggaacccatgtaccaggacagagccagagatacccagactgacgagatcgtcgcattaaaaaaagtacgcatggataaagagaaagatggtattcccatcagtagtctgagggaaattacgctgctgttgcggcttcggcatcctaacattgtcgagttaaaagaagtggtggtgggcaatcacttggaatccatcttccttgttatgggctattgcgaacaagaccttgcctctctgctagagaatatgccaacaccctttagtgaagcacaggtcaagtgcattgtgcttcaagtgctgaggggcctgcagtacctccataggaactttattattcatagagacctgaaagtgagcaacttactaatgaccgacaaaggctgcgttaagaccgctgatttcgggctagcacgggcctatggggttccagtgaaaccgatgacccccaaagttgttaccctatggtacagggcccctgagctgctacttggcacgactacacagaccacctccattgatatgtgggctgtgggatgtatcctggccgagctcctggctcatcggcccttgctgcccggaacctccgagatccatcagatcgacctcattgtgcagctgcttgggaccccatctgagaatatctggccagggtttagcaagctccctctggtggggcagtatagtctccggaagcagccttacaacaatcttaagcataagttcccttggttgtctgaggccggcttgcggctcttacacttcctgtttatgtacgaccccaagaaacgggcgactgctggcgattgtctcgagtcaagctatttcaaagaaaagccactgccctgcgaacccgagttgatgcccacttttcctcatcaccggaataaaagggctgcccccgccacctcagaaggtcaatctaagagatgtaagccatag

SEQ ID NO: 113441 - DNA, 1083 bp, synthetic construct
  misc_feature 1..1083: note = Description of Artificial Sequence: Synthetic coding sequence
  source 1..1083: mol_type = other DNA
atggccgaaccagacctggagtgtgagcagataaggcttaagtgcatccgaaaagaaggcttctttaccgtgccacccgagcaccgcctgggcaggtgtagatccgtcaaggagttcgagaagttgaataggattggggaagggacttacggtattgtctatcgcgccagagacactcagacagacgaaatagtggcattgaaaaaagtccgaatggacaaagagaaggacggcatcccaattagttcgctgcgcgagatcactctactactgaggctgaggcatccaaacattgtggagctaaaagaggtcgtagtcgggaatcatctcgagagtatcttcttggtgatggggtattgcgagcaggatctggctagtctcttagaaaacatgcctacacctttctctgaggcacaagtcaaatgtatagtgcttcaggtgctgagaggcttgcaatatttacatcggaacttcatcatccaccgtgacctcaaagtctccaatctactgatgaccgacaagggatgtgtaaagacagcggacttcggacttgcacgagcgtacggagtccccgtcaagcccatgactcctaaggtggtgaccctgtggtatagggctcctgaactgctgctgggcacaacaacacaaacaactagcatcgatatgtgggcagtagggtgcatactggccgaactgctcgctcaccgtcctctccttcctggtacatctgagattcaccagatcgatttaattgtacaattactgggcacaccaagcgagaatatctggcctggcttctccaagttgcctctcgtcggacagtactcactccgaaagcagccttataacaatcttaagcataagttcccctggctgagcgaggccggccttcggctccttcactttctcttcatgtacgaccctaagaaaagggccactgccggcgattgcttggaaagcagctatttcaaggaaaagccactcccttgcgagcctgagttaatgccgacattcccacatcaccggaataaaagagccgcaccggcaacctctgagggtcaaagcaagcggtgtaagccctag

SEQ ID NO: 113442 - DNA, 819 bp, synthetic construct
  misc_feature 1..819: note = Description of Artificial Sequence: Synthetic coding sequence
  source 1..819: mol_type = other DNA
atggacaaggaaaaggatggcatccccatctcctcactgagggaaatcacattgctgctgcgcttacgccacccaaacatcgtggaattgaaggaagtggtcgtgggcaaccacctcgaatctattttcctagttatgggatactgcgaacaagatctggccagtctgcttgaaaatatgccaaccccttttagcgaagcccaagtgaaatgcattgttctgcaagtgctgagaggactgcagtacttacatagaaactttatcattcatcgcgacctaaaggtgagcaacctgcttatgaccgacaagggctgtgtgaaaactgctgacttcggtctggcacgcgcctatggggttccagtgaagccaatgacaccgaaggtggttacactttggtaccgggcgccagagctactgctaggcactactacccagaccacatccattgatatgtgggcagtgggttgcattctggcggaactgctggcacataggcccttactgcctggcacctccgaaattcaccaaatcgacctgattgtgcaattgctggggaccccctccgaaaatatttggcctgggttttctaagctacccctcgtcggacagtatagcctaaggaaacagccttacaataatctgaagcacaagtttccttggctcagcgaggccggactgcgcctgctccatttcttgttcatgtacgaccccaagaaacgagcaacagccggagactgccttgagagttcatactttaaggagaaacccttgcgcttacctatctccggtgtctgtgagggctgtcgagaaccagggtag

SEQ ID NO: 113443 - DNA, 504 bp, synthetic construct
  misc_feature 1..504: note = Description of Artificial Sequence: Synthetic coding sequence
  source 1..504: mol_type = other DNA
atggggaagaccgaggaaaagggcaacggaaaaggcgcttttcaagaaagaaagggtccattaggcgctgtccggaaggaggcaggcgctggcgcccaggatgcaggcgccgccgaaggggccgccgtgaagaaaatgactttcagcgagcatccctacaataacctgaggaaacgttttggggctctgctgtccgatcagggatttgacctgatgaacaagttcctgacctatttccccggccggaggatttccgccgaggacgggctgaaacatgagtatttcagggagacccctctacccatagatccatccatgtttcctacctggcctgccaaatctgagcagcaacgagtgaaacgcgggacctccccacgcccgcccgaggggggtctgggttacagccagctgggggacgatgatcttaaagaaacaggattccacctgactacaacaaaccaaggcgcttctgccgccggccccggattctcactgaagttttag

SEQ ID NO: 113444 - DNA, 2241 bp, synthetic construct
  misc_feature 1..2241: note = Description of Artificial Sequence: Synthetic coding sequence
  source 1..2241: mol_type = other DNA
atgagtcagtcggatgaccgcgactcaaaacgggacagtctagaagagggagagctgcgagaccattgtatggaaattacgatccgcaattcgccatatcgaagggaggatagtatggaggaccggggcgaggaagacgatagtctggcaatcaagcccccccagcagatgtctcgtaaagaaaaggtgcatcatagaaaagatgagaagcgcaaggaaaaatgtaggcaccactcacattctgcagagggaggcaagcacgccagggtgaaagaaagagagcacgagagaagaaagcgccacagggaggagcaagataaagcgcggagggagtgggagcggcagaagagacgggagatggcaagagaacacagccgaagagaacgagatagactggagcagctcgaacgcaaacgagaacgcgaacgaaagatgagagaacagcaaaaggagcagcgggagcaaaaggagcgtgaacgacgagctgaggaacgaaggaaggagcgagaggcgagacgggaagtttctgcccaccaccgcaccatgcgagaggattatagcgacaaagttaaagcgagtcactggagcaggtctcctccgagacctcccagggagcgcttcgaactgggagacggccgcaagcccgtcaaagaagagaaaatggaggaacgggatctgctctccgatcttcaggatatttcagattctgaaagaaagacaagcagtgccgagtcgtcctccgccgagtcgggcagcgggtccgaggaagaggaagaggaggaggaggaggaggaggaagagggcagtacctcggaagaatccgaggaggaagaggaggaggaagaggaggaggaagaggaaaccggctccaactccgaggaggcatccgaacagtcggcggaggaagttagtgaagaggagatgtccgaggacgaggagcgcgagaacgagaaccatctgctcgtcgtcccagaatctagatttgatagagactctggcgaatctgaagaggccgaggaggaggttggcgaaggcaccccccagtcctccgccctgactgagggagattatgtgcccgactctcctgccttacttcccatcgaactgaagcaggaactccctaagtatttgccagccctgcagggttgcagatctgtggaggaatttcagtgtttaaataggattgaagaaggcacgtacggtgtggtgtatagggcaaaggataagaagaccgacgaaatcgtagcccttaaacgactgaagatggagaaagagaaggagggctttcctataacttctttacgagagatcaatacaattttgaaagcacaacaccccaatattgtgaccgtaagggagatagttgtcggatccaacatggacaaaatttatattgtgatgaactatgttgagcacgacttaaagagcttgatggagaccatgaaacagccttttttgccaggagaagtcaagacactcatgatccaactgttgagaggtgtgaaacacttacatgacaactggatcctgcatcgcgaccttaagacttctaatctcctcctctctcacgcaggaattttaaaggtgggtgattttgggctcgcacgcgaatacggatcgcctctcaaagcttacactcctgtcgtggtcacccagtggtacagagcaccggaactcctcctgggcgccaaggaatacagcacggctgttgatatgtggtctgtgggctgcatctttggagagcttttgacgcagaaaccactgtttcctggcaattccgagattgatcagattaacaaagtatttaaggagttagggacgccctcagaaaagatatggcctggttactctgaactgcctgttgttaagaagatgacattctcggagcacccctataacaatctcaggaaacgcttcggggctctgttgtcagaccagggatttgacctaatgaacaagtttctgacttactttcctgggcgacggatctcggccgaagatgggctgaaacacgaatatttcagagagactcctctgccgatcgaccccagcatgtttccaacctggccagccaaatccgagcagcaacgcgtcaagcggggcaccagcccccgccctcccgaggggggcttaggctactcacagttgggggacgacgacctcaaagaaacagggtttcacctgacgacgactaaccagggcgcttccgcggcaggaccaggcttttcattgaaattctag

SEQ ID NO: 113445 - DNA, 2340 bp, synthetic construct
  misc_feature 1..2340: note = Description of Artificial Sequence: Synthetic coding sequence
  source 1..2340: mol_type = other DNA
atgggcgacgaaaaggactcttggaaagtgaagaccctggacgaaatcttgcaagagaagaagaggaggaaagagcaggaagaaaaggccgaaatcaagcggctcaagaacagtgatgaccgggacagcaaacgagacagcctggaagaaggggagctgcgcgatcactgtatggagataaccattcgtaattctccataccgcagggaagactctatggaggatcgaggagaagaagacgactccctggccatcaagccaccgcagcagatgtctcgaaaggagaaggtgcaccacagaaaagacgagaagcgaaaggagaagtggaaacatgcacgcgtgaaagagagagaacatgaacgacggaagaggcatcgtgaggaacaagataaagcacgaagggagtgggaaaggcagaaacgacgcgagatggcccgggagcattcccgccgcgagagggggaacgacggggtgtgcctgttcagggacaggctggaacagctggaacgtaagagagaacgggagaggaaaatgcgtgaacagcagaaggagcagcgggagcagaaggagagagagagaagagcggaggagcggaggaaggagcgcgaagccagacgtgaggtatcagcccaccataggacaatgcgagaagactactcggacaaagtgaaagcctcccactggtcaagatcccccccaagaccccccagagagaggtttgaacttggggatggcagaaagccagtgaaagaggagaagatggaagagcgcgacttgttgtcggatctgcaggatatcagcgattctgagcggaaaacgtcaagcgcagaatccagttcagcagaatccgggtcgggctccgaggaggaagaagaagaagaggaagaagaggaagaagaagggagtacatccgaagagagcgaggaagaagaagaggaggaggaggaagaggaagaggaaacaggctccaatagtgaggaagcatctgaacagtctgctgaggaagtgtcagaggaggagatgtctgaggatgaagaaagagagaatgaaaaccacctcctcgtggtgcccgaatccaggttcgatcgagactccggtgagtccgaggaagctgaagaggaagtgggagaagggacgcctcaatcctcggctctgactgagggggattacgtcccggactcaccagcccttctgccgattgaactgaagcaggaactccctaagtacctgcccgctctgcagggctgtcggagcgtggaagagtttcagtgtcttaatcgcatcgaagaaggcacctacggtgtggtctaccgcgccaaagacaagaaaaccgacgaaatcgtggccctgaagcgtttgaagatggaaaaagagaaagagggcttccctataactagcctgagggagatcaatacaatcctgaaggcgcagcaccccaatatagtaactgtgcgggagatcgtggtcgggagcaacatggacaagatttatatcgtaatgaattatgtcgagcacgaccttaaatccttgatggagaccatgaagcagcctttcctgccaggcgaggtaaagactctcatgatccagctccttcgcggggtaaaacatttacatgacaattggattctgcatcgagacttgaaaacttccaatctcctactgagtcatgcgggtatcctgaaggtgggagacttcggtttggcacgagaatatggcagcccactaaaagcttataccccggtcgtggtcacacagtggtaccgcgctcctgaattattactgggggccaaagaatatagcaccgccgttgatatgtggtctgtgggatgcatcttcggcgaactcctgacacaaaaacccttgtttccgggcaacagcgaaatagatcaaattaataaggtcttcaaagagctggggactcctagcgagaagatctggcctggttacagcgaactccccgttgtgaagaagatgacgttcagcgagcacccgtacaataacctcaggaagagattcggagcccttttgtccgaccaaggcttcgacttgatgaataagtttctcacatatttccctggacggcgtattagtgccgaagatggtttgaaacacgagtatttccgtgaaacccctctgcctattgatcccagcatgttcccgacttggcccgccaagtcagagcaacagcgagtaaagagggggacatcgcctcgcccaccggaaggtggcctgggatacagccagctcggcgatgacgacctgaaggagaccgggtttcacctcacgacaacaaatcagggggcgtctgctgcagggccaggattctccctgaagttttag

SEQ ID NO: 113446 - DNA, 2313 bp, synthetic construct
  misc_feature 1..2313: note = Description of Artificial Sequence: Synthetic coding sequence
  source 1..2313: mol_type = other DNA
atgggagatgaaaaggatagctggaaagtaaagacccttgacgaaatactacaagagaagaagcggagaaaagagcaggaggagaaggccgagataaaacgactcaagaacagtgacgaccgcgactctaaaagagatagtctcgaggagggtgaactgcgggatcattgtatggaaataacgatacgaaacagtccatacaggagggaagactccatggaggaccggggtgaggaggatgacagtctggccataaagcccccccagcaaatgtcaagaaaagagaaggtgcaccaccgcaaagacgagaagcggaaagagaaatggaaacacgcacgggtgaaagagcgcgaacacgaacgtcgtaagcgacaccgtgaagagcaggacaaggctaggagggagtgggaaaggcaaaaaaggcgcgagatggccagggaacatagccgtcgggagcgcgataggctcgagcagctggaaaggaaaagagagcgagagcggaaaatgagagagcagcagaaagaacagcgagagcagaaggaacgcgaacgtagggccgaggagaggcggaaggaaagggaagctcggcgggaggtctctgcgcatcacagaaccatgcgggaggactacagcgacaaggtgaaagcctctcactggtccaggtctcccccaaggccaccaagggagagatttgagctcggggatgggcgtaagccggttaaagaagagaaaatggaggaacgcgacctcctgtccgacctgcaggacatcagcgacagtgaaaggaagacctcaagcgccgagtcatctagcgcagaatcaggtagcgggagcgaggaggaagaggaggaggaggaagaggaggaggaggagggcagcacatctgaagagagcgaggaggaagaggaggaagaagaagaagaagaggaggaaaccggatctaacagtgaagaggcttccgagcagtctgctgaagaggtgagtgaggaggagatgtccgaagacgaggagcgcgaaaacgagaaccatctcctggtcgttccagagagtcgatttgacagagattcaggagagtctgaggaggcagaggaggaggtgggcgaggggaccccacagtcctctgctttgaccgagggcgactatgtccctgatagccccgccctgttacctatcgagcttaagcaggagcttcctaagtatcttcccgccctgcaaggttgtaggtcagtcgaggagttccagtgcctcaataggattgaagagggtacttatggggtggtctacagagcaaaagacaaaaaaaccgacgagatcgtagcactgaaacgcctcaaaatggagaaggagaaggaaggctttcctatcacgtccttgcgcgaaatcaacactattttgaaagcgcagcacccaaatattgtcaccgtgcgggaaatagtggtgggcagcaacatggataaaatttatatagttatgaactatgtggagcacgatctcaagtcgcttatggagaccatgaaacagcctttcttgcctggcgaggtgaagacactgatgattcaactgcttagaggtgttaaacacctgcacgataactggatcctgcatcgggacctgaagacttcaaatctcctactgtctcatgccggtatcctaaaagtcggcgacttcgggcttgcccgcgagtacggatcccctctgaaagcgtatacccctgtggtggtgacccagtggtacagagctcccgagttgctgctcggagccaaagagtactccactgctgttgatatgtggtccgtcgggtgcatatttggcgagctgcttactcagaaacccttgtttcccgggaatagtgagatcgatcaaatcaataaagtgttcaaagagctcggaactccatcagagaagatttggcctgggtactcggagctgcccgttgtgaaaaagatgacatttagcgaacacccctacaacaatctgaggaaacgtttcggagccctgctttccgaccagggattcgacctaatgaacaagttcttgacttacttcccaggccgtcgtatcagtgctgaggatggactaaagcatgagtattttagagagactcctcttcccattgacccttcaatgttccctacgtggcccgccaagtccgagcagcagcgagtgaaacggggaactagtccccgcccacccgagggcggtctcggatatagccagctcggagatgatgacttaaaagaaactggctttcatctgacaacaacgaaccaaggagcctcggctgcaggccccggcttctcactgaagttctag

SEQ ID NO: 113447 - DNA, 2241 bp, synthetic construct
  misc_feature 1..2241: note = Description of Artificial Sequence: Synthetic coding sequence
  source 1..2241: mol_type = other DNA
atgtcgcagtccgacgacagggattccaaacgggatagtctcgaggagggcgaactaagggatcattgtatggagattactatcagaaattccccgtatcgcagagaagactctatggaagatagaggcgaggaagatgattctttagccattaaacctcctcagcagatgagccgaaaggaaaaagtccaccataggaaagacgagaagcgaaaagagaagtgccggcaccacagccatagcgctgagggaggaaaacacgcacgggtaaaggaaagagaacatgaacgccggaaacgccacagggaggagcaggataaagccagacgggagtgggaacggcaaaagagacgagaaatggccagagagcactcaagacgggagcgcgatcggctcgagcagctcgagcgaaagcgcgagagggaaagaaaaatgcgcgagcagcagaaggagcagagggaacaaaaggaacgcgagaggcgagcagaagaaaggcgcaaggagagagaggctcgccgtgaagtgtctgcccaccaccgtaccatgcgggaggattacagtgataaagttaaagcatcccactggtcaaggagtcctccccgcccgccaagagaacgcttcgagctgggagatgggaggaagcccgtgaaagaggaaaagatggaggaacgggacctactttccgacctgcaggatatcagcgactctgagcggaagacatcctctgccgagtcctccagcgcagagtctggctcagggtccgaagaagaggaggaggaggaggaggaagaggaagaggagggatccacgagtgaagagtcagaggaagaagaggaagaggaagaggaggaagaagaagaaacagggtccaactctgaagaggcatcagaacagagcgcagaagaagtttctgaagaggaaatgagcgaagatgaggagcgggaaaacgagaatcacctgctggttgtccctgaaagtcgctttgatagggactcgggagaatccgaggaagcggaagaagaggtgggcgagggaaccccgcaatccagcgccctgaccgagggagattacgtccctgatagtcctgccctactgccgattgagctgaaacaggagctcccaaagtacttgccggcactgcaggggtgccgctccgttgaggaattccagtgccttaatcgcatagaggaaggaacttatggagttgtgtatagagctaaagataagaaaacagatgaaattgtggcactgaaacggttgaagatggaaaaagagaaagagggcttcccgattacaagcctacgcgaaattaatacgatcctgaaagcccagcaccccaacatcgtcaccgtcagagagatagtcgtcggctcaaatatggacaagatctacattgttatgaattacgttgaacacgacttaaagagtctaatggaaaccatgaagcagccctttctaccgggggaagtcaagactcttatgatccagttactgagaggagtgaaacatctgcacgacaattggatcctccaccgggacctcaagacgtcaaatctgttgctcagccatgctggtattctaaaggtcggcgacttcgggctggctagggaatacgggtctccgctcaaggcatatactcctgtcgtggttactcagtggtacagggctcccgaactgctccttggtgccaaggagtactctaccgccgtagacatgtggagtgtggggtgtatctttggagagctcctgacacagaagccgctttttccgggaaattctgagattgaccaaattaataaggttttcaaagaactgggaacccccagcgaaaagatatggccgggatattcggagctaccagtggtgaaaaaaatgacatttagtgaacacccatataataacctgagaaagagattcggagcacttctgtccgatcagggattcgatctcatgaacaagtttctgacctatttcccagggcgaaggataagcgcagaggatggactgaagcatgagtatttcagagagacccctctccccattgatcctagcatgttccccacatggccggccaagtcggagcagcaaagggttaaaagaggaaccagtcccaggcctccagaaggtggcctggggtactctcagttgggagatgacgatttgaaggagactggctttcacctaacgacaactaatcaaggggctagcgcggcgggtcctggattttccttaaagttttag

SEQ ID NO: 113448 - DNA, 2352 bp, synthetic construct
  misc_feature 1..2352: note = Description of Artificial Sequence: Synthetic coding sequence
  source 1..2352: mol_type = other DNA
atgggcgatgaaaaggacagctggaaagttaaaaccctcgacgaaattctccaggaaaaaaagcgtcgaaaagagcaggaggagaaggccgagatcaagcgcttaaagaattcagacgacagggactcaaaaagagatagtcttgaggagggagagttaagagaccattgcatggagataaccattcggaactccccttaccggagagaagatagcatggaagatcggggcgaagaggacgattctttggctattaagcccccccaacagatgagcaggaaagagaaagtgcaccataggaaagatgagaagaggaaggagaagtggaagcacgcaagggttaaagaaagggagcatgagaggcgaaaaagacacagagaagaacaggacaaggcgaggagagagtgggagagacagaaaagacgggaaatggcaagggagcactcccgcagggagcgcgataggttggagcaactcgagcggaaacgtgaacgtgagagaaagatgagagaacaacagaaggagcagcgagaacagaaggagagggagagaagggctgaggagcgcaggaaagagcgggaagcccgaagggaagtgtcagcgcaccacaggaccatgagggaagactacagtgacaaggtaaaggcctcccactggagcaggtctccccctcgtccacctcgtgaacggttcgaactcggtgatgggcggaaacctggggaagcacggcctgccccggctcagaaacctgcccaattaaaggaagaaaagatggaagagcgcgaccttctgtccgacctgcaggacatcagcgattctgagagaaagacatcgagcgcggagtcttccagcgccgaatctgggtccggctctgaggaagaggaagaggaggaggaggaagaagaagaggaaggcagcaccagcgaggagagcgaggaagaggaggaagaggaggaggaggaagaagaagaaactggttccaatagtgaagaggcatcagaacagtctgcagaggaggtctctgaggaggagatgtctgaagacgaggagcgcgagaatgagaaccaccttctggtggtgccggaaagcaggttcgaccgcgactccggagaatccgaggaagccgaagaggaggtaggagagggtactcctcaatcctcggcactcacagaaggagattatgttccagacagccctgccttgctacccatagaactaaagcaggaactgccaaaatatcttccagcactccagggctgtcggagtgtggaagaattccagtgtttaaaccgaatcgaggaggggacatatggtgtggtgtaccgcgccaaggataagaaaactgacgaaattgtggcactcaaacgtttgaagatggagaaagaaaaagagggcttcccaatcaccagcctgcgggagatcaacactattttgaaagcacaacacccaaacatagtgacagtacgtgaaatcgtggtgggttccaacatggataagatatacatcgtgatgaactacgtcgagcacgacctgaaatccctgatggagactatgaagcaacctttcctgccaggcgaggtgaaaacactgatgatccagttgctcagaggcgtcaaacacctgcatgacaactggatcctgcacagggatcttaaaacctcgaacctattattgtcacacgcaggcattctcaaggttggggactttggacttgcgagagagtatggctctcccctgaaagcttacaccccagtcgttgtaactcagtggtatcgcgcaccagaactcctattaggagctaaggagtattcaaccgcagtggacatgtggtccgttggttgtatctttggcgagctccttacccagaaacccctgtttcctggcaatagtgagattgatcagattaacaaggtttttaaagaattaggaactcctagcgagaaaatttggccaggttacagtgagctgcccgtggttaagaaaatgactttctccgagcatccttataacaacctgagaaaaagattcggagcactcctgagtgatcagggtttcgatcttatgaacaagttcctgacctactttcctggccggaggatttctgcggaagacggtttgaagcatgaatatttcagggagacccccctcccaatcgacccttctatgtttcccacttggccagcaaagagtgagcagcaacgcgtgaagcggggcacctcgccacggccacctgaaggcgggctgggctactcacaattaggcgacgacgacctgaaggagacgggttttcacctcactacaacgaaccaaggagccagcgccgcaggccctggtttcagcctgaagttttag

SEQ ID NO: 113449 - DNA, 699 bp, synthetic construct
  misc_feature 1..699: note = Description of Artificial Sequence: Synthetic coding sequence
  source 1..699: mol_type = other DNA
atgggcgacgagaaagatagttggaaagtaaaaactctggacgaaatactacaggagaagaaaagaagaaaagagcaggaagaaaaggccgaaattaagagactgaagaacagcgacgacagagatagtaagcgtgattcactcgaggaaggggaactccgcgatcattgtatggaaataacgatacgaaactcaccctatcgtcgcgaggacagcatggaggacagaggcgaggaggacgactccctcgctataaagccaccccagcaaatgagtagaaaagaaaaagtgcaccaccgcaaggacgaaaagagaaaagaaaaatggaaacatgcacgggtgaaagagagagaacatgagaggcggaaacgacatcgcgaagaacaggataaggcacgccgcgagtgggaaagacagaaacggagagagatggccagggaacactccagacgagagtcagtctgcacttcaccaaacgacgaaaggggactacagagacagtccgaaagccaaccactcgagagccagccagcaagcgcagctgccggggctgtgagagtgggcagacgtcctgaagctagtaagagacgtgagaatggacggaagggtcccgctgtccgactgaccggacaccagaggcaacgggaagaagatcagctcggtagagtactcgtttccggaatccggctcagattttag

SEQ ID NO: 113450 - DNA, 2241 bp, synthetic construct
  misc_feature 1..2241: note = Description of Artificial Sequence: Synthetic coding sequence
  source 1..2241: mol_type = other DNA
atgtctcagtccgatgatagggacagcaagcgcgacagcctggaggaaggcgaactccgggaccattgcatggaaattactatacgcaactctccgtatcgtagggaggattctatggaggatagaggcgaggaggatgacagtctcgccatcaagcccccacagcagatgtcccgaaaggagaaggtccatcacagaaaagatgaaaagaggaaagagaaatgtagacatcatagccattcagctgaagggggcaagcatgctagagtgaaggagagggagcacgagcggcgcaaacggcaccgggaagagcaggataaagctcgccgagaatgggaacgccagaagaggcgggagatggctagggagcatagccgcagggagagagacagactagaacaattggagcgcaaaagggagagagagaggaaaatgcgggagcagcagaaagaacaacgggagcagaaggaacgtgaacggagagcagaagaacgcaggaaagagcgtgaggctagacgagaagtgtctgcccaccacaggactatgagagaggattacagtgacaaagtgaaggcctctcattggtctagaagtccacccagacctccacgtgagcgcttcgagttaggcgatgggcgcaagcctgttaaggaagagaagatggaagaaagagatctgctgtctgatctgcaggatattagtgattcggaacggaagacttctagcgccgagtcctcaagtgccgagtctgggagtggatctgaagaagaagaggaggaggaagaagaggaagaggaagagggatccacctccgaagaaagtgaggaagaggaggaggaggaagaggaagaagaagaagagacaggaagcaattccgaggaggcctcagagcaatcggccgaggaggtatcagaggaggagatgagcgaggatgaagagagagaaaacgagaatcacttgcttgtggtgcctgaatccagatttgaccgcgactcgggagaatccgaggaggctgaagaggaagtgggtgaaggcaccccacagagctccgctttgaccgaaggggattacgtgcccgattcccctgcactccttccgattgaactgaagcaggagctgccgaagtacttacccgcactgcagggatgccgctctgtggaggagtttcagtgcctcaaccgcattgaagaaggcacctatggcgttgtgtaccgtgctaaagacaagaagactgatgagatagtagctctcaagaggctcaagatggagaaggagaaagagggctttccaatcacaagcttgcgcgaaatcaacaccatccttaaagcccagcaccccaatatcgtcactgtgcgtgaaatcgtcgttggctcaaatatggataaaatttatatcgttatgaattatgtggaacatgacctgaaaagcctcatggagacgatgaaacagcccttcctccctggagaggtgaagactctgatgatccagttgctcaggggggttaaacatctgcatgacaattggattctgcaccgcgacttgaaaaccagtaacctgctactaagtcatgccggcatactcaaggttggagacttcggtctggcccgggaatatggaagccctctgaaggcctatacgccggtggtcgtcacccagtggtacagagcccctgagttactgctgggagccaaagagtacagcactgccgtagatatgtggtccgtggggtgtatcttcggtgagctgctgactcagaaacctcttttccccggcaacagcgaaatcgatcagattaacaaggtgttcaaagagctgggcaccccatctgaaaaaatctggcctgggtactctgagctgcccgtggtcaagaagatgacattttcagagcatccatacaataaccttaggaaaagattcggcgctctactttctgaccagggctttgatctcatgaacaagttcctaacatacttccccgggcgcagaatatccgctgaggatggcctaaagcacgaatattttagggagacccctctgcctattgacccctccatgttccccacctggccggccaagagcgagcagcagagggtaaagagggggacctcaccccgtccccctgagggcggcctgggctacagtcagctcggagatgatgacctcaaagaaaccggcttccacctgaccactactaatcagggggctagcgctgccgggcccggcttttcgctgaagttctag

SEQ ID NO: 113451 - DNA, 114 bp, synthetic construct
  misc_feature 1..114: note = Description of Artificial Sequence: Synthetic coding sequence
  source 1..114: mol_type = other DNA
atgggggacgaaaaggattcgtggaaggtcaaaaccctggacgagattctacaggagaagaaaaggcggaaggaacaggaggaaaaggcagaaattaaaagactaaagaattag

SEQ ID NO: 113452 - DNA, 2343 bp, synthetic construct
  misc_feature 1..2343: note = Description of Artificial Sequence: Synthetic coding sequence
  source 1..2343: mol_type = other DNA
atgggtgacgagaaggattcgtggaaagttaaaacgttagacgaaattttgcaggagaaaaaacggcggaaagagcaggaggaaaaggctgagatcaagaggctgaagaacagcgacgacagggactcaaagcgcgattcgcttgaggagggtgaacttcgggatcactgtatggagatcactatccgcaattccccataccgccgggaggacagcatggaggaccggggagaggaagatgactctctggctatcaaacccccgcagcagatgagtcggaaggaaaaagtccaccatcgaaaagacgagaagcgaaaggaaaaatgccgccaccatagtcacagcgctgaaggtggcaagcatgctcgggtaaaagaaagagaacacgagaggcggaagcgccatagggaagaacaggacaaagcgcgccgcgaatgggagcggcaaaaacgtagagagatggccagagagcacagccggagggaacgcgataggctggaacagctggagcggaagagggaacgcgagagaaagatgagagagcagcagaaagagcagagggaacaaaaagaaagggagagacgtgccgaagagcgccgtaaggagagggaggctagaagagaggtgagtgcccatcaccggacaatgcgcgaagactacagcgataaggtaaaggcttcgcattggtctcggtccccccccaggccccctcgcgaacgatttgaactcggggacgggcggaagcctgttaaggaagagaagatggaggagagagatctcctcagcgatctgcaggacatttcggacagtgagcggaagactagcagcgctgagagttcttcagctgaaagcggcagcgggtccgaggaggaggaagaggaagaggaggaggaggaggaagaggggtccacttcagaggagtccgaagaggaggaagaagaagaggaggaggaggaggaggaaacagggtcaaatagtgaagaagctagcgagcagtctgcagaggaagtgtcggaggaggagatgtctgaggatgaggaacgtgagaatgagaaccatttgctcgtggtcccagagtcacgctttgaccgggattccggagaatccgaggaggccgaggaagaggtgggagaagggacaccacaatcgagcgcgttaaccgagggcgactacgtgcctgattcccctgccctcctgcccatcgagttaaagcaggagctgcctaagtatcttccagcacttcagggctgtagatcagttgaggagtttcaatgcttgaatcgcattgaagaagggacctacggggtggtctacagggcgaaagataagaaaaccgatgaaatcgttgcactcaagagactgaaaatggagaaagagaaggaggggttcccaataaccagcctgcgggaaatcaacactatactcaaagcccagcacccgaatattgtgaccgtcagagaaatcgtggtcggctcaaacatggataagatttacatcgtgatgaactacgtggaacatgatctcaagagcctcatggaaaccatgaagcagcccttcctgcccggagaggtgaaaacgctgatgattcagttgctcaggggagtgaaacacctccacgacaactggattctccaccgcgatctcaaaacatctaaccttctattatctcatgcagggatcctgaaagtaggcgatttcggcctagccagagagtacgggagccctcttaaagcttatactccagtggtcgtgacccaatggtacagggcccctgaactgctgctcggcgccaaggagtatagcacggctgttgatatgtggtctgtgggctgcatcttcggcgaacttctgacccagaagccactgtttcccgggaacagcgagattgatcagatcaataaggtgttcaaagagttgggaacacctagcgaaaaaatctggcccgggtactctgagctccccgtggtcaagaagatgactttcagcgagcacccatataataatttgaggaaaagatttggtgccttattgagtgaccagggctttgacctgatgaataaattcctgacctatttcccgggccggagaatttccgccgaggacggcctgaagcatgagtacttccgggaaacgccactcccaattgacccttctatgtttccgacatggcccgcgaagagtgagcagcaaagggtaaagagaggaactagcccaagaccgcctgagggagggttgggctatagccaattgggtgacgacgacttaaaggaaacgggctttcatttaactacaactaatcagggagcatccgccgccggacctggcttttccctaaagttctag

SEQ ID NO: 113453 - DNA, 456 bp, synthetic construct
  misc_feature 1..456: note = Description of Artificial Sequence: Synthetic coding sequence
  source 1..456: mol_type = other DNA
atgggggatgaaaaagacagttggaaagtcaagactttggacgagatcctgcaagagaaaaagcgtcggaaagagcaggaggaaaaggctgaaatcaaacgtttaaagaacagcgacgaccgcgactcaaaacgcgattcactggaagagggcgagctccgagatcattgtatggagatcaccataagaaactcaccttaccgccgcgaagactcaatggaggaccggggagaagaggacgacagtctagcaatcaagccacctcagcagatgagtaggaaagaaaaagtgcaccacaggaaagatgaaaagcggaaagaaaagtggaaacatgcccgcgttaaagagagggaacacgaacgccgaaaacgccatcgagaagagcaggataaggcccgcagggaatgggagcgacagaaaagacgtgagatggcccgtgagcatagcaggcgatag

SEQ ID NO: 113454 - DNA, 1263 bp, synthetic construct
  misc_feature 1..1263: note = Description of Artificial Sequence: Synthetic coding sequence
  source 1..1263: mol_type = other DNA
atgggtgacgagaaagattcatggaaggtgaagacactggatgaaattttgcaggagaagaaaagacggaaagagcaggaggagaaggctgagatcaaaaggctgaaaaacagcgatgaccgcgactccaaacgggactccctggaagaaggggagttacgggaccattgcatggaaataacaattcggaattctccgtaccggcgcgaggattctatggaagatcggggagaggaggatgacagcctggccatcaaaccaccccagcaaatgtcacggaaggagaaagtgcaccaccgaaaggatgagaaacgaaaagaaaaatgccgccaccactcacacagtgctgaggggggcaagcatgctagagtaaaggaaagggaacatgaacggaggaaacgtcacagagaggaacaggacaaggcccggagggaatgggagagacagaagcgccgcgagatggcgagagagcacagccgcagggagagagataggttagaacaactggagagaaagcgcgaacgtgagagaaaaatgcgcgaacaacagaaagagcagagagagcagaaagaaagggaaaggcgggcggaggaacgtcgaaaagaacgggaagcccgtagagaagtgtctgcgcaccaccgcactatgagggaggattatagcgacaaagtgaaggcttcccactggtctcgctcacccccccggcccccacgggagcggtttgaacttggggatggtaggaaacccggcgaggcacgcccagcccccgcgcagaaacccgcccagctgaaggaggagaagatggaagagcgcgacctgcttagcgatctgcaggatatttccgattcagagcgcaagacttctagcgcggagtctagttctgccgaatcaggctccggcagcgaagaggaagaagaagaagaagaagaggaagaagaagagggcagcacctcggaggagtccgaagaagaggaagaagaagaggaggaggaggaggaagagaccggcagcaatagtgaggaagccagtgagcagagcgcagaagaagtgtccgaagaggagatgtctgaagatgaggagcgcgagaacgaaaaccacctgctagtggtgcctgaatcgcggttcgacagagactccggcgaaagcgaagaggccgaagaggaggtgggacttccagagagacgcggagtccctgtccccgaacaggacagaggagggcacctgtggagtggactgcagtccaagaggcaggagaacaggtag

SEQ ID NO: 113455 - DNA, 1686 bp, synthetic construct
  misc_feature 1..1686: note = Description of Artificial Sequence: Synthetic coding sequence
  source 1..1686: mol_type = other DNA
atggctatcgccacatctacacagctagcgcgcgcgctgtatgacaataccgccgaaagccctcaggaactctccttccggaggggcgacgtgttgagggtactgcagagggagggtgctggtggcttggacgggtggtgcttgtgcagtctacacggccagcagggcattgtgcccgccaaccgggtgaagctcttgcctgccggaccagctcccaaacccagcttaagtccagccagtccagctcagccaggctctccctaccccgcccctgatcacagcaacgaggaccaggaagtgtacgttgtgcctccacccgccaggccctgtccaacatccggaccgccagcaggcccttgtccgccctctcctgatctgatatataaaattccgcgcgcatctggaacacagctcgctgcaccgcgagatgcgctggaggtgtacgatgtcccccctaccgcactgcgtgttcccagctcaggcccatacgactgcccagcgtcgttttcacaccctctgacacgagtcgcgcctcaaccgccgggcgaagacgatgctccttatgacgtgcctctcacccctaaaccccctgccgaactggagcctgatctcgaatgggagggaggccgagaacccgggccaccaatatatgctgctccctcaaacctcaagagggccagcgccctactcaatctgtatgaagcccccgaagagctgctggccgacggggagggtggcggaaccgacgaggggatctacgatgtgcctttgcttggccctgaggcccctccttcgccagaaccgcctggagccctggcctcgcacgatcaggacactctggcacagctactggctcgatccccccccccacctcaccggccgagactccccagcgccgagagtctgtcccggcgcccattgccagctctgcctgtgccagaggcaccatcaccgagtcccgtgcccagcccagcacccgggcggaagggcagcatacaggaccggcccctgccaccgccgccaccacgactgcctgggtatggaggtccgaaggttgagggagatccagagggcagggaaatggaagacgaccctgctggacaccataatgagtatgaaggaatacccatggcggaggaatacgactacgtacacctcaaaggaatggataaagcgcaagggagccgtcctcctgatcaagcatgcaccggtgaccccgagcttcccgagagggggatgcccgcacctcaggaggccttgtctcctggcgaaccactggtggtgtctaccggggacctgcagcttctgtatttttacgccggacagtgccaaagccactattccgccctacaggcggccgtcgccgcccttatgtctagcacccaggctaatcaaccaccccgactatttgtgccccactccaagcgtgtggtggtcgccgcccatcgcctcgtgtttgtgggcgacaccttgggccgactggcagccagcgcaccgctgcgtgcacaggtgagggcagctggaaccgcgctcggtcaagccctaagagcaaccgtgctcgccgtgaagggtgctgcattaggctatccatcttctcctgccatacaggagatggttcagtgtgtgactgagttggcagggcaggcacttcagttcacaacgctgttgacctctcttgcaccttag

SEQ ID NO: 113456 - DNA, 684 bp, synthetic construct
  misc_feature 1..684: note = Description of Artificial Sequence: Synthetic coding sequence
  source 1..684: mol_type = other DNA
atgaacggtaccatatatgccaatgagtgtcagcagattcgtcatccaaactcgaaaacgttggggacggtgacacccaggaagcccgtcctcagcgttagcgctagaaagattaaggacaacgccgcagattggcataacctgatactgaagtgggaaaccctcaatgatgcaggctttactaccgcaaacaatatagccaatctgaagattagcctccttaacaaagataagatcgagctggatagttcatctcctgcatctaaagagaacgaggaaaaagtgtgcctggagtacaacgaggagttagagaaactttgcgaagaactgcaggccacactggatggccttaccaagatccaagtgaagatggagaagttatcaagtacaaccaaaggaatatgcgaattggaaaattatcactacggtgaagaatccaagaggccaccccttttccacacgtggccgactacccatttttatgaagtttctcataaactactggagatgtatcgaaaggagcttcttttgaagaggactgtagctaaagaactcgctcacacaggcgatccagacttaactctctcttacctctccatgtggctgcatcaaccatatgtcgagtctgactcaagactccatttagaaagcatgctgctggagacaggacatcgggccctgtag

SEQ ID NO: 113457 - DNA, 357 bp, synthetic construct
  misc_feature 1..357: note = Description of Artificial Sequence: Synthetic coding sequence
  source 1..357: mol_type = other DNA
atggaggctaagactcttggcaccgttacaccaaggaagcctgtgctgtcagtgtccgctcgaaaaattaaagataacgccgctgactggcacaatcttatcctgaagtgggagacactcaacgatgccggctttaccacggctaataacatcgctaatctcaagatatccctgctaaacaaggataagattgaactagacagctcttcaccagcctccaaggaaaacgaggagaaggtttgcctggagtacaacgaggaactggagaagctctgcgaggagcttcaagcgacattagatggtctcatgagatttaggattagcagctggagatgcactggcaggagctgctcctag

SEQ ID NO: 113458 - DNA, 639 bp, synthetic construct
  misc_feature 1..639: note = Description of Artificial Sequence: Synthetic coding sequence
  source 1..639: mol_type = other DNA
atggaggccaagacattggggacagtcactcccagaaagcccgtgcttagtgtgagcgcacggaagataaaagacaatgccgccgactggcacaatctgattttaaaatgggagacgctgaacgatgccggcttcactactgcgaacaatattgcgaatcttaaaatctcattgctgaataaagacaaaatagagctggacagctctagtcccgccagtaaagagaatgaagaaaaggtgtgtctggagtataatgaggagctcgagaagctttgcgaagaactgcaagctaccttagatggcctgaccaaaatccaagtgaagatggaaaagctttcaagtacaactaaggggatctgtgagctcgaaaactatcactatggcgaggagagtaaacggccaccacttttccatacatggcccaccacacatttctatgaagtcagccacaaactgctggaaatgtacagaaaagaactcctgcttaaacgtaccgtagccaaagaactagcacacaccggtgatcccgacctgacactgtcctatctctcaatgtggcttcaccagccctacgtggagtccgactcccggctgcacctggagagcatgctcttggaaaccgggcacagagccctgtag

SEQ ID NO: 113459 - DNA, 918 bp, synthetic construct
  misc_feature 1..918: note = Description of Artificial Sequence: Synthetic coding sequence
  source 1..918: mol_type = other DNA
atggatatgtttcaaaaagtcgagaaaatcggggaaggaacatacggggtagtatataaggctaagaatagagagactggccagctggtcgctctcaagaagatccggctggatcttgaaatggagggggtgccaagtactgctataagagagatcagcctgctgaaagagttgaagcaccccaatatcgtgagactcttggatgtggtgcacaacgagagaaaattatatctggtcttcgagtttttgtctcaggacctgaaaaaatatatggatagcacacccggttctgaactgcctctgcatcttattaaatcttatctctttcaactcctgcagggcgtctccttttgtcatagccatagggtcattcacagagatcttaagccacagaaccttctgataaacgagctcggggccattaaactggctgattttggtctggccagagccttcggcgtgccattgaggacatacacccacgaggtggtgactctctggtatagagctccagaaatcctcctgggctctaaattttacaccaccgccgtggacatttggtccattggctgtattttcgcggaaatggtcactcgtaaggctctgtttcctggggacagcgaaattgatcagttattccgtatattccggatgttggggacacccagcgaggatacctggcctggggtgacccagcttccagactacaagggttcattccctaagtggaccaggaaaggcctggaagaaatcgtcccgaatctggagcccgaggggagagatctcttaatgcagctgctgcagtacgacccttcacaaaggatcactgccaagacggctcttgcccacccatacttcagttcacctgagccttcacccgccgccaggcagtacgtgctgcagagatttcggcactag

SEQ ID NO: 113460 - DNA, 918 bp, synthetic construct
  misc_feature 1..918: note = Description of Artificial Sequence: Synthetic coding sequence
  source 1..918: mol_type = other DNA
atggatatgttccaaaaagtggagaaaattggcgaaggtacttacggtgtggtgtacaaagcgaaaaatagagaaacgggacagttggtagcattgaagaagataagattggacctggagatggagggtgtccccagcactgccatccgggagataagcttgttgaaggagctgaagcatcccaacattgttagactgttagacgttgtgcacaacgagcgcaaactgtatctggtgttcgagttcctgtcacaggacttgaagaaatatatggatagtaccccaggatcggagttacctctccatcttatcaagagctatctcttccagctgctgcagggagtgagcttttgtcacagccatagagtcattcatagagacctgaagccacagaacctgttgattaatgagctgggagcgatcaaattagcggactttgggctggcacgggcattcggagtgcctcttcggacctatactcacgaggtcgttaccctttggtatcgcgcacccgagatcctactcggatccaagttttacacaaccgcggtggacatctggtccattggctgcatctttgcagaaatggtgacccgcaaggctctatttcctggagatagcgagatagaccaactgtttcgcatttttaggatgcttgggaccccatccgaggatacatggcccggagtgactcaacttcccgattataaaggatcattccccaagtggaccagaaagggactcgaggagatagtacctaatctggagccagagggccgggatcttctgatgcagctgctccagtacgatccctctcagcgcattaccgccaaaaccgctctggcgcatccctacttcagctcaccagagccgagtcccgcagcccgccagtacgtgcttcagcgtttccggcattag

SEQ ID NO: 113461 - DNA, 879 bp, synthetic construct
  misc_feature 1..879: note = Description of Artificial Sequence: Synthetic coding sequence
  source 1..879: mol_type = other DNA
atgcagaagtacgagaagttagaaaagataggcgaagggacctacggcacggtgttcaaggcaaagaatcgggaaacacacgaaatcgtcgcattgaaacgagtgaggctcgacgatgatgacgaaggtgtgcctagcagcgctttacgcgagatctgcttgctaaaggaacttaaacacaagaacatagtgagactccacgacgtgctgcactcggataaaaagctgacactcgtctttgagttttgcgatcaggacctgaagaaatatttcgattcgtgcaacggtgatttggaccccgagatagtgaagagttttctgttccagctattaaaagggctcggcttctgtcactccagaaacgtgctgcaccgcgatctcaagccacagaatctgctgattaataggaatggcgagctcaagctggctgatttcggtctcgcgcgcgctttcggcatccccgtgagatgttactctgctgaagttgtaactttgtggtatcgccctccagatgttctgttcggagcgaagttgtactctacctctattgacatgtggtccgcgggctgcattttcgcagaattggccaacgcaggcagacccctattcccggggaacgatgttgatgatcaattgaagaggattttcagactgttaggaacaccaaccgaagaacagtggcctagcatgaccaaattgcccgattacaaaccatatcccatgtacccagctacaacctctctggtgaacgttgtccccaagttgaatgctaccgggcgcgatctgctccaaaatctgttgaagtgcaacccggttcagcgcatctcggctgaagaagccctacagcacccttacttctccgatttttgtcctccctag

SEQ ID NO: 113462 - DNA, 783 bp, synthetic construct
  misc_feature 1..783: note = Description of Artificial Sequence: Synthetic coding sequence
  source 1..783: mol_type = other DNA
atgcaaaagtacgaaaaactggagaagattggggaaggcacgtacgggactgtctttaaggccaaaaaccgagaaactcatgagattgtcgcattaaagcgggttcgccttgatgacgacgatgagggggtgccttccagcgcgcttcgggagatttgtctgctcaaagagttaaagcataagaatatcgtgagactgcacgatgtgcttcattccgataagaagctcacactggttttcgagttctgtgatcaggacctcaaaaaatactttgactcttgcaatggcgacctggacccggaaatcgtgaagaatggcgagctgaaactggccgattttgggctggcaagagcctttggcataccagtgcgatgttatagtgcggaagtagtcactctctggtacagaccgccagatgtgcttttcggcgccaaattatattccaccagcattgacatgtggagtgctggctgcatctttgccgagctggcaaatgcggggagacctcttttcccagggaatgatgttgatgaccagctcaagagaattttcaggcttctggggacacccaccgaagagcaatggccatctatgactaagctgcctgattataagccttaccccatgtacccagcaacaacctctctggtgaacgttgtgccaaagctgaatgccactggaagggatctgctgcagaatctcctgaagtgtaaccctgtgcagcgcatctccgctgaagaagccctccaacacccctatttttctgacttctgccccccctag

SEQ ID NO: 113463 - DNA, 1104 bp, synthetic construct
  misc_feature 1..1104: note = Description of Artificial Sequence: Synthetic coding sequence
  source 1..1104: mol_type = other DNA
atgggcactgtgctttccctgtcacctgcctcctcagcaaagggcagacgccccggagggctgcctgaggaaaaaaagaaggccccacccgcgggggacgaggcccttggaggttatggtgcaccacccgtgggaaagggcggcaagggcgaatcaaggctcaaacgccccagcgtgctgataagtgctttaacctggaagaggctcgtcgccgcgtccgcaaagaagaagaaaggatccaagaaagtcacccctaagccagctagtaccggccctgatccactggtgcaacagcgcaatcgcgagaatcttctgaggaagggcagagacccccctgacggaggggggactgcaaagccattagccgtgcccgtgccgacagtgccagctgccgccgccacctgcgaacctccctctggtgggtccgcggccgcccagccacccggaagcggcggtgggaaaccccctccgccaccacccccggcacctcaagtcgccccgcctgtgccaggcgggagtccaaggcgggtgatcgtacaggctagcacaggtgaactgctcagatgtcttggcgatttcgtctgccgaagatgctaccggcttaaagagctgtccccaggggagttggtcggctggtttaggggagtcgatcggagtctgctgctccagggatggcaagaccaggcatttatcactccggcaaacctcgtctttgtgtatcttctgtgtcgggaatctttgagaggggacgagttggcctcagcagcagagttgcaggctgctttcctgacttgcttatatctcgcctacagttacatgggcaacgagattagctatccactcaagccgtttctggtggaacctgataaagagaggttctggcaaaggtgcttacgcctcattcaacggctgagcccacagatgttgcgcctgaatgcagacccccacttctttacccaggtattccaagacctaaaaaatgagggggaggctgctgcctctggcggaggacctccctcaggcggtgctcctgcggcaagcagcgcagctcgcgactcttgcgccgcgggaaccaaacactggacgatgaacctcgacagatag

SEQ ID NO: 113464 - DNA, 1779 bp, synthetic construct
  misc_feature 1..1779: note = Description of Artificial Sequence: Synthetic coding sequence
  source 1..1779: mol_type = other DNA
atggaaatgtatgagacactcggcaaagttggtgaagggtcctacggtacggtcatgaagtgtaaacacaagaacactggccaaatcgtagccattaaaatcttctatgaacggccggagcaatctgtgaacaagatcgccatgcgggaaattaaatttctgaaacagttccatcatgaaaacctcgtgaacctcatagaggtgtttcgtcagaagaagaaaatccatcttgtgttcgaattcatagaccatactgtcctggacgaactccaacactattgccatggcctggagagtaagcgtctgcggaagtacctcttccagatcctgagagcaatcgattacttacattctaacaacatcatccacagggatataaagccagaaaatatcctagtatcgcagagcggaattactaaactctgcgatttcgggttcgctcgaactctggcagctccaggcgatatttacactgactatgttgcaactagatggtatcgggcccctgagctggtgttgaaggacacaagttacgggaagcctgtggatatctgggccctgggatgtatgatcattgagatggctactggtaacccctacctgccctcttccagcgacctggacttgctccataaaatcgtactcaaagtaggaaatttatctcctcatctacagaatattttctccaagtctcccatcttcgccggagtggtgctcccgcaggtacagcaccctaagaacgcccgtaagaagtacccaaagctgaacggcttgttagctgacattgtgcacgcatgcttgcagatagatcctgctgaccggatttccagcagcgaccttttgcaccatgagtactttaccagagatggttttatcgagaagttcatgcccgagttaaaggccaagctcctgcaagaggccaaggtcaattccctcatcaaacctaaggagtcatctaaggaaaacgagctccggaaagacgaacgcaaaacagtgtacaccaatactttactcagtagttcagtgctcggcaaggagattgagaaggaaaagaagcctaaggagataaaggtccgggtcatcaaagtcaaaggtggacggggcgacatttctgagcccaagaaaaaggaatacgagggtggcctgggacagcaggatgctaacgaaaacgtacatccaatgtctcccgacacaaaactggtgacaatagagcctcccaaccccataaatccctcaaccaactgcaatggtctgaaggaaaaccctcattgtggaggcagcgtcactatgcccccgattaatctcacaaatagcaacttaatggccgcaaatctgagctctaacttattccatccttcagtgcgactaaccgaaagggcgaaaaagcggcgaacatcctcccaatctatcggacaggtaatgcctaactcgaggcaggaggacccaggcccaatccagtcacagatggaaaaagggatttttaacgagagaacggggcacagcgatcagatggctaacgagaataaaagaaaattgaatttcagccgatctgaccggaaggaatttcacttccccgagcttccagtcacgatccaaagtaaagacaccaaagggatggaggtgaaacagataaaaatgcttaaacgggagtctaagaaaacggaatcatcaaaaatccctacgctgttgaatgttgaccaaaatcaggagaagcaggaaggtggagacggacattgtgaagggaaaaatctcaagagaaataggttctttttttggtag

SEQ ID NO: 113465 - DNA, 1368 bp, synthetic construct
  misc_feature 1..1368: note = Description of Artificial Sequence: Synthetic coding sequence
  source 1..1368: mol_type = other DNA
atggaaatgtatgaaaccctgggcaaagtcggtgaggggtcatatggcacagttatgaagtgtaaacacaaaaacacaggccagatcgttgctattaaaatcttctacgagagaccggagcaatctgttaataaaatcgccatgagggaaatcaagttcttaaagcagttccatcatgagaacctggtcaacctcatcgaggtgttccgacagaagaagaaaatccacttggtctttgaattcatagaccacactgtgctggacgaactccaacattattgtcatggccttgagtcaaagagattgcggaagtacctttttcaaatcctgcgggcaatcgattaccttcatagcaacaacatcatccatcgggatatcaagcctgaaaacattctggtcagtcagtcagggataacgaaactgtgtgactttgggttcgcacggactctcgccgcgcctggcgatatctatacggactacgtggctaccagatggtatcgggcgccggagctcgtgttgaaagatacaagttatggtaaacctgtggatatctgggcactcggttgcatgatcatagaaatggcgaccgggaatccataccttccaagttcttccgatcttgatctcctgcataagatcgtgctgaaagtcggcaatttgtctcctcatcttcaaaatattttctccaagtctcccatatttgcaggggtggtgctgccacaggtacaacacccgaagaacgctcggaaaaagtacccgaagctgaacgggcttctagcggatatcgtgcatgcttgtctgcagatcgacccagcagaccgtatctctagttcggatttactgcaccacgaatactttacaagggatggtttcatcgaaaagtttatgccggagctgaaagcgaaacttttgcaggaggccaaggtgaacagcttgataaaaccaaaagagtcaagtaaggaaaacgagctcagaaaggacgagcggaagactgtatatacaaataccctactcagttcgagcgtgctgggtaaggagatcgaaaaagagaagaaacccaaggagataaaagtcagggtgattaaagtgaagggcggcaggggcgacatctcggaaccaaaaaaaaaggagtatgagggaggtctggggcaacaggatgctaacgagaacgtccaccccatgagcccggacacaaagctcgtgacaatcgaacctcccaaccccattaaccctagcacgaactgtaacggcctcaaagagaatcctcattgtgggggatctgtgacaatgcccccaatcaacctgaccaattcaaacctaatggcagccaatctgagctctaatctcttccacccatccgtgcgctag

SEQ ID NO: 113466 - DNA, 1092 bp, synthetic construct
  misc_feature 1..1092: note = Description of Artificial Sequence: Synthetic coding sequence
  source 1..1092: mol_type = other DNA
atgccagagctgaaggccaaactgttacaggaagcaaaagtcaatagccttatcaagcctaaggaatcaagtaaggaaaacgaactaagaaaggacgaacgcaagacggtatacaccaatacgttactttcctcgtccgtactaggtaaggagatcgagaaagagaaaaagccgaaggagatcaaagttcgcgttattaaggtaaagggaggaaggggtgacatttctgagccaaagaagaaggagtatgagggaggcctcggtcaacaggacgctaatgagaatgttcaccccatgagccccgatacaaagctggtgaccattgagccaccaaatccgattaacccttctaccaactgcaatggtctgaaagagaatccgcactgcggaggatcggtgactatgccaccaatcaacctgactaactcaaatctgatggcagctaacctgtcatctaatttgttccaccccagcgtgagactgaccgagcgggccaagaagcgccgcacctcttctcagtccattggccaggtgatgccgaattcccggcaggaagatcccgggcctatccagtctcagatggagaagggcatttttaacgagcggactggccatagtgaccaaatggcaaatgaaaacaagagaaagttgaatttttctcgctccgacagaaaggagtttcactttcctgaactgccggtcaccatacaatctaaggacaccaagggcatggaagtgaagcagattaagatgctcaaaagagagtctaaaaagacagaaagcagtaaaatccctaccctgctcaatgtggatcagaatcaggagaaacaagaattcatcccgctttccctgctctctgcatgttgcccaatttttacgaatatatgtagccagctgacaattagatacgtatttatctctggcatgaagacagaccagtacagtgagctggtcccagtagaatggggcatcgcagaaaaaatccccaagaatgtagaagccactctcgagttggggaatcgccagaggttcgaacagtttggcgagcttaggcgacggcaggagaatgtggggaagtttgggacattctag

SEQ ID NO: 113467 - DNA, 1773 bp, synthetic construct
  misc_feature 1..1773: note = Description of Artificial Sequence: Synthetic coding sequence
  source 1..1773: mol_type = other DNA
atggaaatgtacgagactctcggcaaagtcggcgaggggagctatggaacagtgatgaaatgcaaacataaaaacaccggccagattgtcgccatcaagattttttacgaaagaccggaacagagcgtgaataagattgctatgagagaaatcaagttcctgaaacagttccatcacgaaaacttggtgaatttgatcgaggttttccggcaaaaaaagaagatccacctggttttcgagttcatagatcatacagtcctagacgaattgcagcattactgtcacggactcgaatccaaaaggctgcgcaagtacttgttccaaatcctccgtgccattgactacttacacagcaacaatattattcatagggacatcaagcctgagaacatcctagtctctcaatcgggtatcaccaagctgtgtgattttggcttcgcacgaaccttagccgcccccggcgacatctataccgactacgttgcaacccgttggtatcgtgctcctgagctcgtgttgaaggacaccagttatggcaagccggtggacatttgggctctgggttgcatgattattgagatggctaccgggaatccgtatctgccatcttcaagcgatctggacctgttgcacaagattgttttgaaggtagggaatttaagtccccacctgcagaacattttttcgaagtctccaatcttcgcaggggtcgttttaccacaggtgcagcatccgaaaaacgcaagaaagaaatacccgaagctaaatggcttgctggcggacatcgtgcatgcatgtttgcagattgatcctgctgatcgcataagctcgagcgacctactccaccatgagtatttcaccagagacgggtttatcgagaaatttatgcctgagcttaaggcaaagctcctccaagaagctaaagtgaactctctgatcaagcccaaggagagcagtaaggagaacgaattgaggaaggacgagagaaaaactgtgtatacaaacaccctcctatcctccagcgtgctgggcaaggagatcgagaaggagaaaaagccaaaggagattaaagtccgcgtgatcaaggtcaaaggcggccggggggacatttcagagccaaagaaaaaggagtacgaaggcggcctgggtcagcaagatgcaaacgagaatgtgcatccaatgagtcccgatacgaagctggttaccattgagccaccaaatcctatcaatccctcgaccaactgcaatggccttaaagaaaatccacactgcggaggatctgtaacaatgcccccaattaatctgactaactccaatttgatggctgccaacctgtcgtctaatctgttccatccctcagtgcggctgaccgagagagcaaagaagcgacgcactagttctcaaagcataggtcaggtcatgcctaattctcgccaggaagatcctggacctattcagtctcagatggagaaaggtatatttaacgagcgtaccggccattctgaccagatggctaacgagaacaagagaaagctcaactttagccggagtgataggaaggagtttcacttccctgagttgcccgtgaccatccaatccaaagataccaaaggtatggaggttaagcagattaaaatgctcaaaagggaaagcaagaagactgagtcgtccaagataccgacactactcaatgtggatcagaatcaggagaaacaggagaacaccgggaatgcgcagaccgagagaaaaaagaacctgcccgatgttgagtag

SEQ ID NO: 113468 - DNA, 1368 bp, synthetic construct
  misc_feature 1..1368: note = Description of Artificial Sequence: Synthetic coding sequence
  source 1..1368: mol_type = other DNA
atggaaatgtatgagacactcggcaaggtcggtgaggggagctatggaaccgtgatgaaatgtaagcataagaacaccggacagattgtcgccattaaaatattttacgagcggcctgagcagtccgttaacaaaatagcaatgcgagagatcaagttccttaagcagtttcatcatgaaaatttggtgaacctgatcgaagtgtttagacagaaaaaaaaaatccacctcgtgttcgagtttatagatcacacagttcttgacgaacttcagcactactgccatgggctggaaagcaaacgtctgcggaaatatctcttccaaatcctgcgggccattgactatttgcattctaataacataattcacagggatatcaaacccgaaaatatcttggtaagtcaatctggaataacgaaactgtgcgatttcgggttcgccagaaccctggccgctccgggcgatatttacaccgattatgtggcaacacgctggtaccgcgcacccgagctggtactgaaagatacaagttacggcaagccggtcgacatctgggccctgggctgcatgatcatcgagatggccaccgggaacccctaccttccctcaagctctgatctagatctgctgcataaaattgtgctgaaagttggcaatttatcgccacacctgcagaacatttttagtaagagtcctatattcgccggtgtcgtgttgcctcaggtgcagcacccgaagaatgctaggaagaaatatcccaaattaaacgggctcctcgcagatattgtgcacgcctgcctgcaaatcgaccccgcggatcggatcagttcgagtgacctgttgcaccacgaatattttactcgggacggatttattgagaaattcatgccggagcttaaggccaaacttctgcaggaggcgaaagtaaacagcctcataaaacccaaggaatcttccaaggagaatgaactgcggaaagacgaaagaaaaactgtgtataccaacaccctcctctcctcatctgtgttgggtaaggaaatcgagaaggaaaagaagccaaaggagatcaaggttcgcgtaattaaagtgaaaggcgggcgaggagatatttctgaacccaaaaaaaaagagtatgaaggcgggctgggtcagcaggatgctaacgagaacgtgcatccgatgtcacctgacacaaagctagttactatagagcccccaaaccctataaatccctccacaaattgtaacggactgaaggaaaatccccattgtggtggcagtgtgactatgccccctatcaatcttacaaattctaatctgatggctgccaacctttcatccaatctttttcacccatcggtgcggtag

SEQ ID NO: 113469 - DNA, 876 bp, synthetic construct
  misc_feature 1..876: note = Description of Artificial Sequence: Synthetic coding sequence
  source 1..876: mol_type = other DNA
atgccagagcttaaagccaagcttctccaggaagcaaaagtaaacagtttgataaaacctaaggagtcctctaaggaaaacgagctgcggaaggatgaacgcaaaacagtgtataccaataccctgctgtcctcttcagtcctgggaaaagaaattgagaaagagaaaaagcccaaggaaataaaggtacgggtgattaaagtcaaggggggccgcggcgacatatccgaacctaagaagaaagagtatgagggaggtttaggccagcaggacgccaatgagaatgtgcaccctatgtctcccgatactaaattggttacaatcgaacctcccaaccctatcaacccaagcaccaactgcaacggtctgaaggaaaatccacactgcggcgggagcgtgactatgcctcccatcaacttaacgaattctaatctgatggccgctaatcttagttctaatctgttccacccgtccgtgaggctaactgagagagcaaagaaacgcagaaccagttcacagagtatcggccaggtgatgcctaacagcagacaggaggaccctggacccatacagagccagatggaaaaagggatcttcaacgaacgcaccggccactctgaccaaatggccaatgagaataagagaaaattgaatttttcacgcagcgatagaaaggagttccatttccctgaactgcctgtgaccattcagtccaaagacaccaaggggatggaggttaagcagataaaaatgctgaagcgggagagcaagaaaactgaatcctctaaaatcccaaccctgctgaatgttgatcagaatcaggagaagcaagaagtgagactgtaccaaaggcatgaagaccgccccatacaatag

SEQ ID NO: 113470 - DNA, 3093 bp, synthetic construct
  misc_feature 1..3093: note = Description of Artificial Sequence: Synthetic coding sequence
  source 1..3093: mol_type = other DNA
atgaaaatccccaacatcgggaatgtcatgaacaagtttgagatactcggtgtcgtgggggagggagcttacggtgttgtgctgaaatgccgacacaaggagacccatgagattgtggccatcaagaagttcaaagatagtgaagagaatgaagaagtcaaggagactacactgcgcgagctgaaaatgctaaggacactgaagcaggagaatatcgtggagctcaaagaagccttcagacggagaggaaaactctacctcgtgttcgagtatgtggaaaagaacatgctggagctcctggaagagatgccaaacggcgtccctccggaaaaagtaaagtcttatatataccagctgattaaagctattcattggtgtcacaaaaatgatattgtgcatcgagatattaagcctgagaatctgttgatcagccacaacgatgttctgaagctttgtgattttggctttgccaggaacttgtctgaaggcaacaatgcaaattataccgaatatgtggccacccggtggtacagaagtcccgagttacttctgggcgctccatatggcaaaagcgtggacatgtggagtgtgggatgtattctcggagagctctctgacggacaacctttatttcctggggaaagtgaaattgatcagctgtttacgatccagaaggttctggggccgcttccctcagagcagatgaaattgttttattctaacccaaggttccacggactgagattcccggcggtaaatcaccctcagtccctggagaggcgctatcttggtatcctgaactccgtactgctcgatttaatgaaaaatctactgaagctggaccccgccgatcgttatctgaccgaacaatgtctgaatcatcccacctttcagacacagcggctgctggaccggtcaccatcccgtagtgctaagcgaaaaccatatcatgtcgaaagtagcactctgtcgaataggaatcaggcaggtaagtctacagctctccagtcacatcataggtctaacagcaaagatatccaaaatttgagcgtcggcttgccaagggccgacgagggcttgcccgctaatgagagtttcctaaacggaaatttggccggtgccagtctctccccgctgcatacaaaaacgtaccaggccagttcccagcccggctcaacaagcaaggatttgacaaacaacaacatccctcatctgcttagtcccaaagaggctaagtcaaagactgagttcgattttaatatcgatcctaagcctagtgagggaccagggacgaagtacctaaagtccaactcccgctctcagcagaaccgtcatagttttatggagtcctcacaatctaaggctggtactctgcaacccaacgagaagcaaagtcggcactcatatatagacaccattcctcagtcctctcgctcaccatcttacagaacgaaagctaaatcccacggagctctctccgacagcaaatcggtgtcaaacctgtccgaggcacgggcccagattgcggaaccttcaacgagtaggtacttcccatcaagttgtttagaccttaactccccaacttctccgacccctacccggcacagtgacaccaggactctgttgtcacccagtggccggaacaatcgtaacgaaggtaccctggatagcaggagaaccaccactaggcacagtaagaccatggaagaattaaagttgcccgagcatatggacagtagtcatagtcattcacttagcgcgcctcacgagtctttctcttacggactgggatacacctccccattctcttcacagcagcgcccccaccggcacagtatgtatgtgaccagagataaagtgcgcgcgaagggtctcgacggctctttaagcattggacaggggatggccgcaagagccaactcccttcagcttctcagtccccaacccggcgagcagcttcctccggaaatgaccgtagcgagaagttcggttaaagagacctcgcgggaaggaacatcttcattccatactaggcagaaaagtgaagggggcgtttatcacgatccccactccgacgatggtaccgctcccaaagaaaataggcatctctataatgaccctgtgcctagaagggtggggtctttctaccgagtgccgtcaccacgcccagacaactcttttcacgagaataacgtgtcgacccgggtcagtagtctgccttctgagtcttcgagcggcactaaccactcaaagagacaaccggcctttgatccttggaagagcccggagaatattagtcattctgaacagctgaaggaaaaggagaagcaaggattttttagaagcatgaaaaagaaaaaaaaaaaatctcagactgtgcccaactcagatagccccgatctgctcacattgcagaaatctatccactcagcatcgacacccagcagccggccgaaagaatggcggccagaaaagattagcgacctgcaaactcagagccagcccctcaagtcactgaggaagctgctgcacctgagttccgcttcgaaccatcctgccagctctgacccaaggttccagccactcactgctcaacagaccaagaactccttctccgagatccgtatccatcccttatcccaggcgagcggggggtcctctaacattcgacaggagcccgctcccaaaggccgaccggcccttcaactgcccgatgggggttgtgacggtcgacggcaacggcaccatagcggcccacaggatcgccggtttatgctccgtactaccgagcaacagggcgagtacttctgctgcggtgacccaaaaaagccccataccccttgcgtccccaatcgcgccctccacaggcctatcagcagcccagctccataccccgtcctgcaggtgcggggcacatccatgtgcccgaccctgcaggtcaggggtactgatgctttttcctgtcccacccagcagtctggattttcgttttttgtaagacacgtgatgagggaggccctgattcaccgagcacaggtgaatcaggcggcacttttgacctatcatgagaacgcagcgctgaccggcaaatag

SEQ ID NO: 113471 - DNA, 3093 bp, synthetic construct
  misc_feature 1..3093: note = Description of Artificial Sequence: Synthetic coding sequence
  source 1..3093: mol_type = other DNA
atgaagattcctaatatcggaaacgttatgaacaaattcgagattctgggcgtggttggggaaggagcctacggagttgtgctcaagtgtcggcacaaagagacccatgagattgtcgcgatcaagaagttcaaggatagtgaagagaacgaggaggtaaaagaaactaccctgcgtgagttaaaaatgctgaggactttaaagcaagagaatattgtagagctgaaagaggcctttaggcggagaggcaaattatatttggtcttcgagtatgtggagaaaaatatgcttgagctgctcgaagaaatgcccaatggcgtgcctcctgagaaagtgaaatcgtacatttatcagctgatcaaggcgatacattggtgtcacaagaacgatatcgttcaccgtgatatcaagccagaaaatctgctgatctcccacaacgatgtgcttaagctttgcgattttgggttcgctcgaaatttgagcgaaggcaataacgcaaattacacggagtacgtggctacgcggtggtatcggtctccagaactgctgctcggtgccccttatggaaagagtgtcgacatgtggagcgtcgggtgtatcctcggtgaactaagcgacggacagccgctattcccaggggaaagcgaaatagaccagctttttactattcagaaagtgctcggaccactaccaagcgagcagatgaagctattctactccaatccccggttccatggactacgcttcccagccgtgaaccatccacaaagcctggagcgccggtacctgggaatactgaatagcgtgttactggatctaatgaagaatttactcaagctcgacccagcagataggtatctgaccgaacagtgcctgaatcatcccactttccagacacagcgactgctcgaccgttcccccagccgaagcgccaagcggaaaccttaccacgtcgagtcttccacactgtctaaccgtaatcaggcaggcaaatctacagcacttcagagccatcaccggtctaattctaaagatatccagaatctctcagtggggctgcctagggcagacgagggcctgcccgccaatgagtcctttttaaacggcaacttagctggtgcctcactcagtccactccataccaagacttatcaggcctcttcccaacctggctcaacgagcaaagacctaaccaataacaacattcctcacctcctgtctcccaaggaggccaaaagtaagacagagtttgattttaatatagaccccaagccctctgagggacctggaaccaagtaccttaaatcgaactctagatcacagcaaaatcgccattcatttatggaatctagtcagagtaaagcgggcaccctgcagccaaacgaaaagcagagccggcattcctacatagacaccatcccccaatcctcccgatcccccagctatcgcacaaaagccaagagtcatggagctctaagcgatagtaagtccgtcagtaacctgtctgaggcccgtgcccagattgcagaaccctccaccagccgatacttcccatctagctgcctggacctgaattctccgacttcccccacaccaacgaggcattccgacaccaggactttgcttagcccctcgggacggaacaatcgtaatgagggaaccctggactcaaggcggacgaccacacgccatagtaaaaccatggaggagctgaaactgcctgaacacatggacagcagtcattcgcactcgctgagcgctccccacgaaagcttttcctacggtcttggctacacttctccctttagtagtcaacagaggcctcaccggcacagcatgtatgtcacaagagataaggtgcgtgcaaaaggattggacggttcgctgagtatcggacaggggatggctgctagggcaaatagtctccagctgctttctcctcagccaggcgaacagctgccgccagaaatgacagtggcgcggtcttctgtaaaggaaacttcacgggagggcacctctagctttcacactaggcagaagtcagaaggaggagtataccacgatccccactctgatgacggtaccgccccgaaggagaaccgtcacctatacaatgatccagtgccccggagagtcggctcattttaccgagtcccatccccccgcccggacaatagctttcatgagaacaatgtgtccacccgagtgagcagcctcccgagtgagtcatcctccggtaccaatcactccaagaggcagccggcgtttgatccatggaagtcgccagaaaacattagccatagcgagcagctgaaagaaaaagaaaaacagggattcttcagatccatgaagaaaaaaaagaagaaatcacagaccgtgcccaatagtgactcacccgacttactaacattgcagaagagcatccactcggccagtactccgtcatctaggccaaaggagtggcgccccgaaaagatctcagacctgcagacacagagtcaaccgcttaagagcctcagaaaattactccacctctctagtgccagtaaccatccggcttcttctgacccgaggtttcagccactcacagcgcagcagactaagaattcattcagtgagattagaatacatccactgtcacaggcctctgggggtagtagcaacattagacaggagccagcacccaaggggcggcccgctctgcagctccccgatggtggatgcgacggtagaaggcagcgtcaccattccggcccccaggaccggcggtttatgttacgcaccacggagcagcaaggggagtatttttgttgcggggatcccaaaaaacctcatacaccgtgcgtacccaaccgcgcgctccaccgtccaatcagcagccctgccccctaccctgtgctccaggtccgcggcacctctatgtgccccaccctgcaggttcgcggtacagatgcgttcagctgtcctactcagcagagcggctttagcttttttgtacgtcatgttatgagagaggccctgatccatcgagctcaggtgaatcaggcagcactgctgacatatcatgaaaacgcagctctaaccggcaagtag

SEQ ID NO: 113472 - DNA, 1956 bp, synthetic construct
  misc_feature 1..1956: note = Description of Artificial Sequence: Synthetic coding sequence
  source 1..1956: mol_type = other DNA
atgtccctccctcgtcttctgaaagtgaatatacggacgtatgacaacagcatccctattagtgaatctagtcgtaaatcttggaaccagaaacatttcgccctgacattcccaaagcccttgcaaaggggcacaaatgacaaatcgagaccccttaagagccagataaccgtgacacggcacgataagcggaagctggaagaagggcagaaaccagctcacaagtggatcaggcacagtttcagaaagatcctccaatggccaccaatctatacagctgcaagagagcaaactccctttaggcacttgtatacctccaaaacacacttaaagaaggctgagtataagaagagcaaagacgaaaagggtgggacaccactaaagaaagatagtaaaaaaaaaggcgggagctacgctaccaacccagaatcaaagcagatagtcgaagagaagacaaagagacagaatgaggcggacaagacaccgctcaagagttctcacgagaatgaacagagtaagaagagcaaatcctctagtgaaacaaatcctgagtcccagaattccaagaccgtgagcaagaattgtagccaaaaggacaagaaagactcgaagaacagcaagaaaacaaataccgaatttctgcataccaagaacaacccaaaaaaagatttaaaacggtcaaagacatccaacgaccctatatcagagatttgctctgagaacagcctgaatgtcgactttcttatgctggtgggacagtctgacgacgagtcaattaacttcgatgcctggctgaggaactattctcagaataattcaaagaattactccctcaagtatactaagtataccaaaaaggatacaaaaaagaatgccaaaaagagcagcgatgctgaatcagaggattctaaggacgccaagaaggacagcaagaaggtgaagaaaaacgtcaagaaggacgacaagaaaaaagatgtcaagaaagataccgaatcaactgacgcagagtctggcgatagtaaagatgagaggaaagacactaagaaagataagaaaaaacttaagaaagatgataagaagaaggacaccaagaagtaccctgagtccactgataccgagtcaggggatgccaaggatgcaagaaatgatagcagaaacctcaaaaaggcctccaaaaatgacgataaaaaaaaggatgccaagaagatcacattttcaacagattccgagtcagagctcgagtcaaaggagagccaaaaggacgagaagaaggataaaaaggacagtaagacagacaacaaaaagtcggttaaaaatgatgaagagtccacagatgccgatagtgagcccaaaggcgattcaaagaagggaaagaaggatgaaaagaagggcaagaaggattctaaaaaagacgacaagaaaaaagatgctaagaagaacgccgagtccaccgaaatggagtccgacctggagctaaagaaagataaaaagcactccaaagagaagaaggggagcaaaaaggacattaaaaaggatgcccgtaaggacactgagagcacagatgccgagtttgacgagagtagcaagactggtttcaaaacttcaaccaagatcaagggatctgacaccgagtctgaggagtctctctataagccgggtgccaagaagaaaatcgacgagagcgacggaacatctgcgaactcgaaaatggagggactcgagagtaaacgaggattcagaatgtccagtaaaaagactacctttaatgaaaaaggagaaaaggctagcactggccgtgttcctcccagccgggagaaaccaccactgcctgcctgtgagccatccttgccatctcctaaggtgcggcggctttgctggtgcaaaatgcccccaccaccccctaaaccacggtacgcacccttgcccgaggccccttggatccacaaactgctttag

SEQ ID NO: 113473 - DNA, 1974 bp, synthetic construct
  misc_feature 1..1974: note = Description of Artificial Sequence: Synthetic coding sequence
  source 1..1974: mol_type = other DNA
atgagtctccccagactgctcaaggtaaacatccgcacttacgacaacagtatacctatcagcgagagttctcgaaaatcatggaaccagaaacactttgcattgaccttccccaagccattacagcggggtaccaatgacaagtccaggcctttgaaaagtcagattaccgtgaccaggcatgataagcgaaagctggaggagggtcagaaaccagctcataaatggatccggcactcctttcggaagatcctccagtggcctcctatttacaccgctgcaagggagcagacaccctttcggcacctgtataccagcaaaacccatcttaagaaggccgagtacaaaaaatcaaaagacgagaaaggcggcactccgctgaaaaaagattctaaaaaaaagggcgggtcctatgcgaccaatccggagtccaaacagatcgtggaagagaaaactaagcgccagaatgaagccgacaagaccccactgaaatcttcacatgagaatgagcaaagcaagaaatccaaatcatcgagcgagaccaatcccgagtcccagaacagcaaaacggtctcgaaaaattgttctcaaaaggataaaaaggatagcaagaactcaaagaagacaaacaccgagttcttgcatacaaagaataatccaaagaaagacttgaaaagatccaagacatctaatgaccctatttccgagatttgtagcgagaacagtctgaatgtcgactttctcatgttggtcggtcaatctgatgatgagtctataaacttcgatgcttggctcaggaattacagccaaaataactctaaaaattattccctaaaatacaccaagtatactaaaaaggacactaagaagaacgcaaagaagagctctgatgcggagtccgaagactccaaagacgctaaaaaggactccaagaaagtcaaaaaaaacgtgaagaaagatgataagaagaaggatgtgaagaaggacaccgagagtactgacgccgagtcaggggacagcaaggatgaaaggaaggatacaaagaaagataaaaagaagctgaagaaggatgataagaagaaagataccaaaaaatacccagaaagtacagacacagagtccggcgacgctaaggatgctcgcaatgattcaagaaatttaaaaaaagcaagtaaaaacgacgataaaaagaaggacgctaagaagattacattctcgactgactccgaaagcgagctagagtctaaggagtcccagaaggatgaaaagaaagacaagaaggattcaaaaacggataataagaagtcagtaaagaacgacgaggagtccacagacgcggactctgaaccgaagggtgattcaaaaaagggaaaaaaagatgaaaagaaggggaagaaagactccaagaaggatgacaaaaaaaaagatgctaagaagaacgcagagagcactgagatggagtcagatctggagctgaagaaagacaagaagcacagcaaagaaaaaaaaggtagcaaaaaagacataaaaaaggatgctcgtaaagacacagaaagtacggacgcagagtttgatgagtcctccaagactgggtttaaaacgtctaccaagattaaagggtctgacacagagtcagaggagtccctttacaagcctggcgctaagaagaaaattgacgagagcgatggtactagcgccaatagcaagatggagggactggagagtaagagggggttccggatgtctagtaaaaagacaacttttaatgagaaaggggaaaaggctagcaccggccgtgtgcccccatcacgcgaaaaaccgccgctcccggcttgtgaaccctctctgcctagccccaaagtgagaagactgtgctggtgcaagatgccgccccctccccccaaacctcgatacgcaccactaatccagagacgacagcgcttgggcgtgaggcgctgccagctattgatgtag

SEQ ID NO: 113474 - DNA, 1086 bp, synthetic construct
  misc_feature 1..1086: note = Description of Artificial Sequence: Synthetic coding sequence
  source 1..1086: mol_type = other DNA
atgcaagagaaagatgcttcctcacagggcttcctcccccatttccagcactttgctacccaggcaatacatgtgggacaggatcctgaacagtggaccagtagggcggtggttccacccatcagtctgagtaccaccttcaagcagggagcccccggccagcactccgggttcgaatactccagatcaggcaaccccacccgaaactgccttgagaaggcggtagctgcgctcgatggagctaagtactgtctggcgttcgcttcaggacttgctgccacggtgacaatcacacatctactgaaggcaggtgaccagatcatttgcatggacgacgtttacggaggcacaaacagatattttcggcaggtcgccagtgaatttggactgaagatcagttttgtggattgctcaaagattaaactgctggaggcagcgatcaccccagagacaaagcgacccttggccctgggagccgatataagcatgtattcagcaaccaaatatatgaatggccattccgacgttgtgatgggtctcgtctcagtaaactgtgagagcctacataacaggcttcggtttttgcagaacagtcttggagccgtgccgtctccaattgactgttacctgtgtaacagaggcctcaaaactctgcacgtccgaatggagaagcactttaagaatgggatggccgtggcacagtttcttgaaagcaatccttgggtcgagaaagtgatttatcccggcctgccctcccaccctcagcatgagttggtgaagcgacaatgcaccggatgtaccgggatggtcaccttctatatcaaggggactttgcagcatgctgaaatatttctaaagaatctcaaattatttacgctcgcggagtctttgggcgggtttgaaagcctcgctgagctgcctgcgattatgacccatgcctcggtgttgaagaatgatagggatgtgctgggcattagtgatactctcatcaggttatccgttggtctcgaagacgaagaggacctgttagaagatttggatcaggcactgaaggcggcgcacccaccaagcggctcccacagttag

SEQ ID NO: 113475 - DNA, 1218 bp, synthetic construct
  misc_feature 1..1218: note = Description of Artificial Sequence: Synthetic coding sequence
  source 1..1218: mol_type = other DNA
atgcaggaaaaggacgctagttcccagggattcctgccacatttccaacactttgccacccaggccatccacgtggggcaagatcctgagcagtggacctcccgagccgtagtgcctcccatcagcctctcgactacttttaagcaaggcgcaccggggcaacactccggtttcgaatatagtcggagtgggaaccccacgaggaactgtttggaaaaagcggtggccgcccttgacggggctaaatattgccttgccttcgctagcgggctcgccgccacagttacaattacacacctactgaaggccggcgaccagataatctgcatggacgacgtctacggaggcacaaatcgatacttcaggcaggtggcctctgaattcggacttaaaatctccttcgtggattgtagtaaaataaagctccttgaagcagctatcacacccgaaactaagctggtatggatcgagacgcctaccaaccccacacagaaagtgatagacatcgagggctgtgctcacattgttcacaagcatggggatataatcctcgtggtggacaataccttcatgtccccctacttccagcgccccctggcactgggtgccgatatctcaatgtattccgccactaagtacatgaacggacactccgatgtggtgatgggtctggttagcgtgaactgtgaaagcctacacaatcgattacggttcctgcaaaattcattgggggccgtgccctcccctatagactgttatctgtgcaaccgcggcctgaagaccctgcacgtacggatggagaagcatttcaagaatggaatggccgttgcccagttccttgagtcaaacccctgggtggagaaggtgatctaccccggccttccatctcatccacagcacgagctggtcaagcgccagtgtaccgggtgtacaggtatggtgacattctatatcaaaggcacactccagcatgccgagatttttttgaaaaatctgaagttgttcaccttggctgaatcgttggggggctttgagtcccttgctgaactcccggccatcatgacacacgcaagcgtgttgaaaaatgaccgtgacgtgctcggcatcagcgacaccctaattaggctgtcggtgggtctggaggatgaagaggaccttttggaagacctcgaccaagccttgaaagctgcccacccaccctccgggtctcacagttag

SEQ ID NO: 113476 - DNA, 1122 bp, synthetic construct
  misc_feature 1..1122: note = Description of Artificial Sequence: Synthetic coding sequence
  source 1..1122: mol_type = other DNA
atgcaggagaaggacgcctcatcacagggatttctgccgcacttccagcacttcgccacccaggctatacatgttgggcaggatcctgagcagtggactagccgggccgtggtcccaccaatcagcctcagtactaccttcaaacagggcgccccaggccagcactctggcttcgagtacagccggagcgggaacccgacaaggaactgtttggagaaggccgtggccgctttagatggggctaaatactgcactaacaggtacttccggcaggtcgcttcagagttcggcttgaaaatcagtttcgttgactgtagcaaaattaagctgctcgaagccgccatcactcccgagacgaaactggtatggatcgagacacccaccaatcctacccagaaggtcattgacatcgagggctgcgcacacattgtgcataagcacggtgatatcatccttgtagtcgataacacatttatgagtccatacttccagcgacctctggctctgggggcagatattagcatgtatagcgcaaccaagtacatgaatgggcattcagatgttgtcatgggactggtctcagtgaactgtgagagccttcataaccgcttacggttcttgcaaaacagtttgggcgccgtgcccagccctatcgactgctatctgtgtaacagggggctgaagactctccacgtaagaatggaaaaacactttaaaaacgggatggctgtggcacagtttttggaatccaacccctgggtggaaaaagttatctaccccggcttaccgagccacccacagcacgagttggtgaagagacaatgtacagggtgcacaggcatggtgacattttatattaaaggcactctgcagcacgccgaaatattcttaaaaaatctgaagcttttcacactagccgaatctcttggaggttttgagtctttagccgagttgcctgccatcatgactcacgcatctgtcctcaaaaacgacagagatgtgctgggcatctccgatacgcttattagattatctgtgggcctggaagacgaagaggacctgctcgaggatctggaccaggcactgaaggctgctcatcctcccagtggatcacacagttag

SEQ ID NO: 113477 - DNA, 1656 bp, synthetic construct
  misc_feature 1..1656: note = Description of Artificial Sequence: Synthetic coding sequence
  source 1..1656: mol_type = other DNA
atgccttcggagactccacaggcagaggtcggtccaactggttgtccacataggagtggtcctcactcggcaaaaggcagtctagaaaaggggtctcctgaagacaaagaggcaaaggaacctctatggattcgccctgacgcgccttcacgctgcacttggcagctaggccgaccagctagcgaaagcccccaccaccacaccgctcctgccaaatcaccaaaaatccttccagatatcctcaaaaagatcggcgatactcccatggtccgtataaataaaattggcaaaaagttcggcctgaagtgcgaacttctggccaaatgcgaatttttcaacgccggaggatccgttaaagataggatcagtctgagaatgatcgaagatgctgagagagacggaacattgaagcccggcgatactataatcgaaccaacctccgggaataccggcatcgggctggccctggcagcggctgtgagaggctacaggtgcattatagtcatgcctgaaaagatgtcgagcgagaaggtggatgttttaagggccctgggcgctgaaattgttcggacccccacaaacgccaggtttgacagtcccgaatcacatgtgggggtagcctggcggctgaaaaatgagataccaaattcacatatactcgaccaatacagaaatgcttctaaccctttggcacactatgataccaccgccgacgagattttgcagcagtgcgacggtaaattagacatgctggtggcgtccgtgggcactggcgggaccattacagggatcgcgcggaagctgaaagagaaatgtcctgggtgccgcattattggagtcgatcccgaggggagtatccttgccgagcccgaggaattgaatcagacagagcagactacatacgaggtagaaggaattggatatgactttattcctacggtattggatcggacagttgtggataaatggtttaagagtaacgacgaggaagcctttacttttgccagaatgctgattgcgcaagagggtctgctctgtggaggatcagctggatccactgtggcagtggccgtcaaagccgcccaggagctgcaggaaggacaacgctgcgttgtcatcctgcctgactctgtgcggaactacatgacaaaatttctcagtgacagatggatgctccagaaggggttcttaaaggaggaggaccttacggagaaaaaaccatggtggtggcacctccgagtccaggagctgggcctatccgccccgctgactgtacttccaaccataacctgcggccataccattgaaatcttgagggaaaaaggcttcgaccaggctccggtcgtcgacgaagctggtgtcattttgggtatggtgaccctggggaacatgctgtcctcactgctcgctggaaaggttcagccctcggaccaggtgggaaaggtgatctacaaacagttcaagcagatacgactgaccgatactctagggcgactcagccatatactggagatggatcattttgccctcgtcgtacacgagcaaatccagtaccactcgaccggaaaatcaagtcagaggcagatggtctttggagtggttaccgctattgatctgctgaatttcgtggccgcccaggaaagggaccagaagtag

SEQ ID NO: 113478 - DNA, 1656 bp, synthetic construct
  misc_feature 1..1656: note = Description of Artificial Sequence: Synthetic coding sequence
  source 1..1656: mol_type = other DNA
atgccatcagagacaccccaggctgaagtggggccaaccggatgtcctcatcgatctgggcctcactccgccaagggaagccttgaaaaggggtcccccgaggacaaggaggccaaggagcccctgtggattagaccagacgcaccatctcggtgcacatggcagctgggccgaccagcctccgagagtcctcatcaccatacagcgccagcaaaatcccctaagatcttacctgacattctcaaaaagattggtgatacgccaatggttcggatcaataaaatcgggaagaaatttgggttgaagtgtgagctcttagctaagtgcgaattcttcaacgctggagggtcggtcaaggataggatctcactcaggatgattgaagacgcagagcgggacggaacactgaagccgggagacactattatagaaccgacaagcggcaacactggaatcggattggcgttggccgctgctgtacgcggctatagatgcatcattgtcatgccggaaaaaatgtcgagcgagaaggtcgacgtcctgagggctctcggagccgagattgtgcgaaccccaacaaacgcccgctttgatagcccagagagccacgtgggagtggcctggagactcaagaacgaaattcccaactcacatatcctggaccagtataggaacgcgtctaaccctctcgctcactatgacaccacagcagacgaaattttgcagcagtgcgacggaaaacttgatatgctcgtcgcttctgtcggtactggcggaaccattacagggatagctcggaagctgaaagaaaagtgtcccggatgcagaatcatcggcgtcgaccccgagggcagtatccttgccgagccagaggagctgaaccagacagaacaaacaacttatgaggtagaagggatagggtatgacttcataccaacggtcctcgatcgcacggtcgtggataaatggttcaagagcaacgacgaggaagcttttaccttcgcgcggatgttgatcgcacaggaaggcctcctatgtggaggctcggctggaagtacagtggccgtcgcagtcaaggctgctcaggaactccaggagggccaacgctgtgttgtgatcctgcccgactccgttaggaattatatgaccaagtttctatctgaccggtggatgttacagaagggtttcttgaaagaggaagaccttactgaaaaaaagccctggtggtggcatctgcgggtccaggagctcggtctcagtgcgcctcttacagtgttacctactatcacttgtggacatactatcgaaattctgcgcgagaaaggctttgaccaagctcctgttgtggacgaagccggagtcattctgggcatggttaccctcggaaacatgctttcctcccttctggctgggaaagttcaaccctcagaccaggtgggtaaggtcatttacaaacaattcaagcagatccgcttaaccgacaccctgggcaggctgtcacatatccttgaaatggaccatttcgctctggtggtgcacgagcagatacaataccacagcaccgggaagagctcccaaagacaaatggttttcggggtggttacggcgatcgatctcctgaacttcgtggccgcacaggaaagagaccagaagtag

SEQ ID NO: 113479 - DNA, 1656 bp, synthetic construct
  misc_feature 1..1656: note = Description of Artificial Sequence: Synthetic coding sequence
  source 1..1656: mol_type = other DNA
atgcccagtgagactccccaagctgaggttggtcctacgggatgcccgcaccggtccggtccgcactctgctaagggttccttagagaagggttcccctgaggacaaggaggcaaaggaacctctctggattcgccccgacgcgccgtccaggtgcacctggcagctcggtaggcctgcaagtgagagtccacaccatcacaccgctcccgctaagtcacctaagattctgcccgacatattgaaaaagatcggggacacccccatggtcaggatcaacaagattggcaagaaatttggtctcaaatgtgaactgttagcaaagtgcgagttctttaacgccggaggtagtgtcaaagataggatctcactgagaatgatcgaagacgccgagcgcgacggtactctgaagcccggcgatactatcatcgagccaacttctggaaacacaggaatcggccttgcacttgccgcggcagtgcgtggctaccgttgtatcattgtgatgcccgagaagatgagctccgaaaaagttgatgtacttagagcattgggagccgaaattgtgaggacacccactaatgctcgattcgacagtcctgagtcccatgtcggcgttgcctggcggctcaaaaacgaaatcccaaactcacacattctagaccaatatcgaaacgcctccaatccattagcacattatgataccacagctgacgagattctgcagcagtgcgatggaaagctagatatgctggtcgcttctgtaggaaccggcggaaccattacaggaattgcccgaaagttaaaggagaaatgccctggatgtaggattattggcgtcgaccccgagggttcaatactcgcagaacccgaagagctgaaccagaccgagcaaaccacatacgaggtggaagggattgggtacgactttatacctactgtgcttgatcgcaccgtggtggacaaatggtttaagtccaacgacgaagaggcattcacattcgcacgaatgttaattgcacaagaaggcctactgtgtggtggttctgccgggagcaccgttgccgtggcggtcaaggcagctcaagagctccaagaaggccaacgatgcgtcgtcattttacccgactctgtaagaaattatatgactaagtttctcagtgatcgatggatgctgcagaaagggttcctgaaggaagaggacctgacagagaagaaaccttggtggtggcacctcagggtgcaagaactgggtctcagcgccccattgactgtcttgcctacaatcacctgcggccacaccatcgagatccttcgtgaaaaaggtttcgaccaagccccagtggtcgatgaggctggggtcatcctgggtatggtcaccctcggtaatatgctctcaagcttattggctggaaaggtgcagccttcggaccaggtcggaaaggtcatatacaagcagttcaaacagatacgcttgacggacactttaggaaggctctcacatatcctggagatggaccattttgccctcgtggttcatgaacagatccagtaccacagcacgggcaagtcaagtcagcggcaaatggtatttggggtggttaccgcaattgaccttctgaatttcgtggccgcccaggagagagaccagaagtag

SEQ ID NO: 113480 - DNA, 1656 bp, synthetic construct
  misc_feature 1..1656: note = Description of Artificial Sequence: Synthetic coding sequence
  source 1..1656: mol_type = other DNA
atgccttcggaaaccccacaggcagaggtgggcccaacagggtgtccccatcggtcagggccacactcagccaagggatcgcttgaaaaaggcagcccggaggataaagaagccaaagaacccctgtggatcaggcccgacgctccatctcgctgcacatggcaactgggaaggcctgcttctgagtcgccacatcaccacacagcgcctgctaaaagtccgaagatcctgccggacatactgaaaaagatcggagacacacccatggtcagaatcaacaagattggaaaaaagtttggtttaaagtgcgagcttttggctaaatgtgagttttttaatgcaggcggctcggtaaaagacagaatctccttgcgtatgatcgaagacgcggaaagggatggcactctgaagcccggagacactattattgagcctaccagcgggaatacggggattggcctggcattggccgcggcagtgcggggatacaggtgcatcattgtgatgcctgagaagatgagcagcgagaaggtcgacgtacttcgcgccttgggcgccgagatcgtacgcactcccacaaacgcccgctttgatagccctgagtctcacgtcggcgttgcatggcggttaaagaacgagatccccaatagtcatattcttgatcaatacagaaatgccagcaacccgcttgcccattatgacaccacagcagatgaaatccttcagcagtgcgatggtaaactggatatgctagtagccagtgtgggcacaggcggaactatcacgggcatagcccgaaagctgaaggaaaagtgccctggctgccggattataggagtggatccggagggtagcatcctcgccgaaccggaggaactgaatcagacagagcagaccacatacgaggtggagggtattggttacgacttcatacctactgtgcttgacagaactgtagtcgataaatggtttaagagcaacgacgaagaggcattcaccttcgccagaatgctgattgctcaggaggggttattatgtggtggctctgctgggagtactgtagctgtcgccgtgaaagctgcccaggaactccaggagggacaaaggtgcgtggtgatcctgccagatagtgtgcgcaactacatgaccaagttcctgagcgatcggtggatgctgcagaaaggattccttaaagaggaggaccttaccgagaaaaagccctggtggtggcaccttcgagttcaggagctgggattgtcagctccattaactgtgctacccaccatcacctgcggacacacgattgagatcttgcgtgagaagggcttcgatcaggcccccgtggttgacgaggctggtgttattctcggcatggtgaccctcggtaatatgctgagttctctgctcgcgggaaaggttcagccctcagaccaggtagggaaagtgatttataaacagttcaagcagatccgactgaccgatacactgggccgcttgtctcatattctagagatggaccatttcgcactggttgttcacgagcaaatccagtaccattcgaccggcaaaagcagccagcgccagatggtctttggtgtcgttacagcaatcgacctgctgaacttcgtggccgcgcaggagcgcgatcagaagtag

SEQ ID NO: 113481 - DNA, 1698 bp, synthetic construct
  misc_feature 1..1698: note = Description of Artificial Sequence: Synthetic coding sequence
  source 1..1698: mol_type = other DNA
atgccctccgaaacgccgcaggccgaggttggaccgaccggctgcccacatcgcagcggcccgcatagcgctaaggggtcattagaaaagggttctcctgaagataaggaagcgaaggagcccctgtggatccggccagatgcaccttcaaggtgcacctggcaactagggagaccggcgagcgagagtccccaccaccacacagcgcctgctaagagtcccaagatcctccctgacattttgaaaaaaataggggacacacccatggttcggatcaacaaaatcggtaaaaaattcgggctgaagtgtgagttgcttgcgaagtgcgaattttttaacgccggcggttcagttaaagacagaatttccctgagaatgatcgaggacgccgagcgggacggaaccctgaaacccggtgataccatcattgagcctaccagcggcaacacagggatcggactggcgctcgcagctgctgtacgagggtatcgctgtattatagtgatgcctgaaaagatgagttccgagaaggttgatgttctgagggcattaggagctgagattgtcagaacaccaaccaacgcacgattcgacagtccggaatcccacgtgggcgtcgcgtggagactcaaaaacgaaattcccaacagtcatatcctcgaccaatatagaaatgcttcaaaccctctggcgcattacgacactacagcagatgagatcctgcagcagtgtgatggcaaacttgacatgttggtggcctctgttggcacaggaggcacaatcaccggcattgcgaggaagcttaaggaaaagtgtcctggatgccgaatcatcggagtcgatcctgagggaagtatcctcgccgaacctgaggagctgaaccagactgagcagactacctacgaggtcgaaggcataggctacgactttatacccaccgtgctcgaccggacagttgtggataaatggttcaagtctaacgatgaggaagcattcacctttgcacggatgctaatcgctcaggaggggctgttgtgcggaggatccgctggctcaaccgtggccgtcgcggtgaaggccgctcaggaattgcaggagggtcagaggtgcgtggtcattttgcccgatagcgtccggaactacatgacaaaattcctctctgacaggtggatgctgcagaagggcttcctaaaagaggaggacttaacagaaaagaaaccctggtggtggcatctgagagtgcaggaacttggactaagcgccccgctgacagttctcccgacaattacctgtggacataccatcgaaatcctgcgtgagaaagggtttgatcaagcacctgttgtggacgaggccggggtgatattgggcatggttacgcttgggaacatgcttagttccctcctggcaggaaaagttcaaccttctgaccaggtgggcaaagtgatctataagcagtttaagcaaatccggttaaccgataccctcgggcggttgtctcacattttagagatggaccactttgcattggtggtacacgagcagatccaaagccaagatcaggcctgggccggagtggtgggaggccccgcagaccactctaccggaaagagctcacagcgacagatggtgttcggtgtcgtcactgctattgacctacttaatttcgtcgcggcccaagagcgggaccagaagtag

SEQ ID NO: 113482 - DNA, 534 bp, synthetic construct
  misc_feature 1..534: note = Description of Artificial Sequence: Synthetic coding sequence
  source 1..534: mol_type = other DNA
atgccaagtgagacccctcaggcagaggtaggtcccacaggatgccctcaccggtctgggcctcactcagccaagggatcactcgaaaagggtagtccagaagataaagaagccaaggagccactgtggatacgccccgatgcgcccagccgttgcacctggcaactaggtagaccagcatctgaaagcccccatcaccacacggccccagccaaatcccccaaaattctgcctgacattcttaagaaaatcggggacacacccatggtgcggattaacaagatcggaaaaaagtttggcctgaaatgtgaattgcttgctaagtgtgagttcttcaatgccggtggttccgttaaagacagaatttcgctgaggatgatagaagacgccgaaagagatggtacactgaagccgggggacacgataatcgagcccacaagcggtaacactggaataggcttggccttagccgcagccgtcagaggctatagatgtatcattgtaatgccagagaaaatgtcatctgagaagtag

SEQ ID NO: 113483 - DNA, 1527 bp, synthetic construct
  misc_feature 1..1527: note = Description of Artificial Sequence: Synthetic coding sequence
  source 1..1527: mol_type = other DNA
atgccttctgaaacacctcaggcggaggtaggcccaactgggtgtccccacagatccggcccccaccatcatacggccccagcaaagagcccgaaaatcttgcctgacatccttaaaaagatcggcgacaccccgatggttcggattaataagattggcaagaaatttggacttaaatgtgagctgctggctaagtgtgagtttttcaacgcagggggctctgtaaaggatagaatttccctgagaatgatcgaagatgccgagcgtgatggaactctgaagcctggtgacaccatcatcgaacctacctctggtaataccggaatcgggctcgctttagccgctgccgttcgcggctatcgctgtatcatcgtgatgccagagaaaatgtcatccgaaaaggtggatgtgttgcgtgcccttggcgctgagattgttagaacacccactaacgctcggtttgactcgccagagagccatgttggggtggcctggcggctgaaaaacgagatccctaactcccacatcctcgaccagtatcgaaacgcatctaaccctctggcccactacgacaccaccgcagatgaaatcctgcagcagtgcgacgggaagttggatatgcttgtcgcttcggtgggcactggtggcaccattaccggcatcgcaaggaaactgaaagaaaaatgccccggatgcaggatcatcggcgtcgaccctgaaggtagtatcctggcggaacccgaggagttgaaccaaacggaacaaactacctatgaggtggaaggaatcggttacgacttcataccgacagtgctagacagaaccgtggtggacaagtggttcaaatccaacgatgaggaagctttcaccttcgcccgcatgctcattgcacaggagggcctgctctgtggaggatccgcaggctccacagtggcagtagctgtaaaggccgcccaggagctgcaagagggacaacggtgtgttgtcatactgccagattccgttcgcaattatatgacaaagttcctcagtgatcgctggatgttacaaaaaggcttcctgaaggaggaagacttgacagaaaagaaaccctggtggtggcacttgcgcgtacaggagctcggcctctcagctcctctgacagtgctgcctactatcacttgtggccacactattgaaatccttcgtgagaaaggctttgatcaggctccagtggtcgacgaagccggagtgatccttggtatggtcacgttaggaaacatgctgagtagtctcctagcgggcaaagttcaacctagtgaccaggttggcaaggtcatatacaagcagtttaagcagattaggcttactgacacacttgggcggctgtcccatatactggagatggatcatttcgcgctggtggttcatgagcagattcagtatcactccaccggcaagtcttctcagagacagatggtctttggtgttgtcacggccatagatctactgaattttgtggctgctcaagaaagggaccaaaaatag

SEQ ID NO: 113484 - DNA, 1392 bp, synthetic construct
  misc_feature 1..1392: note = Description of Artificial Sequence: Synthetic coding sequence
  source 1..1392: mol_type = other DNA
atggtgaggattaataagataggcaaaaagtttgggctgaaatgtgagctgctggcaaagtgtgaattcttcaacgccgggggctcagtcaaagacagaatctcattgcgcatgatcgaagatgcagagcgggacggcactctgaaacctggggacaccatcatagagcctacatcaggcaataccggaattggcttggcgctcgctgccgccgttagagggtatcgttgtatcatcgttatgcctgagaagatgtccagcgaaaaggtggacgtcctgcgtgcattgggcgctgagatcgtccgtaccccaactaacgctcgctttgactctcctgagtctcacgttggcgtggcctggcgactgaaaaacgaaatcccaaactcacatatactcgatcaataccgtaatgctagcaatccgctggcacactatgacactacagccgacgagatcctccagcagtgcgatggaaagctggatatgcttgtcgcatctgtgggaactggcggtactataacaggcattgcaaggaaactcaaagaaaaatgccctggctgtcggattataggcgtggatcctgagggaagcatcctggccgagcccgaggaactgaaccagactgaacagaccacctatgaagtggagggaatcgggtatgactttattcccactgttctggatcggaccgttgttgataagtggttcaagagcaacgatgaagaggcgttcacctttgcccggatgctcatcgcccaagagggccttttgtgtggcggaagcgcaggctctacagtcgcagtggcagtgaaggctgctcaggaactgcaggagggacaaagatgcgtagtcattcttcctgactctgtcaggaactacatgaccaagttcctgagcgacagatggatgcttcagaagggatttcttaaggaggaggacttgacagaaaagaaaccatggtggtggcatctgagagtgcaagaactagggctgtccgctcccctgacggtgctcccgaccatcacatgcgggcacactatcgagattctgcgcgaaaaaggctttgaccaggcaccagttgtagatgaggcaggtgtgatactggggatggtgacgcttgggaacatgctcagctctctcctggctggcaaagtccaaccctccgatcaggtggggaaggtaatctacaagcagttcaagcaaatccgcctgactgacacgttgggccgactgtctcatatcctcgagatggatcatttcgcactagttgtgcatgaacaaattcagtatcactctactgggaagtcgtcccagagacagatggtctttggagtggttactgcgattgacctgttaaactttgtggccgcacaagagcgggaccagaagtag

SEQ ID NO: 113485 - DNA, 312 bp, synthetic construct
  misc_feature 1..312: note = Description of Artificial Sequence: Synthetic coding sequence
  source 1..312: mol_type = other DNA
atgatggccgagccgtggcaggcgctgcagttgcttctggctatcctgctgacattgatggcgttgccctaccaggcgagaaagaagacctttcttagcgtgcatgaggtgatggcagtcgagaactatgcaaaagactccctgcagtggatcaccgatcagtacaataaagagtctgacgataagtaccatttcaggatctttagggtactcaaagtgcagcgccagcaggtcaactgctttttcagtgttttcgctgtcccctggtttgagcagtacaaaattcttaataagtcctgcagcagtgattag

SEQ ID NO: 113486 - DNA, 417 bp, synthetic construct
  misc_feature 1..417: note = Description of Artificial Sequence: Synthetic coding sequence
  source 1..417: mol_type = other DNA
atgatggccgaaccctggcaggctctgcagcttctcctggcgatccttttgacgctcatggctctgccctaccaagctcgcaagaaaactttcctctctgtgcatgaagtaatggccgttgagaattacgccaaagactctctccagtggatcactgatcagtataacaaagaaagcgatgataagtaccacttccgcatctttcgggttttgaaggtccagcgccaggtcaccgatcacttggaatatcacctgaacgtggaaatgcagtggactacgtgtcagaaaccagagaccacaaactgtgtcccacaggaacgggaattacacaagcaggtcaactgttttttctccgtgttcgcggtcccgtggtttgagcagtacaagatactcaataagtcttgctcaagtgattag

SEQ ID NO: 113487 - DNA, 297 bp, synthetic construct
  misc_feature 1..297: note = Description of Artificial Sequence: Synthetic coding sequence
  source 1..297: mol_type = other DNA
atgatcccgggtggcttaagtgaagcgaagccggccactcctgaaatccaggagatcgttgataaagtcaagccgcagctggaagagaagacaaatgaaacatatggcaagctcgaagccgtccagtacaaaacccaggtagtcgccggcacaaactactacatcaaggtgagggccggcgataacaagtacatgcacctgaaggttttcaagagcttgcccggacagaacgaagatctggtgctgacgggctatcaagttgataaaaataaagatgatgaactcaccggcttttag

SEQ ID NO: 113488 - DNA, 297 bp, synthetic construct
  misc_feature 1..297: note = Description of Artificial Sequence: Synthetic coding sequence
  source 1..297: mol_type = other DNA
atgatgtgtggcgccccctccgctacgcagcccgcaactgccgagacccagcacattgcagatcaggtccgctctcagctggaagagaaggagaacaaaaagtttcctgtctttaaagcggtcagcttcaaatcacaggtggtcgcaggaacaaactacttcatcaaggtgcatgtgggggacgaggacttcgtgcacctgcgggtgtttcagtcgcttccacacgagaataaacccttgacactgtcaaattaccagacgaataaggccaagcatgacgaacttacctatttctag

SEQ ID NO: 113489 - DNA, 441 bp, synthetic construct
  misc_feature 1..441: note = Description of Artificial Sequence: Synthetic coding sequence
  source 1..441: mol_type = other DNA
atggctggacccttgcgggctccattgctcttattggccatactggctgtcgctctggctgtgagcccagccgccgggagctcccctggaaaaccaccacgcttagtgggtgggccaatggatgcaagtgtggaggaagagggggtgcgccgggccttggatttcgctgtcggagaatacaacaaagcttcgaatgatatgtaccactcaagagctcttcaggtggtgagagctcgcaaacagattgtcgccggcgtcaactactttctggatgtagagctcggtcgcacaacctgtacgaagacccagccaaatctagataactgtcctttccacgatcaacctcatctgaagaggaaagctttttgttcattccagatatatgccgtgccatggcagggcacaatgaccctttccaaatcgacttgtcaggatgcatag

SEQ ID NO: 113490 - DNA, 441 bp, synthetic construct
  misc_feature 1..441: note = Description of Artificial Sequence: Synthetic coding sequence
  source 1..441: mol_type = other DNA
atggccggcccactgagagctcccctcttactattagcaattttagcggtggcactcgcggtctcccctgctgctggcagctccccagggaagccaccccggcttgtgggcggcccgatggacgcgagtgtggaggaggaaggcgtgaggcgggccctcgacttcgccgttggtgagtacaataaggcctccaacgatatgtaccacagcagagctcttcaggtagttcgagccagaaaacagattgtcgccggcgttaactattttctagacgtggaattgggtaggacaacatgtactaaaacccagcctaacttagacaactgcccgttccacgatcagccccacctgaagcggaaggcattctgttctttccaaatatatgcagtcccatggcagggaactatgaccctgagtaaatctacatgtcaggatgcctag

SEQ ID NO: 113491 - DNA, 441 bp, synthetic construct
  misc_feature 1..441: note = Description of Artificial Sequence: Synthetic coding sequence
  source 1..441: mol_type = other DNA
atggcaggccctttgagggcccccctgctgctgcttgctatactagccgtcgcacttgctgtctcaccagctgcagggtccagccccgggaagccacccagattggtgggaggacccatggacgcttccgttgaggaggagggagtccgtcgtgccctcgacttcgcagtcggcgaatacaacaaagccagcaacgacatgtaccattcgcgagccctgcaggtcgttcgggcccgtaagcaaattgtggccggtgtcaactactttctcgatgtagaactggggagaacgacatgcaccaaaactcagccaaatctcgataactgtccgttccacgaccagccccacctgaagagaaaagcattctgctcgttccagatctacgcagtgccctggcagggcactatgacgctttcaaagagcacctgtcaggacgcctag

SEQ ID NO: 113492 - DNA, 429 bp, synthetic construct
  misc_feature 1..429: note = Description of Artificial Sequence: Synthetic coding sequence
  source 1..429: mol_type = other DNA
atgatgtggccaatgcatacccccctgctactgcttactgcattgatggtcgccgtcgcgggaagcgcttctgcccaatcccgaaccctggctggcggcatccacgcgaccgatctgaacgataagtcagtgcagtgcgccctggattttgccattagtgaatacaacaaagtcattaacaaggacgaatactactccaggcccctgcaggtaatggcggcgtatcagcagatagtcgggggggtcaactattatttcaatgtcaagtttggtcgcactacttgcacaaaatcccaaccgaacctcgataattgcccgtttaatgatcagcccaaattgaaagaggaggagttttgtagcttccagatcaatgaggttccttgggaggacaaaataagcatcctcaactacaaatgccgcaaggtgtag

SEQ ID NO: 113493 - DNA, 1578 bp, synthetic construct
  misc_feature 1..1578: note = Description of Artificial Sequence: Synthetic coding sequence
  source 1..1578: mol_type = other DNA
atggcgacactactacggtctaaactgtccaacgtcgctacttcagtgagcaacaagagccaggccaaaatgtctggaatgttcgctaggatgggctttcaagccgccacagatgaggaagcagtaggcttcgcacattgcgacgatcttgacttcgaacatagacagggtttacagatggacatcttgaaggctgagggtgagccatgcggcgacgagggagccgaagctcctgtagagggggacatccactaccaacgcggaagcggggcccctctcccaccatccggtagcaaggaccaggtgggtgggggaggcgagttcgggggacatgacaagccaaagatcactgcatgggaggcagggtggaatgtgacaaatgctatccagggcatgtttgtcctgggattaccttatgcaatcctgcacggcggctatttgggactgtttcttatcatctttgcagccgtggtgtgctgctatacagggaaaatcttgattgcctgcctgtacgaggagaacgaagatggagaggttgtaagggtgcgggacagttatgtggctatcgccaacgcttgttgcgctccacgattccccactcttggagggcgggtggtgaacgtagctcagataattgagctggttatgacttgtatcctgtatgtagtggtgagcggcaacctgatgtacaactcttttcctggtctaccagttagtcagaagagctggtctatcatcgccacagcagtcctcctgccatgtgctttcctgaaaaacctgaaggcagtcagcaaatttagcctcctttgcaccctagcacactttgtgatcaacatcctcgtgatcgcttattgcctgagccgcgcaagagactgggcatgggaaaaggtgaagttctatatcgacgtgaagaaatttccaatctctatcgggatcatcgtcttcagctatacatcacagatctttttacccagtctggagggcaatatgcagcaaccctctgagtttcactgtatgatgaattggactcacatcgccgcttgcgtgctgaaaggcctgttcgcattggtcgcctacttaacatgggccgatgagaccaaagaggttatcaccgataacctgcctgggtccatccgggcggtagttaacatcttcctggtggcaaaggctctgctgtcctaccccttaccattcttcgccgccgtggaggtcctggagaaatctttatttcaagaaggcagtcgagctttctttccagcctgctattcgggtgatggcaggctgaagtcatggggacttactttgaggtgcgctctggttgtgttcaccctcctgatggcaatctacgtaccacactttgcccttctgatggggctaacgggctcgctgacgggggccggcctttgtttccttctcccaagtctcttccatttgcggctcctgtggcggaagctactgtggcaccaggtgttcttcgatgttgccatctttgtcatcggcggaatctgttccgtcagcggatttgtgcactcgctggagggtttaatcgaggcgtatcgcactaacgcggaggattag

SEQ ID NO: 113494 - DNA, 426 bp, synthetic construct
  misc_feature 1..426: note = Description of Artificial Sequence: Synthetic coding sequence
  source 1..426: mol_type = other DNA
atggcttggcccctctgcacactgctgttactactggccactcaggccgtggccctggcctggtctccgcaggaggaagatagaatcatcgaggggggtatctacgatgccgatctcaacgacgagagagtccaacgtgccctgcacttcgtgatttccgaatataataaagctacggaggatgaatactatagacggttactccgggtcctccgggcacgggagcagatcgtcggaggtgtgaattattttttcgacatcgaagtgggacgcactatctgcactaaatcacagccaaatctcgatacctgcgcatttcatgaacagcccgaacttcaaaagaaacaactatgctcgtttcagatctatgaagtgccatgggaagatcgaatgagccttgtgaatagcaggtgccaggaagcctag

SEQ ID NO: 113495 - DNA, 426 bp, synthetic construct
  misc_feature 1..426: note = Description of Artificial Sequence: Synthetic coding sequence
  source 1..426: mol_type = other DNA
atggctcaatacctctccacactgctgttgcttctcgcaactctcgccgttgccctcgcctggtccccaaaggaggaggacaggattataccgggaggcatctacaatgctgacttgaatgatgaatgggtgcagcgcgcgctgcactttgccatttcagaatataacaaggcaacaaaggacgactattatcggagacccttacgagtgctgagggccaggcaacagactgtaggaggagtcaactacttttttgatgtcgaggtgggtcgaacaatatgtacaaaatcccagcctaatttggatacatgtgcctttcacgaacagcctgagttgcaaaagaagcagctctgttcctttgagatttacgaggtgccttgggagaataggcgcagcctcgtaaaaagcagatgccaagagagttag

SEQ ID NO: 113496 - DNA, 426 bp, synthetic construct
  misc_feature 1..426: note = Description of Artificial Sequence: Synthetic coding sequence
  source 1..426: mol_type = other DNA
atggcccagtacctgagcaccttgttactgctcttggccaccttagctgtggctttagcatggagcccgaaagaggaagatcggattattccaggagggatctacaacgccgaccttaacgatgagtgggtccagcgggcactccattttgcaatctctgagtacaacaaagcaaccaaagatgactattaccggcgccctctgcgggtccttcgcgcccgccagcagaccgtcggcggtgtgaattatttttttgatgtggaggttgggcggacaatctgtacaaagtcacaaccaaatcttgacacttgcgcttttcacgagcagcctgaactgcagaaaaaacaactgtgtagttttgagatatatgaggtgccatgggagaatcgtcgaagtctcgtcaaatccagatgccaggaatcttag

SEQ ID NO: 113497 - DNA, 582 bp, synthetic construct
  misc_feature 1..582: note = Description of Artificial Sequence: Synthetic coding sequence
  source 1..582: mol_type = other DNA
atgccaaactggggaggcgggaaaaagtgtggcgtgtgtcagaagaccgtgtatttcgccgaggaggttcagtgcgaggggaattccttccacaaatcgtgctttctttgcatggtgtgtaagaaaaatctggattctaccactgtggctgtgcatggcgaggaaatttactgcaaatcatgttacggcaagaaatacgggcctaaaggatatgggtacggacaaggtgctggtacattatctacagacaaaggcgagagcctcggaatcaaacacgaggaggcacctggccatagaccaaccacaaaccctaacgcttccaagttcgctcagaagataggcggatcggaacggtgtccacgttgctcacaggccgtttacgctgccgaaaaggtaattggagctgggaagtcttggcataaagcctgttttcggtgcgccaaatgtggaaaaggactggaatcaaccacgctggctgacaaggacggcgaaatttattgcaaagggtgctacgcgaaaaatttcggacccaaggggttcgggttcggacagggtgccggagctctggttcattctgaatag

SEQ ID NO: 113498 - DNA, 582 bp, synthetic construct
  misc_feature 1..582: note = Description of Artificial Sequence: Synthetic coding sequence
  source 1..582: mol_type = other DNA
atgcccaactggggcgggggaaagaagtgcggagtttgccagaagaccgtatatttcgccgaagaagtgcagtgtgagggtaatagtttccacaaaagctgttttctgtgtatggtctgtaagaagaatttggacagcaccaccgttgctgtgcacggcgaagaaatctactgtaagagctgctacggtaaaaagtatggcccgaaggggtacggttacgggcaaggggcaggaaccctgagcactgacaaaggagaatcacttggaataaaacatgaagaagcgccaggccaccgtcccaccactaaccccaatgcttccaagttcgctcagaagataggagggagcgaacggtgcccccggtgttcccaggccgtgtacgcagcagagaaagtaatcggcgcaggcaagtcttggcacaaagcctgcttccgttgcgcaaaatgtggcaaaggtttagaaagcaccaccctggctgataaagacggagagatatactgcaagggctgctacgcaaagaacttcggccctaaaggtttcggattcggacagggggcaggcgccctggtccactcagagtag

SEQ ID NO: 113499 - DNA, 582 bp, synthetic construct
  misc_feature 1..582: note = Description of Artificial Sequence: Synthetic coding sequence
  source 1..582: mol_type = other DNA
atgccaaattgggggggcggcaagaagtgcggagtatgtcagaaaacggtttatttcgccgaggaagtgcagtgtgaggggaacagctttcataagtcctgttttctctgtatggtgtgcaagaaaaacctggactcaactaccgttgctgtgcacggcgaggaaatttattgtaaatcctgttacggcaagaaatacgggcctaagggatatggctacgggcagggcgccgggactttgagcaccgacaaaggggagagcctgggcattaaacacgaagaggccccggggcacaggcctacgaccaaccctaatgccagtaagtttgctcagaaaattggaggaagtgagcgctgtccaaggtgctcacaggcagtttatgcggctgaaaaggttattggcgcaggcaaatcatggcacaaagcctgttttagatgtgctaagtgtggcaagggcctggagtctacaacgttggctgacaaagatggggagatttattgcaaagggtgttatgccaagaatttcgggccaaaaggatttgggtttggccagggcgctggcgcactggtgcactctgaatag

SEQ ID NO: 113500 - DNA, 582 bp, synthetic construct
  misc_feature 1..582: note = Description of Artificial Sequence: Synthetic coding sequence
  source 1..582: mol_type = other DNA
atgccaaactggggaggcggaaaaaaatgcggagtatgccagaagactgtgtacttcgcagaggaggtgcaatgtgaaggaaattcctttcataagtcatgcttcctctgcatggtctgcaaaaagaacctggactcaacaactgtcgcagtgcacggggaagagatttattgtaagagctgctacgggaagaagtatggccccaagggctatggttatggccaaggggccgggaccttgagtacagacaagggcgagagtctaggtatcaagcacgaagaagcaccgggtcaccggcccactactaatcccaacgccagtaaatttgcgcagaagattggggggagtgaacgctgtcctcgctgttcacaggcagtatacgctgctgagaaagtcataggcgctgggaagtcctggcacaaggcatgcttccgatgtgccaaatgtgggaaaggcttagagagcaccaccttggccgataaagacggagaaatttactgtaagggatgctacgccaagaacttcgggcccaagggattcggctttggtcagggcgctggcgccctggtgcacagcgagtag

SEQ ID NO: 113501 - DNA, 513 bp, synthetic construct
  misc_feature 1..513: note = Description of Artificial Sequence: Synthetic coding sequence
  source 1..513: mol_type = other DNA
atgcccaactggggtggagggaagaagtgtggcgtgtgccagaagacagtttactttgcagaggaagttcagtgcgaaggcaatagctttcacaagagttgttttctgtgtatggtctgcaagaagaacctagatagcactactgttgcagtgcacggagaggagatctattgcaaatcttgttacggcaaaaagtacgggccaaaagggtacgggtatggacagggcgccggtacgaatcccaacgcttccaaattcgcacagaagattggcggctctgaaagatgtccccgttgtagtcaggctgtgtacgccgcagaaaaggtcatcggtgcaggcaaatcatggcacaaagcatgcttcagatgcgctaaatgcggaaaggggctggaaagtacaacactggctgacaaagacggtgaaatctattgcaagggctgctacgcaaagaactttggacctaagggctttgggtttggccaaggtgccggagctcttgtccactctgaatag

SEQ ID NO: 113502 - DNA, 582 bp, synthetic construct
  misc_feature 1..582: note = Description of Artificial Sequence: Synthetic coding sequence
  source 1..582: mol_type = other DNA
atgcccgtgtgggggggcgggaataaatgcggagcgtgtggccgtacagtgtaccatgcagaggaggtccaatgtgacggacgcagctttcaccggtgttgcttcttgtgcatggtgtgtaggaaaaatctcgacagtacgaccgtggccatccatgatgaggaaatttactgtaaaagctgttacggaaagaagtatggccccaaaggttacgggtacggacaaggggctgggaccctgaatatggatagaggcgaacggcttggcattaaacctgaatccgttcagccgcaccgcccgacgactaaccccaacacatctaaattcgcacagaaatacggtggcgctgagaaatgctcaaggtgtggcgacagcgtgtatgcagcagagaaaattataggagccggtaagccctggcacaagaactgcttccgatgtgccaaatgtggaaaatctctggaaagtacaaccttgacagagaaggagggcgagatctactgcaaaggctgctatgcaaaaaattttggccctaaggggtttggatatggacagggtgctggcgctcttgtgcatgcccagtag

SEQ ID NO: 113503 - DNA, 582 bp, synthetic construct
  misc_feature 1..582: note = Description of Artificial Sequence: Synthetic coding sequence
  source 1..582: mol_type = other DNA
atgccagtttggggtggtggtaataagtgcggcgcgtgcggcaggacagtgtaccacgctgaggaggtacagtgcgacggcaggtcatttcaccgctgttgctttctgtgtatggtttgccgtaagaatctagacagcaccacggtcgccatccatgatgaggaaatttactgcaagtcctgctacggcaaaaaatacggccctaagggttacggctatgggcagggcgctggcactctcaatatggatcgcggggagcggcttggtatcaaaccagaatctgtccagccccacaggccaactacaaatcccaatacgtcaaagttcgcacagaaatatggtggagcagaaaagtgttcccgctgcggtgactctgtttacgctgctgagaagatcataggagcgggtaaaccatggcacaagaattgcttcaggtgcgccaagtgcgggaagtctctggaatccactactctgactgagaaagagggtgaaatttactgcaagggctgttatgccaagaatttcggcccgaagggctttggctacgggcagggagcgggagccctggtgcacgcacagtag

SEQ ID NO: 113504 - DNA, 585 bp, synthetic construct
  misc_feature 1..585: note = Description of Artificial Sequence: Synthetic coding sequence
  source 1..585: mol_type = other DNA
atgccgaattggggtggtggagctaaatgcggcgcttgcgaaaagaccgtgtaccatgctgaagaaattcagtgtaacgggaggtcgtttcacaagacctgtttccattgtatggcttgtagaaaagccttggatagtaccacagtggccgctcatgaatcagagatttactgtaaagtctgttatggccggcggtacggacccaaggggatcgggtatggccaaggcgctgggtgcttatctactgacaccggagagcacctgggtttgcagttccagcaatctcctaagccggctcggtcagtaacaacatccaaccccagcaaatttacagccaagtttggcgaaagcgaaaagtgcccgcgatgcgggaagagtgtgtatgccgcggagaaggtgatgggtggaggaaaaccatggcataagacctgtttcagatgtgctatctgtggcaaatcactggaatccaccaacgtaactgacaaggatggagaactatattgcaaggtgtgctacgcgaaaaatttcggcccgacaggcatcgggtttggcgggcttacacagcaggtggaaaaaaaagagtag

SEQ ID NO: 113505 - DNA, 585 bp, synthetic construct
  misc_feature 1..585: note = Description of Artificial Sequence: Synthetic coding sequence
  source 1..585: mol_type = other DNA
atgccaaactggggcggtggcgcaaaatgtggtgcctgtgagaaaacagtttatcatgccgaagagatccaatgcaacggtaggagcttccataagacctgtttccactgcatggcttgccgaaaagcactcgactcaacgacggtggccgcgcacgaatctgaaatttactgcaaggtttgttatggcagacgctacggccctaagggcatcggctatggtcagggggccggctgtctcagcaccgatacaggagaacatttgggactgcagtttcagcaatcaccgaagcctgcacgctcagtgaccacctctaacccatctaagtttacagctaaatttggggagtcagaaaagtgtccacgctgcggcaagagcgtgtacgcagccgaaaaggtcatggggggagggaagccctggcacaagacttgctttcgctgtgctatctgtggtaaatccctggaaagtaccaacgtcaccgacaaggatggtgagctgtactgcaaagtctgttatgctaagaatttcggacctacaggcatcgggtttggcgggttaactcagcaggttgagaaaaaggagtag

SEQ ID NO: 113506 - DNA, 1365 bp, synthetic construct
  misc_feature 1..1365: note = Description of Artificial Sequence: Synthetic coding sequence
  source 1..1365: mol_type = other DNA
atgttcctcgcccagaggtcactttgtagcctctccggacgagctaagttcctgaagaccatatcctcttcgaagattctgggattttctactagcgcaaaaatgagtctcaagtttacaaatgcaaagcgaattgaaggactcgattcaaatgtctggattgagtttactaagttggccgccgatccctcggtggtgaacctgggacagggcttcccagatatttctccaccgacttacgtcaaagaagaactgtccaaaatcgccgctatcgatagcctcaatcagtatactcgtggcttcggccatccctctctggtaaaggccctgagctatttatatgagaaattataccaaaaacaaatcgattcaaacaaagaaattctcgtgaccgtgggggcgtacggttcccttttcaataccatccaggcgcttattgacgaaggggatgaggtgattctgatcgtgcccttctacgattgctatgaacccatggtgcgcatggccggggccacgccggtgtttataccattaaggtctaagccagtgtatgggaaaaggtggagcagctctgactggaccctggatcctcaggagttggaatctaagtttaacagcaagactaaggctattattctgaatacacctcataacccactgggaaaagtgtacaaccgagaggaactccaagtgatagcagacctgtgcattaaatacgatactctgtgtatatccgatgaggtttacgagtggctggtgtactcaggaaacaagcacctgaagatcgccacgtttccagggatgtgggagcggaccatcacaatcggctctgctggcaaaaccttctctgtgaccgggtggaaactgggatggtcgattggtccgaaccatttgattaagcacctccagaccgtgcaacagaacacaatttacacctgtgcaaccccacttcaggaagcacttgcccaagcattttggatcgatatcaaaagaatggacgacccagagtgttacttcaattcattacccaaagaactggaagtcaaaagagaccgaatggtccggctgctggaatccgtggggcttaagcccatcgtgcctgacggaggttatttcattattgccgacgtgtccctgttggatcctgacctgagcgacatgaagaacaacgagccctatgattataagtttgttaagtggatgacgaagcacaagaagctgtctgccatccccgtgtccgcattttgcaattctgaaactaaatctcagttcgaaaagtttgttcgtttctgttttatcaagaaagactctacactcgatgcggccgaggagataattaaggcatggtctgttcagaagagttag

SEQ ID NO: 113507 - DNA, 504 bp, synthetic construct
  misc_feature 1..504: note = Description of Artificial Sequence: Synthetic coding sequence
  source 1..504: mol_type = other DNA
atgtttctggcccagcgctccttatgtagtctctctggtagagctaagttcctgaagacaatttcgagctctaaaattttaggctttagcaccagtgcaaaaatgagtctgaagtttaccaatgccaagcgcatcgagggacttgacagtaacgtgtggattgagtttacaaaacttgccgccgatccctccgtggtgaatctgggccagggtttccctgacatatcccccccgacatatgtgaaggaggagcttagtaagattgccgccatagatagcctcaaccagtataccagagggtttggacaccctagcttagtgaaggctctgagttatctgtatgagaaactttaccaaaaacagatagatagcaacaaagagatcctagtcactgtaggcgcctacggatccttattcaatacaattcaagcgctaattgacgagggcgacgagtacaacgcttgtacagtgaaattcactaatttaaagtgcactgctggttag

SEQ ID NO: 113508 - DNA, 789 bp, synthetic construct
  misc_feature 1..789: note = Description of Artificial Sequence: Synthetic coding sequence
  source 1..789: mol_type = other DNA
atgtttctcgctcagcggagcctttgctcgctcagcggcagggctaagttccttaaaacgatttcaagtagcaagatactgggcttctcaactagtgccaagatgtccctgaagttcaccaatgccaagcgaatcgagggactggacagtaacgtatggattgaatttacaaagcttgccgccgatccgtccgtcgtaaacctgggtcaggggtttcccgatatctcaccgcccacgtacgtgaaggaggagctgtcaaagatcgctgccattgatagcctaaaccagtatacgcggggttttggtcacccttctctggtgaaagctctgtcctacctgtacgagaaactgtatcagaagcaaatagattcaaacaaagagattttagtgaccgtgggggcctacggatccctttttaataccattcaggctttaatcgacgagggagatgaggtgatactcattgtgcctttctacgattgttacgagccaatggtccggatggccggagccacccctgttttcattcccctgagaagcaagcccgtgtacgggaaaagatggtcgtcctccgattggaccctcgacccacaggaactcgagtctaagtttaacagtaagaccaaggccatcattctcaatacacctcataatcctctcggcaaagtgtataatagggaggagctgcaggtgatcgctgatctgtgtataaagtatgacactctgtgtatttctgacgaggtgtatgaatggctcgtgtactctggaaacaaacacctcaagatttag

SEQ ID NO: 113509 - DNA, 1263 bp, synthetic construct
  misc_feature 1..1263: note = Description of Artificial Sequence: Synthetic coding sequence
  source 1..1263: mol_type = other DNA
atgtcacttaagttcacaaatgctaagcgcattgaggggctggatagcaacgtgtggattgaatttacaaaactggcggctgacccttccgtcgtaaatctgggccagggattccctgatataagcccccccacctacgtgaaggaagaattgtctaagattgccgcaattgacagtctgaaccagtataccagagggttcggtcacccatcattggtgaaggcgctatcttacctgtacgaaaagctctaccagaagcaaattgatagtaacaaagagatcctcgtgaccgtcggggcatatgggagtttgtttaacaccatccaggccctgattgatgagggcgacgaggtgatcctgatcgtgcccttctacgattgctacgagccaatggttcggatggccggagccacccctgtctttatccctctgaggtcaaagcccgtgtacggcaagaggtggagctcaagcgattggaccctggacccgcaggaactggagtctaaattcaattcaaagactaaagctatcatcctgaatacaccccacaaccctcttggtaaggtttataaccgagaagagctacaggtgatcgctgatctctgcatcaagtacgataccctgtgcattagtgacgaggtgtatgagtggttggtctattcaggcaataagcatctgaaaatcgccacctttcccggaatgtgggagcggacaattaccatcggaagtgccggcaagacatttagcgttacaggctggaagcttggttggtctataggtcccaaccaccttatcaaacatttacagacagttcagcagaatactatctatacctgcgctacacctttgcaggaagctctggcacaggccttctggatagacataaaaaggatggacgaccctgagtgttatttcaattcgctaccaaaggagctggaggtcaagagagaccgaatggtcaggctgctcgaaagcgtgggcttaaaaccgatagtccccgacggcggatacttcatcatcgccgacgtctcattgttggatccagatttatctgatatgaaaaacaacgaaccttacgattacaaatttgtaaaatggatgaccaagcataaaaagctgtccgcaattcctgtcagtgccttctgcaattcggagactaagagccagtttgagaaatttgtgaggttttgcttcatcaaaaaggactctaccctagacgccgccgaggaaatcattaaagcttggtccgtgcagaagagctag

SEQ ID NO: 113510 - DNA, 1269 bp, synthetic construct
  misc_feature 1..1269: note = Description of Artificial Sequence: Synthetic coding sequence
  source 1..1269: mol_type = other DNA
atggctaagcagctacaggcccgtcggttagatggaattgattataacccgtgggtagagttcgtgaagctcgcgtcggagcacgatgtcgtgaatttgggacaaggctttcccgacttcccaccccctgattttgctgtggaggctttccaacacgctgtttccggtgactttatgctgaatcaatatacaaagaccttcggctacccacccctcaccaagattctggctagcttctttggtgaattgctgggacaagagatcgaccctctgcgtaacgtgctcgtgaccgttggcgggtatggggccctgtttactgcatttcaggccctcgtcgacgagggggatgaagtcatcataatcgagccattcttcgactgttacgaaccaatgacaatgatggctggaggacgcccagtttttgttagcttgaagccagggccaattcagaacggagagctgggttcctcaagtaactggcaacttgaccccatggaattagcagggaagttcacgagccggactaaagccttggtgctaaacacgccaaataatccactgggtaaagttttttcaagggaagaattagagcttgttgcaagcttatgtcagcagcatgacgtggtgtgtattactgacgaagtttaccaatggatggtttatgacgggcatcagcacatatctatcgcctccctccctggaatgtgggaaaggacgctgacgataggctctgcgggaaagaccttttccgctaccggctggaaagtggggtgggtcttgggtccagatcatatcatgaagcatctcaggacggtccaccagaactctgtcttccactgccccacccagtcccaagctgccgtggccgaatcctttgaacgtgagcaactgctctttcgtcaaccctcttcttatttcgttcagtttcctcaggccatgcaacggtgccgggatcatatgatccgctcgttgcagtctgtgggcctcaaacctattatcccgcaggggtcctattttctcatcaccgatatctcagattttaagcgaaagatgcctgacctccctggggccgtcgatgagccttatgacaggcggtttgtgaagtggatgataaagaacaaaggcttggtggccataccagtctccatcttttacagtgtccctcatcagaagcactttgatcactatataaggttctgttttgtgaaagatgaggccacactgcaggctatggatgagaagctcagaaaatggaaggtggaactgtag

SEQ ID NO: 113511 - DNA, 1119 bp, synthetic construct
  misc_feature 1..1119: note = Description of Artificial Sequence: Synthetic coding sequence
  source 1..1119: mol_type = other DNA
atggccaaacaactgcaggcgcgacgactcgatggcattgactacaatccctgggtggagtttgttaaactggcttccgaacatgacgtggtgaacctggggcagggattcccagatttccctcctccagactttgccgttgaggcttttcaacacgctgtgtcaggcgacttcatgttaaaccagtataccaagacattcgtgatcattatcgaaccattcttcgattgctacgagcccatgacaatgatggcaggcggccgcccagtgttcgtgtccctgaagcccggccctatccagaatggagagctgggatcatccagcaactggcaattagatcctatggagcttgcgggaaagttcaccagtcggaccaaagccttggtattaaatacccccaataaccctctcggaaaggtgttttccagggaggagcttgaattggttgcttcgctctgtcagcaacacgatgtcgtatgcatcacagatgaggtgtaccagtggatggtgtacgatggacaccaacacatctcgattgcaagtctgccgggcatgtgggagcgtaccctgaccatagggagcgcgggaaagacgttctctgcaaccggctggaaagtggggtgggtgctgggccctgaccatatcatgaaacacctgcgaacagtgcatcaaaacagtgtgtttcattgccccacccagtctcaggcagctgttgccgaatcattcgagagagaacagcttctgtttagacagccttcctcttatttcgtgcagttccctcaggcgatgcaaagatgtcgcgaccacatgattagatccctgcagtccgtggggctcaagcccattattcctcaggggtcttattttttgatcactgatattagtgactttaaaagaaagatgcctgatctacccggcgcagtggacgagccatatgataggcgctttgtcaagtggatgatcaagaacaaaggtcttgtcgctatcccggtgagcattttctatagcgtgccccatcaaaaacacttcgaccactacatacggttttgtttcgttaaggatgaagccacacttcaggctatggatgaaaagctcaggaaatggaaagtggagttatag

SEQ ID NO: 113512 - DNA, 480 bp, synthetic construct
  misc_feature 1..480: note = Description of Artificial Sequence: Synthetic coding sequence
  source 1..480: mol_type = other DNA
gccatggctaagcagctgcaggcaaggaggttggacgggattgattacaacccatgggtcgaattcgttaagcttgcctctgaacatgacgtcgttaacctgggacagggcttccccgactttcccccgcctgactttgcagtggaagcttttcagcacgctgttagcggggatttcatgttaaaccagtacactaaaactttcgtctctctgtgttatcctggttggtccgcaatggtgcgttcctggtccacagctgctctgaccctgcccgtaagtagcggcccacccaccagcgcatccggcgtcacgggcaccacaggctggtctcaatcctggctggagtcctcattctttgatcctaaaaaaaagaagattatatggggatatcccccccttaccaagatattagcaagtttcttcggggaactcctgggtcaagagatcgatcccctgaggaatgtgctggtcaccgtgtag

SEQ ID NO: 113513 - DNA, 555 bp, synthetic construct
  misc_feature 1..555: note = Description of Artificial Sequence: Synthetic coding sequence
  source 1..555: mol_type = other DNA
atggcaaaacagttgcaggcacggagactggatggcattgattataacccatgggtcgaatttgtgaagctggcctcagagcacgacgtcgttaacctgggccaagggtttccagacttcccgccaccagattttgccgtcgaggccttccagcacgccgttagcggggacttcatgctgaaccagtacacaaagacattcggatatcctcctcttaccaagatcttagcttccttttttggcgaattgttggggcaagagatcgaccccctgcggaatgtgttggttacagtaggcgggtatggcgcactgtttaccgcgttccaggcgttagtggatgagggagacgaggtcattataatagaacctttttttgactgttacgagccaatgacaatgatggctggggggaggcctgtgttcgtctccctgaaaccaggccccatacagaatggagagctgggaagctcttcaaattggcagttggatcccatggagcttgcaggaaagttcaccagccggaccaaagctcttgtcctgaacacccccaattag

SEQ ID NO: 113514 - DNA, 480 bp, synthetic construct
  misc_feature 1..480: note = Description of Artificial Sequence: Synthetic coding sequence
  source 1..480: mol_type = other DNA
gccatggcgaaacagctacaggctaggcgactggatggcatagactacaacccctgggtggaattcgtcaagctggcctcggagcacgacgtggtaaacttaggccaaggatttcctgacttccctccaccagactttgctgttgaagcttttcaacacgctgtctcgggcgactttatgttgaaccagtacaccaagacattcgtgtctctgtgctatcccggatggagcgctatggtgcggtcttggtcgacagctgctctcactctgccggttagttcaggtccaccaacttccgcttctggagtgacaggcaccacgggctggtctcagtcatggttagagtcctccttcttcgaccccaaaaaaaaaaaaataatttggggttatccaccattgactaagatccttgcttccttttttggcgagctgttaggccaggagatcgaccccctcaggaatgttttagtgactgtgtag

SEQ ID NO: 113515 - DNA, 1551 bp, synthetic construct
  misc_feature 1..1551: note = Description of Artificial Sequence: Synthetic coding sequence
  source 1..1551: mol_type = other DNA
atgtttcggacggctgcagctatctcagtgcacctggtggggcccctgcaggggagaaaggctggggctccactcacttggttcctgcaccagacgcaggtggccgaaaaaaacgtcggatccccagcaccccgccctacatcccacttgggcctggctaatccacaagagcgcaaagtcccccagggaccgcagagtccatgtgaggttcccgctgctgaggggatactgaggacaggcggtgccaaactgcctattcagggccaccccgccaaattggcaatggcaaagcagctccaggcccgacggctggatggaatcgattacaatccttgggtcgagttcgtgaaattagcctccgagcatgacgtggttaatctcggccagggcttccccgacttcccccctccggactttgcagttgaggcctttcagcacgctgtcagtggtgatttcatgttaaaccagtatacgaagactttcggttacccacccctgactaagattttggcatctttttttggggagctgttagggcaggagattgatccccttcgtaacgtcctggttacggttggtgggtacggcgctctttttaccgccttccaggcattagtcgacgaaggagacgaggttatcattattgaacctttctttgattgttacgaacctatgactatgatggctggcggccgacccgttttcgtctccctgaagccaggtcctatccagaatggtgaacttggatctagcagcaactggcaactggacccaatggaattagcgggtaaatttacatccaggactaaagcgctggttctgaataccccgaacaacccccttggaaaggtttttagcagagaagagctggagctggtggcctcattgtgccagcagcacgacgtggtatgcatcactgatgaagtgtatcaatggatggtgtatgatgggcatcagcatataagcatcgcaagcttgcctgggatgtgggagcgtacgttgactatcggaagtgcgggcaagacattttctgccaccggatggaaggtgggatgggtgttgggccctgaccacatcatgaagcacctcagaactgtacaccagaatagtgtttttcactgtccaacccagtctcaagccgcagtggcagaatcattcgagagggaacagttgttatttagacagccttcttcgtacttcgtgcaatttccacaggccatgcagcgatgccgcgaccacatgatccgatcccttcagagcgtgggactcaagccaatcatcccacagggatcctactttttaattactgatatttccgactttaaacggaagatgccagatctacctggggccgtcgacgagccatatgacaggagattcgtaaaatggatgataaaaaacaagggtttagttgcaattcctgtcagtatcttttacagtgtgcctcaccagaaacactttgaccattatatcaggttctgtttcgtaaaggacgaagccactctccaagcgatggacgagaagttgcgcaaatggaaggtggagctttag

SEQ ID NO: 113516 - DNA, 756 bp, synthetic construct
  misc_feature 1..756: note = Description of Artificial Sequence: Synthetic coding sequence
  source 1..756: mol_type = other DNA
atggccaaacagctgcaggcacgcagactggacgggatagattataacccctgggtggaattcgttaagcttgcttctgaacatgacgttgtcaatttaggccagggattccctgacttcccaccaccagattttgccgttgaggcctttcaacatgctgtatccggtgacttcatgctaaatcagtacaccaaaacttttggataccccccgctcaccaaaattctggcatccttcttcggagagctcttgggccaggaaatcgaccctctgagaaacgtactagttaccgtaggtggctatggagctttgttcaccgccttccaagccttggtcgacgagggcgacgaggtcatcatcatcgagccattctttgactgttatgagccaatgacgatgatggccggtgggcgccctgtgtttgtgagtttgaaaccagggccaattcagaacggagagcttggaagctctagtaactggcagctggaccctatggagttggcgggcaaattcacttccaggacgaaggcattggttctgaataccccaaataaccccctgggtaaggtcttctcccgggaggagcttgagctggtggccagcctctgtcagcagcacgacgtagtgtgcatcacagatgaggtttaccaatggatggtctatgatgggcatcagcacatttcaattgccagcctgcccgggatgtgggagcggaccttgacaatcggtagcgccggcaaaactttttccgcttag

SEQ ID NO: 113517 - DNA, 603 bp, synthetic construct
  misc_feature 1..603: note = Description of Artificial Sequence: Synthetic coding sequence
  source 1..603: mol_type = other DNA
atggagcagacggaggtcttaaagccgcgaaccctcgcagacctgattcgaattctgcaccaacttttcgccggtgacgaagtgaatgtcgaggaggttcaggccatcatggaggcctacgagtctgaccctaccgagtgggccatgtacgcaaagtttgatcagtatcgctacacccgcaatctggtcgaccagggcaatgggaagtttaatctgatgatactttgttggggtgagggacacggtagcagcatccatgatcataccaatagtcactgttttctaaagatgcttcaggggaatttaaaggagaccctcttcgcctggcccgacaaaaaaagtaatgagatggtgaaaaagtcagagcgagtactgcgcgaaaatcaatgcgcttacatcaacgatagcattggcctgcacagggtagagaacatttcgcacaccgagccagcagtgagccttcacctctacagcccaccattcgacacctgtcacgcatttgatcagcgaactgggcacaaaaataaggtgacgatgacattccatagcaaatttggcattcgtactcctaacgctacctccggctccctcgaaaataattag

SEQ ID NO: 113518 - DNA, 3111 bp, synthetic construct
  misc_feature 1..3111: note = Description of Artificial Sequence: Synthetic coding sequence
  source 1..3111: mol_type = other DNA
atgtacctcgtggcaggggatcggggtttagccgggtgcggacatttgttggtcagcctcctgggtttgctgctactactggcccgtagcgggacacgcgctcttgtttgcctgccttgtgatgagagcaagtgtgaggaacctcgcaattgcccaggttccatagtacagggcgtgtgcggctgttgctatacatgcgcctcgcagcggaatgagtcatgcggagggacattcggtatctacggcacctgcgacaggggattacgctgcgttattcgcccaccgctgaacggagactcgctcacagaatatgaagccggggtgtgtgaagacgaaaactggacagacgaccagctacttggattcaaaccctgtaatgaaaatctaatcgctgggtgtaacatcattaacggtaaatgtgaatgcaatacaattcgaacctgctctaatccgtttgagtttcctagccaggatatgtgtctcagcgccctgaaacgaattgaggaggaaaaacccgactgtagcaaagcacggtgtgaggtgcagttcagccctcgatgtcctgaggattcagtgctgatcgaaggctatgcacccccaggggagtgctgcccattgccatcaaggtgcgtgtgtaacccagcaggctgccttagaaaagtgtgccagcctggcaacctgaacatcttggtgtccaaggcgagcgggaagccaggggagtgttgcgacctatatgagtgtaagccagtgttcggagtggattgccggacagttgagtgtcccccagtccagcaaaccgcttgcccccccgacagttacgaaactcaagtccggttgactgctgacggttgctgcacactgcccactagatgtgaatgcctatcagggctgtgtgggttccctgtgtgtgaagttggctccactccccggattgtgtcgaggggtgacggtactccgggtaaatgctgtgacgtcttcgagtgcgtaaacgacacaaagcccgcgtgcgtgttcaacaatgtggaatattatgatggcgacatgtttcggatggataattgccggttttgccgatgccaggggggcgtcgcaatatgctttaccgcacaatgcggtgaaataaactgcgaacgttactacgtgcctgagggcgaatgttgccccgtgtgtgaggaccccgtgtaccctttcaataatccagctgggtgttatgccaacggtctcatactggcgcacggcgacagatggcgcgaggatgactgcactttctgtcagtgtgttaacggggagcgacactgcgtcgccacagtatgcggccagacatgtacaaacccagtgaaggtccccggcgaatgttgtccagtgtgcgaggaacctacaataattaccgtggatccaccggcctgtggagaattatctaattgtactctgactggaaaggattgcattaacggattcaaacgtgaccacaatggctgtcgaacttgccagtgcattaacacagaggagctgtgcagtgaacgtaagcagggctgcactctgaattgtcccttcggattcctcaccgatgcacagaactgcgagatttgtgaatgcaggcctagacccaagaagtgccgacctattatctgcgacaaatattgcccattaggactacttaagaacaagcacggatgcgatatctgtagatgcaagaaatgtcccgaattgtcatgctccaaaatttgtccgctgggttttcaacaggattcccatggctgcctgatctgtaagtgccgagaagcttcagcctcagctggccccccgatattgtcagggacctgtttgacagtagacggacatcaccataaaaatgaggagtcctggcacgatggatgccgagagtgttattgtctcaacggacgggagatgtgtgctctgataacgtgtcccgtccccgcctgtggaaatcctaccatccaccccggtcagtgctgtccctcttgtgcagatgactttgtcgtccagaaacccgagctgtctactcccagcatttgccacgctcccggtggcgaatactttgtcgaaggcgagacttggaacattgactcttgtacccagtgtacctgccatagtggcagagtgttgtgcgagaccgaagtttgcccccccctactctgccagaatccaagtcgcactcaagatagttgttgtccgcagtgtacggaccaaccttttagaccttctctttctaggaacaattcagtacctaattactgtaagaatgacgagggcgatatatttcttgcagctgaaagctggaagccagatgtctgtacgagctgcatttgcatcgattcagtgattagctgtttctccgaaagttgcccatctgtgagctgtgagcgtcctgtgcttcgcaaaggacagtgttgcccttactgcatcgaggatacgattccgaagaaggtcgtgtgccattttagcggaaaagcctatgcggatgaagagcgctgggacctggactcctgcacccattgttattgtctccagggccagaccttgtgctctactgtgtcatgtccacccctgccttgcgtggagcccatcaacgttgagggctcttgttgcccgatgtgccccgagatgtacgtgcctgaaccgactaacattccgatcgaaaagaccaaccacaggggcgaggttgacctggaggtccccttgtggccgactcccagcgagaatgacatcgtgcacctgcctagggatatgggacacctacaagtggactacagggacaacaggctgcacccttcagaagatagctccctggacagcattgcctcagtggtcgtccccatcatcatttgcttgtctatcataatcgctttccttttcatcaaccagaaaaagcaatggatccccctgctgtgttggtacaggactcctacaaaaccgtcgtctctcaataaccagttagtctctgtggattgcaagaaaggcaccagggtccaggtggactccagccagcgtatgctccgcattgctgagcccgacgcccggtttagcggattctatagcatgcagaaacagaatcatttgcaggccgataacttctaccagactgtgtag

SEQ ID NO: 113519 - DNA, 498 bp, synthetic construct
  misc_feature 1..498: note = Description of Artificial Sequence: Synthetic coding sequence
  source 1..498: mol_type = other DNA
atggctgatttcgatgaaatttacgaggaagaggaggacgaagagagggccctggaggagcagctgctcaaatactctcccgatccagtggtggtacgcggctccggtcatgtgactgtgttcggcctgtcaaataagttcgagtcagagtttccctcttcactgaccggaaaagtagccccagaggagttcaaggcctctattaaccgcgtgaatagttgtcttaaaaaaaacctgcctgtgaatgtgagatggctgctgtgcggttgtctttgttgctgttgcaccctcggctgcagtatgtggcccgttatctgtttgagcaagcgaacccgtaggtctatcgaaaaattgctggaatgggaaaacaacaggctgtatcacaagctgtgtctgcattggaggctgtcgaaacgaaagtgcgaaacgaataacatgatggaatacgtaatcctcatcgagttcttaccaaagacacctatcttccggcccgattag

SEQ ID NO: 113520 - DNA, 234 bp, synthetic construct
  misc_feature 1..234: note = Description of Artificial Sequence: Synthetic coding sequence
  source 1..234: mol_type = other DNA
atgcctaaatgtccaaagtgtaataaggaagtgtactttgctgaacgcgtgacatcccttggaaaagactggcatcggccatgtttgaagtgcgagaaatgcgggaagactctcacatcaggcgggcacgcagagcatgagggcaagccttactgcaatcacccatgttacgccgccatgtttgggccgaagggttttggaaggggcggcgctgagagtcatacgttcaaatag

SEQ ID NO: 113521 - DNA, 234 bp, synthetic construct
  misc_feature 1..234: note = Description of Artificial Sequence: Synthetic coding sequence
  source 1..234: mol_type = other DNA
atgccgaagtgcccgaaatgtaataaggaagtgtactttgctgaacgagtgacctcactgggtaaggactggcacagaccttgtctcaaatgtgagaagtgcggaaagacccttacgtccgggggacatgccgagcatgaggggaagccctattgcaatcacccctgctacgccgcgatgtttggtcccaagggttttgggagggggggagctgagtcccacacgttcaaatag

SEQ ID NO: 113522 - DNA, 234 bp, synthetic construct
  misc_feature 1..234: note = Description of Artificial Sequence: Synthetic coding sequence
  source 1..234: mol_type = other DNA
atgcccaagtgtcctaagtgcaataaagaggtgtacttcgccgagcgggtcactagcctgggaaaggactggcatcgcccctgtttgaagtgcgaaaagtgtggcaaaacgttaacctcaggaggacacgcagaacatgaaggaaagccatactgcaatcatccatgttacgctgctatgttcggccccaagggcttcggaagaggaggcgcggaaagtcacacatttaaatag

SEQ ID NO: 113523 - DNA, 627 bp, synthetic construct
  misc_feature 1..627: note = Description of Artificial Sequence: Synthetic coding sequence
  source 1..627: mol_type = other DNA
atggctagtaaatgtccaaaatgtgataaaaccgtgtacttcgccgagaaggtctcaagcctaggcaaagactggcacaagttctgcctcaagtgtgaacgatgttccaagacactgacccctggtggccacgccgaacacgacggcaaaccattctgccataaaccgtgttacgctacgctgttcggacccaagggagtgaatattgggggagccgggtcctacatctacgaaaaacccctggcagagggcccgcaggttaccggcccgatcgaagtgccagctgcccgggcagaggaacggaaagctagtggaccacccaaaggacccagccgcgcgagtagcgtgaccaccttcaccggagagccaaatacatgtccacgatgttctaaaaaagtctattttgccgagaaagtcactagcctgggcaaagactggcaccgcccatgcctgcggtgcgagcgctgcgggaagacgctgacacccggcggacatgcagagcatgatggtcagccatactgtcataagccatgttatggcattttattcggaccaaaaggagtgaatactggtgctgtggggtcctatatctacgatcgtgatcccgaggggaaagtgcagccatag

SEQ ID NO: 113524 - DNA, 849 bp, synthetic construct
  misc_feature 1..849: note = Description of Artificial Sequence: Synthetic coding sequence
  source 1..849: mol_type = other DNA
atgcccccccaccacctgctgccttggctcgcccaagtcccatctgccgagggggagttggttcgtttggtgtccagagcaggcggtcggggcgcttgtttctggcccgcagtcaccatggaaatggccgtggccgccgggtgcgtatgtaaaggtggtgggtgctgccacagggagccatctcaagaccatcatgaaagccaggaacacagaggacccctagtcggcagccagacctgcctggtccatcaggcagagggtactgctgaaaaagtcagctccctgggcaaagattggcataagttttgtctgaagtgtgagagatgttcaaagactttgacacctggcgggcacgcagagcacgatgggaaacccttctgtcacaaaccctgctacgctaccctgttcgggcccaaaggtgtgaacatcggcggcgcaggtagctacatttacgagaaacccctcgctgagggtccccaggttacaggccctatcgaagtgccagcagcacgcgctgaggaacgtaaggcctcaggtccccctaaagggcccagtcgcgccagcagtgtgacgacatttacgggagaaccaaacacttgtccccggtgttctaagaaggtatactttgccgagaaggtcaccagcctgggtaaggattggcataggccctgtttgaggtgcgaacgttgtggcaagacgcttacacccggggggcacgcagagcacgatgggcagccctactgtcataagccatgctacggcattctgtttgggcctaagggggttaataccggcgccgtaggctcatacatctatgacagagaccccgaaggcaaagtccagccttag

SEQ ID NO: 113525 - DNA, 315 bp, synthetic construct
  misc_feature 1..315: note = Description of Artificial Sequence: Synthetic coding sequence
  source 1..315: mol_type = other DNA
tgaccaggcggggagcgtgctgaaggcgcaggacgcccgggagctccaaccatggcaagtaagtgcccaaaatgcgacaagactgtgtatttcgcggagaaggtgacttcactgggaaaagactggcacagaccctgtctccgatgcgagcggtgtgggaaaactttgaccccaggcggacatgctgagcacgacggccaaccctactgtcacaagccttgttatgggatactctttggccctaagggagtcaacaccggcgctgtcggctcgtatatctacgatagggacccagaaggaaaagtgcagccttag

SEQ ID NO: 113526 - DNA, 537 bp, synthetic construct
  misc_feature 1..537: note = Description of Artificial Sequence: Synthetic coding sequence
  source 1..537: mol_type = other DNA
atggaaataaagcatctcctgttcctggtggcagctgcctgcttgcttcctatgttgtctatgaagaagaaatcagcaagagaccagtttaacaaactggtcacagacctacccaatgtgcaggaggagattgtcaatattcacaacgccctccggcggagggtggtgccacctgcctcaaacatgctgaagatgagctggtccgaggaggcagcacagaacgctaggatatttagtaaatattgcgacatgactgagagcaaccctctggagagaaggctcccaaataccttctgtggcgagaacatgcatatgaccagctatcccgtcagctggagcagcgtcatcggcgtctggtacagtgagtccacctctttcaaacacggagagtggacgactaccgatgacgacatcacaaccgaccactacacacaaattgtgtgggccacttcttaccttatcggctgtgctattgcgagttgtagacaacaaggatcaccaaggtacctttacgtgtgtcattattgccatgattag

SEQ ID NO: 113527 - DNA, 750 bp, synthetic construct
  misc_feature 1..750: note = Description of Artificial Sequence: Synthetic coding sequence
  source 1..750: mol_type = other DNA
atggagattaagcatcttctgttcctcgtggcagcagcctgtctgctcccaatgctgtccatgaagaaaaagtcagccagagatcagttcaacaagttagtgacagacctccccaacgtgcaggaagagatagtgaatattcataacgccctcagaaggcgcgtcgttccccctgcctccaatatgctgaagatgagttggtctgaggaggcggctcagaatgcccggattttctctaagtactgcgacatgactgagagtaatccgttggagcgtaggctgcccaatactttttgtggtgaaaatatgcacatgacgagctaccctgtgtcatggtcttccgtgattggagtgtggtacagcgaaagcacttcattcaaacatggcgagtggactacaacagacgacgacatcacgactgaccattacacacagatcgtttgggcaacatcctatttaataggatgcgcaattgcaagctgccgtcagcagggatcccccagatatctgtatgtgtgccattattgccacgagggaaatgatccagagactaagaacgagccctacaagacaggggtcccatgcgaggcttgtccatccaattgcgaggataaactatgcactaacccctgtatctactacgatgagtattttgactgtgatatccaggtccactatctcgggtgtaatcacagcactaccattctcttttgcaaggcgacttgtctgtgcgatacagagattaagtag

SEQ ID NO: 113528 - DNA, 750 bp, synthetic construct
  misc_feature 1..750: note = Description of Artificial Sequence: Synthetic coding sequence
  source 1..750: mol_type = other DNA
atggaaatcaaacacctgctcttcctggtcgcggcagcgtgcttgttgcctatgttaagtatgaaaaagaaaagtgcaagagatcagtttaacaaactggtcacagacctgcccaacgtccaagaagaaatagtgaacatccacaacgctctgaggaggcgcgtggttcctcccgcctctaatatgctcaaaatgtcttggtctgaggaggctgcacagaatgctaggattttctccaagtactgcgatatgaccgaatccaatcccctcgagcggaggctacctaataccttttgcggcgaaaatatgcacatgacatcctatccagtgtcctggtcctccgtgatcggcgtttggtactccgaaagtacctcttttaagcacggggaatggaccacaacagacgacgacatcactactgatcactacacgcaaatagtctgggccacgtcttatttgatcgggtgtgccattgcctcatgtcgacagcaaggcagcccgaggtacctctacgtatgtcactattgccacgaaggtaatgatcctgaaactaagaacgagccttataaaactggagtaccatgtgaagcctgtccctcgaattgcgaagataagctgtgtacaaatccctgtatctattacgatgagtatttcgactgcgacattcaggttcactacctgggttgtaaccacagcacaactatcctattctgcaaagcaacatgtctgtgcgataccgagataaaatag

SEQ ID NO: 113529 - DNA, 750 bp, synthetic construct
  misc_feature 1..750: note = Description of Artificial Sequence: Synthetic coding sequence
  source 1..750: mol_type = other DNA
atggaaattaagcatctgctgtttctggttgccgccgcgtgcctactgccaatgctcagcatgaagaagaagtcagcacgcgaccagttcaataagctggtaacagatctacccaacgtccaggaagagatcgtcaacatccataatgcgttgaggcgtagggtggtacctccagcatcaaacatgcttaagatgtcctggtctgaagaggctgcacagaatgccaggatcttcagcaagtactgtgatatgacagaatctaacccattggagagaaggttgccaaatactttttgtggagaaaatatgcacatgaccagctacccagtgtcatggagcagcgtgatcggggtttggtactccgagagtacctcattcaaacatggcgaatggactaccactgacgatgatatcacaacagatcactatactcagattgtttgggcaacaagttacctgattggttgtgctatagcgtcctgtcgtcaacagggatctcctcggtacctgtatgtgtgccattactgccatgagggcaacgaccctgagacgaagaatgaaccttacaaaacaggcgttccttgtgaggcctgccccagtaactgcgaggataaactctgtaccaatccatgcatatactacgacgagtattttgactgcgatatccaggttcactacctaggttgtaaccacagcactactattttattttgcaaagccacctgtctgtgtgataccgaaattaaatag

SEQ ID NO: 113530 - DNA, 537 bp, synthetic construct
  misc_feature 1..537: note = Description of Artificial Sequence: Synthetic coding sequence
  source 1..537: mol_type = other DNA
atggagataaagcatctcctttttctggtcgcagcagcatgtctgctgccgatgttaagcatgaagaagaaaagtgcccgcgaccagttcaataagctcgtgaccgaccttcctaacgtacaagaagaaatcgtcaacatccataacgctctgagacgcagggttgttccaccggcctctaatatgttgaaaatgtcctggtctgaggaagccgctcaaaatgctaggatcttctcgaagtactgcgatatgacagaatccaatccacttgagcggaggctgcccaataccttttgtggggagaatatgcacatgacgagctatcccgtttcctggagctcagtgattggagtgtggtactccgagtctacctcctttaaacatggggaatggacaactaccgatgacgatattaccacggatcattatactcagatcgtatgggccacctcatacctgattggctgcgcaattgcaagctgccgccagcagggctcacctcggtacctgtacgtttgtcattattgtcacgactag

SEQ ID NO: 113531 - DNA, 537 bp, synthetic construct
  misc_feature 1..537: note = Description of Artificial Sequence: Synthetic coding sequence
  source 1..537: mol_type = other DNA
atggagataaaacacttgttgtttttagtggctgcagcatgtctgctgccaatgttgagcatgaagaagaagagtgcacgagaccagttcaacaaactagtgactgatctgcctaatgtacaagaggaaattgtgaacattcataatgccttgcgtagaagagtggtgccacccgctagcaatatgctcaaaatgagctggtctgaagaggccgcacagaacgctagaatcttttccaaatactgcgatatgacagaatctaatcccttagaaagaaggctgccaaacacattctgtggggaaaacatgcacatgacttcttaccccgtcagttggtcttctgtcatcggggtgtggtattccgaatccacctctttcaaacacggagaatggacaacaacggatgatgatatcacaaccgatcattatacacaaatcgtgtgggcaacttcctatttgatcggttgcgctatcgccagttgccgccaacagggctccccacggtacctgtacgtctgtcattattgtcacgactag

SEQ ID NO: 113532 - DNA, 669 bp, synthetic construct
  misc_feature 1..669: note = Description of Artificial Sequence: Synthetic coding sequence
  source 1..669: mol_type = other DNA
atggcaggcaaaccaaaactccattacttcaacggaagaggacgcatggagcccatccggtggttgttagccgctgctggagtcgaattcgaggaaaagttcatcggaagcgccgaagacttaggtaagctcaggaatgatggctctttaatgtttcagcaggtgccaatggtggagattgatggcatgaagctggtgcagacccgggccattctaaattacatcgcctccaaatataacctgtatggaaaggatataaaagagcgtgcccttatcgacatgtacactgaggggatggctgacctgaacgaaatgatcctgttactgcctctgtgtcgtcccgaagaaaaggatgctaagatcgccttgatcaaagagaagacaaagtccagatattttccagctttcgaaaaggtgctgcagagtcatgggcaggattatcttgtggggaacaaactttctcgtgccgacatctcattggtggagctcctttattatgtggaggaactcgatagcagcctgattagcaacttccctctgctgaaagccctgaaaacccgcatctctaacctgccgacagtaaagaagttcctgcagcctgggagtcctcgaaagcctcccgcagacgcaaaggccctggaagaggctcgcaagatatttcgtttttag

SEQ ID NO: 113533 - DNA, 732 bp, synthetic construct
  misc_feature 1..732: note = Description of Artificial Sequence: Synthetic coding sequence
  source 1..732: mol_type = other DNA
atggctctgctgcccgtcctgttcctcgtgacagttctcttaccatccctccccgctgaaggcaaagacccagcattcactgccctcctgaccacgcagcttcaggtgcaaagggaaatcgtgaataaacacaacgagttgcgaaaagctgtcagcccacccgctagtaacatgttgaagatggaatggtctcgagaagtgactactaatgcgcagaggtgggcaaacaaatgtaccctgcagcattctgaccccgaggatcggaaaacttccaccagatgcggagagaatttgtacatgagcagcgatccaacgtcatggagctccgcaatccaatcctggtacgatgaaatcctcgactttgtgtacggagtaggccccaagagccctaatgccgttgtgggtcactacacacagttagtctggtattctacctaccaggttggatgcggcatcgcatattgtcctaaccaggattcactgaagtactattatgtctgccagtattgtccagctggcaacaatatgaatagaaagaatacaccatatcagcaaggcaccccctgcgcaggctgcccggatgattgtgacaaaggcttgtgtaccaactcctgccaataccaggacctgctgagcaattgtgattccctaaaaaacaccgcgggctgtgagcatgaactgttaaaagagaagtgcaaggctacctgtctgtgcgagaataagatttattag

SEQ ID NO: 113534 - DNA, 1494 bp, synthetic construct
  misc_feature 1..1494: note = Description of Artificial Sequence: Synthetic coding sequence
  source 1..1494: mol_type = other DNA
atgtcctgcgtcctggggggggttatccctcttggcctcctttttctggtctgtggaagccagggctacctcctcccaaacgtgactctcctcgaagaactgctgagcaaataccagcacaatgaatcgcattccagagtgcggcgcgcaatccccagggaagataaggaagagatccttatgttgcataacaagctcaggggacaggtgcagccccaggcctccaacatggaatacatgacttgggacgatgaattagagaagagcgcagcggcttgggcatcccagtgtatctgggagcacggacccacaagcctcctggtgagcattgggcagaatctgggagcccattggggaaggtaccggagccccggtttccatgtgcagagttggtatgacgaagtgaaggactacacttacccatatccttcggagtgtaatccatggtgtcccgagaggtgcagcgggcccatgtgcacccattacacgcagatcgtgtgggctacaaccaacaagataggctgtgccgtgaatacttgcaggaaaatgaccgtctggggggaggtgtgggagaacgctgtctatttcgtgtgcaactatagccccaaggggaactggatcggcgaagccccctacaagaatggccgcccttgcagtgaatgccctccatcctacgggggatcttgcagaaacaatctctgctacagagaagagacctatacccctaagccagaaacagatgaaatgaacgaagtcgagaccgcccctattcctgaagagaaccacgtgtggctccagcccagagtgatgcgccctacaaagccaaaaaaaacttccgccgtgaactacatgacccaagtggttaggtgcgatacaaaaatgaaggaccgctgtaagggctctacctgtaacaggtatcagtgccccgctggctgcctgaatcacaaagcgaagatatttgggacccttttctacgagtcctcaagttcgatctgcagggccgccattcattatggaatccttgacgacaaaggaggtctggttgacatcacaagaaacggaaaggtgcctttttttgttaagtcagagagacacggagtccaatctctgtctaaatacaagccctctagttcctttatggtgtcgaaggtgaaagtgcaggaccttgactgttataccaccgtggctcagctgtgtcccttcgaaaagcccgccacccactgcccaaggattcactgcccggcccattgcaaggatgagccaagttactgggccccagtgtttggtacgaatatctacgccgatacttccagcatatgcaaaactgcggtacatgcaggcgtgataagcaacgagtccgggggcgacgtcgacgtgatgcctgtcgataagaagaagacttacgtcggctctctgcgcaacggagttcagagtgaaagcttgggaactccgagggacggaaaagcattcagaatttttgccgtgaggcagtag

SEQ ID NO: 113535 - DNA, 1269 bp, synthetic construct
  misc_feature 1..1269: note = Description of Artificial Sequence: Synthetic coding sequence
  source 1..1269: mol_type = other DNA
atggcaccctggcccccaaagggtttggtgccagcgatgctgtggggactgtccctctttctgaacttgccgggcccaatatggctgcaaccgtcaccaccaccccagtcaagcccacccccacagccccacccgtgtcacacttgtagaggcctcgtggatagcttcaacaagggccttgaaaggacaatcagggacaatttcggaggggggaatactgcctgggaggaggaaaacctgagcaagtataaagactctgagacgcggctggtggaggtcttggaaggcgtgtgctccaaaagcgatttcgaatgccatagactgttggagttaagcgaggagctggtcgagtcttggtggttccacaagcaacaagaggcgcccgacctctttcaatggctgtgttccgatagtctcaagctatgttgcccagccggtacatttggcccctcttgtcttccttgccctggcggtacagagaggccttgcggcggctacggccagtgtgagggcgagggcacgcgcgggggatctggccattgcgattgccaggctggctatggtggggaagcttgcgggcagtgcggcctgggatacttcgaggctgaacgtaacgcttctcatcttgtgtgtagcgcctgctttggcccatgtgcccgttgtagtggccccgaagaaagcaactgtcttcagtgcaagaagggatgggccctccatcatctcaagtgtgttgatatagatgaatgcggaacggagggtgcgaattgtggcgctgaccagttctgtgttaatacagaaggcagttacgaatgcagagattgtgcaaaggcatgtctcgggtgcatgggggcggggcccggccgatgtaaaaaatgctcgccaggttaccaacaggtggggtctaaatgcttggatgtggatgaatgcgaaaccgaggtgtgccccggagagaataagcaatgtgaaaacaccgagggaggctataggtgcatctgcgctgaaggctacaagcaaatggaaggaatctgtgtgaaggaacagatacccggagcattcccgatcctgacagacttgacgcccgagacaactcgccggtggaagctgggcagtcacccacactcgacatatgttaaaatgaaaatgcaaagggatgaagccacattcccaggcctgtatggcaagcaagtagctaaactgggcagccagtccaggcagtcagacagaggtacgaggctgatccattctcaacaggccagttctcagcggtag

SEQ ID NO: 113536 - DNA, 1263 bp, synthetic construct
  misc_feature 1..1263: note = Description of Artificial Sequence: Synthetic coding sequence
  source 1..1263: mol_type = other DNA
atggccccgtggcctccaaaaggccttgtgcccgctatgttatggggcttgtccttgtttctcaacctgcctggaccaatatggcttcagcccagcccacccccacagagttctcctccaccacagccccacccttgtcacacgtgtaggggcctagtggattcttttaacaaggggcttgagcgcacaattagagacaattttggcggcggaaacaccgcgtgggaagaggaaaacctgagcaagtacaaagactctgagactcgcttagttgaagtgctggaaggagtctgcagtaaatcggattttgagtgtcacaggctgctagaactctctgaagaactggtcgagtcttggtggttccataaacagcaggaggcccctgatctgttccagtggctttgttctgactctcttaaattatgctgcccagccggaacttttggcccttcttgcttgccttgtcccggaggtaccgagcgtccatgcggggggtacggccaatgcgagggagaaggtacacgcgggggatctgggcattgtgattgtcaagccggatacgggggagaagcgtgcggtcagtgtgggcttggttactttgaggcagaaaggaatgcatcacacctggtctgttctgcatgctttggtccatgtgctagatgttcaggccccgaggagagcaattgccttcagtgcaagaaaggttgggccctccatcacttgaaatgcgtggacatcgatgaatgtggtaccgagggcgcaaattgcggcgccgatcagttttgcgttaatacagagggaagctacgagtgcagggactgcgctaaggcctgcctaggctgcatgggcgcgggaccaggacgttgtaaaaaatgttccccaggatatcagcaggtaggtagcaagtgtctggacgtcgatgaatgtgaaaccgaggtatgcccaggggaaaacaaacagtgtgagaacacagaaggcggctacaggtgtatatgcgctgagggctacaagcaaatggaagggatctgtgtcaaggaacaaatacccgagtccgctgggttcttcagcgaaatgaccgaggacgaacttgtggtgctgcagcaaatgttcttcgggatcatcatctgtgccctggccacgctagccgcaaagggggatctggtgtttaccgcgatctttattggagcagtggctgccatgactggctattggttatcagaacggtcagaccgggtgctggaaggatttatcaagggccgatag

SEQ ID NO: 113537 - DNA, 1263 bp, synthetic construct
  misc_feature 1..1263: note = Description of Artificial Sequence: Synthetic coding sequence
  source 1..1263: mol_type = other DNA
atggcgccttggccccctaagggtctcgtcccagcaatgttatggggtctttccttattcctgaatttgccaggccctatttggctgcagcctagtccaccccctcagtcttccccaccgccccaaccacacccttgccacacatgtcgcggcttagttgattcctttaacaagggcctggaaaggacaatccgcgataacttcggcggcgggaatacagcctgggaagaagaaaacctgagcaaatataaggactccgagacaaggcttgtggaggtgctggagggcgtttgttccaaaagtgattttgagtgccaccgcttgctggagttgagcgaagaactggtcgaatcgtggtggtttcataagcagcaggaagctcccgatctctttcagtggctctgtagcgacagtctgaagctttgctgcccggccggaacctttggacccagctgtttgccatgccctgggggcacagaaagaccatgtggcggatacggccaatgcgaaggggaagggaccagaggggggtctggacattgcgattgtcaggctggctatggtggcgaggcctgcggacagtgtggactcgggtactttgaggcagagcgcaatgcaagccatctggtctgcagcgcctgcttcggaccatgtgcacggtgctcggggcccgaagaatcgaattgcctgcaatgcaagaaaggctgggcattgcaccatctgaaatgtgtggacatcgatgagtgtggcacggagggcgccaactgtggagcggaccagttttgcgtgaatacagagggaagttatgaatgccgagattgcgccaaagcgtgccttggttgcatgggcgctggacccgggcggtgtaagaagtgcagcccaggttaccagcaggtgggctctaaatgtctggatgtggacgaatgcgagaccgaagtgtgtcccggcgagaataagcagtgcgagaatacggaaggtgggtatcggtgcatttgcgctgagggttataaacaaatggagggcatttgtgttaaggagcagattcccgaatcagccggtttcttttcggaaatgacagaggacgagttggtcgtactacagcagatgttcttcgggattatcatttgtgccctggctacgctcgcggctaagggcgacttggtgttcacagcaattttcataggagcagttgctgcaatgactggttactggctgagtgagcgaagcgacagggtgcttgaaggttttataaagggacggtag

SEQ ID NO: 113538 - DNA, 1263 bp, synthetic construct
  misc_feature 1..1263: note = Description of Artificial Sequence: Synthetic coding sequence
  source 1..1263: mol_type = other DNA
atggctccatggccgccaaaggggctggtaccggccatgctttggggactctctttatttttaaatcttcccggccccatttggctgcagccaagccccccacctcaatcttcacctccccctcagccgcatccgtgccacacctgcaggggcctcgtggacagtttcaataaggggttagaacgtaccatcagggacaacttcggcggcggcaacaccgcttgggaagaggagaacttgagcaaatacaaggacagcgagacccgcttggtggaagtcttggagggggtctgctccaagtccgactttgaatgtcaccgactgctagaactgtccgaggagctggttgagtcatggtggttccataaacagcaggaagctccagacctcttccagtggctgtgctccgatagtctcaagctgtgttgcccagcagggacctttggaccctcctgcttaccgtgccccggagggactgagaggccttgcggagggtacggtcagtgtgagggtgaagggacccgtggaggaagcggacactgcgactgtcaagcgggctatggaggcgaagcctgtggacagtgcggactgggttacttcgaagctgaacgaaacgcctctcacctggtttgcagcgcctgcttcggcccatgcgcacgctgttccggaccggaggagtccaattgcttacaatgcaaaaaaggatgggctctccatcacttgaaatgtgtggacattgacgagtgcggtacggaaggtgcaaattgtggagccgaccagttctgtgtgaacaccgagggaagttacgagtgcagggactgtgcaaaagcttgcctgggttgtatgggggctggtccaggtcgatgtaagaaatgttcaccaggttatcaacaagtcggatcaaaatgtctggatgttgatgagtgcgaaacagaggtctgtccaggggaaaataaacagtgtgaaaatactgaggggggatacagatgtatttgcgcagagggctataaacagatggagggaatttgtgtgaaagagcagataccggaatcagccggattttttagcgagatgactgaggacgagctagtcgtccttcagcaaatgttttttgggattattatttgcgctctggcaaccttggctgccaaaggagatcttgtgttcaccgccatctttattggagcggttgcagccatgacgggctactggctgtctgagcggtcagatagggtactggagggctttataaaagggcgttag

SEQ ID NO: 113539 - DNA, 1140 bp, synthetic construct
  misc_feature 1..1140: note = Description of Artificial Sequence: Synthetic coding sequence
  source 1..1140: mol_type = other DNA
atgtcttctcgtatagctagggcccttgccctagttgtcacactcctgcacctgactaggctcgctctctccacttgccccgccgcttgtcactgtcctctggaggctcccaagtgcgccccaggagttggcctagtgagggatggatgcggctgctgcaaagtgtgtgccaaacagctcaatgaggactgcagtaaaacacagccatgcgatcataccaagggcctagaatgcaattttggcgcctccagcactgctttgaaaggtatctgcagggctcagagcgaaggccggccatgcgagtacaacagcaggatctaccaaaacggggagtcctttcagcccaactgtaaacatcaatgcacatgcatagatggcgctgtgggatgtattccactgtgtccacaggaactcagcctgcccaatcttgggtgccctaaccctagactggtcaaggtcactggacagtgttgcgaggagtgggtgtgtgacgaggattccataaaagatcctatggaagaccaggatggcctccttgggaaggagctgggattcgacgcatctgaggtggaactgacaagaaacaacgagctgattgccgttgggaagggaagctctctaaaacggctaccagttttcggcatggagccgagaattctgtacaaccctctgcaggggcagaagtgtattgtgcagactactagttggagccagtgttccaagacctgtggcaccggtataagtactcgcgtgacaaatgacaatccagaatgcaggctcgtgaaggagacccgaatctgtgaagtcaggccgtgtgggcaacctgtgtacagttcactgaagaaagggaagaagtgctctaagacaaaaaagtcccccgagccggttaggtttacttacgcgggatgtctctccgtgaagaaataccgaccaaagtactgtggctcttgcgtggacgggagatgttgtacccctcagctgacgcggtgcgaagacgccgtgcccttaaggcgctggggtgacatattccaggaacggcatgacgatcctgtgaaatgtaattacaattgccctcacgcaaacgaggccgcatttccattctacagactgtttaatgatattcacaaattcagggactag

SEQ ID NO: 113540 - DNA, 1146 bp, synthetic construct
  misc_feature 1..1146: note = Description of Artificial Sequence: Synthetic coding sequence
  source 1..1146: mol_type = other DNA
atgagtagccgtatcgctagagctcttgccctagtcgtcactctcctgcacctcacaaggttggctctctcaacctgtccagccgcttgtcactgcccccttgaggcgccgaagtgcgctcccggagtagggctagtacgggatggttgcggttgctgcaaagtgtgcgccaagcagctgaacgaggattgcagcaaaacacagccttgcgatcacaccaagggcttagagtgtaatttcggtgcatcatctacagcgctgaagggtatttgccgggcccagagtgaaggtcggccctgtgagtacaactcaagaatatatcagaacggcgagtcgttccagccgaactgcaagcatcagtgtacctgcatagatggagcagtcggttgcatcccgctttgtccccaggaattgtcgctgcccaatctcggttgccccaacccgagactggtgaaggtcacaggccagtgttgtgaggaatgggtgtgcgacgaagattcaatcaaggacccaatggaggaccaggatggtcttctgggcaaggagttgggatttgacgcctctgaagttgaactcacaagaaataacgagctcatagcagtgggtaaaggctcctccttaaaacgactgcctgtattcggtatggagcctaggatcctgtacaaccccttgcaagggcagaaatgtatcgtgcaaacaaccagttggagtcagtgctcaaagacttgtggaacagggatcagcacgcgggtcaccaacgacaatcctgaatgcaggctggtcaaagagactagaatctgcgaggtgcggccctgcggccagcccgtgtacagttctttaaagaaagggaaaaaatgcagcaaaacaaaaaaaagccctgagcccgtgaggttcacctacgccggctgcttatcagttaaaaagtatagacccaaatattgcggtagctgtgtagacggccggtgctgcacgccccaacttacgaggacagtaaagatgcgctttcgctgtgaggatggcgaaaccttttcaaagaatgtgatgatgattcagtcttgtaagtgcaattacaactgcccccacgcaaatgaagccgcgtttcccttttaccgtttgttcaatgatatccacaagttcagggattag

SEQ ID NO: 113541 - DNA, 1074 bp, synthetic construct
  misc_feature 1..1074: note = Description of Artificial Sequence: Synthetic coding sequence
  source 1..1074: mol_type = other DNA
atgtcctccaggatcgcgagggcattggccctggtcgtaacactcctgcatctgaccagactggcgcttagcacctgcggttgctgcaaggtttgtgcaaagcagttaaacgaggactgcagcaaaacccagccctgtgatcacacaaaaggacttgagtgcaatttcggagctagctcgaccgccctgaaaggaatttgtcgcgcccaaagcgaaggacgaccatgtgagtataattccaggatttaccagaacggggagtctttccagccgaattgcaagcaccagtgtacctgcattgacggagctgtgggctgcattccgctttgccctcaggaactgagtcttcccaatctgggatgccccaacccacggctcgtaaaggtcaccgggcagtgctgcgaggagtgggtgtgcgacgaggacagtattaaagacccgatggaggaccaagacggcttgctgggaaaggagctcggcttcgacgcttccgaagtggagcttacaagaaataacgagctcattgctgtcggtaaggggtcatcattgaagcggctgcccgttttcgggatggagccacgcatcctctataatcctctgcagggccagaagtgcatcgtccagactacttcatggagccagtgttccaaaacctgtgggacaggaatcagtacgcgcgtcacgaatgataatccagagtgtcggctagtgaaagagaccagaatttgcgaagtgaggccgtgtggacagcccgtgtatagtagtctgaagaaagggaagaagtgttctaagacaaagaaatctccagaacccgtaagattcacttatgccggctgcctatctgtgaagaaataccgccctaagtattgtggatcctgcgtggacggacggtgttgtacaccacagttaacgaggacagttaagatgcgtttccggtgcgaagatggcgagaccttttcaaagaacgtgatgatgattcagagttgcaagtgcaattacaactgccctcatgcaaacgaagctgcgtttcctttctaccggttgtttaatgatatccacaaattcagggattag

SEQ ID NO: 113542 - DNA, 1014 bp, synthetic construct
  misc_feature 1..1014: note = Description of Artificial Sequence: Synthetic coding sequence
  source 1..1014: mol_type = other DNA
atggatgaaacaggaaatctgaccgtgtcatcggccacatgccacgacaccattgatgactttagaaaccaggtgtactctactctgtattctatgatcagtgtagtagggtttttcggaaacggattcgtgctgtatgttcttatcaagacataccacaaaaagagtgcattccaggtctacatgatcaatctcgcggtggccgatttattgtgtgtgtgtacactgccgctgcgtgttgtgtattacgttcataaagggatttggctgttcggtgatttcttatgcaggctgtctacgtacgccctttacgtcaatctgtattgctcaatcttcttcatgactgccatgtcctttttccgctgtatcgctatcgtatttccagtgcagaatatcaatctcgtaacccagaagaaggccagatttgtctgcgtgggaatctggatctttgtcatactcactagcagcccatttctcatggctaaaccgcaaaaggatgaaaagaacaacacaaaatgtttcgaacctccacaggacaatcaaacaaaaaaccacgtacttgtcttacattacgtgtctctgttcgttggttttattattcctttcgttattatcattgtatgttatacaatgatcattctaaccctgcttaagaaatcaatgaagaaaaatctgtccagtcataaaaaggccatcggcatgatcatggtggtaactgctgctttccttgtctcatttatgccttaccacatccaaagaactatccaccttcacttcttgcacaacgaaactaagccctgcgactctgtgttgagaatgcagaagtcagttgtcatcaccttgagcctagcagcaagcaattgttgcttcgacccgctcttgtacttcttttccggcggcaatttccgaaagcgcctgtctaccttccgaaagcattcactgtcctcagtcacatatgttcccaggaagaaggcgtcactccccgagaagggcgaggagatatgcaaagtttag

SEQ ID NO: 113543 - DNA, 1041 bp, synthetic construct
  misc_feature 1..1041: note = Description of Artificial Sequence: Synthetic coding sequence
  source 1..1041: mol_type = other DNA
atggagagaaaattcatgtcattgcagccatcaatatctgtgagcgagatggagccaaacggaacttttagtaataataatagccgcaattgcaccatcgaaaattttaaacgcgagttcttcccaatcgtgtacctgataatatttttctggggggtgctgggcaatgggctgtctatctacgtctttctgcagccatacaagaaatccacctcggtgaatgtcttcatgctgaacctcgcaatatcagatctcctgttcatctcaacactcccttttagagcagattactatctgcgagggagtaactggattttcggggatctggcatgcaggatcatgagctactcactgtatgtgaatatgtattcttccatttattttctcaccgtgctttctgtcgttcggttcctggcaatggtacacccatttcgcctgcttcatgtgacttcaattcgttctgcctggatactgtgtggcatcatttggatcctgattatggccagttctatcatgctgcttgacagtggatcagaacagaatggtagcgtcaccagttgtctcgagcttaacctgtataagattgctaaacttcaaacaatgaactatattgcactggttgtgggttgcctcctgcccttttttacgctctcaatctgctacctcctgattattagggtgctgctcaaagtggaagttcccgagtccggactccgtgtctcacaccgaaaggccctgaccacaattataatcactttaattatttttttcctgtgctttctgccatatcatacacttagaacagtgcacctcacaacctggaaggttggcctgtgtaaagataggctccataaggcattggtcatcactctggctctcgcagccgccaatgcctgcttcaatcctctcctatattattttgcaggggaaaattttaaagaccgactcaagtcggctctgagaaaggggcatccacaaaaagctaaaactaagtgtgtgttcccagtttccgtgtggctccgtaaagaaacccgggtgtag

SEQ ID NO: 113544 - DNA, 2181 bp, synthetic construct
  misc_feature 1..2181: note = Description of Artificial Sequence: Synthetic coding sequence
  source 1..2181: mol_type = other DNA
atggcagattccagtggacagcaggggaagggacggcgagtccagccccagtggtcacccccagccggcacccagccatgtagactacatctgtacaactctctgacacgtaataaggaagtcttcataccccaggacggaaaaaaggtcacctggtattgttgcggtcccactgtgtacgacgccagtcacatggggcatgcccggtcatacatttcattcgatattctgaggagagtgttgaaggattattttaaatttgacgtattttactgtatgaatataactgacatcgacgacaaaataataaaaagagcccgccagaaccatctctttgaacagtatagagaaaagcgacccgaagcagcacagctgttggaggatgtccaggcagcactcaagccattttcagtgaagctcaatgagaccaccgaccccgataaaaagcaaatgttggagagaattcaacacgcagtgcagcttgccactgagcctctcgagaaagctgtgcagtcgcgcctgacgggcgaagaggtgaatagctgtgttgaggtcctgctcgaggaggccaaggatctgctatcagattggttggactcaactctgggttgtgacgttacagacaacagtatattcagcaagctgcccaaattttgggaaggagattttcatcgggatatggaagctttgaatgtgttacctccagatgtgctgacccgtgtgtccgaatatgtgcccgaaattgtgaattttgtgcagaaaatagtcgataacggctatggttatgtgtctaacggtagcgtttatttcgacacagccaaattcgcttcttctgaaaagcactcctacgggaagctggtgcccgaggctgtgggagaccaaaaggccttacaggaaggcgagggagatttaagtatatctgccgacagactatcagagaagaggagccctaacgattttgccctttggaaagcctctaaaccgggtgaaccaagctggccctgtccctggggcaagggtagacccggatggcacattgagtgctccgccatggcaggtacgcttctgggagcctcaatggatattcatggtggcgggtttgacctgagatttcctcaccacgataacgagcttgcacagtctgaggcatacttcgagaatgattgctgggtccgatatttcttgcataccgggcacttaacaatagctggatgcaaaatgtctaagtcactgaagaattttatcaccatcaaggacgctttgaaaaaacactccgccaggcaactgcggctggcctttctgatgcacagctggaaagatacactggactactctagcaatactatggagtcggcattacagtacgagaaatttctgaatgaattcttcctgaacgtaaaggacattctaagagctcccgtggacattactggacagttcgaaaagtggggcgaggaagaagccgagctgaataaaaatttctacgataaaaagaccgctatccataaggcgctgtgtgacaacgtggacactaggactgtgatggaggagatgcgagccctcgtgagtcagtgcaatctctacatggccgctcgaaaggcggtacgcaagcgtcctaatcaggccttactagagaacatcgccctgtaccttacccacatgcttaaaatattcggggcggtcgaggaggattcatcactggggttcccagtgggcggccccggaacgagcctcagcctcgaggcaactgtcatgccctatctccaagtccttagtgagttccgcgaaggggtcagaaaaatagctagggagcagaaagtccctgaaatcctgcagcttagcgatgctcttagagacaacatcctgccagaattgggagtgagattcgaggatcacgagggacttcccaccgtcgtgaagctggtcgacagaaacactctgctgaaggaacgcgaggagaaacggagggttgaggaagagaagagaaagaagaaagaagaggccgcacggcgaaaacaagaacaagaggcagcaaaattggcaaagatgaagatccctccatctgaaatgttcctgtctgagaccgataagtacagtaaattcgacgagaacgtatcaatggtctgccctcatatgacatggagggccaaaagtagcgcgaaagggaagccccgcagttag

SEQ ID NO: 113545 - DNA, 2496 bp, synthetic construct
  misc_feature 1..2496: note = Description of Artificial Sequence: Synthetic coding sequence
  source 1..2496: mol_type = other DNA
atggccgactccagtgggcagcaggctcccgactaccgtagtattctgagtatttcagacgaggcagctcgcgcacaggctcttaatgaacacttgtccacaagatcctatgtccaggggtattcgctctcacaggctgacgtggacgccttccgacagctttcagcacctccggctgaccctcagctctttcacgtggccagatggttccgccacattgaagccttgctgggatccccatgtggcaaggggcaaccgtgtagactccaggccagtaaaggaagaagggtccagccacagtggtcccctccagccgggacccagccttgtcgccttcatctctacaactccctaactcgtaacaaggaagtgtttattccccaagatggcaaaaaagttacttggtactgttgcgggcccacagtgtatgatgcgagccatatgggacatgctcggtcatacatcagcttcgacatcctgaggcgagtactgaaagattacttcaagttcgacgttttctactgcatgaatatcaccgacatcgatgacaagattataaagcgcgctaggcagaatcatcttttcgaacagtatagagagaagcggcccgaagccgcccagctcttggaagacgtgcaggcggccttgaagccatttagcgtcaagttaaacgaaaccacagaccccgataaaaaacagatgttggagaggatccagcatgccgtccaactggccactgaacctctggaaaaggcagtgcaaagccgtctaaccggagaggaggttaattcctgcgtggaggtgctgctcgaagaggcaaaggatctgctgagtgactggctagacagcaccctggggtgtgacgtcaccgacaatagcatcttttctaaactccccaagttctgggagggagactttcaccgagacatggaggctcttaatgtgttgcctccagatgtcctgaccagagtgagcgagtacgtgccggagatcgtgaacttcgtacaaaagatcgtggacaatggatacggatatgtatcgaacggcagtgtctattttgacacagcaaagttcgcaagctcggaaaagcacagctacggaaagttagtgccagaggccgtcggtgaccagaaggcactgcaggaaggcgaaggggacttatcaatatccgcagacaggctctcagagaagagatccccgaacgacttcgccctatggaaagcctccaagccaggggagccctcttggccctgcccctgggggaagggcaggccgggctggcatatagagtgctcagcgatggcggggactctgctcggcgcttctatggacatacatggtggcggctttgacctgcgctttccacatcacgacaacgaacttgcccagtccgaagcctactttgagaacgattgctgggttaggtatttcttacacaccggccacctcaccattgctggctgcaagatgtctaaatccctgaagaattttatcaccatcaaagatgcgctcaaaaagcatagcgccagacagttgagacttgccttcctgatgcattcatggaaagacaccctagattactcgtccaacactatggagagcgccctccagtacgaaaaatttctcaatgaatttttcctgaacgtgaaggacatactgcgcgcgcctgttgatattaccggtcagttcgagaagtggggtgaggaggaggcagaactgaataagaatttttatgataagaaaacagctattcacaaggctctttgtgacaatgtcgacactcggaccgtaatggaagagatgagggcactggtgtcccagtgtaatctttatatggccgctcggaaggcagtgaggaagaggcccaatcaggctctattagagaacatagccctctatctcactcacatgctcaaaatcttcggcgccgtcgaggaggacagtagtctgggcttccccgtgggcggccctggcacgtctttgtctctggaagctactgtgatgccttacctacaagtgctgtcggagtttcgcgagggcgtgaggaagatagccagagaacagaaggtaccggagatattgcagctttctgacgccctgcgagataacatccttccagaattgggggtgcgatttgaagatcacgaaggccttccaacagtagtgaagcttgttgaccgtaacacacttctgaaggaacgggaggaaaagaggcgggtcgaggaagagaagagaaagaagaaagaggaggccgcaaggcgaaagcaggagcaagaggccgccaagctggccaagatgaagatccccccctccgaaatgttcctaagtgagactgataaatattctaaatttgacgagaacgggctccccactcatgacatggaaggcaaagagcttagcaagggccaggcaaagaaactgaaaaaactgtttgaggcccaggagaaactgtataaggagtatctgcagatggctcagaatggctcctttcaatag

SEQ ID NO: 113546 - DNA, 2247 bp, synthetic construct
  misc_feature 1..2247: note = Description of Artificial Sequence: Synthetic coding sequence
  source 1..2247: mol_type = other DNA
atggcagacagctccgggcaacaagggaaagggcgccgagtccagccacagtggagtcctcccgctggtacccagccatgccgcctccacctctacaactctcttaccaggaataaagaggtatttattccccaagatggcaagaaggtgacatggtattgctgcggacccactgtgtacgatgcaagccatatggggcacgctcgcagttatatcagtttcgatatcctgcgcagggtgctcaaggactattttaaatttgacgtcttctactgtatgaacattacagacatcgatgataagatcatcaaacgtgcccgacaaaaccatctgttcgaacaatatcgagagaagagaccggaagccgcccagctgctagaggatgttcaggcagcactgaaacccttctctgtcaagctcaatgaaacgactgacccagataaaaaacagatgcttgagcgaattcagcatgcagtacagttggctaccgaacccttagagaaagctgttcagagtcgcttaactggtgaggaggttaactcctgcgtggaggtgctcttggaagaggccaaagacttactgagcgattggctggactctacgctcggctgcgacgttactgataattccatattcagtaaactacccaaattttgggagggggatttccatagggacatggaggccctgaacgttcttccgccagatgtgctgactcgcgtgtctgaatacgtgcccgagattgttaactttgtacaaaagattgtagacaacggatacggatacgtgagtaacggctccgtctacttcgataccgccaaattcgcaagtagtgaaaaacattcctatggcaaactggtccccgaagcggtgggtgaccagaaggcactgcaagaaggagagggggacttatcaatcagtgctgatcgcctctcagaaaaacgctccccgaatgattttgcgttatggaaggcctccaagcctggcgaaccctcctggccttgtccatgggggaagggcagacccggatggcacatcgagtgcagcgcgatggcaggtacgctgttgggggcatctatggatattcacggcgggggcttcgacttgagatttccacaccatgacaatgaactagcacagtcagaggcctatttcgaaaatgactgttgggttagatactttctgcacaccggtcacttgacaatcgcagggtgcaagatgtccaaaagcctgaaaaatttcatcaccataaaggacgccctgaagaagcactctgctcggcagctgagactggctttcctcatgcactcctggaaggatactctcgattattcctcaaatacgatggagtctgcacttcagtatgagaaattcctcaacgaattcttcctcaacgtgaaggacatccttcgggctcccgtggacatcacaggccagtttgagaaatggggagaggaggaggctgaactcaacaagaatttttacgacaagaagaccgcaatacacaaggctctctgcgataacgtggacacacgcactgtaatggaggagatgcgggctttagtaagtcaatgtaacctttatatggccgcgagaaaggccgtacgaaaacgtcccaaccaagccttactggaaaacatcgctttatatctgactcatatgctaaagatattcggtgccgtggaggaagactcctcccttggatttccagtgggaggcccaggaaccagcctgagtctcgaagcaacagtgatgccatatctgcaggtgctgagtgaatttagagaaggagttagaaagatcgcccgtgaacaaaaggtgcccgaaattctacagctgtctgacgcactccgagataacattttaccagagctcggcgtgcgctttgaggaccatgagggtctccctaccgtcgtcaagctcgtcgacaggaacacactgctgaaagagagagaggagaaaagacgggtggaggaagaaaaaaggaaaaaaaaagaggaggccgctcgtaggaaacaagaacaggaggccgccaaactggccaagatgaaaatccctccctctgaaatgtttctttcagagacagacaaatattcaaaatttgacgagaatggcctgcctactcacgatatggaaggcaaagaactgagcaagggccaggcgaaaaagctgaagaagctgttcgaagcacaggaaaaactctacaaggagtacctccagatggctcagaatggcagctttcaatag

SEQ ID NO: 113547 - DNA, 2217 bp, synthetic construct
  misc_feature 1..2217: note = Description of Artificial Sequence: Synthetic coding sequence
  source 1..2217: mol_type = other DNA
atgcagactccaccactgcagcagcctcatcaggagcaagtgttcttagcgtttctggttatagtcattccctcttttctgaccaaagaagtattcattccccaagacggcaagaaggtcacttggtactgttgcggtcctactgtctatgatgcctctcacatggggcatgcaagaagctatatatctttcgacatcctgagaagggtcctgaaagactactttaagtttgatgttttttactgtatgaatataactgatattgatgacaaaataattaagcgcgctcgtcagaatcacctctttgagcagtacagagaaaagagaccagaggcagcacagcttcttgaagacgtgcaggctgctctgaagccctttagcgtcaaactcaacgaaactacagatcctgataagaaacaaatgctcgaacgaatccaacacgcggttcagctggctacagagccgttggagaaagccgtccaatcccgtcttacaggcgaggaagtcaacagttgtgttgaggttttgttggaagaagccaaagatctgctcagcgactggctggactctactctcggatgtgacgtgacggacaacagcatattctctaagctgcctaagttctgggagggtgactttcacagggatatggaagcgctaaacgtcctacccccagacgtgcttacacgggtctccgagtacgttcccgagatagtgaattttgtacagaagatcgtcgataacgggtatgggtatgtgtctaatggtagtgtgtacttcgacaccgcaaaattcgcatcctcggaaaaacactcctatggcaagcttgtgcccgaagccgtgggggatcaaaaggcccttcaggaaggagagggtgacctcagtataagcgccgatcggcttagcgagaagcggtcccctaacgacttcgctctgtggaaggcgtccaagcctggcgaaccctcctggccatgtccttgggggaaggggcgacctggttggcacatcgaatgtagcgccatggcaggcaccctgttgggcgcttccatggatatccatggtgggggctttgatctcagatttcctcatcacgataatgaactggctcagagtgaggcatattttgagaacgactgctgggtaaggtactttctccatactggtcatttgacaatagccggctgtaaaatgagtaaatccttaaaaaactttatcactattaaagatgcattaaaaaaacatagcgctagacagttgcgattggcgtttcttatgcattcatggaaagataccctggattacagctctaacacaatggaatctgcactccagtacgaaaagttcctgaatgagtttttcttgaacgtgaaagacatcctgagggctccagtcgatattacaggacagttcgagaagtggggcgaagaagaagccgaactaaacaagaacttttacgataagaagacggctatccataaggcgctgtgcgacaacgtggatacaagaaccgtgatggaggaaatgcgagccttagtgagtcagtgcaacctgtatatggctgcacgaaaggcagtgcgcaaaaggcctaatcaggcgctccttgaaaatatcgcactttatctcacccatatgttaaagatttttggcgcggtggaggaagattccagcctcggcttcccagtgggagggcctggcacatcgctgtctctggaggccactgtaatgccatacctgcaagttttgagcgaatttcgggagggtgtgaggaaaattgctcgcgaacaaaaggttccagagatcctccaactctctgatgctcttcgtgacaatattctgccggagttgggtgtgcgatttgaagaccacgaaggccttcctacggtagtcaaactcgtggaccggaacacgctactgaaggagagggaagagaagaggagagtagaggaggagaagagaaaaaagaaggaagaagctgctagacgaaagcaagaacaggaagccgctaagctcgcaaagatgaagatcccaccttctgagatgtttctgagcgagaccgacaagtatagcaaatttgatgagaacggattaccaacacatgatatggagggtaaggaactatcaaaggggcaagctaaaaagttgaagaagctgtttgaggctcaggagaagctgtacaaagaatatctccagatggctcagaatgggtccttccaatag

SEQ ID NO: 113548 - DNA, 2220 bp, synthetic construct
  misc_feature 1..2220: note = Description of Artificial Sequence: Synthetic coding sequence
  source 1..2220: mol_type = other DNA
atggaaccaaccagtggcccgtttaggacggacctcggctaccacctggtcggatgttcaagcggcaaaggaagaagagtgcagccacaatggtccccccctgcaggaacacagccatgcaggctccacctgtataactctttgacaaggaacaaggaagtgtttatccctcaggacggtaagaaagtgacatggtactgttgcggccctaccgtgtacgatgccagtcacatgggacatgcgcgaagctacatatcattcgatatcctgcgacgggtattgaaggactatttcaaatttgatgtgttttactgcatgaatataacagacatagacgacaaaatcatcaaacgcgcccggcagaatcatctgtttgagcagtacagggaaaagcggcccgaagctgctcagctgctcgaggacgtgcaggcggctctcaagcctttcagcgtgaaattaaacgagactactgacccagataagaagcagatgctggagaggattcagcacgctgttcaactggccacggagcccttagagaaagcggtgcagtctcggctaaccggtgaggaggtgaactcctgtgtggaagtgttgctggaagaggctaaagacctgctgtccgactggctagatagtacgttaggctgcgacgtgacggacaatagtatctttagcaagctgccaaaattttgggagggtgattttcacagggacatggaagccctgaatgttctccctccagacgtgctgaccagagtgtcagaatacgtgcccgagattgtcaatttcgtgcagaagattgtcgacaacggctatggatacgtatctaatggttccgtctacttcgacaccgccaaattcgcctcgagcgaaaaacatagctacggaaaactggtgccagaggctgtgggggatcagaaggcgctgcaagaaggagagggtgatctctccattagcgctgatcggttgtcggaaaaacggtcccctaatgacttcgccctgtggaaagcctcgaagccgggcgaaccgtcgtggccttgtccatgggggaagggtcgaccaggatggcacattgagtgctccgcaatggcaggcactctgctcggcgccagtatggacatccacggggggggtttcgacttgagattccctcatcatgacaacgagctggcccagtcggaagcctattttgaaaatgactgttgggtaaggtatttcttacacacgggacacctcactatcgccggttgcaaaatgtccaaaagcctgaaaaatttcatcaccatcaaggacgccttgaaaaaacacagcgcaagacagttgaggctcgcctttctgatgcatagttggaaggacacacttgactacagttccaatacgatggagagcgccctccagtatgagaagtttcttaatgaattttttctgaatgtgaaggacattctacgggctccagtcgatattacaggccaattcgagaaatggggtgaagaagaggccgaactcaataaaaatttctatgacaaaaagactgccatccacaaagccctttgtgataacgtcgatactcggacagtaatggaagaaatgcgagcattagtgagccagtgcaacctgtacatggctgcccggaaagctgtacgaaaacgtccgaaccaggctctgttagaaaacatcgctttatatcttacacacatgctgaagatcttcggagccgtggaagaggatagtagtctaggcttcccggtgggcggtccaggcaccagcctctcactggaggcaaccgtgatgccttacttgcaggtgctgtcagaattcagagagggggtgcgaaagatcgcgagagagcaaaaggtgcctgagattctgcagctgagtgatgcgttacgagacaacatcttacccgaattgggagttcgcttcgaggatcatgaagggttgcctaccgtggtgaaactcgtagaccgaaatactctattaaaggaacgcgaggaaaaaagaagggtcgaagaagagaagcgcaaaaagaaggaggaagctgcacgacggaaacaggagcaggaggctgctaagctggccaagatgaagatccccccttcagagatgtttctcagcgagacagacaaatactccaaatttgatgaaaacgtgagcatggtttgcccacacatgacctggcgcgcaaagtctagtgccaaagggaaacctcggtcgtag

SEQ ID NO: 113549 - DNA, 1695 bp, synthetic construct
  misc_feature 1..1695: note = Description of Artificial Sequence: Synthetic coding sequence
  source 1..1695: mol_type = other DNA
atgctccgtactactaggggccctggcctgggtcccccacttctccaagcagcccttggactgggtagagctggatggcattggcctgccggaagagcagctagcgggggacgggggcgcgcatggttgcagcccactggaagggagactggggtgcaggtctacaacagtctcactggaaggaaggagcccctgatcgtagctcacgccgaagcagcaagctggtatagttgtggcccaactgtgtacgaccacgctcatctgggacatgcgtgttcttacgtaagattcgacatcattcgacgcattctcactaaggtgttcggctgttctatcgttatggtgatgggaatcactgatgtggacgataagataatcaaacgtgcaaatgagatgaacatctccccagcatctttggccagcctgtacgaggaggactttaagcaagatatggcagccctcaaggtcctgcctccaacagtttatctgcgggttacagaaaacattccccaaattatatcttttatcgagggcatcattgcgcgaggaaatgcttattctactgccaaaggcaatgtatacttcgacctcaaatcacggggagataagtacgggaaattggtaggggtggtccctggaccagtcggagaacctgccgattccgataagagacacgcttctgacttcgccctctggaaagctgctaagccacaggaagtgttttgggcatcaccctgggggcccggcagacctgggtggcacatcgaatgctctgctattgcctcgatggttttcggttctcagctggacattcacagcggagggattgaccttgcctttcctcaccacgagaacgagattgctcaatgcgaagtcttccatcagtgcgaacagtgggggaactactttctccatagcggccacctgcacgccaaggggaaagaggaaaagatgtcgaagagtctaaagaactatattactattaaggatttcttgaagacatttagtcccgatgtgttcagattcttctgtctcaggtctagttacagaagtgccattgactactcagatagtgcaatgctgcaggctcaacagctcctgttggggctgggtagctttcttgaagacgcgcgggcctatatgaagggtcaactggcctgcggatcggtgcgggaggcaatgctctgggaaagattaagctccaccaagcgagcagtgaaagctgctctggccgatgacttcgacacaccaagggtggttgacgctatcttggggctggcccaccacggtaatgggcagctcagggcgagtctgaaagagcccgaagggcctagatcaccagcagtcttcggtgccatcattagttattttgaacagttttttgagaccgtcggcatttctctggctaaccaacagtatgtgtccggagatggatcagaggccacattacatggtgtggtggacgagctcgtccggtttagacagaaggtacgacaatttgctctggctatgcctgaggccaccggcgatgctcggcgccagcagctacttgaaaggcaacctctcttggaggcatgtgatactttaaggcgcggcctgacagcccacggcatcaatattaaagatagaagctctaccacctcgacgtgggagttattagaccaaagaacgaaagaccagaagtctgccggttag

SEQ ID NO: 113550 - DNA, 549 bp, synthetic construct
  misc_feature 1..549: note = Description of Artificial Sequence: Synthetic coding sequence
  source 1..549: mol_type = other DNA
atggtgttcggctcacaactggacatacactccggaggcattgacctcgcatttcctcaccatgagaacgagatagctcagtgtgaggtcttccatcaatgtgaacagtggggcaattatttcctacatagtgggcatctgcacgcaaaggggaaggaagagaagatgtccaagagcctcaaaaattatatcactattaaggactttctgaaaacatttagcccagatgttttcagattcttctgcctcaggtccagttaccgatccgcaatcgattattcagattccgctatgttgcaagcacagcagctgctgctggggttggggtcattcttggaggacgcccgagcctatatgaaagggcagctggcctgcggctccgtgagggaggcaatgctctgggagcggttgagctccacaaagcgggcagttaaggcagcactggcagacgacttcgataccccaagggtggtggatgccatacttggcctggcacaccacggaaacggacagttgcgcgcttccctgaagaagcctgggagcgcctag

SEQ ID NO: 113551 - DNA, 441 bp, synthetic construct
  misc_feature 1..441: note = Description of Artificial Sequence: Synthetic coding sequence
  source 1..441: mol_type = other DNA
atggcccagaagcgacccgcctgcaccctgaagcccgaatgcgtccagcagctgctggtttgttcgcaggaggccaagaagagcgcatactgcccatactcccattttccagtgggggctgctctactcacccaggaaggacgaattttcaaaggctgtaacatagaaaacgcttgttatcccctgggcatctgtgccgaaaggactgcgatccagaaggccgtgagtgagggttacaaggacttccgtgcaatagctatcgcctccgacatgcaagatgattttatctctccttgcggcgcgtgccgccaggtgatgagggagttcggaaccaattggccagtctacatgaccaaacctgatggtacatatatcgtgatgaccgtgcaggagctcctgccctcaagctttggccccgaggacttgcaaaagacacaatag

SEQ ID NO: 113552 - DNA, 687 bp, synthetic construct
  misc_feature 1..687: note = Description of Artificial Sequence: Synthetic coding sequence
  source 1..687: mol_type = other DNA
atgctgagccggtgtaggagtgggctcctccatgtcctggggctgtcttttcttttacagacacgcaggcccattctgttatgcagtccgcgcctgatgaagccactggtggtctttgtcctgggcggcccaggggcaggaaagggaacacagtgcgcccgcatcgtggaaaagtatggatatacccatctcagtgccggcgagctgctgagggatgagcgcaaaaatccagattctcagtatggcgaactgatcgagaagtacatcaaagaaggtaagattgtcccagtggagatcaccatttccctgctcaaaagggagatggaccagacgatggccgccaatgctcagaagaacaagttcttaatcgatggattccctaggaatcaagacaatctccagggatggaacaaaacgatggatggaaaggctgacgtgtcatttgtgctcttctttgattgtaataacgaaatctgtattgaacggtgtttagaaagagggaagtctagcggacgtagcgatgacaatcgtgaaagtctggaaaaaaggattcagacgtatctgcagtcaactaagcccataatagacctgtatgaagagatgggaaaggtgaaaaagatcgacgcctctaaatcggttgatgaggtgttcgatgaggttgtgcagatatttgataaggaggggtag

SEQ ID NO: 113553 - DNA, 540 bp, synthetic construct
  misc_feature 1..540: note = Description of Artificial Sequence: Synthetic coding sequence
  source 1..540: mol_type = other DNA
atgttatcgcgttgcaggtccggtttgctgcacgtgctaggactgtcgtttctgctccagactaggagacctatcctgctgtgctctccacgactcatgaagcctctggtggtgttcgtattgggcggccccggcgccggtaaaggtacccagtgcgcccgtattgtggaggaaatggatcagaccatggcagcaaatgctcaaaaaaataagtttctaatagacggctttccaagaaatcaggataatcttcaaggatggaataaaactatggatggaaaggctgacgtcagctttgtgctattttttgactgcaataacgagatctgtattgaacgatgtctggagcgcggcaaatcatctgggcgaagcgacgataatagagagagcttggagaaaaggatccagacttatttgcagagcacaaagccaattatcgatttgtatgaggagatggggaaggtgaagaagattgacgcatccaaaagtgttgatgaggtgtttgacgaagtagtgcagatcttcgacaaagaggggtag

SEQ ID NO: 113554 - DNA, 1230 bp, synthetic construct
  misc_feature 1..1230: note = Description of Artificial Sequence: Synthetic coding sequence
  source 1..1230: mol_type = other DNA
atggctttcgcacgccgtctcttaagaggaccacttagcggtcccctgttgggacggaggggtgtttgcgccggcgcaatggccccaccgaggcgttttgtgctcgaacttccagattgtacactcgcgcactttgctctcggggccgatgccccaggcgatgccgacgccccggatcctaggctagcggccttgctaggacccccagaaaggtcctacagcctctgcgtgccagtgactcccgatgcagggtgtggtgctcgcgtgcgtgccgcccgtctgcaccagaggctgttacatcagctacgccgggggccattccagagatgccagcttctccggctgctgtgctactgccctggtgggcaagctgggggcgctcagcaggggtttctgctgagggatcctttagacgaccctgacacgcgtcaggccctcctagagcttcttggtgcatgccaggaggcaccaagaccccatttaggcgagtttgaggcagaccctaggggccagttgtggcagcgtctgtgggaggtccaggacggaaggagactccaggtcggctgcgctcaagtggtccctgtgccagaaccccctctacatcctgtggtgccagatctaccatcgtccgtcgtgtttcctgatagggaggctgcgcgagccgtcctggaagaatgcacatcattcattcccgaggcccgagctgtcctggacctggtggatcaatgccctaagcagatccagaaagggaagtttcaggtggttgcaatcgagggacttgatgccaccggcaagaccaccgttacccagagcgtagccgatagcctgaaagcagtattactgaagtcccccccaagctgtatcggacagtggcgaaagattttcgatgatgagccgacgatcattagacgagccttctattccctgggcaattacatcgtggcaagtgaaatcgccaaagagtcagcaaagagtccggtcattgtggatcgttactggcacagtacagccacttacgcaattgcaacagaagtgtctggaggcctgcagcacctgccacccgctcaccaccccgtctatcagtggcccgaagacttgctcaagcccgaccttatcctgctgctgactgtctcgcctgaggaacgtctgcagagactgcaggggcgcgggatggaaaaaactagagaggaagcggagttggaagctaactcagtgttcaggcaaaagtag

SEQ ID NO: 113555 - DNA, 1350 bp, synthetic construct
  misc_feature 1..1350: note = Description of Artificial Sequence: Synthetic coding sequence
  source 1..1350: mol_type = other DNA
atggcttttgccagaaggctgctaagaggtcccctgtccggccctctgctaggacgaaggggtgtctgcgcgggagctatggccccacccaggcgctttgtcctcgaacttccggattgcacactggcccactttgccttaggggctgatgcccccggagatgccgatgctccagaccctcggctcgctgccttgcttggaccacctgaaaggtcttactccctgtgtgtacctgtgactccagatgcgggttgtggggctagagtgcgcgctgcgaggctccatcagcgcttactgcatcaattacgtcgaggaccttttcagcgatgtcagctgctgcgcctgctgtgttactgtccagggggacaggccggaggtgcacagcaaggcttcctcctccgcgaccccctcgacgaccctgatactcggcaggcgctcctggagctgctgggtgcttgccaggaagccccccgcccccacctcggggaatttgaagccgatccccgggggcagctctggcaacgcctctgggaagtacaagatggccggcggctgcaggttgggtgtgcgcaagttgttcccgtacccgagccccctctgcaccccgtggtgcccgatctgcctagttctgtggtcttccccgatagagaagccgcccgggccgtgctggaggaatgtacttcttttattcccgaggcgcgcgccgtgctcgatctggtcgatcagtgcccaaagcaaattcagaagggtaaattccaggtggtggcaatagaggggctggatgccacgggtaaaaccaccgtgactcaatcagttgctgatagtttgaaggccgtcttgctcaagagcccaccatcgtgtataggacaatggcgaaagatttttgacgacgaacctacaatcatccgtcgggcattctattcgctgggaaactatatcgtcgcctccgagattgcaaaggagtctgccaaatcccctgtgatcgttgatcgctactggcattcgacggctacttacgctatagcaacagaagtctccggcgggttacagcatcttccccccgcacaccatccggtgtatcagtggcccgaggatctactaaaaccggatttaatccttctcctgacggtgtcgcctgaggaacgcctgcagagattgcaaggcagagggatggagaaaactcgcgaagaggctgaattagaggccaatagtgtgtttcgccagaaagtcgagatgtcgtaccaacgtatggagaaccctgggtgtcatgtagtggacgccagcccgtcccgggaaaaggtgttgcagacggtcctctcgttaattcaaaactctttctctgaaccatag

SEQ ID NO: 113556 - DNA, 1101 bp, synthetic construct
  misc_feature 1..1101: note = Description of Artificial Sequence: Synthetic coding sequence
  source 1..1101: mol_type = other DNA
atggcctttgcaaggagactactgcggggccccctgtccggtcctctcctggggcggcggggggtgtgtgcaggcgctatggctcctccaagaaggttcgtactggagctccccgactgtactttagcccactttgctctgggtgcagatgctccaggcgacgctgacgcccccgatcctaggctggccgctctcctgggaccgccagaacgtagttatagtctatgtgtgccagtgactccagacgccggctgcggagctcgggtgagagccgcccggctgcaccagcgcctcctgcaccaactgaggcgcggccccttccaacgctgccagctgctgcggttattatgctactgcccaggcgggcaagccgggggggcccagcagggctttcttttgcgggacccactggatgaccctgatacaagacaggcactgctggagctgctgggggcctgtcaggaggcccctcgaccgcacctgggcgagtttgaagccgatcctcgaggtcagttgtggcagagactgtgggaggtccaggacggcaggagattgcaggttggctgcgctcaggtcgtacccgttccagagccccccctccaccccgtggtgccagacctaccctccagcgtagtttttccggatcgggaggcagcacgagcagtcttagaagagtgcacgagtttcatcccggaggcccgcgcagttctggatttggtggatcaatgccctaaacagatccagaaggggaagttccaggtggtggctattgaagggctggatgcaacaggtaaaacaaccgtaacccaatcagttgcagactccctgaaggccgtgctgttaaagtcccctccaagctgcattggacagtggcggaagatcttcgacgacgagcctacaattataagacgcgccttctactctcttggaaattacatcgtcgcaagtgaaatcgcaaaagagtctgctaagtctcctgttatagttgacaggtcccagctcggcggaactttatatcacccctctcttcacctgcttgggagtgaagtctgcgggaccggcattttagacagcagtcatagttcacagggcctagaatag

SEQ ID NO: 113557 - DNA, 813 bp, synthetic construct
  misc_feature 1..813: note = Description of Artificial Sequence: Synthetic coding sequence
  source 1..813: mol_type = other DNA
atgggcaacacgagttcagagagggccgccttagaaaggcacggcggccacaagacaccccggagggattcctccggagggactaaggatggcgatcgcccaaagatactgatggattcccctgaggatgcggacctgttccatagcgaggagattaaggccccagagaaagaggaattcctggcgtggcaacatgacttggaagttaacgacaaggccccagcccaggccaggcctactgtgttccgctggacgggaggtggaaaggaggtgtatctaagtgggtccttcaataattggtctaagttaccgctgacacgaagtcataacaacttcgtcgccatattggatctgcctgaaggcgaacaccagtataaatttttcgtcgatggccagtggacccacgacccctctgaacccatagtcacctcccagctcgggaccgtgaataacatcattcaggttaagaagacagacttcgaggtcttcgacgcacttatggttgacagtcagaagtgcagcgacgtgtctgagctgtcctcttctcccccagggccttaccaccaggaaccttacgtctgtaaaccagaggagcgattccgggctccccccattctgcccccgcaccttctccaggtgatccttaataaggacacagggatttcctgcgaccctgcactgctgcccgagcccaaccacgttatgcttaatcacttatacgccctctctattaaggacggagtgatggttctgtcagccacgcaccggtacaaaaaaaagtatgttaccaccttactgtataagcccatttag

SEQ ID NO: 113558 - DNA, 588 bp, synthetic construct
  misc_feature 1..588: note = Description of Artificial Sequence: Synthetic coding sequence
  source 1..588: mol_type = other DNA
atgggccagatagaatgggctatgtgggccaatgaacaggccctggcctccggtttaatactcatcactggcgggattgtggctactgccggccgattcacccaatggtatttcggcgcatactctattgtagcaggcgtttttgtatgcctgctcgaataccccagagggaagcgaaaaaagggaagcactatggagaggtggggccaaaagtatatgactgcagtcgtcaagcttttcggtcctttcactaggaactattatgtaagagcggtgcttcacctgctgttaagcgtgcctgctggctttctgttggctacaatcttgggcacagcttgtcttgccattgcatcaggcatctatctgctggctgcagttaggggtgaacagtggacccctatcgaaccaaaaccacgagagcggcctcagatcgggggtaccattaagcaacccccctcaaatcctcctcctaggccccctgccgaggcaaggaagaagccctccgaagaggaagcagcggtagccgccggcggccctccaggaggacctcaggtcaacccaattccagtaacagacgaagtcgtgtag

SEQ ID NO: 113559 - DNA, 1713 bp, synthetic construct
  misc_feature 1..1713: note = Description of Artificial Sequence: Synthetic coding sequence
  source 1..1713: mol_type = other DNA
atgggcaactgggcggtaaatgaggggctgtctatttttgtaattctcgtatggctgggtctcaacgtgtttcttttcgtgtggtattaccgcgtttatgatatcccccctaaattcttctatacaaggaaactactcggaagtgccctcgccttagccagagcccctgccgcctgcctgaactttaactgcatgctcattttattgcctgtttgcagaaacctgttaagtttcctgcggggcagctcggcctgctgcagcacaagggtgcgtcggcaattggaccgcaatcttactttccataagatggtcgcctggatgattgccctccactctgctattcacacaatcgcccacctcttcaatgttgagtggtgtgtgaacgccagagtcaacaacagtgacccttattccgtggctctgtccgaattgggagacagacagaacgagtcatacttgaattttgcacgaaaacgaatcaagaatcctgaaggaggcctgtacctcgcggtgactctccttgcaggaattacaggggtggtgatcaccttatgtctgatcctcattatcacgtcttctaccaagaccattaggagatcttatttcgaagtgttctggtatactcatcatctttttgttatcttcttcatcggcctggcaatacacggtgcagaacgcatagtgcgggggcagaccgccgagtctttggccgttcacaatatcacagtgtgtgagcagaaaatctctgagtggggcaaaatcaaggaatgtccaattccacagttcgccggtaacccacccatgacctggaagtggatcgtcggacccatgtttctgtacctgtgtgaaaggcttgtgcgtttctggcggtcccagcagaaggtggtcataactaaagtggtgacccaccctttcaagacaatcgagctgcagatgaagaagaaaggcttcaagatggaggtcgggcagtatatctttgtgaaatgcccaaaggtgtctaaacttgagtggcatccgtttaccctgacctctgccccagaggaagatttctttagcatccacattaggatcgttggagattggacagaagggctgttcaatgcgtgcggatgtgacaagcaggaattccaggacgcatggaagctgccgaaaatcgccgttgacgggccgtttggtactgcgagtgaggacgtgttttcctatgaagtggtgatgcttgtaggggcaggcattggtgttacccctttcgcgagcatacttaaatcagtttggtataagtactgcaacaacgcgacaaacctgaaactcaaaaaaatttacttctattggttatgccgcgacacgcacgcttttgagtggtttgccgacctacttcagctgcttgagagccaaatgcaagaacggaataacgctgggttcctgagttataatatttatctcaccgggtgggatgaatctcaggcgaaccacttcgctgtgcaccatgatgaggaaaaggatgtcataactggacttaagcagaaaactctttacggccggcccaactgggataatgagtttaagaccattgcatcccagcaccccaacactcgcatcggtgttttcctctgcggtcccgaggctcttgcagagaccctcagcaaacagagcatcagcaactcggagtctgggcccagaggtgtccactttatttttaacaaagagaacttctag

SEQ ID NO: 113560 - DNA, 912 bp, synthetic construct
  misc_feature 1..912: note = Description of Artificial Sequence: Synthetic coding sequence
  source 1..912: mol_type = other DNA
atgacttggaaatggattgtgggtcccatgtttctctatctgtgcgaacgcctggtccgcttttggcggtcccagcagaaggtggtgatcacaaaggttgttacccacccgtttaagactatcgaactgcagatgaaaaagaaagggttcaagatggaagtaggccagtatatcttcgtgaaatgtcccaaggtgtcaaaattagaatggcatccattcactttaacctctgcacccgaggaggactttttctctatacacatccgcatcgtgggagattggaccgaaggcttgttcaatgcgtgcggatgcgacaagcaggagtttcaggatgcctggaagttgcctaagatagcagtagatggcccgttcggaaccgccagcgaagatgtttttagctacgaggtggtgatgctggtgggagccggcatcggcgttacgccatttgcttctatcctaaagagtgtgtggtacaaatattgtaataacgcaactaacttgaagctgaaaaagatctacttttattggttgtgtcgagatacccacgctttcgagtggttcgccgacctgctgcagctgctggaatcccagatgcaggaacggaataacgcaggattcctgtcctacaatatctatctcaccgggtgggatgaatctcaagccaaccatttcgctgtgcatcacgacgaagagaaggacgtcattactggactgaaacagaaaaccctgtacggaagaccaaactgggataatgagttcaagaccattgcgagccagcacccaaatacccggattggagttttcctctgcggaccagaggcactggccgaaaccctgtccaagcagtctatctccaactctgagtcaggtccccggggggttcactttattttcaacaaagagaacttttag

SEQ ID NO: 113561 - DNA, 1617 bp, synthetic construct
  misc_feature 1..1617: note = Description of Artificial Sequence: Synthetic coding sequence
  source 1..1617: mol_type = other DNA
atgggcaattgggcggtgaacgagggtctttccattttcgtcataagtgccttggctttggcgcgggcacccgctgcatgtctgaattttaactgtatgttgattctgttgcccgtgtgcaggaacctgctgagttttcttcgtggctcctccgcatgttgtagcacccgggtacggcgccaactggaccggaatcttacttttcataaaatggtggcctggatgatagccttgcatagcgccatccacaccatcgcccacctctttaacgtcgagtggtgcgtgaacgctcgtgtgaacaacagtgatccctactccgtcgctctttctgagttgggagacaggcagaatgaatcatatctgaacttcgcacgtaagcggatcaagaatcctgagggaggtctgtatctggctgtcaccctactcgctgggattacaggcgtggtaatcactctatgcctgatcctgatcatcactagctctaccaaaaccatccggcgctcatacttcgaagtattctggtatacccatcacctgttcgtcattttttttattggactcgcaattcacggcgccgaacgcatagttcggggccaaaccgcggaaagcctcgccgtccacaatataaccgtctgcgagcaaaagatttcagaatggggaaaaattaaggaatgtccaataccacagttcgccggaaacccccctatgacttggaagtggattgtcggacccatgttcttgtacctgtgcgagagactggtgcgattttggagatcacagcagaaggtcgtgatcactaaggtcgtgacccatccattcaaaactatcgagttgcaaatgaagaagaaaggtttcaagatggaggtgggacaatatatattcgtcaagtgccctaaggtgtctaaactcgaatggcacccttttaccttaacttccgctcccgaggaggacttcttctctatccacatcagaatagtaggagactggacagagggcctgtttaacgcatgtggctgtgacaagcaggagtttcaggatgcatggaagcttccaaagatagctgtcgacggtcctttcggtacagcctctgaagacgtttttagctatgaggtggtgatgctcgtgggggctggaatcggtgttacaccatttgcttcaatcctcaagtctgtgtggtacaagtactgcaataacgccacaaatctaaagctaaagaaaatttatttctattggctctgccgcgacacccacgccttcgaatggtttgccgacctgctccagcttctggaaagtcagatgcaggaacgaaataacgccgggtttctgtcatataacatttacctgactggatgggacgaaagtcaagctaatcatttcgccgtgcaccacgacgaggagaaagacgttataacaggcctcaagcagaagacgttatacgggaggccaaactgggacaacgaatttaagacgatcgccagccagcatcccaacacccgaatcggagtgtttctgtgcgggcccgaagccctggccgaaactttgtccaaacagagcatctctaattccgagtccggtccccggggggttcatttcatctttaacaaggagaacttttag

SEQ ID NO: 113562 - DNA, 714 bp, synthetic construct
  misc_feature 1..714: note = Description of Artificial Sequence: Synthetic coding sequence
  source 1..714: mol_type = other DNA
atgaattctcggcggcgggaaccaattaccttgcaggaccctgaggccaaataccctctgccactcatcgagaaagaaaaaattagtcataatacaagacggtttcgcttcggtctaccctctccagatcatgtgctcggcttgccagtcgggaattatgttcagctcctcgccaagattgataatgaactcgtagttagagcttacacccctgttagttctgacgacgatcgcggtttcgtggacctgatcatcaagatttactttaaaaacgtgcatccacagtaccccgagggcggcaagatgacacagtatttggagaacatgaagattggcgagacaattttcttccgcggacccagaggacggctcttttaccatggccctggtaatttaggaataagaccggaccagaccagcgagcccaagaagacgttagccgaccaccttgggatgattgcaggcggcactggaatcacaccaatgttgcagctgatccggcacatcactaaggatcccagtgataggacccgcatgagtctgattttcgcaaaccaaaccgaagaggacatcctcgtgcgcaaggaactggaggaaattgcaaggacacaccccgaccagtttaatctctggtacaccctggatcggcctcctattgggccatggtcggctgagggtgccacccttttgtccaattcagcgcaatttcattag

SEQ ID NO: 113563 - DNA, 831 bp, synthetic construct
  misc_feature 1..831: note = Description of Artificial Sequence: Synthetic coding sequence
  source 1..831: mol_type = other DNA
atgaatagcaggagaagagaaccgatcactctgcaagatcccgaggccaaatacccgctgccattgattgagaaagaaaaaatctcacacaacacacgccggttccgtttcggcctgcccagcccagaccatgtccttggcttaccggttggaaattacgtgcagctgctggctaaaattgataacgaattggtggtccgggcttatacccccgtgtcctccgatgacgaccggggctttgttgatctaatcattaaaatttacttcaaaaatgttcacccccagtatcctgaaggaggtaaaatgacccagtacctggaaaacatgaagattggggaaacgatcttttttcgggggcccagagggagactcttttaccacggtcctgggaatctgggcattaggccagaccagacctctgagccaaagaaaaccttagccgatcacttaggcatgattgcaggtgggactggtattacacccatgctccaactcatcaggcatataacaaaagatcctagcgatagaacacggatgtccttgatcttcgctaaccagactgaagaagacatccttgtccggaaagagctggaggagatcgctagaacacatcctgatcagttcaacttgtggtatacactcgaccgcccccctattggctggaaatattcctccggcttcgtgactgccgatatgatcaaagagcaccttccacctcccgccaaatcgactctcatcctcgtgtgtggaccacctcccctgatccaaacagcagcccatcccaacctggagaaacttggctacactcaggatatgatctttacgtattag

SEQ ID NO: 113564 - DNA, 351 bp, synthetic construct
  misc_feature 1..351: note = Description of Artificial Sequence: Synthetic coding sequence
  source 1..351: mol_type = other DNA
atgaactcgaggcgacgggagcccatcacactgcaagaccctgaggcaaagtacccattgcctctcattgagaaagagaagatctcccataatacaaggaggtttaggttcggcttaccctcgccggatcacgtcctgggcctacccgtcggcaactatgttcagttgctggccaagattgataacgagctggtagtccgggcgtatacacctgtgtccagcgacgacgacaggggattcgtagatttgatcattaaaatctactttaagaacgtgcacccccaataccctgagggcggcaagatgacacagtatctggagaatatgaagataggcgagaccatcttctag

SEQ ID NO: 113565 - DNA, 714 bp, synthetic construct
  misc_feature 1..714: note = Description of Artificial Sequence: Synthetic coding sequence
  source 1..714: mol_type = other DNA
atgaacagtaggcgcagagagcctataacgctccaggacccggaagcgaagtatcctctccccctgatcgagaaggaaaaaatctctcataacaccagacgctttcggtttggcctgccatctccagatcatgttctggggctcccggtagggaactacgttcaactgctcgcaaagattgacaacgagcttgttgtcagagcatacacaccagtctcgagcgatgatgacaggggttttgttgacctgattattaaaatctactttaagaacgtgcatccacagtatccagagggtggcaagatgacacaatatctcgaaaacatgaaaatcggcgagaccatcttttttcgcggccccaggggcaggctcttttatcacggcccagggaacctggggattcgcccagaccaaacatctgagcccaagaagaccttagcagatcatctgggaatgatcgctggtggaaccggcattacacctatgctgcaactcatccggcatattaccaaggatccatccgaccgcactaggatgagtctgatctttgccaatcagacggaggaagatatcctggtgcggaaggagctggaagaaatcgcccggacacatcccgaccagtttaacctctggtacaccctggacagaccgcctatcggaccatggagcgccgaaggggccacgctgctctctaactctgctcagtttcattag

SEQ ID NO: 113566 - DNA, 441 bp, synthetic construct
  misc_feature 1..441: note = Description of Artificial Sequence: Synthetic coding sequence
  source 1..441: mol_type = other DNA
atgaattctaggcggcgagaaccaatcacgctccaggacccagaggctaagtacccgctccctcttattgagaaggagaagatttctcataacacacgccggtttcgatttggccttcccagccccgaccacgttctcggactgccggttggcaactacgtgcaactcttagccaagatcgacaacgaattggtcgtgcgagcctatactccggtgtcctcagatgatgatcgggggttcgtagacctaatcatcaagatatacttcaagaacgtgcacccccagtaccctgagggcggcaaaatgacgcagtacctggagaacatgaaaataggagaaaccatcttttttaggggtccgcgaggccgcctgttctatcatgggcctggcaatttaggtattagaccggaccagacttcggagccaaagaaaacactgtag

SEQ ID NO: 113567 - DNA, 516 bp, synthetic construct
  misc_feature 1..516: note = Description of Artificial Sequence: Synthetic coding sequence
  source 1..516: mol_type = other DNA
atgaattccaggaggcgcgagccaatcaccctgcaggacccagaggctaaataccctcttcccttaatcgagaaagagaaaattagtcataacactcgtagattcaggtttggcctgccttccccggaccatgtactgggcctgccagtgggcaattacgtgcaactgcttgcgaagatagataacgagcttgtcgtgagagcctatacacccgtatcatctgatgacgacaggggctttgtggatctcatcatcaagatctacttcaaaaacgtgcacccacagtaccccgaaggcggcaagatgacccagtacttggagaatatgaagatcggggagacgatattctttagagggccccggggtaggttattttaccacggacctgggaacctgggaatcagacctgatcagacatccgaacctaagaaaacgctggctgaccacttggggatgattgccgggggaaccggcatcacacccatgctgcagctcatccggcatataacgaaatag

SEQ ID NO: 113568 - DNA, 831 bp, synthetic construct
  misc_feature 1..831: note = Description of Artificial Sequence: Synthetic coding sequence
  source 1..831: mol_type = other DNA
atgaacagccggcgtagagagcctatcactctgcaagatccagaggccaaatatccactacccctgatcgaaaaggagaaaatatcccataacacaaggcggttcaggttcggtctgccaagtcctgaccatgttcttgggctgcctgtcgggaattatgtgcagttgcttgctaaaattgataatgaactggtggtccgcgcttacactccagtatcctctgatgacgaccggggatttgtggatcttatcattaagatatattttaaaaatgtccacccccagtatccagagggcgggaagatgacccaatacctcgaaaatatgaagatcggggagaccatattctttagaggccctcgcgggcgacttttctatcatggacctggcaatctgggcatccgacctgaccagacctctgaaccgaagaagactctggccgaccatctgggtatgatcgctggcggaactggcattaccccaatgttacagctaataagacatattacaaaagatccctcagatcgtacgcggatgtcactgatcttcgctaatcagacagaggaggacattctcgtccgcaaagagctggaggagatcgccaggactcacccagatcagttcaacctgtggtacaccctggataggcctcccattggttggaaatactcctcgggattcgtaaccgccgatatgattaaggagcacttaccacctcccgccaagtctacgctgattctggtctgtgggccccctcctttaattcagaccgcagcacatcccaatctggaaaaactgggctacacacaggatatgatcttcacttactag

SEQ ID NO: 113569 - DNA, 906 bp, synthetic construct
  misc_feature 1..906: note = Description of Artificial Sequence: Synthetic coding sequence
  source 1..906: mol_type = other DNA
atgggggcccagttaagcactcttggacacatggtcctgttccctgtatggtttctctattctcttctaatgaagctttttcagagaagcactcccgccatcacactggagagtcctgatattaagtatcccctgaggctaattgatcgagagatcatctctcacgacacccggcggttcaggttcgccctcccctccccccagcatatactgggtttaccagtgggacagcacatatacctgtcagcacggatcgatggcaatcttgtggtgagaccctatacgccaattagtagcgatgacgataagggattcgtggacttggtcattaaagtctattttaaggacacacacccaaagttcccagctggaggcaagatgagccagtatctggaaagcatgcagattggtgatacaatcgagttccgcggtccatcagggcttctggtatatcaaggcaaaggaaagtttgccataaggccagataagaaaagtaatcctataatccgtaccgtgaagtccgtcggcatgatcgcaggggggactggcattacaccgatgcttcaggtaattcgagccatcatgaaggaccctgatgatcatactgtttgccacttactgtttgcgaatcaaaccgagaaggatattctgctccggccggaacttgaagagctgcgcaataagcattccgccagattcaagctttggtatacattggatcgggcacccgaggcctgggattacggtcagggattcgtgaatgaggagatgatcagagatcacctgcctcctcctgaggaagagcctttggtgttgatgtgcggccctccgcccatgatacagtacgcatgccttcctaacctggaccatgtaggtcaccctaccgaaagatgcttcgtgttttag

SEQ ID NO: 113570 - DNA, 1005 bp, synthetic construct
  misc_feature 1..1005: note = Description of Artificial Sequence: Synthetic coding sequence
  source 1..1005: mol_type = other DNA
atgaacagatccctccttgtaggatgcatgcagagcaaagacatctggggcagggaggagtctatctgtgagaggctgaaacaggacgggctggacgtggaacgagccgaatcctgggagcttggacatatggtgctctttccggtgtggttcctgtatagtctcctgatgaagctgttccagcggtcaacacccgctatcaccttggagagcccagacatcaagtaccctttacgactcatcgatcgggagataatcagccacgacacccggcggttccggttcgccctgccctcaccacagcacatcctgggcctgccggttgggcagcatatctatctgagtgcccgcatcgacggtaatctggttgtgcgtccatataccccaatttcatccgacgacgataagggcttcgtggacctcgttataaaggtatattttaaggacactcacccaaagtttcccgcaggcggaaaaatgagccaatatctcgaaagcatgcagatcggtgacacaatcgaatttcgtggacctagcgggctgctcgtctatcagggaaagggcaaattcgctatcagaccagacaaaaaatcaaacccaatcatccggaccgtgaagtccgtcggcatgatagcaggtggcacaggcatcactccaatgctgcaggtgatcagagctatcatgaaggaccctgacgaccataccgtgtgtcacctgttgttcgctaatcaaacagaaaaagatatcctcttgcgtcctgagcttgaagaactgcgaaataagcacagcgcacgatttaagctctggtacacactagaccgggctcccgaagcctgggattatgggcagggcttcgtaaacgaggagatgattcgagatcacctcccaccgccagaggaggagccgctggtactgatgtgcggaccgccgccaatgattcagtatgcatgcctgcctaacctggaccacgtcgggcaccctacagagaggtgttttgtattctag

SEQ ID NO: 113571 - DNA, 837 bp, synthetic construct
  misc_feature 1..837: note = Description of Artificial Sequence: Synthetic coding sequence
  source 1..837: mol_type = other DNA
atgaaactttttcagcggtctacacccgcaataaccttggaatccccagacattaagtatcctttaagactcatagatcgggaaataatctcccacgatacaaggaggttcagatttgctctgccatctcctcagcacattctgggcttacccgtgggtcagcacatctacctctctgccaggatcgatggtaacctggtcgttagaccttataccccaatatcaagcgacgatgacaaaggattcgtggatctggtgataaaagtgtacttcaaagacacgcatcctaaattccccgccggcggaaaaatgagccagtatcttgaatccatgcagataggagacacaattgagttcagagggccatctggcctgcttgtgtaccagggtaaagggaagttcgccattcggccagacaagaaatctaacccgataatccgcaccgtcaagagtgtaggtatgatcgccggggggacgggcattacacccatgcttcaagtgatcagagccattatgaaggatcccgacgaccatactgtgtgccatcttctcttcgctaatcaaaccgagaaggacatcctgctccgccccgaactggaagagttaaggaacaagcattctgctcggttcaagttgtggtacacattggaccgggctcccgaagcctgggattatgggcaggggtttgtgaatgaggaaatgattcgagaccatctgcctccaccggaggaggaacctttagtcctgatgtgcggcccacctcctatgatccaatatgcctgtttgccaaatctggatcatgtagggcatccaaccgaaagatgtttcgtcttttag

SEQ ID NO: 113572 - DNA, 837 bp, synthetic construct
  misc_feature 1..837: note = Description of Artificial Sequence: Synthetic coding sequence
  source 1..837: mol_type = other DNA
atgaaactcttccagagaagcacgccagcaatcacgctggagagtcctgatatcaagtaccccttacgccttattgatagggaaataatttcccacgacacccgacgcttcagattcgccctccccagcccacaacacatcctcggcctcccggtaggacagcacatctacctgtctgccaggatagatggaaacttagtggttcggccctacactcccatctcctctgatgatgacaagggctttgtagaccttgtgatcaaagtatacttcaaggacacgcatccaaaatttcccgccggcggtaagatgtcacaatacctcgagagcatgcagattggggacacaattgaattccgaggtcccagtggattattggtataccagggcaaagggaaattcgccataaggccggacaaaaagtccaatcccattatcaggactgtgaagtccgtaggaatgattgcaggcggcactggcatcaccccaatgttacaggttattcgagccataatgaaggatccagacgaccacactgtgtgccatctcctgttcgcaaatcagaccgagaaagacatactcctgcgtcccgaactcgaagaactgcgtaacaagcacagcgcccgttttaaactgtggtacacacttgaccgggctcctgaggcttgggactatggccaggggtttgtgaatgaagagatgattagggaccatctccccccgcctgaggaagagcccctggtgctcatgtgcggtccaccccctatgatacagtatgcctgcctgcctaatcttgaccatgtaggccacccaactgagcgctgcttcgtcttttag

SEQ ID NO: 113573 - DNA, 837 bp, synthetic construct
  misc_feature 1..837: note = Description of Artificial Sequence: Synthetic coding sequence
  source 1..837: mol_type = other DNA
atgaaactcttccagaggtctacaccagcgatcaccctagaatcaccagatataaagtatccactgagactgattgaccgggagataatctcccacgacacccggagattccgttttgccctgcctagccctcagcacatactgggcctgccagtcgggcaacatatttatctgagtgcgagaatagatggcaacctggtggtgcggccttacaccccgatctcatcagatgacgataaaggcttcgtggatcttgtcattaaggtttattttaaggacactcacccgaagttcccggctggaggcaaaatgtcacagtacctagagtcaatgcaaattggggacaccatcgaattccgagggccatccggattactggtctatcagggcaaggggaaattcgcgatccgacccgacaaaaaatctaatccaattatacggaccgttaagtcagtgggtatgattgctggcgggacagggattaccccaatgctccaggtcatcagggctattatgaaggatccagatgaccacactgtctgccacctactgtttgccaatcagacagagaaggatatccttctgcggcccgagctggaagagctgcgaaataagcacagcgcacggttcaaactttggtataccttggatagggctcccgaagcttgggactacggacagggatttgtgaacgaggagatgatccgagatcatctcccaccgcccgaggaggagcctcttgtgctgatgtgtggtcctcctcccatgattcaatacgcttgcctccccaacctcgaccacgttggtcatccaaccgaaaggtgctttgtgttttag

SEQ ID NO: 113574 - DNA, 837 bp, synthetic construct
  misc_feature 1..837: note = Description of Artificial Sequence: Synthetic coding sequence
  source 1..837: mol_type = other DNA
atgaagctgtttcagcgctccactccagccattacactggaaagccccgatatcaagtacccattgagacttattgaccgggagataatctcacacgacacacggcggttcagatttgccctcccgtcaccacagcacattttggggttacctgtagggcaacatatctatctctcagcaagaattgacggaaacttagtggtacgcccctatacccccatcagtagtgacgacgacaaaggattcgttgatctcgtcatcaaggtctacttcaaggacacacaccctaaatttcccgccggcggcaaaatgtcgcagtacttggaatccatgcagatcggagataccatcgagttcagaggtccaagcggactgctggtctaccaaggtaagggtaaattcgcaattcgccccgacaaaaaatcaaatccaattatcaggacagtgaagtcagtggggatgatcgccggcggaaccggcataacccctatgttgcaggttatacgcgctatcatgaaagacccagatgaccatacagtttgtcatctgctctttgctaaccagactgaaaaagacatcctgttacgcccagaactggaggaactgaggaacaagcattcagcccggttcaagctatggtacacactggaccgcgcacccgaggcctgggattatggacaggggtttgtcaatgaggagatgattcgggatcatctgccaccgccagaagaggaacccttggtactgatgtgcggacccccccccatgattcagtacgcctgtctgcctaatctggatcacgttggccacccaacggaacggtgcttcgtcttctag

SEQ ID NO: 113575 - DNA, 444 bp, synthetic construct
  misc_feature 1..444: note = Description of Artificial Sequence: Synthetic coding sequence
  source 1..444: mol_type = other DNA
atgaaactctttcagagatccacccccgccatcactttggagagcccggacattaagtaccccctgcgactgattgacagagagataatcagtcacgacacgaggcgatttcgtttcgccttaccgtcaccgcagcacatcctgggcctgccagtgggccagcatatttatctgtcagccagaatagatggaaacctggtggtccgtccttatacacccatctcgagcgatgacgacaaaggattcgtggacctggtgataaaggtctactttaaggatacgcacccaaaattccctgccggcggcaagatgagccagtacctcgaatcaatgcagattggagacacaatagaattcagggggccctctggattgctggtgtatcaggggaagggcaagtttgccataagacctgataagaagtccaaccccataatacgatag

SEQ ID NO: 113576 - DNA, 330 bp, synthetic construct
  misc_feature 1..330: note = Description of Artificial Sequence: Synthetic coding sequence
  source 1..330: mol_type = other DNA
atggattggatcagactgaccaagtcgggcaaggatctaacgggcctcaaggggcggctaattgaagtcactgaggaggagcttaagaagcacaacaagaaggatgactgctggatatgcatcagggggttcgtgtacaatgtgtccccctatatggagtaccatcccggaggtgaagatgaacttatgcgggcagccgggagcgacggcaccgaactgtttgatcaggtccacagatgggtcaactatgaatctatgttaaaggagtgtctagtggggcgtatggctattaagcccgctgtgctgaaaggcaagctgtggcacctgtag

SEQ ID NO: 113577 - DNA, 1566 bp, synthetic construct
  misc_feature 1..1566: note = Description of Artificial Sequence: Synthetic coding sequence
  source 1..1566: mol_type = other DNA
atgctcaacgtaccctcgcagtcttttcctgcaccccgctctcagcaacgggtggcctctggtggacggtccaaagtcccattgaagcaggggcgctccctgatggactggatccgcctgactaagagtggaaaggacctaactgggctgaaaggccggttgatagaagtaacggaagaagaactaaagaaacacaacaaaaaagacgattgttggatttgtattcggggattcgtgtataacgtcagtccctatatggaataccaccccgggggcgaggatgagcttatgcgtgccgccgggagcgacggtacagagttgttcgatcaggtccaccgttgggtgaattatgagtcgatgctgaaggagtgcctggtggggagaatggctatcaaacctgccgtattgaaagattacagggaagaggaaaagaaggtcctcaacgggatgcttccaaaaagtcaggtgaccgatacattagccaaagaaggaccatcgtatccatcttacgattggttccaaactgattctcttgtcacgattgcaatttatacaaagcagaaggacataaatttagacagcatcattgtggatcatcagaatgacagttttcgcgcagagacaatcatcaaggactgtctttacctgattcacataggtctctcgcacgaggtacaggaggacttctccgtccgtgtggttgaatctgtggggaaaatcgagattgtgctccaaaaaaaagagaacacctcctgggatttcttgggccaccctctgaaaaatcacaattccctgatcccgcgcaaagacacaggcctctattaccggaagtgccagttaatatcaaaagaggatgttactcacgacaccagactgttctgtttaatgctgcccccatcaacgcatttacaggtgccgatcggacagcatgtgtacttaaaactgcccattacaggcaccgagattgtaaagccttacactccggtctccggatcgttgttgtccgaatttaaggagcccgtgttacccaacaacaaatatatttacttcctgatcaaaatttaccctactggcctctttacacccgagctcgatcgcctccagattggggacttcgtttccgtgagctcgccggagggaaattttaagatttcaaagtttcaggagctggaagatctgtttctcctcgcggctggaacgggtttcacgcctatggtgaagattctgaattatgccctgaccgacattccttctctaaggaaggtgaaactgatgtttttcaataagacagaggacgacatcatttggagatcgcaactcgagaagctcgccttcaaggataagagactagacgtggaatttgtactaagcgcccccatctctgagtggaacggtaagcagggacacatttctccggccctcctgtcagaatttctcaagcgtaatctcgataaatccaaagtcctcgtctgcatctgtgggccagttccatttaccgaacagggggtcagactgctgcacgacctgaactttagcaagaacgagattcattcgttcactgcgtag

SEQ ID NO: 113578 - DNA, 297 bp, synthetic construct
  misc_feature 1..297: note = Description of Artificial Sequence: Synthetic coding sequence
  source 1..297: mol_type = other DNA
atggccgaacagagcgacgaagctgttaaatactacacccttgaggagatccaaaagcacaatcatagtaaaagcacatggctgattttgcatcacaaggtgtacgatttaacgaagttcttagaggagcatccagggggagaagaggtgctcagggagcaggccggcggggatgctaccgagaacttcgaagatgtcggccactccacagacgctcgagaaatgtccaagacctttatcatcggcgagctgcatcccgacgatcggcccaaactcaataagccccccaagccatag

SEQ ID NO: 113579 - DNA, 405 bp, synthetic construct
  misc_feature 1..405: note = Description of Artificial Sequence: Synthetic coding sequence
  source 1..405: mol_type = other DNA
atggcagaacagtcagatgaggccgtgaaatattacactctagaagaaatacagaaacataatcattccaaaagcacctggctaattctccaccacaaggtgtacgatctgacaaaattcctggaggagcaccctggtggagaagaggtgctcagagaacaggctggtggggacgcgacagagaatttcgaagacgtggggcattcgaccgacgcaagggaaatgagcaaaactttcatcataggcgagctgcatcctgatgatcgtcccaaactcaataagccccctgaaacccttattaccaccatcgactccagctcctcatggtggaccaattgggtgatccctgcaattagcgccgttgccgtggcactgatgtacagactgtacatggcggaggattag

SEQ ID NO: 113580 - DNA, 375 bp, synthetic construct
  misc_feature 1..375: note = Description of Artificial Sequence: Synthetic coding sequence
  source 1..375: mol_type = other DNA
atggccgagcagagcgacgaagctgtcaaatattatactcttgaagagattcagaagcacaatcactctaaatctacatggctgattctgcaccataaagtatatgacttgacaaagtttctcgaggaacatcccggaggcgaggaagtcctgcgggaacaggctggtggtgatgctaccgagaattttgaagacgtgggccactcaacggatgcacgcgaaatgtctaagacctttattatcggagagctgcaccccgagacactcatcactacaattgacagctcctcctcttggtggaccaattgggtcatacctgccatctcagcagtggccgtggcgctgatgtatagactgtatatggcagaggactag

SEQ ID NO: 113581 - DNA, 297 bp, synthetic construct
  misc_feature 1..297: note = Description of Artificial Sequence: Synthetic coding sequence
  source 1..297: mol_type = other DNA
atggctgaacagtcagacgaagcagttaagtactatacactcgaggaaatccaaaaacataatcattctaaaagcacctggctcatccttcaccacaaggtgtacgatttgacaaagtttttggaggaacatcctggtggcgaggaggtcctgagggaacaggctgggggcgacgcaacagagaattttgaggatgtcggacatagcacagacgcccgggagatgtcaaaaacatttattattggcgagcttcacccggacgaccgcccaaaactcaataaacctccggagccctag

SEQ ID NO: 113582 - DNA, 453 bp, synthetic construct
  misc_feature 1..453: note = Description of Artificial Sequence: Synthetic coding sequence
  source 1..453: mol_type = other DNA
atgagtggcagtatggcgacagcagaggccagcgggtctgatggaaagggccaggaggtagagacatccgtcacatactatagactcgaagaagtcgccaagaggaacagcttgaaagagttgtggctggtgatccacggtagggtctatgacgtgaccaggttcctgaacgagcatcccggcggggaggaggttctcctcgagcaggctggagtcgacgcatcggagtcattcgaggatgtggggcactcttccgatgccagggaaatgctcaaacaatattatatcggtgacatccacccttccgatctcaaacccgagagcgggagtaaggacccgagtaagaatgacacctgtaagtcctgttgggcctactggatcctgcctatcatcggagctgttttgctgggcttcttataccggtattacaccagtgaatccaaatcgtcgtag

SEQ ID NO: 113583 - DNA, 441 bp, synthetic construct
  misc_feature 1..441: note = Description of Artificial Sequence: Synthetic coding sequence
  source 1..441: mol_type = other DNA
atggctaccgcagaagctagtgggtcagacggaaaggggcaggaagtagagaccagcgtgacctattacagactggaagaagttgccaagcgcaattccctcaaggaactctggctcgttattcacgggagggtttacgacgtcacgagattcctcaacgagcaccccggcggagaagaggtcctgctggagcaagctggggtcgatgcatctgagtcgttcgaggatgtggggcattcatccgacgccagggaaatgctcaaacagtattacatcggtgacatccacccaagtgacctgaaacctgaatctggaagtaaagatccatccaaaaatgacacctgtaagtcatgctgggcttattggatcctgccaatcattggggcagtgctgctcggcttcttgtaccggtactatactagcgaaagcaagagcagctag

SEQ ID NO: 113584 - DNA, 756 bp, synthetic construct
  misc_feature 1..756: note = Description of Artificial Sequence: Synthetic coding sequence
  source 1..756: mol_type = other DNA
atggaggggggggcagccgctgctactcctacggcgttaccgtactatgtggccttctcacaactccttggcctcaccctggtggctatgaccggggcctggctgggcctgtaccgaggaggtatcgcatgggaatcagacctgcagttcaacgcacaccctctgtgcatggtgatcggcttgatttttttacaggggaatgcactactggtctacagggtgtttagaaacgaggccaagaggacaactaaagtgctacacggtctgcttcacatctttgctcttgtcatagctctggttggtctggttgccgtgtttgactatcaccgcaaaaagggttacgccgatctatatagcttgcatagctggtgcgggattctcgtttttgtgctttactttgtgcagtggctcgtggggttctctttctttctgttccccggggccagcttctcactgcggagcaggtaccggccccagcatatttttttcggagccactatttttttgctgagcgttggaactgcgctcctggggctcaaagaagccttgctcttcaatcttggcggaaaatactcggccttcgaacctgaaggagtcctcgcgaacgtactcggtctgctgttagcatgttttgggggggctgttctgtatatcttaacccgggctgattggaagcggccctcacaagcggaagagcaggccctgtctatggacttcaagaccctaaccgagggcgatagccctgggtcgcaatag

SEQ ID NO: 113585 - DNA, 756 bp, synthetic construct
  misc_feature 1..756: note = Description of Artificial Sequence: Synthetic coding sequence
  source 1..756: mol_type = other DNA
atggaaggcggcgccgcagctgccaccccgaccgctttaccctactacgtcgccttcagtcaattgctgggacttaccctcgtagccatgacaggcgcttggcttgggctgtacagggggggaattgcttgggagagtgatctccaattcaatgcccaccccctgtgcatggtgattggcctcatttttttacagggcaatgccctactggtctaccgcgtgttccgaaatgaagcaaagcgcacgacaaaagtcctgcacggcttactgcacatttttgccttggtgatcgcactggttggactcgtggctgtttttgattatcatcggaagaagggatatgccgacctctactccctgcattcctggtgcgggattttggtcttcgtcctgtactttgtccagtggttggtgggatttagtttttttcttttcccaggtgctagctttagccttagaagtaggtacagacctcagcacattttcttcggagctactatatttctgttgtctgtgggcacagctttacttgggcttaaggaggccctcctgtttaatctgggggggaagtatagtgcttttgagcctgagggggtgctggccaacgttctcgggctgcttctagcctgctttggcggagccgtgctttacattcttacccgggccgattggaagcggccatcgcaggccgaggagcaggcactgtccatggacttcaaaacccttaccgagggcgacagtcccggtagtcagtag

SEQ ID NO: 113586 - DNA, 756 bp, synthetic construct
  misc_feature 1..756: note = Description of Artificial Sequence: Synthetic coding sequence
  source 1..756: mol_type = other DNA
atggagggaggggctgctgcagctacacccacagcactcccctattacgtggccttttcacaactgctcggcctgaccctcgtagccatgaccggcgcctggctcggactgtacaggggcggcatcgcttgggaatccgacctgcagtttaatgcacatcccctttgcatggtcattggactgatttttctccagggtaatgccctactggtttatcgggtctttcgcaatgaagccaagagaaccactaaggtgctgcatggcctgttgcacatcttcgccctggtgatcgcactggtgggcctagtggccgtgttcgactaccacaggaaaaagggctacgcagacctttatagcctacattcatggtgcggtattctggtattcgtcttgtacttcgtgcagtggctggttgggttctctttcttcttgtttccaggagcttccttttccctgaggtctcggtaccgcccacagcatatattcttcggagcgaccatattccttctctccgtgggtaccgcattgctcggattaaaagaggctttgctctttaatctgggcggcaagtattccgcgttcgagcccgaaggtgtcctggcgaacgtacttgggctgcttcttgcctgctttgggggcgctgttctttacatcctcaccagggctgattggaaacggccaagtcaggccgaggagcaggccctgtcgatggactttaaaaccctgaccgaaggtgactcgccgggcagtcagtag

SEQ ID NO: 113587 - DNA, 417 bp, synthetic construct
  misc_feature 1..417: note = Description of Artificial Sequence: Synthetic coding sequence
  source 1..417: mol_type = other DNA
atggagggtggagcagctgcagccactcccaccgcactgccatattacgttgccttcagccaattactgggactaactctggttgcaatgactggtgcttggttaggactgtatagaggtgggatagcgtgggaatcagacctacaatttaatgcgcaccctctgtgtatggtcatcgggctcattttcttgcaaggcaatgccttgctcgtttaccgagtgttcagaaatgaggccaagcggaccaccaaggtgctgcatggactgctccacatttttgcactggtgatcgcactcgttggcctggtggctgtttttgactatcatcggaaaaagggctacgcagacttatactcgctacactcatggtgtgggattctggtgttcgttttatacttcgtacaggggcaggtgtag

SEQ ID NO: 113588 - DNA, 957 bp, synthetic construct
  misc_feature 1..957: note = Description of Artificial Sequence: Synthetic coding sequence
  source 1..957: mol_type = other DNA
atgaaacaaaagaccaaacccgggactggcccgctgtcctcattagagttcggcgtcagctttctcgccccctctccacacatggaactacttgcctcctgccccaggtcccgactttctccctggggggggtgggcgccccctcccagtcatagccgggacctgcgacccttgcctcaagatgacggagtttgcttgtcgatggaggggggcgccgccgccgccacacccaccgccctgccctactacgtggcctttagtcagctgctgggcctgactctcgtggcaatgacaggtgcgtggctcggcctgtacagagggggtatagcatgggagtccgacctgcagtttaatgctcacccactgtgtatggtcattgggctcattttcttacaaggcaatgcccttttggtctaccgcgtatttcgaaatgaggccaaacgtacaacgaaggtcctccatggccttctgcatatttttgccttagtgatcgctctggtgggcttggtggctgtgttcgactatcacagaaaaaaggggtatgccgatttgtacagtctgcattcatggtgcggcattttggtattcgtgctgtattttgtgcagtggctggtgggatttagcttcttcttatttcctggcgcctcattttctctcagatctagatataggcctcagcatattttcttcggcgccacgatattccttttgagtgtaggcactgccctcctggggctaaaagaggcgcttctctttaacctgggaggaaagtacagtgcattcgaaccagagggcgtgctcgcaaatgtcctgggacttctactggcgtgcttcgggggcgcagtgctctacatccttacaagggccgattggaaacgcccgagccaggctgaagagcaggccctgtccatggacttcaaaaccttgacggagggcgatagtcccgggtcccagtag

SEQ ID NO: 113589 - DNA, 1143 bp, synthetic construct
  misc_feature 1..1143: note = Description of Artificial Sequence: Synthetic coding sequence
  source 1..1143: mol_type = other DNA
atgggcagcggttgccgaatcgagtgtatcttcttttctgagtttcaccctacacttggacctaagatcacatatcaggtacccgaagacttcatcagccgtgaactgtttgacaccgtacaggtctacataattaccaagccggaactccagaataagctgatcacagtcactgccatggaaaaaaagttaatcggatgtcctgtgtgtattgaacacaaaaaatactcccggaacgctctactcttcaatttgggtttcgtgtgcgacgcacaagcaaagacctgtgccttggagccaatcgtgaagaagcttgcagggtatctgacgacgttggagctcgagtcttcatttgtgagcatggaggagagcaagcagaagctggtgcccattatgaccatccttcttgaggagcttaacgcgagcggccgctgtaccttgccaattgatgaatccaacacgatccatttgaaagtcatcgaacagcgaccggatccgcccgttgcccaagagtacgacgtgcctgtgttcactaaagataaggaagacttcttcaattctcagtgggatctgaccacacagcagatacttccttacattgacggattcagacacatccaaaagatttcagctgaagctgatgtcgaactgaacctggtgagaattgcgatacaaaatctcctctactacggagtggtaacactcgtgagtattcttcagtacagcaatgtttattgcccgacgccaaaggtgcaggacttggtggacgacaagtcactccaggaggcgtgcctcagctacgtcacaaaacagggccacaaacgggcctctcttagggatgtgttccagttgtactgctcactctctccgggcactactgtacgtgacctgattggcaggcacccccaacagctccaacatgtggacgagcggaagttaatccagttcggtctgatgaagaatttgattaggagactgcagaagtatcccgtgagagtcactagagaagagcagagccaccctgcaagactgtataccgggtgtcactcctacgacgaaatctgctgtaagacgggcatgtcctaccatgaactcgatgagcgccttgaaaatgatcctaatattattatctgctggaagtag

SEQ ID NO: 113590 - DNA, 669 bp, synthetic construct
  misc_feature 1..669: note = Description of Artificial Sequence: Synthetic coding sequence
  source 1..669: mol_type = other DNA
atggctttgagcgccgaaaccgaatctcatatttatagggccttgcgaacagcgagcggggctgctgcccacctggtggccctaggctttaccatatttgtcgcggtcctggccaggcccgggagttctctcttctcctggcacccggtcctcatgagcttggccttctcctttctcatgaccgaggctctcttggtttttagcccggaatcgagtctgcttcacagcctaagtcgtaagggaagggcacgatgccattgggtattacaattgttggctttgttgtgcgctctactgggattagggctagtgatcctgcacaaagagcagttaggaaaagcacatctcgtcacaaggcatggccaagccggactgctcgccgtactgtgggcaggcctccagtgttccgggggtgttggtctcttgtaccctaagctgctgcctaggtggcccttggcgaaacttaaactgtaccatgccacctctggcttggtgggctatctgttgggtagcgcaagtcttctcctgggcatgtgttctctatggttcaccgcgtcagtgaccggcgcggcctggtacttggcagtcctgtgccccgtcctcacttccttggtcatcatgaatcaggtgagtaacgcctatctatacagaaagcggatccaaccttag

SEQ ID NO: 113591 - DNA, 669 bp, synthetic construct
  misc_feature 1..669: note = Description of Artificial Sequence: Synthetic coding sequence
  source 1..669: mol_type = other DNA
atggcactatccgcagaaaccgaaagtcatatttatcgagctctgagaaccgcctcaggcgcagctgcacatttggtggctctcggttttactatttttgtagctgtgttagcaagaccagggtcttcactcttctcttggcaccccgtgcttatgtctttggcattttcattcctcatgacggaggccctgcttgtgttttcccctgaaagctccctgctccactcactctccaggaaaggtcgtgctagatgtcactgggtcctccagttactcgcactcctctgtgcacttctcggcctgggattggtgatcctgcacaaagagcagctcggcaaagcccatctagtcacacgccacggccaggccgggcttttggctgtgctttgggctggcctgcaatgcagcgggggggtaggcctcttgtaccctaaactgctgccgcggtggcccttagctaaactcaagctgtaccacgccacgagcggtttggtgggctacctcctgggttctgccagcttgctactgggcatgtgttccctgtggtttactgcctccgtaacaggcgccgcatggtacctggccgttctctgcccagtgttgactagccttgttatcatgaaccaggttagcaacgcctacctatatagaaagaggattcagccatag

SEQ ID NO: 113592 - DNA, 669 bp, synthetic construct
  misc_feature 1..669: note = Description of Artificial Sequence: Synthetic coding sequence
  source 1..669: mol_type = other DNA
atggcactgagcgccgagacggaatctcatatataccgcgcactgcgaacggcatccggcgccgctgctcacttggtcgccctgggcttcactatttttgtggccgtcttagccaggcccggcagtagtctgtttagttggcaccccgtgctgatgagcctggccttctcctttctcatgacggaggccctgctcgtgttttcgcccgagtcctcccttctgcattctttgtctaggaaagggcgtgccagatgccactgggtgctgcaactcttagcgctgttgtgcgctttgctgggattgggtctggttatcctccacaaggaacagttaggcaaggcccatctcgtgacgcggcacggtcaggctggtctgttggcagtgctctgggctggcctccagtgtagtggtggggtgggactcctctatcctaagttgttgccacgatggccactcgccaaactgaaactttatcacgctactagtggcttggtcggctatctactgggaagcgccagcttactccttggcatgtgtagcctgtggtttaccgcttctgtcacaggggccgcctggtacttagcagtgttgtgcccagttctgacatcactggtcattatgaaccaggtgagtaatgcatacctgtatcgcaaacgcattcagccatag

SEQ ID NO: 113593 - DNA, 696 bp, synthetic construct
  misc_feature 1..696: note = Description of Artificial Sequence: Synthetic coding sequence
  source 1..696: mol_type = other DNA
atgggcggcctgtggcgacccggttggagatgcgtgcctttttgtggctggcgttggattcacccggggagccctacacgcgccgcggaacgggttgagccctttctgagacctgagtggtccggcaccggaggggccgagaggggacttcgatggctcggcacatggaaaaggtgctccctccgagctaggcacccagctttacaaccccctcgacggcctaagtcctctaatcccttcacgcgagcgcaggaggaggagagaaggcggcagaataaaacaaccctgacttacgtggcggcagttgccgtcggcatgctgggagccagctatgcagccgtcccactctaccgcctctattgtcagaccacaggtctgggcggaagtgcagtggccgggcacgcatccgacaagatcgagaacatggtgcccgtcaaagaccgcatcatcaaaatatcttttaacgccgatgtgcatgcttctttgcagtggaatttcagacctcagcagactgaaatttacgtggttcccggggaaacagccctggccttttacagggctaaaaaccccaccgacaaacctgtgatcggcatttcaacctataacatcgtgcccttcgaagccggacaatattttaacaagattcaggcctctaagttgcacagagtatacgttctggagagctggcatttgtag

SEQ ID NO: 113594 - DNA, 510 bp, synthetic construct
  misc_feature 1..510: note = Description of Artificial Sequence: Synthetic coding sequence
  source 1..510: mol_type = other DNA
atgctggcgactcgggttttttctctggttggaaaacgtgctataagcacttccgtctgcgtacgagcccacgagagcgttgtcaagagcgaagacttctccctcccagcgtatatggaccgccgagatcaccctctgccagaggttgcccacgtaaagcatctgagcgccagtcaaaaggccctgaaagaaaaagaaaaggcaagctggagctcgctgtccatggatgaaaaggtcgagctgtatagaataaagttcaaggagtccttcgccgagatgaaccggggatcaaacgaatggaaaacagtggtaggcggagcaatgttctttataggattcacggcactggtcattatgtggcagaaacactacgtatacggaccgctgccacagtcatttgataaggagtgggtcgccaaacaaacgaaacggatgcttgacatgaaagtcaatcccattcaggggttggcatctaagtgggattacgaaaagaacgagtggaaaaagtag

SEQ ID NO: 113595 - DNA, 516 bp, synthetic construct
  misc_feature 1..516: note = Description of Artificial Sequence: Synthetic coding sequence
  source 1..516: mol_type = other DNA
atgctgccaagagctgcttggagtctggtgttgaggaaaggcgggggagggagaagaggaatgcattcatctgaaggtaccacacggggggggggtaaaatgtccccatacaccaattgttatgcgcaaagatattatcccatgcctgaggaacccttctgtacagagttaaatgccgaggaacaggcgctaaaggagaaagaaaaaggcagctggactcagctcactcatgccgaaaaggtggccctctaccggctgcagttcaacgaaaccttcgcagaaatgaatagaagatccaatgagtggaaaacagtaatgggatgcgtctttttttttatcggtttcgccgccctggtgatctggtggcaaagagtgtacgtgtttccgcctaagcctattacacttaccgatgaaagaaaagcacaacaactacagagaatgctcgatatgaaagtaaatcccgtccagggtctcgcctcacgctgggactatgagaagaaacagtggaaaaagtag

SEQ ID NO: 113596 - DNA, 390 bp, synthetic construct
  misc_feature 1..390: note = Description of Artificial Sequence: Synthetic coding sequence
  source 1..390: mol_type = other DNA
atggcctcccgtctactgcgcggcgctgggacgttggcagcccaggctctccgcgcccgtggcccaagcggagctgcggccatgcgcagtatggcgagtggcggaggggttccgacagatgaggaacaagctacaggtctggagcgcgagatcatgttggcagccaaaaagggcctagatccgtataatgtgctcgcaccaaaaggagcaagcgggacacgggaggaccctaatttggttccatcgatctcaaataagcgtatcgtggggtgcatatgcgaggaggataacaccagtgttgtgtggttctggcttcacaagggtgaggcccagcgctgtccacgatgcggagcccactacaaactagttccccagcagcttgcacattag

SEQ ID NO: 113597 - DNA, 606 bp, synthetic construct
  misc_feature 1..606: note = Description of Artificial Sequence: Synthetic coding sequence
  source 1..606: mol_type = other DNA
atggcccgcgattatgatcacttgttcaaactgttaatcattggtgacagtggggtaggtaaaagcagccttttacttaggttcgctgacaacactttctccggctcatacataacgaccataggcgtcgacttcaaaattcgaaccgttgaaatcaacggagagaaagtaaaactccagatctgggacacggccggtcaggaaaggttccggactataacatccacctattaccgaggcacccacggagtgattgtggtgtatgacgtcacttccgcagagtctttcgtcaatgtcaagcggtggctccatgagatcaatcagaactgtgacgatgtgtgtaggatcctcgtgggcaataaaaatgatgaccccgagcgcaaagtggttgagactgaggacgcatataaattcgcaggccaaatgggcattcaactgttcgaaacgagcgctaaagaaaacgtaaatgtggaagaaatgttcaactgcataaccgagctggtgctgagagcaaaaaaggacaatctcgccaaacagcagcagcagcagcagaacgacgtggtgaagttaactaagaacagtaaacgaaagaaaagatgctgttag

SEQ ID NO: 113598 - DNA, 261 bp, synthetic construct
  misc_feature 1..261: note = Description of Artificial Sequence: Synthetic coding sequence
  source 1..261: mol_type = other DNA
atggctgaagacatggagaccaagattaaaaattataagacggccccctttgacagcaggtttccgaatcaaaatcagaccagaaattgttggcagaattatcttgactttcaccgatgtcagaaagctatgaccgctaaggggggcgatatctcagtctgcgagtggtaccagagggtgtatcaatcactctgccccacctcctgggtgacagactgggatgagcagcgagccgaaggaacatttcccggaaaaatttag

SEQ ID NO: 113599 - DNA, 312 bp, synthetic construct
  misc_feature 1..312: note = Description of Artificial Sequence: Synthetic coding sequence
  source 1..312: mol_type = other DNA
atgcatcctcacccccaaattcctggcagagacctggccggattctcaaccatggcagaggacatggagaccaagatcaagaattataaaacagcaccattcgattcacgcttccccaaccaaaatcagacacgcaattgctggcagaactacctcgactttcatcgctgtcagaaggctatgacagccaaaggtggggatatctctgtctgcgagtggtatcagagagtctaccagtccttgtgtccaaccagttgggtcactgactgggacgagcagagggctgaagggacgtttcccggcaaaatctag

SEQ ID NO: 113600 - DNA, 228 bp, synthetic construct
  misc_feature 1..228: note = Description of Artificial Sequence: Synthetic coding sequence
  source 1..228: mol_type = other DNA
atggcccctgaagtgttgccaaaacccagaatgagaggactgttggctcggcggttaagaaatcatatggccgtagctttcgtgttgtcacttggcgttgccgctttatataaattcagagtggccgatcagcgcaagaaggcctacgccgacttctataggaactacgacgttatgaaggactttgaagagatgagaaaggccggaatcttccagtccgtgaaatag

SEQ ID NO: 113601 - DNA, 228 bp, synthetic construct
  misc_feature 1..228: note = Description of Artificial Sequence: Synthetic coding sequence
  source 1..228: mol_type = other DNA
atggcccccgaagtcttgcccaaacctcgcatgcgtggcctcttagctcgaagactccgaaaccatatggccgtggcttttgtactttcgcttggtgtggcggctctttataagttcagggtggccgatcaaaggaagaaagcctatgctgatttttaccggaattacgatgtcatgaaagacttcgaggaaatgagaaaagccggcatctttcaatccgtgaaatag

SEQ ID NO: 113602 - DNA, 228 bp, synthetic construct
  misc_feature 1..228: note = Description of Artificial Sequence: Synthetic coding sequence
  source 1..228: mol_type = other DNA
atggcacctgaagtgctgccgaagcctagaatgcgggggcttttagcgcgcagactgagaaaccacatggctgttgcgtttgttctgtctctaggagtggccgcactgtataagtttcgagtggccgaccagaggaagaaggcctacgcagatttttatagaaattacgacgtgatgaaagatttcgaggagatgagaaaggcgggtatcttccagtctgtgaaatag

SEQ ID NO: 113603 - DNA, 228 bp, synthetic construct
  misc_feature 1..228: note = Description of Artificial Sequence: Synthetic coding sequence
  source 1..228: mol_type = other DNA
atggcacctgaagtactgccaaagccccgtatgaggggactgctagcaaggcggcttagaaatcatatggcggtcgcattcgtgctgtcccttggcgtggcagccctttacaaatttcgggtcgcagaccagcgaaaaaaggcttacgcagatttctaccggaattacgatgtgatgaaagactttgaggaaatgaggaaggcgggcatcttccagtcggtcaagtag

SEQ ID NO: 113604 - DNA, 228 bp, synthetic construct
  misc_feature 1..228: note = Description of Artificial Sequence: Synthetic coding sequence
  source 1..228: mol_type = other DNA
atggcccccgaagtattgccaaaacctcggatgcggggtctgctcgcgcgtagactcagaaaccatatggcagtggccttcgtactaagcttaggggtcgccgcactgtataagttccgcgtggccgatcaaaggaaaaaggcctatgcggacttctataggaattacgacgtgatgaaagactttgaggagatgcgaaaggccggcattttccagagcgtaaagtag

SEQ ID NO: 113605 - DNA, 228 bp, synthetic construct
  misc_feature 1..228: note = Description of Artificial Sequence: Synthetic coding sequence
  source 1..228: mol_type = other DNA
atggctcccgaggtgctccccaagccgaggatgcgaggactccttgcgcggcggctaagaaatcacatggccgtggcctttgtacttagcttgggcgtagcagccctctacaagtttcgcgtagcagaccagagaaagaaggcatacgcggacttctataggaactatgatgtgatgaaagacttcgaagagatgcgtaaagctggcatcttccagagcgtgaaatag

SEQ ID NO: 113606 - DNA, 228 bp, synthetic construct
  misc_feature 1..228: note = Description of Artificial Sequence: Synthetic coding sequence
  source 1..228: mol_type = other DNA
atggcacccgaggtgctaccaaagcctcgaatgagaggactgttggcacggcgactgagaaaccacatggcagtagccttcgtgttgtcgctgggggtggcggctctgtataagttcagagttgctgaccagcgaaagaaagcttacgccgacttctacagaaactacgatgtgatgaaggactttgaagaaatgagaaaggcaggtattttccagagtgttaagtag

SEQ ID NO: 113607 - DNA, 228 bp, synthetic construct
  misc_feature 1..228: note = Description of Artificial Sequence: Synthetic coding sequence
  source 1..228: mol_type = other DNA
atggcccccgaggtcctgccgaagcctcgcatgcgaggactactggctagacgactacgaaaccacatggccgtggcattcgtcctgtccctaggcgtagccgcattgtacaaattccgagtcgccgatcagcggaaaaaagcctatgcggacttttataggaactatgacgtcatgaaggattttgaagagatgcgaaaggctggaatctttcaaagtgtaaaatag

SEQ ID NO: 113608 - DNA, 228 bp, synthetic construct
  misc_feature 1..228: note = Description of Artificial Sequence: Synthetic coding sequence
  source 1..228: mol_type = other DNA
atggcacccgaggtcctgcccaagcccaggatgcgaggtctgcttgccaggagattacggaaccacatggccgtcgcctttgtgctatctctgggggtagccgctttgtataagtttagagtggctgaccaaagaaagaaagcatatgcggacttttatagaaactacgatgtcatgaaggactttgaggaaatgcgtaaggctgggatctttcaaagcgtcaaatag

SEQ ID NO: 113609 - DNA, 228 bp, synthetic construct
  misc_feature 1..228: note = Description of Artificial Sequence: Synthetic coding sequence
  source 1..228: mol_type = other DNA
atggctcctgaagtgctacctaagccaagaatgcggggactgttagccagaagactgaggaatcatatggccgttgcctttgtgctctcacttggggtcgccgccctttacaaattccgggtggctgaccagagaaagaaggcatacgccgatttttatcgaaattatgatgtcatgaaggactttgaggaaatgagaaaggccggcatctttcaaagcgtgaaatag

SEQ ID NO: 113610 - DNA, 240 bp, synthetic construct
  misc_feature 1..240: note = Description of Artificial Sequence: Synthetic coding sequence
  source 1..240: mol_type = other DNA
atgcaggcactgcgtgtgtcacaggccctgattaggtcattctcgtccacagctaggaataggttccagaacagagtaagggagaagcagaaacttttccaggaggataatgatatcccactgtacctcaagggaggtatcgtggataacattctctacagggtcactatgaccctgtgtctgggaggcacagtgtactcgctctactccctcggctgggccagcttcccgaggaactag

SEQ ID NO: 113611 - DNA, 330 bp, synthetic construct
  misc_feature 1..330: note = Description of Artificial Sequence: Synthetic coding sequence
  source 1..330: mol_type = other DNA
tagtccttttgggtgcttagcctgcctgggccttctaggcagccaggccatcctcaggctaggctgcagggcgagtctcctccgaatccggccggtagttctagagtgagccaggctctgattagatcattctcatcaacagctcgaaatcggttccagaatcgagtgagagagaaacagaaactctttcaagaagacaacgacatccctttgtatttaaagggcggcatcgtggataatatcttgtatcgggtcacaatgaccttgtgtcttggcggaacagtttacagcctctacagcctgggatgggcttctttcccgcgaaattag

SEQ ID NO: 113612 - DNA, 2775 bp, synthetic construct
  misc_feature 1..2775: note = Description of Artificial Sequence: Synthetic coding sequence
  source 1..2775: mol_type = other DNA
atgagtaggagtcgccagccaccactggtgacaggcatctcaccgaacgagggcattccctggacaaaagtcacaataagaggggagaacctcggcacaggcccaaccgatctgatcgggttaaccatttgcggccataactgcttgctgaccgcagagtggatgtccgctagcaagatcgtttgtagggtggggcaagctaaaaacgacaagggggacataattgtgaccaccaaatctggagggcgtggaaccagtactgtgtcattcaagcttttgaagcccgagaaaattggaattctggaccagtccgctgtctgggtggatgagatgaactactacgatatgaggacggatcggaataagggcatcccacctctgtcattaaggccggccaatcccttaggaattgagatagagaaatcaaaattttctcaaaaggacttagagatgctgtttcatggaatgtctgccgactttacatcggagaatttttccgctgcatggtacctgatcgagaaccacagcaacaccagcttcgaacagcttaaaatggccgttactaatctcaagcgccaagcgaataagaaaagcgagggaagccttgcttacgtgaagggcgggttgagcacatttttcgaagcacaagacgctctgtctgccattcaccagaaactggaagcagatggtacagaaaaggtagagggatctatgacacaaaagctcgaaaatgttctaaatagagcttccaacactgcagacacactattccaggaggtgctgggccgtaaagataaggctgactcgacacgcaatgctcttaatgtgctccagcgattcaagtttctgttcaatttgccgctgaatatagagcggaacatccaaaaaggagactacgatgtggtgatcaacgattatgaaaaagctaaatctctttttggcaaaaccgaggtgcaggtcttcaaaaagtattacgctgaggtcgagacccgaatcgaagctctgagggagctgctcctggacaagctgttagaaactcctagcaccctgcacgaccaaaagcgctacattagatacttgtccgatctgcatgcctctggtgaccctgcgtggcagtgcatcggcgctcagcataaatggattctgcagttaatgcacagttgcaaagaaggctacgtgaaggatctgaaagggaatcccggactccactcccctatgcttgacctggataacgataccagaccctctgttctcggtcatcttagccagactgccagtctaaaaagaggctcatcatttcagtccggtcgtgacgacacatggaggtacaaaactcctcatcgggtcgccttcgtagagaagctgaccaagttagtgttatcccaactgccaaatttctggaagctgtggatatcctacgtcaatggcagtcttttctcagagaccgccgaaaaatcgggccagattgaacggtccaagaacgtgaggcagcgccagaacgactttaaaaaaatgattcaagaggttatgcatagcctagtgaagctcacccgtggcgcgcttttgccacttagcattagagacggcgaagccaagcagtatggagggtgggaagtgaaatgtgaactgagcgggcagtggctggcccacgccatacaaacagtgcgcctcactcacgaatcactgaccgccctcgaaataccaaatgatttgctgcagaccatccaggatctcattctggacctccgggtccgttgtgtgatggccaccttgcagcacaccgctgaggagatcaagcgcttggccgagaaagaggactggatagtggataacgaaggtctgacctctctgccttgtcaattcgaacaatgcatcgtctgcagcctccagtcattaaaaggtgtcctcgagtgcaagccgggcgaagcgagcgtgttccagcaacctaaaacccaggaggaggtgtgtcagctttcaatcaatatcatgcaagtgttcatttattgtctcgagcaactgtcaaccaagccagacgccgatattgataccacccacctgtctgtggatgtctcttccccagatctgtttggctcaattcatgaagacttctctctgacctccgaacagagactgctcattgtgctctcgaactgctgttacttggagagacacacattcttgaacatcgctgagcattttgagaaacacaatttccaaggcatcgagaagatcacacaggtgagtatggcttcgctcaaagaactggatcagcgcctgttcgagaattatattgagctgaaggctgatcctatagtggggtctctggagccaggcatatatgcaggctatttcgattggaaggattgcttgccgcctactggtgtgcggaactatctgaaggaggcactcgttaatattatcgccgtgcatgctgaagtctttacaataagcaaggagctcgtgccacgagtgttatccaaggtcatagaggcggtctcagaggagctttccaggctgatgcagtgcgtgagttcttttagtaagaatggtgccctccaagctcgtcttgaaatttgtgccctccgagacactgtcgccgtctacctgactccggagagcaagtcttccttcaaacaggcactggaggcacttccacagctgagctcaggggccgacaaaaaactcctggaggagctcctgaataaatttaaatctagcatgcacctacagcttacatgtttccaggctgcctcatctaccatgatgaaaacttag

SEQ ID NO: 113613 - DNA, 348 bp, synthetic construct
  misc_feature 1..348: note = Description of Artificial Sequence: Synthetic coding sequence
  source 1..348: mol_type = other DNA
atgcacacacaagacagtgaggtggtgcctgtcccggcatggccttttagtttggtggtgttctcctgtggcggctgctggtcggtcactgcaaagatgctgcgcaatttgctggcactccggcagattgggcaacgtacaatcagtactgcgtccagaaggcactttaagaacaaggtccctgagaagcaaaaactcttccaggaagacgatgaaatccccttgtacctcaagggaggagtggccgacgcacttctctatagagccacaatgatcttaactgtcggcggaactgcttacgctatctacgagctcgctgtcgcatcatttccaaaaaagcaggagtag

SEQ ID NO: 113614 - DNA, 348 bp, synthetic construct
  misc_feature 1..348: note = Description of Artificial Sequence: Synthetic coding sequence
  source 1..348: mol_type = other DNA
atgcacacccaagattccgaagttgtacccgtgcccgcttggcctttcagcctggtggtgtttagttgtggaggatgttggtccgttacagctaagatgttgcgcaatctgcttgccctgcgccaaattggccagagaacaatctctactgcatctagacgacactttaaaaataaggtaccagagaaacagaaacttttccaagaagatgatgagatacctttatacttgaagggcggtgtggccgatgcacttttgtatcgcgcaaccatgatcctgactgttgggggaactgcatacgcaatttacgagcttgctgtggcaagcttcccaaagaaacaggaatag

SEQ ID NO: 113615 - DNA, 1734 bp, synthetic construct
  misc_feature 1..1734: note = Description of Artificial Sequence: Synthetic coding sequence
  source 1..1734: mol_type = other DNA
atgtccaagcccgaactgaaggaggacaagatgctcgaggtgcatttcgtgggagacgacgatgttctgaatcacatcctcgacagggagggcggggctaagctgaagaaggaaagagcacagctgctggtcaatccaaagaaaataattaaaaaacccgaatacgatctggaggaggatgaccaagaggtgctgaaagaccagaactacgtggaaattatgggacgggatgtccaggagagtctgaagaatgggagtgccacagggggaggaaataaagtgtattcctttcagaaccgcaaacatagcgagaaaatggccaaattagcctcggaactcgcaaaaacaccacaaaagtcagtctcgttcagtctgaaaaatgaccccgaaattaccattaacgttccgcagagtagcaaaggacacagtgcaagtgacaaggtacagcctaagaataacgataaaagcgagtttctaagtacagcgccccgaagcctgcgaaaacgtctgatcgtgccaagaagccactctgactcggaatcggaatattcagctagcaattcagaagacgacgaaggggttgcccaggagcacgaagaagacaccaatgccgtgatatttagtcagaagatccaagcccaaaaccgggtggtgtctgcccctgtcggaaaggagacaccatcaaagagaatgaagcgagataaaacgtccgacttagtagaagaatacttcgaagctcacagttcctccaaagtgctgacaagcgatcgtaccctccaaaaattgaaacgtgcgaaacttgatcagcagacactgcggaatttattgtcaaaagtgagtccctctttctcagccgaactgaaacagctcaaccaacaatacgagaaactctttcacaagtggatgctccagctgcatttgggatttaatatagtgctatacggtctgggcagcaagcgcgatctgctcgaacgatttcgaactactatgcttcaggattctattcatgtcgtgatcaacgggttctttccgggaatcagcgtgaaatccgtgcttaacagcattactgaggaggtcttagatcacatgggaacgttccgttcaatcctcgatcagctcgattggatcgtcaataaattcaaggaggatagctcgcttgagctcttcctactcatccacaatttagatagtcagatgctccgtggggaaaaatctcagcagatcattgggcaactgtctagtttgcacaatatctatctaattgcctcaatcgaccatttaaacgctcccctaatgtgggaccacgcaaagcagagcttgttcaactggctatggtatgagactactacttactccccctacaccgaggaaacttcttacgagaacagtctacttgtcaagcagagcggatccctgcctctctcctctttgacccatgtgctgaggtctttaacccctaatgctcggggaatattccgcctgctgatcaaataccaattagataaccaggacaatccatcttatatagggctttcttttcaggacttttatcaacagtgtcgcgaggcattcctcgtaaattccgacctgacattaagggcacagcttactgagtttcgagaccataaactcattcggacaaaaaaaggtactgatggggttgaatacctcctgatccccgtagataacggcaccctgaccgattttctcgaaaaagaggaagaagaagcgtag

SEQ ID NO: 113616 - DNA, 345 bp, synthetic construct
  misc_feature 1..345: note = Description of Artificial Sequence: Synthetic coding sequence
  source 1..345: mol_type = other DNA
atgtattataaattttctggatttacccaaaagctcgcaggcgcttgggcatctgaggcctactctccacagggcttgaaacctgtggtgagtacagaagccccaccaataatcttcgccacccccaccaagcttacgagtgatagtaccgtttacgattatgctggcaaaaacaaggtgcccgagctccaaaagtttttccagaaagccgacggcgtgcccgtgtatctcaaaagaggactccctgaccaaatgctctatcgcacgacaatggcattgacagtgggcggcaccatctattgtctcatcgccctgtacatggcctcgcagcctaagaacaaatag

SEQ ID NO: 113617 - DNA, 246 bp, synthetic construct
  misc_feature 1..246: note = Description of Artificial Sequence: Synthetic coding sequence
  source 1..246: mol_type = other DNA
atgatgttccctcttgctaggaatgcccttagttccctcaagattcagtccattctccagtccatggcccgccacagccatgttaaacatagccctgactttcacgacaaatacggtaacgccgtcctagcaagcggcaccgccttttgtgttgcaacctgggtttttactgccactcagataggaattgaatggaacctgagcccggtggggcgggtcactcccaaggagtggaagcaccagtag

SEQ ID NO: 113618 - DNA, 246 bp, synthetic construct
  misc_feature 1..246: note = Description of Artificial Sequence: Synthetic coding sequence
  source 1..246: mol_type = other DNA
atgatgtttcctctagcaaggaacgcgttgtcaagcctgaagatccagtctatcctgcagagtatggcccgacattcacacgtgaagcattctccagatttccacgataagtatgggaacgctgtgcttgcaagtggaacagctttctgcgttgcaacttgggtgtttactgccacacaaataggtatagagtggaatctgtctccggttggacgggtcacgcctaaggagtggaaacaccagtag

SEQ ID NO: 113619 - DNA, 246 bp, synthetic construct
  misc_feature 1..246: note = Description of Artificial Sequence: Synthetic coding sequence
  source 1..246: mol_type = other DNA
atgatgttccccctggcacgcaatgccctttcgtcgctcaagatacagtctatcctgcaatccatggcgcggcactctcacgttaaacactctcctgatttccatgataaatacggtaacgctgtcctggcatcaggtacagcattctgcgtcgccacatgggtgtttaccgctactcagattggtatagaatggaacctgtctcctgtcgggcgagtaacacccaaggagtggaaacaccaatag

SEQ ID NO: 113620 - DNA, 99 bp, synthetic construct
  misc_feature 1..99: note = Description of Artificial Sequence: Synthetic coding sequence
  source 1..99: mol_type = other DNA
atgatgtttccactcgcaaggaatgccctgtcctcgcttaagattcaatccattctccagagtatggctcgccactcacacgtcaaacattctccgtag

SEQ ID NO: 113621 - DNA, 243 bp, synthetic construct
  misc_feature 1..243: note = Description of Artificial Sequence: Synthetic coding sequence
  source 1..243: mol_type = other DNA
atgttcccgctggcccggaatgccctcagctctctgaagattcagtcgatcctccagtccatggcccggcattcccatgtgaagcattcccccgattttcacgacaagtatggcaatgccgtgctcgcctccggtactgcattttgcgtggccacatgggtgtttacagcaacacagattggaatagaatggaacctctctccggtggggagggtaaccccaaaagagtggaaacaccagtag

SEQ ID NO: 113622 - DNA, 192 bp, synthetic construct
  misc_feature 1..192: note = Description of Artificial Sequence: Synthetic coding sequence
  source 1..192: mol_type = other DNA
atgctcggacagtccatcaggcgcttcaccacctccgtcgtgaggcggagccactacgaggaaggccctggcaagaatctgccgttctctgtcgaaaacaaatggtccctgctcgctaagatgtgtctctattttggatccgctttcgctaccccgtttttggtggtgcggcaccagctgctcaagacgtag

SEQ ID NO: 113623 - DNA, 192 bp, synthetic construct
  misc_feature 1..192: note = Description of Artificial Sequence: Synthetic coding sequence
  source 1..192: mol_type = other DNA
atgctgggccagagcatccggcggttcaccacctccgtggtccgccgcagccactatgaggaaggacccggcaagaacctccccttttccgtagagaataagtggtcgctccttgccaagatgtgtctgtacttcggttccgccttcgcgacacctttcctggtcgtccgacaccagctgctcaaaacctag

SEQ ID NO: 113624 - DNA, 978 bp, synthetic construct
  misc_feature 1..978: note = Description of Artificial Sequence: Synthetic coding sequence
  source 1..978: mol_type = other DNA
atggccgccgctgcggccagcttgaggggggtcgttctgggccccaggggtgccgggctcccgggggcacgggctcgtggtctgctttgctccgctcggcccggccagttgccgctgcgcacgccccaggcggtggcactctcatctaaatctggtctcagtagaggcaggaaagtcatgctgtctgccctgggaatgctggccgctggcggagctggcctggccatggcccttcatagtgctgtgagcgcctcagacttggagctgcatccgcccagttatccttggtctcataggggactcctgtctagtctggaccatactagtatcaggagaggatttcaggtgtataaacaggtgtgcgccagctgtcattcaatggactttgttgcctaccggcacttggttggtgtctgctatactgaggatgaagccaaagagctggcagcagaagtcgaggtgcaggacgggcccaacgaagatggagagatgttcatgagacctgggaagctgtttgattacttcccaaagccttaccccaacagtgaagctgccagagcagccaacaacggagcactaccccccgacctctcatacattgtcagggcccgacatggaggcgaagattatgttttcagcctactcacaggatactgtgagccacctaccggagtctctctccgggaagggctttacttcaatccgtacttccccggtcaggccattgccatggcaccgccgatctataccgacgtccttgaatttgacgatggtactccagcgacgatgagtcaaatcgcgaaagatgtgtgcacttttttacggtgggcgtccgagcctgagcatgatcatcggaagcgcatgggcctgaaaatgctgatgatgatggccctgttagtgcctctggtatatactatcaagaggcataagtggtcagtgctgaagagcaggaagctggcttatagacctcccaagtag

SEQ ID NO: 113625 - DNA, 252 bp, synthetic construct
  misc_feature 1..252: note = Description of Artificial Sequence: Synthetic coding sequence
  source 1..252: mol_type = other DNA
atggaaccgtttgtcgtgttggtgctgtgcctgtcatttatgttgctcttctctttgtggagacaatcatgccgccgaaggaagctgcccccaggccctacccctctccccatcattggcaacatgctccagatcgacgtgaaagacatatgtaaatcttttacaaacgtgagtctgccgtacgtgcctccggcgaactgcaagggctcccagaagagcatggtcttgtgttcaccatgtatcctggcttag

SEQ ID NO: 113626 - DNA, 219 bp, synthetic construct
  misc_feature 1..219: note = Description of Artificial Sequence: Synthetic coding sequence
  source 1..219: mol_type = other DNA
atggagccgttcgtcgttctggtgctgtgcctttcttttatgttactgttttctctgtggcggcagtcttgtagaaggagaaagctcccccccggccccaccccattgcccattattggaaatatgcttcagatcgatgtgaaggatatttgcaaaagcttcactaacgtctcgcttccatatgtcccaccagcaaattgcaaaggggtgctgctgtag

SEQ ID NO: 113627 - DNA, 423 bp, synthetic construct
  misc_feature 1..423: note = Description of Artificial Sequence: Synthetic coding sequence
  source 1..423: mol_type = other DNA
atggatctaatccctaatctggctgttgagacttggttacttctggcagtgtctctggtactgctttatttgtacggtacaagaacccacgggctgtttaaaagattaggaattccaggtccaacccccctgcctcttctgggcaatgtcctgagctacaggcaaggattgtggaaatttgataccgaatgctacaaaaagtatggcaagatgtggggaacctatgaaggtcaactgcccgtgctggccattaccgatccagatgtaatccgcacagtgctggtgaaagaatgctactctgtttttactaataggcgcatttgcgccaccaccagcactataaaaatgcagacccattcagtcactatgtggctcccaccagccgttctccagtctcaacacggagtttgtttatttttatag

SEQ ID NO: 113628 - DNA, 1563 bp, synthetic construct
  misc_feature 1..1563: note = Description of Artificial Sequence: Synthetic coding sequence
  source 1..1563: mol_type = other DNA
atgccccagctgtccctgagctcactgggcctttggccaatggctgcctccccctggctgctcctgctgttggtcggcgcctcatggcttctagccagaatcttagcctggacctatacattttatgataactgctgccgactgaggtgtttccctcagccgcctaaacggaattggttccttggacatctcggcttggtcacaccaacggagcaaggaatgagagtcctgacccagcttgtcgccacctaccctcagggttttaaggtatggatgggacccatatttcctgtaatccgcttctgtcaccccaatatcatccggagtgttattaatgcaagcgctgcaatagtgcccaaagataaggtattctactccttcctgaagccttggctgggcgacggtctgctcctcagcgcaggtgaaaaatggagccgccaccggcggatgctgacacccgcatttcattttaatatcctgaagccctacatgaagatcttcaatgagagcgtgaacattatgcacgccaagtggcagctgctcgcctccgaaggtagtgctagacttgatatgtttgagcatataagcctgatgacactggacagtctccagaaatgcgtgttcagcttcgatagtcactgtcaagagaaacccagtgagtatattgctgcgattctggagctctccgcgcttgtaacgaagcgacaccagcagatcctgctgtacatcgatttcctgtactacctgactcctgacgggcagaggtttagaagagcatgcagactggtgcacgactttaccgacgccgtgattcaggagcgacggcggactcttccgtcgcaaggagtcgatgacttcctgcaggcaaaagccaaatcaaagaccttagattttatcgatgtgttgttactgagtaaagacgaggacgggaagaaattgtccgacgaggatattagagcagaagccgacacgtttatgtttgaaggacatgacaccacggcatcaggcttatcctgggtcctgtatcacctggccaaacacccggagtaccaagaacgctgcagacaggaggtacaggaactcctcaaggatcgcgagcctaaagagatcgaatgggacgatcttgcccagctgcccttcttaaccatgtgtatcaaagagtccttgcgtttgcacccaccagtccccgcagtgtcgaggtgctgcacacaagacattgtgctgcctgatggcagagttatcccaaagggcataatctgtctgattagtgtgttcgggactcatcacaacccagctgtgtggcccgaccccgaagtatatgatccctttaggtttgatcctaagaacatcaaagagaggtcaccactggcattcatcccgttctctgctggcccgcggaattgcatcggtcaggccttcgctatggccgagatgaaggtggtcctgggtctgacactgctccgatttagggtgcttcctgatcacacagaaccccggcgaaaaccagagctggtgctgcgcgccgaagggggactatggctgcgagtggaacccctgagttag

SEQ ID NO: 113629 - DNA, 1455 bp, synthetic construct
  misc_feature 1..1455: note = Description of Artificial Sequence: Synthetic coding sequence
  source 1..1455: mol_type = other DNA
atgttattccctatcagtatgtctgcaaccgagttcttacttgcctctgtgatcttttgtctggtcttttgggtcatcagagcgtccaggcctcaggtgcctaagggactcaaaaacccgcctggcccgtggggctggccactgatcggccacatgcttacgctgggtaaaaatccacacctcgccctcagccggatgagccagcagtatggagacgtcctgcagatcaggatcggctccactccagttgtggtcctcagcgggcttgacaccatccgacaagctctggttagacagggggacgatttcaagggacgtccggatctgtacaccttcacccttatctccaacggccagtccatgtctttcagcccggattcaggtcctgtttgggcagccaggcggcgactggcgcagaacggccttaagtctttttctatcgccagcgatccagcctcttcaacaagctgttacttggaagagcatgtgagcaaagaggccgaagtgttgataagtaccctgcaggagctgatggccgggcccggacatttcaatccatacaggtatgtggtcgtgtccgtgaccaatgttatttgcgccatctgttttggacgacggtacgaccataatcaccaggaattactaagccttgtgaacctgaatgctttcaaagatctcaacgaaaaattctattccttcatgcaaaaaatggtcaaagagcattataagacatttgagaaaggccacatcagggacattactgacagcctcattgagcattgccaagaaaagcaactcgatgaaaatgctaacgttcaactgagtgacgagaaaatcattaatatcgtgctggacctctttggtgctggcttcgacaccgtcactaccgcaatatcctggagcttaatgtaccttgtgatgaacccgagggtgcagaggaagatccaggaagagctggataccgtcatcggcagaagtagaagacccagactctccgaccgttcgcatctaccctacatggaggcattcattctcgaaacgtttcgccacagcagcttcgtgccatttacaattccgcactctacaacacgagatactagtctcaagggcttctatattccgaagggacgatgtgtattcgtaaaccagtggcagataaaccatgaccagaagctctgggttaacccgagcgaattcctgccagaacggtttcttacacccgacggcgccattgataaagtgcttagtgaaaaagtaatcatctttggcatgggaaagagaaaatgcattggcgagacaatcgctcgatgggaggtattccttttcctcgcgatcctactgcagcgggttgagttttctgtgccactcggagtaaaagtggacatgacccccatctatggcctgacaatgaaacacgcttgctgcgagcattttcagatgcagctgcggagttag

SEQ ID NO: 113630 - DNA, 1539 bp, synthetic construct
  misc_feature 1..1539: note = Description of Artificial Sequence: Synthetic coding sequence
  source 1..1539: mol_type = other DNA
atgttgttcccaatttcgatgtctgcaaccgagtttctgctggcttctgtcatattctgtctggtgttctgggtcataagggcaagcaggccccaggttccaaaaggcctgaaaaaccccccagggccttggggctggcccctcatcggacacatgttaactcttggtaaaaaccctcatctcgccctaagcagaatgagccagcagtacggcgatgttttacagatcaggataggctccaccccagtggtggtactctccggacttgacactatcaggcaggccctcgtgcgacagggcgacgatttcaaagggagaccagacttatatactttcaccctgattagtaatggccaatctatgtcattctcccctgactctggtcctgtatgggcagccaggcgaagactggctcagaatggtctgaagtcattcagtatcgcgtccgatcctgcctcctccacttcctgctatttagaggagcacgtaagcaaggaggccgaggtcctgattagcactctgcaggagctaatggccggacctggtcactttaatccttaccgatacgtcgtcgtcagcgttaccaatgtgatctgcgcaatatgcttcggacgccggtacgatcacaaccatcaagagttgttgtccctggtgaacctcaacaataacttcggtgaagtggtggggtccggcaacccagccgacttcattccaattctccgatacctgcccaatccaagtctgaatgccttcaaggatctcaacgaaaagttctattctttcatgcagaagatggtgaaggagcactataaaacatttgaaaaagggcatatcagagatataacggatagcctgatcgaacattgtcaggaaaagcagctggatgagaatgcgaacgtccagctgagcgacgagaagattattaatatcgtgttagacctctttggggccggtttcgatacagtgacaactgcgatttcatggtccctgatgtatctggtgatgaacccccgcgttcagcgtaaaatccaagaggaactggacacagttataggccgctcacgcaggccacgtctatcagaccgatcccacctaccctatatggaagctttcatactggagactttcagacacagctcgtttgtcccatttaccatcccccactcaacaacccgcgacacctccctgaagggcttttatatccctaaaggccgttgcgtgtttgtgaaccagtggcaaatcaatcacgaccagaagctctgggtaaatcctagcgaattcctgccagagaggttcctgacccctgatggcgccatcgacaaagttttgagcgagaaagttataatcttcgggatgggaaagcgcaagtgtattggagaaacaatagcccgatgggaagtcttcctcttcctggccatcctgctccagcgggttgagtttagcgtgcctctgggcgtcaaggtggatatgactcctatctacggacttactatgaaacacgcctgctgcgaacacttccaaatgcagctccgaagttag

SEQ ID NO: 113631 - DNA, 1539 bp, synthetic construct
  misc_feature 1..1539: note = Description of Artificial Sequence: Synthetic coding sequence
  source 1..1539: mol_type = other DNA
atgctgttcccaatcagcatgtcagcaactgaatttctgttagcgtcggttatcttctgtcttgtgttctgggtgatacgagcgtcccggccacaagtccctaaaggcttgaagaacccgcccggcccctgggggtggcccctcataggccacatgctgactcttgggaagaatccccatctggcattaagtcgcatgagtcagcagtacggcgacgttcttcaaataaggataggttcgaccccagttgtggttctcagtgggttggatacaatacgccaggccttagtgcgacaaggagatgactttaaaggccggcccgacctgtatacatttactctgattagcaatgggcagtctatgtccttttcacccgacagcggacctgtatgggctgcccggagaaggttagctcaaaacggccttaagtcattttctattgcttccgatccagccagcagtacttcttgctatctggaagaacacgtgagcaaagaggccgaggtgttgattagcacactgcaggaactgatggccggtcctggccattttaacccatataggtacgtagtagtgagcgttacaaacgtgatttgtgcgatttgcttcgggagacggtacgaccataatcatcaggagttgttgagcttggtcaacttgaataacaacttcggggaagtggtgggctctggaaatcctgccgacttcatccctattctgagatacctgccaaacccatccctgaatgcctttaaagacctgaatgagaaattctattctttcatgcagaagatggtgaaggagcattataaaacctttgaaaagggccatattagggatattaccgattcactgattgaacactgccaggaaaaacagctcgacgagaacgccaatgtccagttaagtgatgagaaaattatcaatatcgttctagatttgttcggggcagggtttgacactgtcaccacagctatctcttggagcctgatgtacctggtcatgaacccccgcgtgcagagaaagatccaggaggagctcgacactgtcattgggcgctctagaaggccacgcctcagcgatagatctcacctgccgtatatggaagccttcattttggaaactttccggcacagctcgttcgtgccttttaccatccctcactcgaccacccgggacacatccttgaagggattttatattcccaaaggacgctgcgtatttgtgaaccagtggcagataaatcatgaccagaaattgtgggtgaacccgtccgagttcctgcccgagagatttctgacccccgatggcgccatagacaaggtactgtctgaaaaggttataatcttcggcatgggaaagcgcaagtgtataggggaaaccatagcccgttgggaggtcttccttttcctcgctatcctgctgcagcgcgtagagttcagcgtgccgctgggagtaaaggtggatatgacgcccatttacggcctgacaatgaaacacgcctgttgtgagcacttccagatgcaattgagatcctag

SEQ ID NO: 113632 - DNA, 1452 bp, synthetic construct
  misc_feature 1..1452: note = Description of Artificial Sequence: Synthetic coding sequence
  source 1..1452: mol_type = other DNA
atgctgtttcccatctccatgagcgcgaccgaatttctcctggcatctgtgatcttctgtctggtgttctgggtcattagggcaagccggccacaagtgcccaaaggactgaagaaccctccagggccgtggggttggccactcattggccatatgctgactttaggtaaaaatcctcatctcgcactgtctagaatgtctcagcagtatggagatgttttacagatcaggatcggaagtacacccgtggtcgtgctttctggcctcgatacgattaggcaggccctggtgaggcagggggatgattttaaaggcaggccagatctatataccttcaccttgatttctaatgggcagtctatgtccttctcgcctgattcaggccccgtgtgggctgcacggcggcgcttggctcagaatggtcttaagagcttctcgattgcttcagacccagcctcgagcaccagttgctatctggaggaacatgtttctaaggaagcggaagtcctgatctccaccctgcaagagcttatggcaggcccagggcacttcaatccttacagatacgtggtggtcagtgtaaccaacgtcatatgcgccatatgtttcggcagaagatatgaccacaaccaccaggagctgctgtccctcgtgaatcttaataacaattttggggaagtggttggcagcggaaaccccgccgatttcattccaattctccgctacctccctaaccccagcttgaatgcttttaaagatctgaatgaaaagttttactcatttatgcaaaagatggtgaaagaacactataaaacgttcgagaaagggcacattcgggatatcaccgatagtctgatcgagcactgtcaggagaagcagctggatgagaacgctaacgtacagctctcagacgagaaaattataaacattgtgctggatctgtttggtgcaggattcgacacagtcacgacagcgatcagttggtcccttatgtacctggtgatgaatcccagggtccaacggaagatccaggaagaactggatacagtgataggacgctcccgcagaccgagactttccgacagaagtcatcttccttacatggaggcattcattcttgaaacctttaggcacagttctttcgtgccgttcacaataccccacagaaagctctgggtcaatcctagtgaatttctcccagagcgcttcttaactcctgacggcgccatcgacaaggttctatctgagaaagtcatcattttcggtatgggtaagcgtaagtgcatcggtgagaccattgcccgatgggaggtgttcctgtttttggccatcctactgcagcgcgtcgagttctcagtgccattgggcgtgaaggtggacatgacaccgatctatggccttacaatgaaacacgcatgctgcgagcactttcagatgcaactcagatcgtag

SEQ ID NO: 113633 - DNA, 1551 bp, synthetic construct
  misc_feature 1..1551: note = Description of Artificial Sequence: Synthetic coding sequence
  source 1..1551: mol_type = other DNA
atggccttgtcccaatccgtccccttctcagccacggagctgctcctggcgagcgccatcttttgtctcgtattctgggttctcaaaggtctgcgcccacgagtgccaaaaggactgaagtctcctcctgagccttggggctggcctcttctaggacatgtgcttacattaggaaagaacccccacctcgcattatcccgcatgagccagaggtatggtgatgtgttacagatccggattgggtccactccagtgctggtgctttcccgcctcgacacaattcggcaagctcttgtgcgacagggcgacgactttaaaggcagaccagatctctacacttcaactctcattactgatgggcagtccctcacattttccacggactccggtccagtgtgggctgcccgccggaggctggcccaaaatgccctgaatactttcagcatcgcttccgaccctgcgtcttccagctcatgctacttagaggagcacgtcagcaaagaggctaaggctctgataagtcgcttgcaagagctaatggcgggcccaggacactttgatccatacaaccaggttgtggtgtccgtggcaaatgtgatcggagccatgtgttttgggcagcatttccctgagtcttccgacgaaatgttgtctctcgtaaaaaacactcacgaatttgtcgagacagccagttctgggaatccgctggatttcttccctattttgaggtaccttccaaaccctgccctgcagcgttttaaggcattcaaccagagatttctgtggttcctccagaaaacagtgcaggagcattaccaggacttcgacaagaatagtgttcgcgacattacaggggccctgtttaagcacagcaagaagggcccgagggcatccggcaacctcattccccaggaaaaaattgtcaatttagtgaacgacattttcggggctggcttcgacacggttaccacagctatatcctggtcattgatgtacttagtcacaaaaccagagatccagcgaaagattcagaaggagctggacaccgtgattggccgggaaaggcgcccacgcctctccgataggccacagttaccatatttagaagcgttcattctagagacctttaggcactccagcttccttccttttaccataccacactctaccacacgcgataccaccctcaacgggttttatatcccaaagaagtgctgtgtatttgttaaccaatggcaagtgaaccatgatccagagctgtgggaggatccaagcgaattccggccggagcgattcctgactgcggacggcaccgctattaataagcctttgtccgagaagatgatgttgtttggcatgggcaagcgcagatgcattggcgaggtgctggctaagtgggagattttcctcttcctggcgattctgctacagcaactggagttctcggtaccgccaggcgttaaagtggatttaacaccgatttatggtctgacgatgaagcacgctaggtgtgaacatgtgcaagcgcgcctgcgcttctctattaattag

SEQ ID NO: 113634 - DNA, 1512 bp, synthetic construct
  misc_feature 1..1512: note = Description of Artificial Sequence: Synthetic coding sequence
  source 1..1512: mol_type = other DNA
atggcgttgcgtgcaaaagcggaggtctgtatggctgtgccatggttgtcactgcagcgggctcaggccctgggtacccgggctgcccgagtgccacgcacggttctcccgttcgaagcgatgccccgcaggcccggcaaccgctggcttagactgctgcaaatctggcgagagcagggctacgaagatttacatctagaggtgcatcaaactttccaggaactgggacccattttcaggtacgacctgggcggagctggcatggtctgcgtcatgctgccagaggacgtcgaaaaattgcagcaagttgatagcctgcacccacatagaatgagcctcgagccatgggtcgcctacagacagcacagggggcacaaatgtggcgtctttcttttgaacggcccggagtggaggtttaaccgtctgcgactgaacccagaggtgctttctcccaatgccgtccagcgattcctccctatggttgatgccgtagccagggatttctcccaggctctcaagaagaaagttctccagaacgcccgcgggtccctgactctggacgtgcagccatctatttttcattatactattgaggcctcaaatcttgcattatttggggagagactggggctggtgggacatagcccttcttccgcctctctgaattttctccacgccttggaagtgatgttcaagtctacagtccaattgatgtttatgccccgcagcctgtccaggtggacaagtccaaaagtgtggaaggagcacttcgaggcttgggactgtattttccagtatggtgataactgcattcagaagatttaccaggagctcgctttctcaaggcctcagcaatacacctctattgttgcagagttgctgcttaacgctgagcttagtcccgacgcgattaaagcgaactcaatggagctgacagcaggtagcgtggatactaccgtgttccctctcctcatgacactgtttgagttggccaggaatcccaatgtgcagcaggcactgcggcaagagtcattggcagctgccgcctcgatcagcgaacatccacagaaagccactaccgagttacccttattaagggcagcgctcaaagaaaccctgcggctgtatccggtcggattattcctggagagagtggcttcgagtgatctcgtgcttcaaaactaccatatccctgccggaacacttgtacgcgtgttcctttatagtctcggaaggaaccccgcgttgtttccacggccagaaaggtacaacccacagcgctggctggatatccgtgggtccgggcgaaatttttaccatgtgccattcgggtttggcatgagacaatgtttggggcggcgtctggctgaggccgaaatgctgctgctgctgcatcacgtcttgaagcacctgcaggtcgagaccttaactcaggaagacattaagatggtgtacagcttcatcttacgcccgtctatgttccccctgctgacatttcgtgcaattaactag

SEQ ID NO: 113635 - DNA, 1314 bp, synthetic construct
  misc_feature 1..1314: note = Description of Artificial Sequence: Synthetic coding sequence
  source 1..1314: mol_type = other DNA
atggccctaagagcaaaagctgaggtctgtatggctgttccatggctttcccttcagcgcgcacaagcccttggcactcgcgcagccagggtccctcgtactgtcctgcctttcgaggccatgccgcgaagaccgggcaacaggtggcttcgcctgttacagatttggcgcgaacagggttatgaggacttgcacctcgaggtacaccagacgtttcaggaacttggccccattttccgctacgatctcggaggagcaggcatggtctgtgtgatgttgcctgaggatgtggagaagttgcagcaagtggattctctgcacccgcataggatgagtttggaaccatgggttgcctataggcagcaccgaggccacaagtgtggagtatttctgttaaacgggcctgagtggagatttaacagactgcgcctgaaccctgaggttctgtctcctaacgccgtgcaacggttcctgccaatggtggatgccgtcgctagagacttctctcaggccttgaaaaagaaggtgttgcagaatgcaagaggctctctgaccctggacgtgcagccatccatattccattacaccatcgaagcttccaacctcgcgcttttcggtgaacgccttggcttggttggccactcaccctcgagcgcgagcctcaattttctgcatgctttagaggtcatgttcaagagtaccgtacaactcatgtttatgcccagaagtctgtccaggtggacaagcccaaaggtttggaaggaacatttcgaagcttgggattgtatctttcaatatggtgataactgtatccagaagatttatcaggagttggcttttagccgccctcagcagtacacatccatcgttgcggaactcctgctgaacgctgaattgtcaccggacgccatcaaagccaattcaatggaactcacagccggaagcgtggataccacagtctttccactattgatgaccctgttcgaactggcaagaaaccctaatgtgcaacaagcccttaggcaggagagcttggccgccgcagcttctatttccgagcacccgcagaaggcgactacagagttgccactcctcagggcagccctgaaagagacactgaggctgtatccagtgggtctgttccttgagcgcgttgctagctccgaccttgttctccagaactaccacattcccgccggagttctgaaacatctgcaagtagaaactctcacacaggaggatatcaaaatggtttactccttcatccttagaccttccatgttcccgttgctcacattccgagctatcaactag

SEQ ID NO: 113636 - DNA, 1512 bp, synthetic construct
  misc_feature 1..1512: note = Description of Artificial Sequence: Synthetic coding sequence
  source 1..1512: mol_type = other DNA
atggcactaagagccaaagctgaggtttgcgtggctgccccctggctgagcctccagcgcgctcgggccctcggcaccagggctgctagggcaccccgaactgtcttgcccttcgaggcgatgccacaacatccagggaatagatggctgcggttgcttcaaatttggagggagcagggctacgaacatcttcaccttgagatgcatcagacgttccaggaacttggcccaatcttcagatacaacttagggggtccccgcatggtgtgtgtgatgttgcctgaggacgtggagaaactgcagcaggttgacagcctacatccttgtagaatgatactggagccatgggttgcctaccgacaacatcggggccacaagtgtggggtgttcctgctgaatgggcctgaatggcgtttcaacagacttcgcttgaacccagacgtcctcagcccaaaggcagtccagcgcttcctccctatggtggatgccgtagcacgcgactttagccaggccctgaagaagaaggtactgcagaacgcaagaggctcactgacgctggatgtgcagccctcaatttttcattacaccatcgaagcatcaaacctggcgctctttggagagcgcctcggcctggtcgggcacagtccaagctccgcttctctgaactttctacacgccctcgaggtaatgttcaagagcactgtgcagttgatgttcatgcccagaagcctgtctcgatggattagtcccaaggtttggaaagaacattttgaagcttgggactgcattttccagtatggggacaactgtatccaaaaaatttatcaggaactggcctttaatcgcccacagcactacacagggattgtagctgagttattactgaaggcggagctgtcactcgaagccatcaaggcaaatagcatggaattaacggccgggagcgttgacactacagctttccctttactgatgacgctcttcgagctcgcacggaatcctgacgtccagcagatcctacgacaggaaagtcttgccgctgctgcctccattagcgaacaccctcagaaagctacaacagaattgcccctgctgagagcagctcttaaagagacactgagattgtatcctgttgggttattcctagagcgggttgttagctcagacctggtgctgcagaactatcacattcctgccggcaccttggtgcaggtgtttctgtatagcttggggcggaatgccgctttgttcccacggccggaaagatataacccacagagatggctcgatataaggggtagcggccggaactttcatcacgtcccgttcggatttggcatgcggcagtgtctgggacggaggttggcggaagcggagatgctgctgctgctccaccacgttctgaagcactttttagttgaaaccttgacgcaagaggacatcaagatggtgtatagcttcattctgcggcccggcacctctcccttgttgaccttcagggcaatcaactag

SEQ ID NO: 113637 - DNA, 1527 bp, synthetic construct
  misc_feature 1..1527: note = Description of Artificial Sequence: Synthetic coding sequence
  source 1..1527: mol_type = other DNA
atgtgggagttggtggcactcctgctcctgacgctggcttatctgttctggcctaaacgcagatgtcctggggctaaataccccaaaagccttctgagcctcccccttgtgggaagcttgccgtttctgcctcgtcacggacacatgcataacaatttctttaagctccagaaaaaatatggtcctatctattcagtacgcatgggaacaaagactaccgttatcgtgggacaccatcagctggccaaagaagtgttaatcaagaaagggaaagactttagcggtcggccccaaatggccactttggacatcgcctccaataatcggaaaggtatagcctttgccgattctggggctcattggcagcttcaccgtcgacttgctatggcaaccttcgccttattcaaggacggagaccaaaagctggaaaagatcatctgtcaggaaatttctaccctgtgcgacatgctggctacacacaatggacaatcaattgatattagtttcccagtatttgtggccgtaacaaacgtcatcagccttatctgttttaacacaagttataagaatggcgatcccgaactaaatgtgatccagaattataatgagggtataattgataacctgagtaaggattcattagttgacttagtaccatggctgaaaatttttccaaacaagacacttgagaagcttaagagccatgtgaagatcaggaacgacctgttgaacaaaatcttagaaaactataaagaaaagtttcggagcgatagcatcacaaatatgctcgacacactgatgcaggccaagatgaattcagacaacggcaacgctggccccgatcaggactccgagctcctctctgataatcatattctgaccactataggcgacatcttcggggcaggcgtcgaaactactacctccgtcgtcaagtggacactggcatttctactccacaaccctcaggtcaagaaaaagctgtacgaagaaattgatcagaatgtgggattttcgcgaacccctaccatatcggatcgcaaccgattgctcttgcttgaggccaccatcagggaggtgctccggctgaggcctgtggcccccatgctcatcccgcacaaggccaatgtcgattcgtctatcggcgagttcgcagtcgacaaggggaccgaagtgattattaacctgtgggcactgcaccataacgagaaagaatggcatcagcccgatcagttcatgcctgagcggtttttgaaccccgcaggaacacagttgatatccccgtctgtctcttacctgccctttggtgctgggccaagatcctgtattggtgagatacttgccagacaagagctgttcctgatcatggcatggctcctgcaaagattcgacctcgaagtgcccgacgacggccagctcccatcactcgagggcatccccaaagtggttttcctgatagatagttttaaagtgaaaatcaaggtccgccaagcttggagggaagcgcaggcagaaggcagtacctag

SEQ ID NO: 113638 - DNA, 1512 bp, synthetic construct
  misc_feature 1..1512: note = Description of Artificial Sequence: Synthetic coding sequence
  source 1..1512: mol_type = other DNA
atggtgctggagatgctcaaccctatacattataacatcacgtcaatcgtccctgaggcgatgccagccgctacaatgcccgtgctgctgctaacaggcctgttcctacttgtgtggaactacgaaggcacaagttctattcctgggcctggatattgtatgggaatcggccctttaataagtcatggtcggttcctgtggatgggtattggttctgcttgcaactattacaaccgagtctacggtgaatttatgcgggtgtggatctctggtgaggagactttgatcattagcaagtcctcctcaatgttccacatcatgaaacataatcactattcgtctaggttcggatcaaagctcgggctacagtgtattggcatgcacgaaaagggaatcattttcaacaacaacccagagctttggaaaacaacacggccgttttttatgaaagccctgtcaggacccgggctagttcgcatggtgacagtgtgcgcggagagtttgaagacacatctggaccgcctggaggaagttaccaatgagtccgggtacgtggacgtcttgactttactgcgacgggtgatgcttgatacctccaatactctgttcctgaggatccccttggacgagagtgccatcgtggtgaagattcagggctactttgatgcatggcaggcccttctgattaagcccgatattttttttaagatttcgtggctgtataaaaaatatgagaagtctgtgaaagacctcaaggatgctatcgaagtccttatcgccgagaaaaggaggagaatctccactgaagaaaaactcgaggagtgtatggattttgccactgaactcatcctggccgagaagagaggggacctgacacgtgaaaatgttaaccaatgtatccttgagatgctgatagcagctcccgacacaatgagcgtcagtctttttttcatgctgttcctgatcgctaagcacccaaacgtggaggaggccattatcaaagaaatccagaccgtcattggagagcgcgacatcaaaatcgacgatatccagaagctgaaagtcatggaaaattttatctatgagtctatgcggtatcagccagtcgtggacctggtaatgcgcaaggcactcgaagacgacgttattgacgggtacccagtgaaaaagggtactaatatcatcctgaacatcggccgaatgcaccgtctagaattttttcctaaaccaaacgaatttacactggagaactttgcaaagaatgttccttacaggtactttcagccatttggcttcggccccagaggctgtgccggaaaatatatcgccatggtcatgatgaaagccatactggtaaccctcttacgcagatttcacgttaaaaccctgcaggggcaatgcgtggagtccatccagaagattcacgatctcagtctacacccagatgagactaaaaacatgctggaaatgattttcacccctcggaattccgaccgctgcctcgaacattag

SEQ ID NO: 113639 - DNA, 1512 bp, synthetic construct
  misc_feature 1..1512: note = Description of Artificial Sequence: Synthetic coding sequence
  source 1..1512: mol_type = other DNA
atggtgctcgaaatgctgaacccaattcattataacatcactagcatcgtcccagaagccatgcctgcagctaccatgcctgttctgctgcttaccggcctgttcctgctggtatggaactacgagggtacctctagcatacctggaccaggctactgcatggggattggaccactgatctcccatggtagattcctgtggatgggcataggctcggcttgtaactactacaatagggtctatggcgaattcatgcgcgtgtggatatccggtgaggaaaccttgatcatcagtaaaagctcgagcatgttccacatcatgaagcacaaccactactcgtctagattcggcagcaagctcggcctccagtgcatcggcatgcacgagaaagggatcatcttcaataataaccccgagctatggaaaacaacacgcccattttttatgaaggccctgtcgggccctggactcgtccgcatggtcaccgtctgcgctgaatcactaaagactcacctggataggctggaagaagtgacgaatgaatcagggtacgtcgacgttctgacactactccggcgcgtcatgctggataccagcaacaccctctttctgagaattcccctagatgaaagcgccattgtggtgaagatccagggctactttgacgcttggcaggcgctgctgattaaaccagacatattctttaaaatctcatggctttataagaagtatgaaaagtctgtgaaggatctgaaagacgcaatcgaagtgttgattgcagagaaaagaagaaggatcagcacagaggaaaagttggaggagtgtatggacttcgccaccgaactaattcttgcagagaagcggggcgaccttacacgggaaaacgtcaatcagtgcatcttggaaatgctcattgcagcccctgacactatgagtgtcagtctcttctttatgctgttcctgattgccaaacaccctaacgtggaagaagcaataattaaggaaatccagactgtgattggtgagcgcgatattaaaattgatgacattcagaagctgaaggttatggagaattttatttatgaatcaatgagatatcagcctgtcgtggacctggtgatgcgaaaagctctggaggatgacgtcattgatggctatccagtaaagaaaggtaccaacattatcctcaacatcggaagaatgcatcggctggagttctttcctaagcctaacgaatttacactggagaacttcgctaagaatgtcccctaccggtacttccagccttttggatttgggccacggggatgcgccgggaaatacatcgcaatggtgatgatgaaagccatccttgtgactcttctccgtcggttccatgtaaagacactgcagggccagtgcgtggagagcatccagaagatccacgatctgagcctgcaccccgacgagacaaaaaacatgttagagatgatctttacacctcgcaattcagacaggtgcctggagcattag

SEQ ID NO: 113640 - DNA, 1512 bp, synthetic construct
  misc_feature 1..1512: note = Description of Artificial Sequence: Synthetic coding sequence
  source 1..1512: mol_type = other DNA
atggttctggagatgctcaatccaatacactataacatcacctctatcgtgccagaggccatgccggcagccaccatgccagttctcctactgacaggcctgttcctgctcgtgtggaactacgaaggaacatcctctatccctggccctggatattgtatgggtatcggtcccttaatctcccacggtagattcttgtggatgggcattggttcggcgtgtaattattacaacagagtatatggcgaatttatgcgggtctggattagcggggaggaaactctgattatcagcaaaagcagcagtatgtttcatatcatgaagcacaaccattatagctctcgattcggatctaaacttgggctgcagtgcataggcatgcatgaaaagggcattatattcaataacaaccccgaattgtggaaaactacaaggcccttttttatgaaggccctatcgggccccggactggtaaggatggtaactgtctgtgcagaatcactcaaaacacacctggatcggttggaggaagtgaccaacgagagcggttacgttgacgtcctcacattgctgaggagggtaatgctcgacacaagcaacaccctattcctgcggattcccctggacgaatccgccattgtcgtgaaaatccaggggtatttcgacgcctggcaagcactgctgattaagcccgatatattcttcaagatttcctggctctacaagaagtacgaaaaatctgtgaaagatttaaaagatgcaattgaggtgttgattgctgagaaacggcggcgtatatccaccgaggagaagttagaggaatgtatggactttgccactgagctaatcctggcggaaaaacggggagacctgacccgggagaacgtgaatcagtgcatcctcgagatgctgatcgctgcccctgacacgatgtcagtctccctgtttttcatgctctttctgatagcaaagcatcctaatgtcgaggaggctatcattaaagaaatacagaccgtaattggagagagagatatcaagattgatgacattcagaagttaaaagttatggaaaacttcatctacgagagcatgcgataccaacctgtcgtggacctggtgatgcgaaaggcattagaggatgatgtcatcgatggctatcccgtcaaaaaggggacaaatatcatcctgaacatagggcgcatgcaccgactcgagttctttccaaaacctaacgaatttaccctggagaatttcgcaaagaacgttccctaccgatatttccagccattcggatttggaccaagaggctgcgctggtaagtacattgctatggtcatgatgaaagccatccttgtgacccttctgcgcaggtttcatgtgaagacactgcaggggcagtgcgttgagagtatccagaagattcatgatttgtcgttgcatccagacgagactaagaacatgctggagatgattttcactccccgcaactccgatcgctgtctcgaacattag

SEQ ID NO: 113641 - DNA, 501 bp, synthetic construct
  misc_feature 1..501: note = Description of Artificial Sequence: Synthetic coding sequence
  source 1..501: mol_type = other DNA
atggtcctggagatgttgaatcccattcattacaacattacctctatcgtacccgaagcgatgcctgccgccacgatgcccgtgcttttgctgaccgggctttttctactggtatggaactacgaggggacaagctctatcccagggcctggttactgtatgggaattgggccattgattagtcatggccgattcctgtggatgggtattgggtcagcatgtaactactataatagagtgtatggtgaattcatgagggtctggatttccggcgaggagactttgattatctccaagagtagtagcatgtttcatataatgaagcacaaccactactcctctcgctttgggtccaaattgggactccagtgtatcggtatgcacgaaaaaggcatcatttttaataacaacccagagttgtggaagacaactcggcctttcttcatgaaggcactcagtggaccaggactggtgcggatggtaaccgtgtgtgccgagtag

SEQ ID NO: 113642 - DNA, 657 bp, synthetic construct
  misc_feature 1..657: note = Description of Artificial Sequence: Synthetic coding sequence
  source 1..657: mol_type = other DNA
atggttctggagatgctcaacccaattcattataacatcacaagtatcgtacccgaggccatgcccgcagcgaccatgcctgttttactcctgacgggcttgtttttgctcgtatggaattacgaaggtacctcatcaattccagggccaggttattgtatggggatagggccactgatttctcacggacggtttctttggatgggtattggctccgcctgcaattattataatagggtctacggtgaattcatgagggtgtggatctccggcgaggagaccctgatcatctccaagagctcctcgatgtttcacatcatgaagcacaatcactactcgagtagattcggctcgaaacttgggcttcaatgtattggtatgcatgagaaagggattatcttcaataataaccccgagctgtggaagacaacaagacccttttttatgaaagcgttgtccgggccgggtctggtccggatggttaccgtgtgtgccgagtcactaaagacacatctcgaccgtctggaagaggttaccaatgaaagcggatatgttgatgtgctgacgctcttgagaagagtcatgcttgacactagtaacacactgttcctgcgaattcctctggacggcacagagatcttcactctaacgtcttag

SEQ ID NO: 113643 - DNA, 1080 bp, synthetic construct
  misc_feature 1..1080: note = Description of Artificial Sequence: Synthetic coding sequence
  source 1..1080: mol_type = other DNA
atggtcctcgagatgttgaaccccatccactacaacatcacttcaattgtgccagaggccatgcccgcagctactatgcctgtgctgctgctgacagggctcttcctgctcgtctggaattatgaaggcacaagtagcatccccgggccggggtattgcatgggcatagggcccctgatatcccatggcagattcctatggatgggaatcgggagcgcctgcaattattataatcgggtgtacggcgagttcatgcgagtatggatttccggggaggaaacacttataatctccaaaagttctagcatgttccacataatgaaacacaatcactatagctccaggtttggtagtaagctgggattgcagtgcattgggatgcacgagaaaggaattatttttaacaataacccagaactttggaaaacaaccaggccattcttcatgaaagctctgtccggtcctggacttgtccggatggtaacagtctgtgcggaaagcctgaagacacatttggatcggctggaggaagtcactaacgaaagcggatacgtagacgtgctgaccttgttacgtagggtgatgctcgacaccagcaacaccctcttccttcgtatccccttggacgaatctgctatcgttgtgaaaattcagggatacttcgatgcctggcaggcgctgctgatcaagccagacatcttttttaagatctcttggctgtataaaaagtacgaaaagagcgttaaggatctcaaggacgccatcgaagtgctgatcgccgaaaaaagaaggcgtatcagcacagaggaaaagttagaagaatgcatggattttgccaccgaactgattttggccgaaaaacgtggggacttgacccgggaaaacgtcaatcaatgcattctagaaatgctcatagctgcccctgatactatgagtgtgagtctcttctttatgctcttcctgattgccaagcaccccaatgttgaggaggccatcatcaaagagattcaaacagtcatcggcgagcgtgatattaaaatagacgacatccagaaactgaagaagcatgatgcaaaatag

SEQ ID NO: 113644 - DNA, 1059 bp, synthetic construct
  misc_feature 1..1059: note = Description of Artificial Sequence: Synthetic coding sequence
  source 1..1059: mol_type = other DNA
atggtgctagagatgctcaatcccatccactataacataaccagtatcgtgccggaggctatgcccgctgccacaatgcccgttctcctgttgactggcctgttcctgctggtctggaactacgaagggacctcgagtatccctggccccggctactgcatggggataggaccactgatctcacacgggcggtttctctggatgggaatcggttccgcctgtaactattataatagggtgtacggcgagtttatgagagtgtggatctctggcgaagagactctaattatctctaagtcaagctctatgttccatattatgaagcataaccattattccagccggtttggtagcaagctggggctacaatgcataggcatgcatgagaagggcataatctttaacaataatcccgagctgtggaagacaacccgaccatttttcatgaaagccctgtctggcccgggcctggtgagaatggttacggtgtgtgcggagtcgttaaaaacccacctcgatcgtcttgaggaggtcactaatgaatccgggtatgttgacgtgctgaccctgctgcggagggtgatgctggataccagcaataccctgttcctaagaatacccctggatgagagcgccatcgtggtgaaaatccaaggttatttcgatgcatggcaggcgttgctgattaagcccgacatcttcttcaagattagttggctctataagaagtatgagaagtccgtgaaggatctaaaggacgcaattgaggtgctgatagccgaaaagcgtcgtcggatctctaccgaagagaaacttgaggaatgcatggacttcgcaacagagctgatactggcggaaaagcgcggtgatctcacacgcgaaaatgtgaaccagtgtattctagagatgctcatcgcggcccccgatactatgagcgtgagtttgttctttatgttgttcttgatcgccaaacaccccaacgtggaggaggccatcatcaaggaaatacagacggttataggggaaagggatattaagattgacgacatccagaagtag

SEQ ID NO: 113645 - DNA, 729 bp, synthetic construct
  misc_feature 1..729: note = Description of Artificial Sequence: Synthetic coding sequence
  source 1..729: mol_type = other DNA
atggtgcttgagatgcttaatcccatacattataatattacctcgatagtgcctgaggcaatgcccgccgccactatgccagtgttactccttaccgggttgttcttactggtctggaattatgagggcacatccagcatccccggtccagggtattgtatgggaataggcccattgatttctcatggcagatttctttggatgggtattgggagcgcatgtaactattataacagggtctacggggagttcatgcgagtgtggatcagcggtgaagaaactctgataatttcaaagtcctccagtatgtttcacatcatgaagcataatcactactcttctaggtttggctcgaaactggggctgcagtgcatcggaatgcatgaaaaaggcatcatattcaacaataaccccgaattatggaaaaccacacggccattctttatgaaggcactgtcaggtccaggcctggtgaggatggtgaccgtgtgtgcagaaagcctgaagacacacctggaccgacttgaagaggtcaccaatgaaagcgggtatgtggatgtgctgactctcctgagaagagttatgctggacacctctaatactctgttcttacgaatccctctggatgagagtgccatagttgttaagatacagggttactttgacgcctggcaggcactcttgataaagcccgacattttctttaagatctcctggctgtacaaatag

SEQ ID NO: 113646 - DNA, 546 bp, synthetic construct
  misc_feature 1..546: note = Description of Artificial Sequence: Synthetic coding sequence
  source 1..546: mol_type = other DNA
atggtgcttgagatgttaaatccaatccattataatatcacgagtatcgtgcctgaggccatgcccgcagccaccatgccagtgttgctcctgactggcctgtttctgctcgtatggaattacgagggtacgtcatcaatccctggaccggggtactgcatgggcatcggacccctgatttctcacgggcggttcctgtggatgggcattggctcagcctgcaactattataatagggtgtatggggagtttatgagggtgtggatctccggggaagagacgctgatcatttccaaaagctccagtatgtttcatattatgaaacacaatcattattcttcccgattcgggagcaaactggggcttcagtgcatcgggatgcatgaaaaggggatcatcttcaataataatcccgaactttggaagacaactagacccttctttatgaaggctctatcagggcccggactagtgcgtatggtcactgtgtgcgcggagtctttaaagacacatcttctcctgtttactccggcctccgtcaactag

SEQ ID NO: 113647 - DNA, 657 bp, synthetic construct
  misc_feature 1..657: note = Description of Artificial Sequence: Synthetic coding sequence
  source 1..657: mol_type = other DNA
atggtcctggagatgctgaaccccattcattataacattacctccattgttcccgaggccatgcctgctgccaccatgccggtactgttactaacaggactgttcctgctggtctggaattacgagggtacctctagtattccgggacccggatattgcatgggaattgggccactcattagccatgggcggtttctctggatgggcatagggtcggcttgtaattattacaacagagtgtacggggagttcatgcgtgtttggatttcaggagaagagacattaatcatcagcaaatcaagctcaatgttccacatcatgaagcacaaccattatagtagccgatttggaagtaagctgggtcttcagtgcatcggcatgcatgagaagggcataatcttcaataataatcctgagttgtggaagacaacaagaccctttttcatgaaggctctgagtggcccaggattagtgcgcatggtaaccgtatgtgcagagtctctgaagacccacctggatcggttggaagaagtaaccaatgagagtgggtacgttgacgtcctgacactgttgagaagagttatgctggatacctccaacaccctctttctccgcattccacttgacggtaccgagatttttactctgacgtcttag

SEQ ID NO: 113648 - DNA, 1059 bp, synthetic construct
  misc_feature 1..1059: note = Description of Artificial Sequence: Synthetic coding sequence
  source 1..1059: mol_type = other DNA
atggtcctggaaatgctcaaccctatccactacaacataacctccatcgtgcccgaagccatgcctgccgccacaatgcccgtcttactgctcacaggcctatttctgcttgtgtggaactatgaagggacatcaagtatacctggacccggatattgcatgggtatcggaccactgatctcacatggccgcttcctgtggatgggcataggttctgcttgcaattattacaaccgggtttacggggagttcatgagggtttggatttctggtgaggagacactgataattagtaagtcatcaagtatgtttcatattatgaagcacaaccactacagctctcggtttgggtcaaaactcggtcttcaatgcataggcatgcacgagaaaggtattatttttaataacaatccagaactctggaagaccacccgcccattcttcatgaaagccctgagcggccccggcctggtcaggatggtgactgtctgcgcagagtctctaaaaacccatctggataggctcgaagaagtgacgaacgaatcagggtacgtcgatgtgctgactctgctgaggcgggttatgttagacacatctaatacactgttcctcagaattccattagatgagagcgccattgtggttaagatccagggctattttgacgcctggcaggctctgttgataaagcccgacatcttcttcaagattagttggctttacaaaaagtacgaaaaatccgtgaaggatctgaaggacgctatcgaggttctgatcgctgagaaacgccggcgcatcagtaccgaggaaaaacttgaggagtgcatggacttcgctacagaactgatacttgcagagaaacggggcgacctcacgcgagaaaatgtgaaccagtgtatcttagagatgctaatcgccgcccctgataccatgagcgtgagcctgtttttcatgctttttttaatcgctaagcaccctaatgttgaggaagcaatcatcaaggagattcagacagtgatcggagaaagggacatcaaaatcgatgatattcaaaaatag

SEQ ID NO: 113649 - DNA, 852 bp, synthetic construct
  misc_feature 1..852: note = Description of Artificial Sequence: Synthetic coding sequence
  source 1..852: mol_type = other DNA
atggtcttagaaatgttaaaccccatccattataacattacgtctattgtgccagaggccatgccagctgccacgatgccagtgctgctactgacaggccttttcctgctggtgtggaactacgaaggcacatcttcaatccccggacccggatattgcatgggcattgggccacttataagccacggacggtttctgtggatggggatcggcagcgcgtgtaactactacaatcgcgtttacggggagttcatgcgcgtttggatttccggggaagaaactcttattataagcaaatcgagttctatgttccacatcatgaaacataatcattacagcagtcggtttggcagtaagctgggacttcagtgcatcggaatgcatgagaagggcatcatctttaacaataatcccgagttatggaagactactcgcccttttttcatgaaagcactgagtgggccgggcctggtcaggatggtgactgtctgtgccgaatctctgaagacccacctggaccggttggaagaggtgaccaacgaatccggctacgtcgatgtgctgacactactgaggcgggtcatgttggatacaagtaacactttgtttctgcgcatccccctggacgagtctgcaattgtagtaaagatccagggatacttcgatgcatggcaagcactactaatcaagcccgatattttctttaagatctcatggctctataaaaaatacgagaaaagcgtaaaggatctgaaggatgcaatagaggtactgattgccgaaaaacgacggaggatctccactgaagagaaattagaagaatgcatggattttgccacggagctgatttag

SEQ ID NO: 113650 - DNA, 498 bp, synthetic construct
  misc_feature 1..498: note = Description of Artificial Sequence: Synthetic coding sequence
  source 1..498: mol_type = other DNA
atggtgttggaaatgctgaaccctattcactacaacataaccagcatcgtaccagaggcgatgcctgccgcgactatgcctgtgctgcttctgaccggcttatttctgttggtttggaattacgagggaacttccagcatccccgggcccggctactgcatggggatcgggcccctcatttcgcacggccgttttctgtggatgggcatagggtccgcctgtaactattacaacagagtgtacggtgagtttatgagagtctggatatctggagaagaaacactgataatcagcaaaagttccagtatgttccatattatgaaacataatcactacagcagccgctttgggtccaagcttggcttgcagtgcatagggatgcatgaaaaaggtatcattttcaataataaccctgaactgtggaaaaccacgcggccattttttatgaaggcactttcagggccagggttggtgaggatggtgacagtctgtgcttag

SEQ ID NO: 113651 - DNA, 1512 bp, synthetic construct
  misc_feature 1..1512: note = Description of Artificial Sequence: Synthetic coding sequence
  source 1..1512: mol_type = other DNA
atggtgctggaaatgctgaaccctattcactacaacatcaccagtatagtcccagaagctatgccagccgccactatgccagttctgctccttacaggtctctttcttttagtttggaactatgagggaacctccagtatccctgggccaggctattgcatgggcattgggcctcttatttcccacggtaggttcctctggatgggaattggttctgcctgtaattattacaaccgtgtatacggcgaattcatgcgagtttggatctcaggcgaggaaactctgattatatctaagtccagctcaatgttccacatcatgaagcacaaccattacagcagcaggttcggaagcaaactcggtctccagtgcatcggaatgcacgaaaaaggaattatttttaataacaacccagagctgtggaagaccacaaggcccttcttcatgaaggcccttagcggtccaggtctggtgcgcatggtaaccgtgtgcgccgagtccctgaagacgcatctcgatagactggaggaagtgacaaatgaaagtggatatgtagatgtgctgactctcctgaggcgggtgatgctcgacacttctaatactttgttcttacggatcccgctggacgagagcgctatcgtagtgaagattcaaggctatttcgatgcgtggcaagccctgttgatcaagccggatatatttttcaagattagctggctgtacaaaaagtacgaaaagagcgtgaaagatctgaaggatgccattgaagttctcatcgccgaaaagaggcggcggattagtaccgaagagaagctggaggaatgtatggacttcgccactgaactgattttggctgagaagcggggggatctgacaagggagaacgtgaatcaatgcatcctggagatgcttattgccgcgcccgataccatgagcgtcagtctcttcttcatgctattcttgatagcaaaacaccccaacgttgaggaagcgatcatcaaagagatacagacggtaatcggggaaagagatattaaaattgacgacatccagaaactgaaggtcatggaaaattttatttatgaatcaatgcgctaccagcccgttgtggatttagtgatgcggaaagccctcgaggatgatgtgattgatggttatccagtcaagaaaggcacgaacattatcttaaacataggaagaatgcacaggcttgagttctttcccaagccgaatgaatttaccctggagaattttgctaagaacgtgccataccgctactttcaaccctttggcttcgggccaaggggctgtgccggcaaatatatagcaatggtgatgatgaaggccatactagtgaccctcttgaggcgtttccacgtgaagacactgcaggggcaatgtgtagagtcaatccagaagatccacgatctatcccttcaccccgatgaaaccaagaacatgcttgaaatgatatttacgccaagaaatagcgatcgctgcctggaacactag

SEQ ID NO: 113652 - DNA, 519 bp, synthetic construct
  misc_feature 1..519: note = Description of Artificial Sequence: Synthetic coding sequence
  source 1..519: mol_type = other DNA
atggtccttgagatgttaaatccaatacattacaacattacttctatcgtgccagaggccatgcctgccgcaaccatgccggttttgctcctcacagggctgttcctgctggtgtggaactacgaaggcacttccagcatacctggccccgggtattgcatggggatcggccctctcatcagtcacggtagatttctgtggatgggcattgggagcgcctgtaactattacaatcgtgtctatggcgagttcatgagagtgtggatatcaggcgaggaaaccctgataatatccaagagctcctcaatgttccacatcatgaagcataatcactactcgagccgtttcggctccaaactgggcctgcaatgcataggcatgcatgaaaaggggattatttttaataacaacccggagctgtggaaaaccactagaccattctttatgaaagctctctcaggaccagggttggtgagaatggtcacagtctgcgctgaatcactcaaaacacacttgtag

SEQ ID NO: 113653 - DNA, 735 bp, synthetic construct
  misc_feature 1..735: note = Description of Artificial Sequence: Synthetic coding sequence
  source 1..735: mol_type = other DNA
atggtgcttgaaatgctgaatcccatacactacaacataaccagcattgtgccggaagcgatgccggcggccacaatgcctgtgctgctgctgaccggcctctttctgttagtgtggaactacgaggggacctcttctattccaggccctggatattgtatgggtattgggcctcttattagccacggtaggttcctgtggatggggataggttccgcctgtaattattataatcgcgtgtacggcgaatttatgagggtttggatatctggcgaagaaactctgattatttctaaatcctcaagcatgttccacattatgaagcacaaccattattctagcaggttcggctctaaactggggctgcaatgcattggtatgcacgagaaaggaattatctttaataataatcccgagctttggaaaacaacacgccccttcttcatgaaggagagcgccatcgtagtaaaaattcagggatattttgacgcctggcaggctcttcttatcaaaccagacattttttttaaaatctcctggctttacaagaagtacgaaaagtccgtgaaggacctgaaggacgcaatcgaagtgctgatagctgagaaaaggagaaggatatccacggaagagaagctcgaggagtgcatggattttgcgactgaactgatcttagctgagaagcgtggtgacttgaccagggagaatgtcaaccaatgtatcctcgaaatgtag

SEQ ID NO: 113654 - DNA, 1485 bp, synthetic construct
  misc_feature 1..1485: note = Description of Artificial Sequence: Synthetic coding sequence
  source 1..1485: mol_type = other DNA
atgctggcctccgggctcctcctggtcacgctgctggcttgcctgacagtcatggttctgatgagcgtctggaggcagcgcaagtcccgaggcaaactgccgcccggacccacacccttacccttcattggcaattaccttcagctcaatactgagcagatgtacaatagtctgatgaagatatccgagcgctatggacccgtattcactatccacctgggccctcgacgcgttgtggtgctgtgcggccacgatgccgtgaaagaagcactcgtagatcaggctgaagaattcagcggcagaggtgaacaagcaaccttcgattggctgttcaaggggtacggcgtggctttcagtaatggcgaaagagcgaagcagctgagacggttctccatagcaactctgcggggattcggcgtgggaaagcgaggcatcgaggaacgcattcaggaggaagccggcttcctcattgacgcgctccgggggacccatggcgcaaacattgaccccacgttctttctgtcccgcactgtgtctaacgtgatttccagcatcgtcttcggcgatagattcgactacgaggacaaggaatttttaagcctcctgaggatgatgctggggtccttccagtttactgctactagtactggccagctgtatgagatgtttagctccgtcatgaagcatctgcccggtcctcagcagcaggctttcaaggaactgcaggggttagaggatttcatagccaaaaaggttgagcacaaccagcggacacttgatcccaacagccccagagactttatcgatagtttcctgatccggatgcaggaagaggaaaagaatccaaacactgagttctacctgaaaaacctggtcatgaccaccctcaatctcttttttgccggtaccgagaccgtctccacgacattgcggtatggattcctcctcttgatgaagcatcctgaggtggaagctaaagtgcacgaagagatagatcgggtcatcgggaaaaacagacagcctaagtttgaagaccgagctaagatgccgtacacagaggccgtgatccatgaaatacagcgattcggagatatgctcccaatggggttggctcatcgtgtgaacaaggatactaagtttcgcgattttttcctccccaaaggcactgaagtcttccctatgctcggctccgtgcttcgcgacccaaggttttttagcaatccccgagacttcaatccacagcacttccttgacaaaaaaggacaatttaagaagtctgatgcattcgtgcctttcagtattggtaagcggtactgtttcggagagggtttggcacgaatggaattatttctgttcttcactaccataatgcaaaacttccggttcaaatccccacaaagtcccaaggatattgatgtatctcccaagcacgtgggctttgctactattccccgtaattacactatgtcttttttaccgaggtag

SEQ ID NO: 113655 - DNA, 1485 bp, synthetic construct
  misc_feature 1..1485: note = Description of Artificial Sequence: Synthetic coding sequence
  source 1..1485: mol_type = other DNA
atgttagcaagcggcatgctcttagtggcccttctcgtctgcctcacggttatggttcttatgagcgtgtggcagcagagaaagtccaagggaaagctgccaccagggccaacccctctgcccttcatcgggaattacctgcagctgaatacagaacagatgtataactccttgatgaagatctcggaacgctacgggcccgtgtttacgattcatttgggaccaagacgcgtggttgtgctatgtgggcatgacgctgttagggaagccctggtcgaccaggcagaagaattcagcgggcgtggcgagcaggccacattcgactgggtattcaagggctatggcgtagtattcagtaatggggagagagccaagcagctgagacggttttcaatcgccacgctgagggatttcggagtggggaagagagggatcgaagagcgcatacaggaagaagcaggattcctgatcgatgctctgcgaggcaccggcggggccaacatcgatcccaccttcttcttaagccgtacggtgagcaacgttatatccagtatcgtgtttggcgataggttcgactataaggacaaggaattcctttctcttttacgcatgatgctcgggatcttccagtttacttctacttcaaccggtcagctgtatgaaatgttctcttctgtgatgaagcacctgccagggccccaacagcaggcattccagctactgcaggggctggaagattttatcgctaaaaaagtggaacacaatcaacgaacccttgatccgaacagtccccgcgatttcatagacagctttttgataaggatgcaggaagaagagaaaaatccgaataccgagttttatctcaagaatctcgtcatgaccaccctgaatctgttcatcgggggtaccgaaactgtgtcgacgacactgcggtacggcttcctcctactcatgaagcaccctgaagtggaggcaaaggtgcatgaagagattgaccgagttattgggaagaatagacagcctaaatttgaagacagggcgaagatgccatacatggaggctgtaatacatgaaattcagcggtttggcgacgtaatccccatgtctctggcccgcagggtcaaaaaggacaccaagtttagagacttcttcctgcctaaggggactgaggttttcccaatgctgggctctgtgctccgagatccatcattctttagtaatccacaggatttcaatccccagcactttttgaacgagaagggacagttcaaaaaatctgacgcatttgtacctttttccattggaaagcgtaactgttttggcgaagggctcgcgcgtatggaactcttcctgttctttaccacagttatgcaaaattttcgtctgaagagttctcagtccccaaaagacattgatgtgagccccaagcatgttgggttcgccacgattcctagaaactatacgatgagttttcttccccgctag

SEQ ID NO: 113656 - DNA, 1332 bp, synthetic construct
  misc_feature 1..1332: note = Description of Artificial Sequence: Synthetic coding sequence
  source 1..1332: mol_type = other DNA
atgttggctagcggtctgcttcttgtagccctgctggcttgcctgactgtcatggttttgatgagcgtgtggcaacagcgcaaatctagagggaagctccccccaggaccaacgccacttccattcataggtaactaccttcagctcaacactgagcacatatgtgactcaatcatgaaggtttctcagggcgtagccttctctaacggagaaagggctaagcaattactccggttcgctatagccacactgcgagactttggcgtcgggaaacggggcatcgaggagagaatccaggaggagtccggatttttgattgaggcaatccgaagcacccacggcgccaatatcgatcccacgttctttctctcacgaacagtatcaaatgtgatttccagtatcgtgttcggcgatcgctttgattacgaggataaggaattcctctcactgttatccatgatgcttgggatttttcagttcacgagtacttccaccggccagctgtacgagatgttcagtagcgtgatgaagcatttgcccggcccgcagcaacaagccttcaagctgttgcagggactggaagatttcatcgctaaaaaagtggaacataatcagaggactctcgatcctaacagtccacaggattttatagactcattccttattcatatgcaggaggaggaaaagaatcccaacactgaattctatctcaagaacctcatgatgtccaccttgaacctattcatcgcgggcacagagacggtcagcaccaccttgagatatggctttctgctcttaatgaagcaccccgaggtggaggctaaggtccacgaggagattgacagagttataggcaagaacaggcagcccaagtttgaggacaggacgaaaatgccttacatggaagctgttattcatgagattcagcgattcggtgacgtgattcccatgagtctcgcacggagagtcaaaaaggacacaaagtttcgcgacttttttttgcccaagggaactgaggtgtttccaatgctggggtcagtgctgcgcgatccaagcttttttagtaatccccaggactttaatccccaacattttctggatgacaaggggcagttcaagaagtccgatgcttttgtacccttttcaatcggcaagaggaattgctttggcgagggacttgctcggatggagctgttcctgttctttaccactgtgatgcaaaactttcgcctgaagagctcccaatcacctaaagacattgacgtgtcccctaaacatgtcgtgttcgctactatcccccgcaattacacaatgtctttccttcctcgctag

SEQ ID NO: 113657 - DNA, 1485 bp, synthetic construct
  misc_feature 1..1485: note = Description of Artificial Sequence: Synthetic coding sequence
  source 1..1485: mol_type = other DNA
atgttggcttcagggctgttactggtcgctttacttgcctgtttgaccgtaatggttctgatgagtgtatggcagcagcgtaaaagccgcgggaaactgcctccaggacctaccccattgccattcattggaaactatctacagctgaacacggaacacatctgcgattcgattatgaagttcagtgaatgttacggcccagtattcactatccatctcgggccacggagggtggtagtgctctgcggtcatgatgcagttagggaagcgctggtggaccaggccgaagagttctcaggccgaggagaacaagccaccttcgactgggtgttcaagggttacggggtggcttttagtaacggggagagagcaaaacaacttttacggtttgcgatagccacattgcgcgatttcggagttggcaaaaggggcatagaggagcgcatccaggaggaaagcggctttttaatcgaagccatcaggagcacccacggcgcaaatattgatccgactttttttctgtcacgcactgtgtcaaacgtgatctctagcatcgtgtttggtgatcgatttgactacgaagacaaggaatttctctctctcctgagtatgatgctgggaatcttccagttcacctccacatcaaccggacagttgtacgagatgttttcctccgtgatgaaacatctacccggaccccagcagcaggcattcaagcttctgcaggggctggaagattttatcgcaaagaaagtcgagcacaatcaacgcaccctcgatcctaatagcccccaggattttatcgattccttcctgattcacatgcaggaagaagagaagaatcctaacaccgagttttacttgaaaaacctgatgatgtccaccctgaacctgttcattgccgggactgagaccgtctcgaccaccctccggtacggatttctgctcctcatgaagcatccggaggtcgaggcaaaggtccacgaggaaatagatcgagtgatcggcaagaacagacagcccaaattcgaggatcgcaccaagatgccttacatggaggccgtcatccatgagattcaaagatttggcgacgtaattcccatgtctctcgcgaggagggtgaaaaaggatactaagtttcgcgacttcttcctgcccaaaggaacagaggtgttccccatgctcgggagcgtgcttcgagacccatcatttttcagcaatccccaagacttcaaccctcaacattttttagatgataaaggtcaattcaagaaaagcgacgcttttgtgcctttttctataggcaagaggaactgcttcggggagggactggctcgaatggaattattcctctttttcaccacagtgatgcagaatttccgactcaaatccagccagagtccaaaggatatagacgtctcacctaaacacgtagtgttcgcgaccatcccccgcaactataccatgtcattcttgccacgttag

SEQ ID NO: 113658 - DNA, 1476 bp, synthetic construct
  misc_feature 1..1476: note = Description of Artificial Sequence: Synthetic coding sequence
  source 1..1476: mol_type = other DNA
atggagctttctgtcctgttgttcctggcactgttaactgggctgctgctgctgctggtgcagcgtcaccccaatacacacgatcgccttcccccaggccccaggcctctgcctctattaggcaatctgctgcagatggatagacgcggtctcctcaagtcctttctccgctttcgggaaaagtacggggatgttttcacagtgcacctcggaccgagaccggttgtgatgctgtgtggtgtcgaagccatccgcgaggccctcgtggacaaggcggaggctttttccggaaggggcaagatagctatggtggacccattttttagaggatacggagtgatttttgccaatggcaacaggtggaaagttctaagaagattctctgtgacgactatgagggactttgggatggggaaacgaagtgtggaggaaagaattcaggaagaggcacagtgcctgatcgaggagctgcgaaagtctaaaggggctctgatggaccccacttttctgttccaatccatcactgccaacatcatctgttctatcgttttcgggaagcgatttcattaccaagaccaggaatttctgaagatgctcaatctgttctaccagactttcagtctgataagcagtgtcttcgggcagttattcgagctgtttagcggatttcttaaatatttcccaggggcccaccggcaagtgtacaagaatctgcaagagattaacgcctacattgggcactctgtggaaaagcacagagagaccttggacccatcggcccccaaggatctgattgatacctacctgctccacatggagaaggagaagtccaacgctcacagcgaattctcacatcagaatttaaaccttaacaccttgtctctgtttttcgcaggaactgagaccacatcaaccaccctcagatacgggttcctgcttatgctgaagtacccacacgttgccgaacgagtgtaccgtgaaatcgagcaggttattggtcctcacaggcccccggagctccacgatagggctaagatgccgtacacggaggccgttatctacgagatccagcgtttcagtgacctccttcccatgggcgtgccacacattgtgacccagcatacctctttcaggggctacattatccccaaagacacggaggtcttcctaattctttcgacagcccttcatgaccctcactacttcgagaagcctgacgcttttaatcctgatcatttccttgatgcaaacggggctctaaaaaaaacagaggcattcattcctttctctctcggaaaacggatttgtcttggagaagggatcgccagagcggagttatttctctttttcactacaatcttacaaaacttttctatggccagtcccgtagcgcccgaagacattgaccttacgcctcaagagtgcggcgttggaaagatcccccctacgtatcaaatccgcttcctgccacggtag

SEQ ID NO: 113659 - DNA, 876 bp, synthetic construct
  misc_feature 1..876: note = Description of Artificial Sequence: Synthetic coding sequence
  source 1..876: mol_type = other DNA
atgcgctgcatgcttacgaatagccatccttggtgtgggtgcgactggcagtttagagaaaagtacggtgacgtgttcacggtgcacctgggcccccgaccagtagtgatgctctgcggcgtcgaggccatcagggaagctctggtggacaaagccgaagcatttagtgggcggggcaagatcgccatggtcgatccattcttcaggggttatggcgttatcttcgccaatggcaataggtggaaagtgctgcgtcggttcagcgtcacaacaatgagagatttcgggatgggtaaacgctcagtcgaggagagaatccaggaggaggcccagtgcctgattgaggagttgcgcaaaagcaaggagagggtataccgggaaatcgagcaggttatagggccccataggcctcccgaacttcacgatagggcaaaaatgccatatactgaagccgtgatttacgaaattcagcgttttagcgatctgctccctatgggcgtgccacacattgtcactcagcacacaagcttcagaggctacattattccaaaggataccgaggtcttcctcattctgtcgacagccctccatgatccccattatttcgagaaaccagacgccttcaacccagatcacttccttgacgccaatggtgcgctgaaaaagacagaggcattcataccctttagcctgggtaagcgtatatgtcttggggagggcattgccagggccgagctgttcttgttttttaccaccattctgcagaatttctccatggctagccccgtggcaccggaggatattgacctgaccccacaggagtgcggtgtgggaaagatccctcccacataccagatccggttcctgccgagatag

SEQ ID NO: 113660 - DNA, 1473 bp, synthetic construct
  misc_feature 1..1473: note = Description of Artificial Sequence: Synthetic coding sequence
  source 1..1473: mol_type = other DNA
atggatcccttcgtggttctggtcctgtgtctttcttgcctgcttctgttgtcgatttggcgccagagctcaggacgaggcaaactgccccctggacccacgccactgcccgtgatcgggaacatcctccagatcgatatcaaggatgtctcaaagtcactgacgaacttatcaaaaatttacggtccagtgttcactttgtactttggtctggagcgtatggtggtccttcacggctacgaagtagtgaaggaggccctcattgatctcggcgaggaattctctggacggggccatttccccctggccgagagagcaaatagaggatttggcattgttttcagcaacggtaaacgttggaaggaaatcaggaggttttccctaatgacactaagaaatttcgggatgggaaaacgctccattgaagaccgcgtgcaggaggaagcacgctgcttagtggaggagctgcggaagaccaaggcttccccatgcgacccgacttttatcttgggatgtgcgccctgcaatgtaatctgctcaattatcttccaaaaacgtttcgactacaaagatcagcagttcctaaatttgatggaaaagttgaacgagaacatccggatcgttagcacaccctggattcaaatctgtaataattttccaacaattatcgattattttccaggcacacacaacaagttgctgaaaaatctcgctttcatggaatccgatatactggagaaggtgaaggaacatcaagagagtatggatattaacaacccccgcgatttcatagattgtttcttaataaaaatggagaaggaaaaacagaaccaacaatctgaattcaccattgagaacctagtgatcactgcggccgatctactaggagccggcactgagacaacttccaccacccttcggtacgccttgctactgcttctgaaacaccctgaagtgacagccaaagtacaggaagagatagagcgagttgtgggtcgcaacagatctccttgtatgcaggatagaggacatatgccctacacagacgccgtggtccatgaagtgcagaggtatatcgacctcatccccacctccctcccccatgcggtcacatgtgatgtgaaattcagaaattacttaattccaaaaggtacaacaatcttgacaagcctaacaagcgtcctgcacgataacaaagagttccctaaccccgagatgttcgatcctaggcatttcctggacgaaggcggaaacttcaagaagagcaactattttatgcccttcagcgcggggaagcgcatttgtgtcggggaagggctagcacgaatggagttattcctgttcttgactttcattctgcaaaatttcaacctgaagtcattaattgacccaaaagatcttgatacaaccccggtggtcaacggctttgcctctgtgccaccattttatcagctgtgctttattcctgtgtag

SEQ ID NO: 113661 - DNA, 1473 bp, synthetic construct
  misc_feature 1..1473: note = Description of Artificial Sequence: Synthetic coding sequence
  source 1..1473: mol_type = other DNA
atggaaccctttgtagttctggttctgtgcctgagcttcatgctacttttcagcctttggcgacagagctgtcgacgcagaaagttacccccgggccccaccccgctgccgatcatcgggaacatgttacaaattgacgtgaaagacatctgtaagtcttttaccaatttctcaaaggtttatggccccgtctttactgtgtattttgggatgaacccgattgtggtatttcacggatacgaggcagtgaaggaggccctcattgacaacggtgaagagttttcgggacggggcaatagtcctataagccagagaattacaaaagggttgggtatcatcagttccaatgggaaacggtggaaggagattcgtagattcagcctgacaactctgcggaactttggcatgggcaagcgcagcattgaagacagagttcaggaggaagcacactgtctcgtcgaggaactgagaaaaacaaaggcaagcccatgtgatcctacatttatcctcggatgtgcgccatgcaacgtaatctgctcggtcgtgtttcagaaaaggttcgactataaggatcaaaattttctgacccttatgaaaagatttaatgagaattttcgaattctaaactccccttggatccaggtgtgtaacaactttccgctcctcattgactgttttcccggcacacataataaagtgctgaaaaacgtcgctctcacgcgctcctatataagagaaaaggtcaaggagcaccaagccagccttgacgtaaataaccccagagactttatcgattgtttcctgatcaaaatggaacaagagaaggacaatcaaaagagcgaatttaatatagagaaccttgtgggtaccgtggcagacctcttcgttgcaggaacagagactacttctacaactctacggtacgggctattgctgctcctcaaacatccggaggtcacagccaaagtacaggaagagatcgatcacgtcattgggcgacaccgctcaccttgcatgcaggacaggtcacacatgccatacactgacgccgtcgtgcacgagattcagcggtatagcgaccttgtgcccaccggcgtgcctcacgccgtgacaacggacaccaagttccggaattatcttattccgaagggcactacgattatggcccttcttactagcgtgctgcatgacgacaaggagttcccaaatcctaatatatttgatcctggccacttcttggataagaacggcaacttcaaaaaatcagattattttatgcctttctccgccgggaagcgaatttgcgctggtgaaggactcgctcgcatggaactatttctgtttcttacaaccatccttcagaatttcaacctgaagtcagtggacgatctcaagaacctgaataccacagccgttactaaaggtattgtttcccttccgccaagttaccagatctgcttcattcctgtgtag

SEQ ID NO: 113662 - DNA, 1374 bp, synthetic construct
  misc_feature 1..1374: note = Description of Artificial Sequence: Synthetic coding sequence
  source 1..1374: mol_type = other DNA
atggagcgcagctttctcgaagaggccattccccagtatctgaaagaattgctgaaagatctggttggcgctcacatcagcgtctccgcccttgtcacaggggtgcgcggcatggaaaatagggctctgaagagtttcagtgccgaattaagtctcagcgcctggttaccttccgtcgctgctctgagttcccttgctgttaattcaccgagtttctgtccgttttttctaggcattattagcagtaatggaaaacggtggaaagaaatcagacgattctcactgacaaccctcaggaacttcgggatgggtaaacgcagtatagaagaccgggtgcaagaggaagcacactgcctcgtggaggagctgagaaaaaccaaagcctctccttgcgatccaactttcattttaggttgcgcaccctgtaacgtgatttgcagcgttgtgtttcagaaacggtttgactataaggaccaaaattttctgactttgatgaaaagattcaacgaaaattttcgaatcttgaattccccctggatacaggtctgcaacaattttcctctattaattgactgtttccccggaacccacaataaggtcctgaaaaatgtggcgctcacaagatcgtacattagagagaaagtaaaggaacatcaagcttccttagatgtaaataaccctcgcgacttcatcgattgtttcttaataaaaatggagcaggaaaaagataatcagaaatccgagttcaatatcgaaaatctggtaggcactgtggcagacctttttgtagccggcactgaaacaacatcaaccacacttcgctatggtctcttattgctgctcaagcaccctgaggtgaccgccaaagtgcaggaggagatagaccatgtgattggccgccaccgctcaccctgtatgcaggacagatcacacatgccgtatacggatgctgtcgtgcatgagatccagagatactcagacctggttccaaccggggtgcctcacgctgtgaccaccgataccaaatttcgcaactacctgattcccaagggtacgacaattatggccctgctgacttccgtcctacacgacgataaagaattccctaatcccaatatctttgatccaggacacttcctggataaaaatggcaatttcaagaagtccgactactttatgccctttagcgccggaaaacgcatatgcgccggcgaggggctcgccagaatggagcttttcctcttcctgacgacaattcttcaaaattttaacctcaagtctgtcgacgatctgaaaaatctgaacactacagcggtgacaaaaggcatcgtctctctgccgccgagctaccagatctgctttatcccagtatag

SEQ ID NO: 113663 - DNA, 1167 bp, synthetic construct
  misc_feature 1..1167: note = Description of Artificial Sequence: Synthetic coding sequence
  source 1..1167: mol_type = other DNA
atgtttctccagcctatcgcaaagggaattataagttccaacggtaagcgctggaaagaaatcagacggttttctctcacgacgctgaggaacttcggaatgggaaaacgatccatcgaggatagggttcaggaggaggcccattgcctcgtggaggaacttcgcaaaaccaaagcctctccctgcgatcctacatttattctgggctgtgcgccctgtaacgtaatttgcagcgtggtcttccagaaaagatttgactacaaggaccagaatttcctgaccctgatgaaaaggttcaatgaaaacttcaggatacttaattctccctggattcaagtgtgcaataacttcccactcctaatcgactgtttccctggaactcacaataaagtactcaagaatgtagcgttaacacgatcctacattagggagaaggtcaaggagcaccaggcatccttggatgtgaataacccacgggacttcattgactgtttcctgattaagatggagcaggagaaggataaccagaaatccgaatttaacatcgagaacttggtgggcaccgtagccgacctgtttgttgccggcacagagaccaccagcacaaccctcagatacggcttactcctgttgttgaagcaccctgaagtgacggcaaaggtccaggaggagatcgaccatgttataggaagacaccgcagcccgtgtatgcaggaccggagccacatgccctacacagacgctgtggtccacgagatccaacgctattccgatttggtgcccaccggagtccctcatgccgtgacgacagatactaagtttcgtaactatcttattcccaagggaaccacaataatggctctgctgacaagcgtcctccacgatgataaggaattccccaatccaaatatttttgatcccggacactttctagataagaacgggaatttcaagaaatccgattattttatgcctttttccgctggaaagcggatctgcgccggagagggcctggcaagaatggagctgtttttattcttgactacaattctgcaaaatttcaatctgaaatctgtcgacgatctgaaaaatttaaatacaactgctgtgaccaaaggtatcgtatccctgcctccatcgtatcagatctgttttattcccgtgtag

SEQ ID NO: 113664 - DNA, 924 bp, synthetic construct
  misc_feature 1..924: note = Description of Artificial Sequence: Synthetic coding sequence
  source 1..924: mol_type = other DNA
atggctgccaagtgttgttcaacgttctttctcggctgtgagttcagtcaatttttgcctctgtttctgcttggaataatttcgtcaaatggcaagcgctggaaggaaatccggcggttcagccttacgaccctgcggaatttcggaatgggcaagcgcagcatcgaggatagggttcaggaggaggcccactgtctggtggaagagctgagaaagaccaaggcatctccatgcgatcctactttcattctaggctgcgccccatgcaacgttatttgtagtgtggtcttccagaagagattcgactacaaagaccagaattttctgacgctgatgaagcggttcaacgagaatttcaggattctgaactccccctggatccaggtgtgcaacaactttccgctattgattgattgttttccgggaactcataataaagtgctgaagaacgtggctctgacgcgttcctacataagggagaaggttaaagaacatcaggcctcactggatgtcaataatccgcgagactttatcgattgttttcttattaagatggaacaggagaaagacaatcagaaatcagaatttaatatagagaatttagtgggtactgtcgctgacttgttcgtcgcaggtaccgaaacgacaagcacaactcttaggtatggcctcctcttattgctgaagcacccagaagtgaccgccaaggtccaagaagagatagatcatgtgatcggcagacaccgctcaccctgcatgcaggatcgcagccatatgccatataccgacgctgttgttcatgaaatccagcggtacagcgatttagtgcctaccggggttccacacgccgttacaacggacaccaaatttaggaactacttaatccccaagagttttgataacaaaatcatgttggccgcctag

SEQ ID NO: 113665 - DNA, 1473 bp, synthetic construct
  misc_feature 1..1473: note = Description of Artificial Sequence: Synthetic coding sequence
  source 1..1473: mol_type = other DNA
atggactccctggttgtgttagtgctgtgtctgtcttgcctacttctcctcagtctgtggcgtcagtcgtcgggtcgcggtaaactgccccccggacccactccactgccagtcatcggcaacatcttgcagatcggcatcaaggacatttcaaaatccctgaccaatctctccaaagtgtacggccccgtttttacactgtatttcgggctcaagccaatcgttgtccttcacggctatgaagccgtgaaggaggccttaattgatttgggcgaagagttttccggccgcggtatattccctctcgctgagcgggccaaccgggggttcgggatcgtgtttagtaacgggaaaaaatggaaggaaatccgcagattcagtctgatgaccctccgaaactttggtatgggcaaaaggagcattgaagatagagtgcaggaggaggcaagatgtcttgtggaggaattgagaaagacgaaggcctcgccctgcgaccctacattcatcctggggtgcgctccatgcaacgtgatatgttctatcatttttcataaacggttcgactataaagatcaacaatttctcaatcttatggaaaaactcaatgaaaacattaaaatcctgagtagcccgtggatccagatttgcaataacttctctccaatcatcgactattttcccgggactcataacaagttgttaaagaatgtggcctttatgaaatcatacatactggaaaaagtcaaggagcaccaggaatcgatggacatgaacaacccgcaggacttcattgattgctttctgatgaagatggagaaggaaaaacataatcagcctagtgaattcaccattgaaagcctcgagaatacagctgtggacctcttcggggcggggaccgagaccacgagtacaaccttacgctacgccctgctactcctcctcaaacaccctgaagttacagcaaaagtgcaggaggaaatcgagagagtgattggaagaaacaggtccccatgtatgcaggatagatcccatatgccatacacggatgccgtcgttcatgaggtccagaggtatatcgatctcttgcctaccagcctgccacacgcggtcacctgcgatattaaatttagaaattacctgatccccaaggggactacaattttgatctccctgacaagcgtcctgcacgacaacaaagagttcccgaacccagagatgttcgaccctcaccacttcctagacgagggcggtaactttaagaagtcaaaatatttcatgccctttagcgctgggaaaaggatctgcgtgggggaggccctcgccggcatggaattgttcctctttttaacctctattctccagaatttcaacctgaagtcccttgtggatcctaagaacctggacactaccccagtggtaaatgggttcgcgtccgtgcctcctttttaccagctctgtttcatccctgtgtag

SEQ ID NO: 113666 - DNA, 1362 bp, synthetic construct
  misc_feature 1..1362: note = Description of Artificial Sequence: Synthetic coding sequence
  source 1..1362: mol_type = other DNA
atggattccctggtggtgctggtcctctgtttgagctgtctgctcctcctgtcactctggcgacagagctcgggtcgtggcaagctgccacccggcccgactccactgcctgttatcggcaacatcttacagattggcatcaaagacatttctaaaagtctgaccaatctgagtaaggtctatgggccagtgttcactctttatttcggactgaaacccatcgtagtcctgcatggctacgaagcagtgaaagaggctttgatagatcttggggaagaattttcagggcggggtatctttcctctcgctgaaagggctaatcgtgggtttgggatcgtcttttccaacggaaagaagtggaaggagattaggcggttttccttaatgacgctgcggaattttggcatgggtaagcgaagtatcgaggaccgcgtacaggaagaggcccgttgtctggtggaagaactacgaaagaccaaagcttctccctgcgatcccaccttcattctggggtgtgccccctgtaatgtaatctgttccatcattttccacaaacgatttgattataaggatcaacagttcttaaacctgatggaaaagctcaacgagaacatcaagatcctttcgagcccatggattcaaatctgcaacaacttctcccctattattgactactttcccggtacccacaacaaactactgaaaaacgtcgcattcatgaagtcttacatactcgagaaggtcaaagagcaccaggagagcatggatatgaataacccccaggattttatagactgtttcttaatgaagatggagaaggaaaaacataaccagccaagtgagtttaccatcgaatccttggaaaatactgccgtggatctctttggcgctgggacagagactacttctaccacgctgcgctacgctcttctactgcttctaaaacacccggaagtgacggccaaagtgcaggaggagatagaacgggtgatagggcgcaaccgctccccttgtatgcaagacaggtcccatatgccatataccgatgccgtggtgcatgaagtgcagaggtacatagatctcttgcccacgagtctgccacacgcagtgacctgtgacattaagtttcggaattacctaatccccaaagggactaccatactgatcagccttacttcagtccttcacgacaacaaagagttcccaaaccctgaaatgtttgacccacaccactttttggacgaggggggtaattttaagaagagcaagtacttcatgcttgtgttgaagatgatacgtacagagaggacaaaacgaaagagagtgggcaagcttttctgggtgtcagtccgagtaacttag

SEQ ID NO: 113667 - DNA, 1341 bp, synthetic construct
  misc_feature 1..1341: note = Description of Artificial Sequence: Synthetic coding sequence
  source 1..1341: mol_type = other DNA
atgggactcgaagcattggtgccgctcgccgtcatcgtggccatctttctgttactcgttgacctcatgcaccgcagacagcgctgggccgcacgctatcccccagggccactgcctcttcccggactgggcaacctactgcatgtagactttcagaacacaccttactgtttcgatcagctacgcaggaggttcggggacgtgttcagcctgcagctggcctggaccccggtggtggttctcaacggcttagccgctgtgcgtgaagcccttgtgacccatggggaagacacagcggaccgccctcccgttccaatcacccaaatcctgggatttggtcccaggagccaaggtagaccttttagaccgaatggtctgctagacaaggctgtgtcaaatgtaattgcatctctaacttgtggtagacgtttcgagtatgacgatcctcgattcctaagactgctggatctcgcccaggaaggattgaaagaagagtcaggcttcttgagggaagtgctcaacgcagtcccagtactgctacacatccccgctctggctgggaaggttctcagattccagaaggcatttctcactcagctggatgaactgttaacggaacatcgaatgacatgggatcctgcacagccacccagggaccttactgaagcctttttagcggaaatggagaaagccaaggggaaccccgagtccagcttcaacgacgaaaacctgtgtattgttgtcgccgacctcttttccgctggtatggtgacaacttccactaccctggcctggggcttacttttaatgatcctacaccctgacgtgcaaaggcgggtacaacaggaaatagacgatgtcattggccaggtacgtcgtccggagatgggcgaccaggctcatatgccgtacaccactgccgtgatccacgaagttcagaggttcggcgatatcgtgcctctcggtgttacgcacatgacaagtagagatatcgaggtccaaggctttagaataccaaaaggcacaaccctgatcaccaatctatcctctgtgttgaaggacgaggccgtgtgggagaagcccttccggtttcatccggagcatttcctcgacgctcagggccattttgtcaagcccgaagcttttctcccgttttccgcgggacgcagagcatgtctcggcgagcccctggcgcgcatggaactatttttgttttttacaagcctcctgcagcacttcagtttttccgtgccgacgggacagcccagaccctcacaccacggagtattcgcatttctggtcaccccttcaccctacgaactgtgtgcggtgccaagatag

SEQ ID NO: 113668 - DNA, 1494 bp, synthetic construct
  misc_feature 1..1494: note = Description of Artificial Sequence: Synthetic coding sequence
  source 1..1494: mol_type = other DNA
atgggcctagaggccttagtgcctctggctgtgatcgttgcaatttttctcctgctggtagatttgatgcaccgaagacagcggtgggcagccaggtacccaccaggcccgcttccattaccggggcttggtaacctgcttcacgtagattttcaaaacactccctactgctttgatcagctgcgacgtaggtttggggacgtgttctctcttcagctagcgtggactccagtcgtggtgctaaatggcctagcggcggtgcgtgaggcattagttacacacggcgaagataccgctgatcgcccgcccgttccaatcacccagatcctgggttttggccccagatcacagggggtcttcctggcacggtacgggcccgcatggcgagagcagcgcaggttcagcgtgtccaccttacgaaatcttgggcttggcaagaagagtctggaacaatgggtcacggaagaggccgcttgcctgtgcgctgcctttgcaaatcattcagggcgtccctttagacccaacggtttactggataaggccgtatcaaatgtgattgcgtccttgacgtgtggtagacgcttcgaatatgacgaccctaggttcctgcggctactggacctcgctcaggaggggcttaaggaagaaagcggcttcctgcgcgaggtgctcaacgcagtccctgtgctcctccacatccccgctctcgccgggaaagtcttgaggtttcagaaggcttttctgacccagttggatgaactgttaactgaacatagaatgacatgggatcctgctcagccaccgcgggatttaacggaagcctttctggctgaaatggagaaggcgaagggtaaccctgaatcaagctttaacgatgaaaacctgtgtatcgtggtggccgacctattttccgccggtatggttaccacttccactaccctggcatggggcttacttctcatgatcctgcatcctgacgttcagcgacgcgtgcagcaggaaatagacgatgttattggacaggtgcggcgtcccgagatgggcgaccaagctcacatgccctatacaaccgccgtaattcacgaggtgcagcgttttggagatattgtccccctgggcgtgacccatatgacaagtcgggatatcgaagtccagggattccgtatccccaagggcacaaccctcattaccaacttaagcagtgtacttaaagacgaggctgtttgggaaaagccttttaggtttcatccggaacactttctggatgcccagggccacttcgtcaagcctgaggcatttctgccgttttccgccgggagacgagcctgcttgggggaaccattggcccgcatggagctcttcctgttctttacatctctcttgcagcatttctccttctcagttccaactggccaaccacgcccgagtcatcacggggttttcgctttcttggtaactccgtctccctacgagttgtgcgccgtccctaggtag

SEQ ID NO: 113669 - DNA, 1494 bp, synthetic construct
  misc_feature 1..1494: note = Description of Artificial Sequence: Synthetic coding sequence
  source 1..1494: mol_type = other DNA
atgggattagaagcgctggtccccctcgccgtaattgtggccatctttctcctactggtggaccttatgcataggcggcagagatgggctgcccgttacccaccgggtcccctgcctctgccgggcctggggaatctacttcatgttgattttcagaacaccccatactgttttgaccagctgcggcgcaggttcggcgacgtctttagcctccagctggcgtggactcccgtggtcgtattgaacggattagccgccgtgcgagaagccctggtcacacatggcgaggacactgctgataggccccctgtgcctatcacccagattctgggattcggaccacgcgggcagggcgtgtttcttgcgagatacgggcccgcatggagggaacagcggagattcagcgtctctaccctacgtaacctcggacttggcaagaaatccttggagcagtgggtaacggaagaagccgcttgtttatgtgccgcctttgccaaccacagtggacgccccttccgacctaatggcctgttggacaaggcagttagtaatgttattgcctcactgacatgtggaaggagatttgagtacgatgacccaaggttccttcgcctattggatttggcccaggaaggactcaaggaagagagtgggttcctgagagaagtgcttaatgcagtaccagtgctgcttcatatcccggcgctcgctggcaaggttctgcggtttcagaaggcctttctcacgcagttggacgaattgttgaccgagcacagaatgacatgggatccagcacagccccctagagatctcaccgaagcctttctggccgagatggagaaagctaagggcaacccagagagctcattcaatgacgaaaatttgtgcattgtggtggcagatctgttcagtgccggtatggtgacaacaagtaccacattggcatggggcctcctgcttatgatcttacacccagatgtccagaggagggtccagcaggaaattgacgacgttattggccaagtacggcgcccggagatgggtgaccaggcacacatgccttacaccacagctgtcatccacgaggtgcagcgattcggagatatcgtgccactgggtgtgacgcatatgaccagtagggacattgaagtgcagggcttccgtattccaaaaggcacaacactgatcaccaacctttcttcagtactaaaagatgaggctgtgtgggaaaagccatttcggttccacccagagcacttcctcgacgctcaggggcacttcgtgaagcctgaggcgttcctccctttttctgcaggccgccgcgcttgtcttggggaaccactggcaaggatggaactgttcttgtttttcacatcccttttgcagcatttctcttttagcgtgcccaccggacagccccggccctctcaccatggtgtgttcgcattcctcgtgaccccgagcccctatgagctctgcgccgtcccacgatag

SEQ ID NO: 113670 - DNA, 1332 bp, synthetic construct
  misc_feature 1..1332: note = Description of Artificial Sequence: Synthetic coding sequence
  source 1..1332: mol_type = other DNA
caggaagccctgactctgccgctgcagctgcgccggcgtttcggcgacgtcttttcactccagctggcttggacccctgtggtagtattaaatggtcttgcggcagtgcgcgaagcactggtgacacatggagaggacacagcagatcggcctcccgtcccaataacccagatcctgggctttggcccgcgcggacagggtgtctttttggcgcggtacggcccggcctggagagagcagaggagattcagtgttagcaccctccgtaatctagggctggggaagaaaagcctagaacagtgggtcactgaagaggccgcatgcctctgcgccgcgttcgcgaaccacgatgccccgttcgcgcccaccgtgtcatggacgaagcccaacgtgatcgcaagcctgacctgtggccggcggttcgaatatgacgaccccaggtttctccgtctgctggatttagcccaagaggggctgaaggaagagtccggctttctgagagaggtattgaacgccgtgcctgtattattacatatacctgccttggccggcaaagtcttgagatttcaaaaggccttcctgacccagttggacgagctgcttactgagcaccggatgacctgggatcctgcacagcccccaagggatctgacagaggctttcctggccgaaatggagaaggcgaagggtaacccagagtcaagcttcaacgatgagaacctgtgcatcgtggtcgccgacctgttcagcgccggaatggtgaccaccagcacaaccctcgcctgggggctattactcatgattttacatccagatgttcagagacgggtccagcaggagatcgacgacgtaatcggacaggttcggagaccggaaatgggggaccaggcccatatgccctacacaacggctgtgatacacgaggtccagcgcttcggagacatcgtccccctgggagtgacgcacatgaccagtagggatattgaagtgcagggttttcgcattccaaaagggaccaccctcattacaaatctgtccagtgtactgaaggacgaggccgtctgggagaagcccttcaggtttcaccccgagcactttcttgacgcacagggacatttcgtgaaacccgaagcttttctgcctttctctgctggccgtcgcgcttgccttggggagcctctggcccgcatggagcttttcctgtttttcactagtctactgcagcactttagcttctccgtacccaccgggcagccacgcccatcgcaccacggggtatttgctttcctcgtgaccccctccccatacgaactgtgtgcagtgcctcgctag

SEQ ID NO: 113671 - DNA, 1341 bp, synthetic construct
  misc_feature 1..1341: note = Description of Artificial Sequence: Synthetic coding sequence
  source 1..1341: mol_type = other DNA
atgggcttagaggcgcttgttcccctcgctatgattgtggcgatatttcttctgctcgttgacctgatgcacaggaggcagcgctgggccgcccgttacccgcctggccccctcccactgccagggctcggaaacttgctgcatgtggacttccaaaacacaccttactgctttgatcaactcagaaggcgattcggtgatgtgttctcattgcagctagcgtggacaccagtcgtcgtcctaaatggtcttgccgctgtcagggaagccctcgtcacccacggggaggacactgctgaccgccctccggtgccaattacccagatcttaggattcgggcccagatcccagggcaggcctttccgcccgaacgggttactcgacaaagcggtgagtaacgtcatcgcttctcttacctgcggcagacgattcgaatatgacgatcctagattcctgaggctgttggatctggctcaagaggggttaaaggaagaaagcggctttctgagggaggttctgaacgctgtaccggtgctcctgcacatccccgccttagccggcaaagtacttagattccagaaggccttcttgactcagctggacgagctgctgacagagcaccgtatgacttgggatcctgcacaacctccacgcgaccttactgaagcatttctcgctgaaatggaaaaagctaagggcaatcctgaaagctcttttaatgacgaaaatctgtgtattgtggttgctgacctcttcagcgccggtatggttactacttcgacaacactcgcgtggggactcctgcttatgatcctccacccagatgttcaaaggagagtgcagcaagagatcgacgacgtcatcggtcaggtccggaggcctgagatgggggatcaggcgcacatgccctacacaaccgccgtaatccacgaagtccagcggttcggcgacatagtcccgttaggcgttacgcacatgactagcagggacatcgaggtgcaggggttcaggatccccaagggtacaactctgattactaacctgtcatcggtcttgaaggacgaagccgtgtgggaaaaacctttccgcttccatccagagcactttcttgatgcacagggtcatttcgtcaaacctgaagcatttctgcccttttccgcaggcaggcgcgcatgtctcggggaacccctagccaggatggagttgtttctgtttttcactagtttgcttcaacacttttctttttccgttcctacagggcaacctaggcctagtcatcacggggtgtttgcttttctcgtcacaccatcaccatacgaactgtgtgctgtcccacgatag

SEQ ID NO: 113672 - DNA, 1482 bp, synthetic construct
  misc_feature 1..1482: note = Description of Artificial Sequence: Synthetic coding sequence
  source 1..1482: mol_type = other DNA
atgtccgccttgggtgtgaccgttgcactgctggtgtgggcggcattcctgctgttggtgtcgatgtggagacaggtgcattcctcttggaacctgccccccggaccttttcccctgccaatcatcggaaatttattccagcttgaactcaagaatattcctaagtcgttcacaagacttgcacagcggttcggacctgttttcacgctatatgtcggtagtcagagaatggtggtcatgcatggctacaaagctgtgaaggaagcactgttagattataaggatgagttcagcgggagaggagatcttcccgcatttcatgctcaccgcgacagaggaatcatatttaacaacggcccaacatggaaagatatccggcggttctcccttacaacgctgcgcaattacggtatgggcaaacaggggaatgagtcaaggattcagcgggaagcacactttctcctcgaagcgctgcggaaaacccagggccaacctttcgaccccaccttccttatcggatgcgcaccatgcaacgttattgctgacatcctcttccgtaaacacttcgattacaacgatgagaagttcttgaggctgatgtatctgtttaacgaaaacttccacttgttaagtaccccttggctgcagctatataacaattttccctcctttctccactacttaccaggatctcaccgtaaggtgatcaagaatgtagcagaagttaaagagtatgtatcggagagagtgaaagagcatcatcagtccctggaccccaactgtccaagggacttgacagactgtctccttgtcgaaatggagaaggagaagcattctgccgaacgcctctatacaatggacggcatcacagttacagttgccgacctatttttcgcaggcactgagacaacttcaacaacgttaaggtatggactactgatactgatgaagtacccggagattgaggaaaagctgcatgaggagatcgatagagtgataggaccttccagaattcctgcaatcaaggaccgccaggaaatgccttacatggacgctgtggtgcacgaaatacagcggttcataacactcgtcccaagtaatttgccgcacgaagcaaccagagacacgattttcagggggtatttaatcccaaagggcaccgtggtggtgcccacgttagattccgtcctgtatgacaaccaagagttcccagaccccgagaaatttaaaccggagcattttcttaacgagaatgggaaattcaaatatagcgactacttcaaaccatttagcacagggaagagggtgtgcgccggagagggactggccaggatggagctgttcttactgctgtgcgccatcctccagcactttaatctgaagccgttggtcgatccaaaggatatagatctctcccccatccatatcggttttggatgcataccacccagatataagctttgtgtgatccccagaagctag

SEQ ID NO: 113673 - DNA, 1482 bp, synthetic construct
  misc_feature 1..1482: note = Description of Artificial Sequence: Synthetic coding sequence
  source 1..1482: mol_type = other DNA
atgtcagccttaggtgtgaccgtggccttgttagtgtgggcagcattcctgttgctcgtgtccatgtggaggcaggtgcatagctcttggaacttgccacctggaccttttccgctaccaatcattggtaacctctttcagctggagctgaaaaacatcccaaagagttttactaggttggctcagagattcgggcccgtctttactttatacgttggctctcagaggatggtcgtgatgcacggctacaaggctgttaaggaggccctcctggactataaagatgagttctccgggcgcggggatctccctgctttccatgctcaccgcgacagaggaataatctttaacaacggaccgacatggaaagacattcgaaggttcagcttgacgacgctgcggaactacggcatggggaagcagggcaacgagtctagaatccaaagagaagcccacttcctcctcgaggctctccgtaagacacaagggcagccgttcgaccctaccttcctcatcggttgcgccccttgtaacgttatcgcggacatacttttcaggaaacacttcgattacaatgatgaaaaattcctgaggctcatgtatctgttcaacgaaaattttcacctgctaagcacaccctggcttcagttgtataacaacttcccttcattcctgcactacctccctggatcgcatagaaaagtgatcaagaacgtagccgaggttaaggaatacgtgtccgagagggtcaaagagcaccatcagtcccttgatccaaactgtccccgggatttgaccgactgtctgctggtggagatggagaaggaaaagcatagcgccgagcggttgtatactatggatggaattactgtgacggttgctgacctgttcttcgccggtacggaaaccactagcacaactctcagatatgggttgcttatcctgatgaaataccccgaaatcgaggagaaattacacgaggagatcgatcgcgtgattgggccttccagaattccggctatcaaagatagacaggagatgccatatatggatgccgtggtccatgagatacagaggtttatcaccctcgttccctctaacttaccacacgaagcaacccgcgacacaatcttccggggatatctgattcccaaggggacggtagtcgtgcctactcttgattctgtgttgtacgataaccaggagttccccgacccagaaaagttcaagcccgagcactttctgaatgagaatgggaagttcaaatatagtgactactttaagccatttagtaccggaaaaagagtctgtgccggcgaaggtctggcacgcatggagctctttctgctcttgtgtgctatactgcagcatttcaatctgaagccattagtggacccaaaagatattgatctgagccctattcacattggatttggatgcattcccccccgctacaagctttgcgtgataccgcgctcctag

SEQ ID NO: 113674 - DNA, 261 bp, synthetic construct
  misc_feature 1..261: note = Description of Artificial Sequence: Synthetic coding sequence
  source 1..261: mol_type = other DNA
atgagcgcgctcggcgtgaccgtggcccttcttgtgtgggcagcctttctcctgctggtgagcatgtggaggcaggttcattcgagctggaatctccctcccgggccattcccccttcctatcatcggcaatttgtttcagctggagttgaagaatatccccaagtcatttaccaggctggctcagcgattcggccctgtgttcaccctttacgtcggcagtcagaggatggtggttatgcatgggtataaagccgtttag

SEQ ID NO: 113675 - DNA, 1476 bp, synthetic construct
  misc_feature 1..1476: note = Description of Artificial Sequence: Synthetic coding sequence
  source 1..1476: mol_type = other DNA
atggactccatttccacagcaatcctgcttctcttgctcgcccttgtatgtctgcttctgacattaagcagcagggataagggcaaactgccgcctggaccacgacccttatccattttaggaaacctgctgctgctctgtagccaagacatgctcactagcctcaccaaactaagtaaagaatacggatcaatgtacacagttcatctgggaccccgtagggttgtggtcctttcaggttatcaggctgtgaaagaggctctcgtcgaccagggtgaagagttctcgggaaggggagattatcccgctttttttaactttaccaagggaaatggaatcgccttctctagcggcgacaggtggaaggtccttagacagttctcgatacaaattctcaggaacttcgggatgggcaaacgtagcatcgaagagcggatactcgaggaaggatcttttctgttagccgaactgcggaagaccgaaggagagccttttgatcctactttcgtgctttccagatccgttagtaacattatttgttccgtcctatttggttcccgcttcgattacgacgacgagcgtcttctgaccatcatcagattgatcaacgacaattttcagatcatgagtagcccatggggcgaactgtacgacatctttccctccctactggactgggttcctggaccccatcagcggatcttccaaaatttcaaatgtcttcgcgacctcatagcccactcagtgcacgaccatcaagcctctttagatcctcggagtccgcgagacttcatccagtgcttcctcactaagatggccgaagagaaggaagacccactgtcacattttcacatggatacactgttaatgacgacacataaccttcttttcggcggcactaagactgtgtcaacaacactacatcatgccttcctggccttgatgaagtatccgaaagtgcaggcaagggtccaggaggagatcgatctggtggtcggccgagctcgtcttcccgcactgaaggatagagcggctatgccttacaccgatgccgtgattcacgaggtgcaacgatttgccgatatcattcccatgaacctcccacatagggttactagggataccgcattccgagggtttctcatcccaaagggcaccgatgttatcacgctgctgaatactgttcactacgatccatctcaattcttaacccctcaggagtttaatcctgagcattttctggacgctaatcagagcttcaagaaatctcctgcctttatgccattttccgccgggaggcggttgtgtttgggggaatccctggcccgaatggagttattcctgtaccttacggcaattctgcagtcattttcgcttcagcccctcggcgcccctgaggatattgacctgacacccctatcttcaggtctcggcaacctcccccgaccttttcagctttgcctgcggcctaggtag

SEQ ID NO: 113676 - DNA, 1509 bp, synthetic construct
  misc_feature 1..1509: note = Description of Artificial Sequence: Synthetic coding sequence
  source 1..1509: mol_type = other DNA
atgctcgccgcaatgggttcactggccgccgccttatgggctgtggtacatcctcgtaccctcttgttaggaaccgtggcctttcttctcgctgctgacttcctgaagcgacgacgccccaaaaattaccctcctggcccctggcggctacccttcttgggtaacttcttcctcgtggacttcgaacagtcacacctggaggtacagctctttgtgaagaaatacggcaatctgttctccctcgaacttggggatatctcagcagtcctcatcacaggccttccactgataaaggaggcattaatacatatggatcagaactttggcaatagaccggtgactcctatgagagagcacatctttaagaagaatggattaattatgtcctctggacaggcctggaaagaacagcgtaggttcactctgaccgccctaaggaacttcggactgggcaagaagtctttggaagagagaattcaggaggaagcgcaacatttgacggaggctatcaaagaggagaacggtcaaccgttcgacccgcactttaagatcaataatgcagttagtaacattatctgctccattacattcggtgagaggttcgagtatcaagatagctggtttcagcaactgctcaaactgctagatgaggttacctacctggaagcaagcaagacatgtcaattatacaatgtgttcccatggatcatgaaatttcttcctggccctcatcagactctgttctccaactggaaaaagctcaagttgtttgtttcccatatgatcgataaacacagaaaggattggaatcctgccgaaacacgcgacttcatagatgcatacctgaaggaaatgtccaagcatactgggaaccccaccagttcctttcacgaggaaaaccttatttgttcaactctggacctgtttttcgccggaacagaaacgacttccacaactttgagatgggctctactctacatggccttgtatcccgagattcaggaaaaggtgcaagctgagatcgaccgtgtgattggccagggacagcagccctcaaccgccgcacgggagtctatgccctatacaaatgcggtaatccacgaggtccagagaatgggaaacataatcccactgaatgtgcctcgcgaggttacggttgacacaacattggctggctaccacctgcccaaaggcactatgatcctgacgaatttaacagctcttcaccgggatcctacagagtgggctacacccgatacatttaatcccgaccactttctggagaacggacagtttaaaaagcgcgaggctttcatgccgttcagtattggcaaacgggcatgcctgggggaacagctggctaggactgaactgttcatattttttacaagcctaatgcagaagttcacttttcggccccccaacaatgagaaactttctctaaagttcaggatgggcatcaccataagccccgtatcccacaggctgtgcgcagttccccaggtttag

SEQ ID NO: 113677 - DNA, 1506 bp, synthetic construct
  misc_feature 1..1506: note = Description of Artificial Sequence: Synthetic coding sequence
  source 1..1506: mol_type = other DNA
atgtggaaactctggagagccgaggaaggggccgctgccctgggcggcgcattgttcctccttttgtttgccctcggtgttcgacagttactgaagcaaaggaggcctatggggttccctccaggccctcctgggttaccctttatcggaaacatttactccctggctgcaagttccgagctgccccatgtctacatgcggaagcagtcacaagtctacggagagatcttttccttggatctcggagggatcagcaccgtggtactgaacggatatgatgtggttaaagagtgtctggtccaccaatcagaaatcttcgctgatcgcccatgcctcccgctgttcatgaagatgaccaagatgggcggcctcttgaactctaggtacgggcgtggttgggtggaccaccggagactggccgtgaacagtttccggtacttcggctacggacagaaatccttcgagtccaagattctcgaggaaacaaaatttttcaatgacgccattgaaacatacaaaggccgacccttcgacttcaagcaactaatcacgaatgctgtgtctaacataacgaacttaatcatttttggtgaacgcttcacctatgaagacactgattttcaacacatgattgagttgttcagtgaaaacgttgagctcgcagcaagcgcttccgtgtttctgtacaatgcctttccttggatcggtattctcccgttcggaaagcatcaacagctctttcgtaatgcagccgtagtctacgattttctgtcacgactgattgagaaggcgtccgttaacagaaaaccccagttaccacagcattttgttgacgcctatttagacgagatggatcagggaaagaatgacccttcatcaacattttcaaaagagaatctgatattcagcgtgggggagctgatcattgctggaaccgaaacaacaactaatgttctaagatgggcaattctgtttatggcactgtacccgaacatccagggacaggtccaaaaggagatagatcttattatgggcccgaatggaaaaccctcctgggacgacaagtgcaagatgccttacacagaggcagtgctgcacgaggtcctgcggttctgtaatattgtgccccttggtatttttcacgccacaagtgaggacgcagtcgtacgcggctattcaattcccaaaggcactaccgtgattactaacctgtattctgtccatttcgatgagaagtactggagagatcctgaggttttccacccggagaggtttttggattcttccgggtactttgccaagaaagaggccctggtgccttttagcttgggtcgtaggcactgtctcggggagcacttggctagaatggagatgttccttttctttaccgccctcctgcagcggtttcacctgcacttccctcatgaactcgtgcctgacctcaagccccgcctcgggatgacactgcagcctcaaccctacttaatttgtgcggaacgccgctag

SEQ ID NO: 113678 - DNA, 1695 bp, synthetic construct
  misc_feature 1..1695: note = Description of Artificial Sequence: Synthetic coding sequence
  source 1..1695: mol_type = other DNA
atggaggctaccggcacatgggccttgctgctggctctcgccctattgctcctcctgacattagccctctcaggtacccgggcccgcggccatctccctccgggacctacacccctgccactgctgggaaatctgttgcaactaagaccaggcgccttatatagcgggttgatgcggttgagtaagaagtatgggcctgtttttaccatctacctggggccctggaggccggtggttgtcctggtcggacaggaagcagtgcgtgaagcactggggggccaggctgaggagttttccggaagaggcactgtggccatgctcgagggtacttttgatgggcatggggttttcttctctaacggtgaaagatggcgccagctccgcaagttcacaatgttagctctccgtgacctgggaatgggcaaaagagagggcgaggagctgatccaggccgaagcccgatgcctggttgagacattccaaggcacggaagggaggccctttgacccctccctactgctggcgcaggctaccagcaatgtggtatgcagcctgctattcggcctaagattttcttacgaggacaaagagttccaagcggttgtgagagccgcaggaggtaccctgctgggtgtgagcagccagggaggccagacttacgaaatgtttagttggttcctaaggcccttgcctggtccacacaagcagctactacaccacgtcagtactctggctgcctttacagtgaggcaggttcagcaacatcagggcaacctcgacgccagcgggccagcgagggatctggtggacgcattcctgctgaagatggctcaggaggaacagaaccccggaactgaatttacaaacaaaaatatgctgatgacagtgatctacctccttttcgccggcaccatgaccgtcagcaccacagtaggctacacactcctgcttttgatgaaatacccccatgtacagaagtgggtgcgcgaagaattgaatagggagctgggggcagggcaagcacccagtctcggcgaccggacacggttaccctacacggatgcagtcctgcatgaggcccagaggcttctggctcttgtaccaatggggatcccccgcactctgatgcgaaccacaaggtttcgaggctatacgttgccgcagggcactgaggttttccccctcctgggaagtattctgcatgaccctaacatcttcaagcacccagaggaatttaatccggaccgttttctcgacgcggacgggcgcttccggaagcacgaggctttcctacctttctctctgggcaagcgggtctgcctgggcgaggggttggccaaagccgagttatttcttttcttcaccaccattctgcaagcattctcacttgagagcccttgtccacctgataccctgtcactcaaacctaccgttagtgggctgttcaacatcccccccgccagcactgtgggcatggaccgggtgaatgtgagcagggtatatacagcaggcagccacatttacaccccagccgtagtgttccggtctctgagccatggccctcacgcgcacctcactcatgccgcaaagatgcacaatcgaacccctatccataactacaagggtcacaaggctaccgccggcttggcgtttcatagacacaaatacagcccgagcgccattacttctacttag

SEQ ID NO: 113679 - DNA, 1515 bp, synthetic construct
  misc_feature 1..1515: note = Description of Artificial Sequence: Synthetic coding sequence
  source 1..1515: mol_type = other DNA
atggaagccactggaacgtgggccttactcctagcactcgccctactcctcttgctcacgttagccctcagcggcacccgcgcacgcgggcacttgccacctggccctaccccccttccattactcgggaacctcttacaactgcggccaggagctctgtatagtgggctcatgcgcctgtctaagaagtacgggcccgttttcacgatatacctcggcccttggcgtccagtggtggttcttgtaggccaggaagccgttcgggaggccttaggtggccaggctgaagaattttccggacgaggcacagtggcgatgctcgagggtaccttcgatggccacggggttttctttagcaacggcgaaagatggcgtcaactgaggaaattcactatgttggctctgcgggacctgggcatgggaaagcgcgagggagaggaattgattcaagccgaggcacggtgcttggtcgaaactttccagggtaccgaaggtcgcccttttgatccatcacttctgctggcacaggccacaagcaatgtggtgtgctcccttcttttcggtctgcgcttctcctacgaagacaaggaatttcaagcggtcgtgcgggcagcaggtggaactttactcggggtctcctctcaaggcggacagacatacgaaatgttctcctggtttttgcggcctctgcctggaccccacaagcagcttctccaccatgtgtctaccctggctgcctttacagtgagacaggttcagcagcaccaaggaaatttagacgccagtggaccagcgcgggatctagtagatgcttttctgctgaaaatggcccaagaagaacaaaatcctgggaccgaatttacaaataaaaatatgctaatgaccgtaatttatctgctattcgccggaacgatgacagtaagcacaacggtggggtatacactcctcctcttaatgaaatacccccatgtgcaaaagtgggtgcgcgaggaattaaacagagagctaggtgccgggcaggcccccagcttgggggacagaactcgcctcccatacaccgatgcagttttgcatgaagcccaacggctgttggcccttgtgcctatggggataccacgcacccttatgaggactacacgttttagaggatacacccttccgcagggaacagaagtcttcccgctgttggggtcaatcctgcacgacccaaatatcttcaagcatcctgaggaatttaacccagatagattcctcgacgctgatggtcgctttcgcaaacacgaagcatttttgcctttttctttgggaaagcgtgtgtgcctgggcgagggccttgccaaagccgaactgttcttattttttacaaccatactgcaggcattctcactggaaagcccctgtcctcccgacaccctgtctttgaagcccactgtcagcgggttatttaatatccctccagctttccagctgcaagtcagaccaacggatctgcatagtaccacacaaacaagatag

SEQ ID NO: 113680 - DNA, 690 bp, synthetic construct
  misc_feature 1..690: note = Description of Artificial Sequence: Synthetic coding sequence
  source 1..690: mol_type = other DNA
atggccatggaggaacagaaccccggcactgaatttaccaataagaatatgctcatgacagttatctacctgctgtttgccgggacaatgacagtctccactacggtcggctacaccctcctgctacttatgaagtacccacacgtccagaaatgggtaagggaagaacttaatagagaactgggagccggccaagcaccatctttgggggaccgaacacgattgccttatacagatgctgtgcttcatgaggctcaaaggcttttagcattggtcccaatgggcatcccaagaaccctcatgcgcactacacggtttaggggctacacactgccgcagggaaccgaagtatttccactgcttggtagcatcctccatgacccaaacatcttcaagcatccagaggaatttaatcctgataggtttcttgatgcggatggaagatttagaaagcacgaagcttttcttccattctcacttggcaagcgagtttgccttggagaagggttggccaaggctgaactgttcctattcttcactactatcctgcaggcgttttctcttgagtccccttgccctcccgatacactctcactgaaacccactgtctcagggttattcaacataccaccagccttccagctacaggtaagacctaccgacttgcactctaccacccaaacccgctag

SEQ ID NO: 113681 - DNA, 1635 bp, synthetic construct
  misc_feature 1..1635: note = Description of Artificial Sequence: Synthetic coding sequence
  source 1..1635: mol_type = other DNA
atgtcgagccctggtccatcacagcctcccgcggaggatcctccgtggccagctcgcctgctcagagcccctctcggtttgctgagattagacccttcgggtggggcgttactgctttgtggccttgttgccttgctgggctggtcatggctaagacggcgcagagcccgagggataccacctggtcccaccccttggccgctagtgggaaatttcgggcatgtgctgttgcccccctttcttagacgaaggagctggctgagttctcgcaccagggccgcaggtatcgacccctccgtcatagggccgcaagtactactggcccacctggcgcgggtctatggctctattttcagcttcttcatcggccattacctggtagtggtgctgagtgacttccactctgtacgcgaggccctcgtgcagcaggccgaggtcttctctgacaggccgcgcgtgcccctgatctccatcgtgaccaaggagaaaggagtggtgtttgcgcactacgggccggtctggcgacagcagcggaagttcagccactccaccctccggcatttcgggttagggaaattgagcctggagcctaaaatcattgaggagttcaaatacgtgaaagccgagatgcagaagcacggagaggaccctttctgcccgttttcaatcattagcaacgctgttagtaacatcatttgctcgctctgttttggccagcgcttcgattacacaaacagtgaatttaagaagatgttaggcttcatgtctcggggcctggaaatatgtcttaactcccaagtcctgctagtcaatatctgtccatggctctattacctgccctttggccccttcaaggagttgagacagattgaaaaggacatcaccagtttcctgaagaaaattatcaaggatcatcaagaatcacttgatcgggagaaccctcaagatttcattgacatgtacctcttgcacatggaagaggaacgtaaaaacaactcaaactctagcttcgacgaggaatacttattctacattatcggcgatcttttcattgccggtacggacactacaaccaactctctgttgtggtgtctgctttatatgtccctcaaccccgatgtgcaggagaaggtgcatgaggagatcgaacgcgtaatcggagccaacagagccccttcactcacagacaaggcccaaatgccctataccgaagcaactatcatggaggtccagaggctgaccgtcgtggtgccacttgccatcccacatatgacctcagagaacacagtgcttcagggttacaccattcccaaaggaactctcatacttccgaatttatggagcgtgcacagggatccggccatctgggaaaagccagaggatttttaccccaacaggtttctcgatgatcagggccagttaatcaaaaaagaaacttttattccattcgggatcggtaagagagtctgtatgggtgaacagctcgccaagatggaacttttcctgatgttcgtgagcctgatgcaatcttttgcctttgccctgccggaggactctaagaagcccttactcacaggccggttcggactaacattagcccctcatccatttaacatcaccatctctaggaggtag

SEQ ID NO: 113682 - DNA, 1506 bp, synthetic construct
  misc_feature 1..1506: note = Description of Artificial Sequence: Synthetic coding sequence
  source 1..1506: mol_type = other DNA
atgagttcccccgggccttctcagccacctgcagaggacccaccatggcctgcacgattgcttcgcgccccactggtggggaactttggccacgttctgctaccgcccttcctccgtcgcaggtcttggctgagtagcaggactcgcgctgccggtatagacccatccgtgatcgggccccaagtcctactggcccacctagcccgggtgtatggatcaatattctcgttttttattggacattacttagtggtggtcttaagcgacttccatagtgtccgcgaggcgctggtgcagcaggcagaggtgtttagcgacaggccccgcgtccctctgatatcgattgttaccaaagaaaaaggcgtcgtattcgcccactacggtcccgtctggagacagcagcgaaagttcagtcatagcacgctcagacatttcggtctcggaaagctcagtttagagcctaagattatcgaggagtttaagtatgtaaaagccgagatgcaaaaacatggcgaagacccgttctgcccattcagtatcatttccaacgccgtttccaacataatatgcagtctgtgctttgggcaaaggttcgactatactaacagtgaattcaagaagatgttgggattcatgagccgcggcctggaaatatgccttaactcccaggtgctgctggtaaatatctgtccttggctctactacctgccctttggcccgtttaaggaacttaggcagatcgaaaaggatattaccagtttccttaagaagatcattaaggatcaccaagaatctctggaccgcgagaatcctcaggacttcattgacatgtacctgctgcatatggaggaggagcgcaaaaacaatagtaatagcagctttgatgaggaataccttttctatattataggagatttattcatcgccggcactgatacaaccactaattctctcctctggtgtctcttgtacatgagtctgaatcctgacgtgcaggaaaaggttcacgaagagattgaacgtgtgataggcgccaaccgtgcaccatcccttactgacaaagcccaaatgccttatacagaggccaccatcatggaggtacaacgactgacagtagttgtgcccctggctatcccccacatgacaagtgagaataccgtactgcagggctataccatcccaaagggaaccctgatcctccccaacttatggtctgttcaccgagatcctgccatctgggagaagcctgaggatttttatcccaatcggttcctggacgatcaggggcagttgattaagaaagagaccttcattcctttcggaatagggaagcgggtgtgcatgggtgaacagttagcaaagatggaactcttcctcatgttcgtatccctaatgcagtctttcgcctttgcgctccctgaggattcaaagaagccattgctgaccggtcgctttggcctcactctggctcctcaccctttcaatatcacaattagccgtcggtag

SEQ ID NO: 113683 - DNA, 1398 bp, synthetic construct
  misc_feature 1..1398: note = Description of Artificial Sequence: Synthetic coding sequence
  source 1..1398: mol_type = other DNA
atgctattgctgggactgttactactcctgcctcttctcgcaggtgcacgcctgttatggaactggtggaaacttagaagcttgcacctgccacccctcgcccctggatttcttcacctgctccaaccagatctgcctatttatctcctgggactgacgcagaagtttggacccatttatcgcctccacctcggtctacaggacaagctggtttcaaggaattacccagatctttcactgggcgattacagtctcctgtggaaggcccataaaaaactgacaaggtcggcactcctgcttggcattcgagattccatggagccggtggttgaacagcttacccaggaattctgcgagagaatgagagcgcagccaggcactccggttgccattgaagaggagttttcgctgctcacctgcagcataatctgctacctcacctttggcgataaaataaaagatgacaatttaatgcctgcgtactacaagtgcatccaggaggtgctgaagacctggtctcactggtccatccaaatagtggacgtgatcccctttctacggttttttccaaacccggggctgaggcggcttaagcaggccattgagaagcgagatcacattgttgaaatgcagctcaggcagcataaagaaagccttgtggctggccaatggagagatatgatggactacatgttgcagggtgtggcacagccatcaatggaggagggctcgggtcaactgctcgaagggcacgtacacatggccgccgttgatctgctcatcggcgggaccgagaccaccgcaaataccctcagttgggcagtcgtattcttattgcaccacccggagatccagcaacgattgcaggaggagctcgaccacgaactgggcccaggcgccagctcctccagggttccctacaaagaccgtgccaggctgcccctacttaacgctactatcgctgaggtactgcgattgcgccccgtcgtgcccctcgcattgccccataggaccacacgaccctcatctatcagcgggtatgacatccccgagggaacagtgatcatccctaatctgcagggggctcacctggatgaaactgtatgggagagacctcatgaattttggcccgataggtttcttgagcccggcaaaaactccagggccttagcttttggatgtggggcgagggtatgcctgggggagccccttgcccgtctcgagttatttgtagtgcttacgagacttctgcaggctttcacgctgctgccaagtggcgatgcgctccctagcttacaacctctacctcattgctccgtcatactgaagatgcaaccattccaggtgagactgcagccgcgcggcatgggcgctcactcccctggccagtcacaatag

SEQ ID NO: 113684 - DNA, 1488 bp, synthetic construct
  misc_feature 1..1488: note = Description of Artificial Sequence: Synthetic coding sequence
  source 1..1488: mol_type = other DNA
atgctgcttttggggctgttgctcctgctacctttgcttgccggcgcgagactcttgtggaactggtggaagctgcgatccctacacctccctccacttgcccctggattcctgcacttgctccagcctgacttaccaatatacctgctgggcctgactcaaaaatttggacccatctaccgtctccacctcggactgcaagacgtggtcgtcttaaatagtaaacgtacgattgaggaggctatggtaaagaaatgggccgactttgctggtcggccagagccacttacatataaattagtgtctagaaactatccagatttaagcctgggcgactactccttactgtggaaggctcacaagaaattgacacgcagcgcactgctgcttgggatccgagattcaatggaacctgtggtggaacagctgacgcaggaattttgcgagcgtatgagagcgcagcctggcacaccagtcgccattgaggaagagttctcgctccttacctgtagcatcatttgctatttgacctttggagacaagataaaggatgataaccttatgcccgcctactataaatgcattcaggaggtgcttaagacatggtcccactggagtattcaaattgtcgacgttataccctttcttaggttctttcccaatcccggcttgcggcggctgaaacaggctatagagaaaagggaccacatcgtcgagatgcagctcaggcaacataaggagtctctggtagccggccagtggcgagatatgatggattatatgttgcagggagtggcacagccttctatggaagaagggagcggccagttactggagggacacgtccacatggctgctgttgacctactgattggtggaaccgagaccacagccaatactctgtcatgggccgtggtctttctccttcaccaccctgaaatacagcaacggctacaagaagagctggatcacgagctcggacctggtgccagctcaagtcgggttccatataaagaccgggccaggctgcctttactgaacgccaccatcgcggaagttctgagactcagacccgtggttccactggcactgccgcaccgaaccaccagacctagctctatcagcggctacgacatacccgagggcaccgtcattataccaaacctgcagggagctcacctcgacgaaaccgtgtgggaaaggccccacgagttttggcctgacaggttcctcgagccagggaaaaatagcagggcattggcatttggttgcggcgcgcgcgtgtgcctgggagaaccgctagctcgcctggagctgtttgtcgtccttacacgcctgctgcaggcattcacattactgccgagtggcgatgccctcccaagcctgcagcctttacctcattgcagtgtgatcctgaaaatgcaaccctttcaggtacgccttcagcccagggggatgggagcccacagtccagggcagtctcaatag

SEQ ID NO: 113685 - DNA, 1488 bp, synthetic construct
  misc_feature 1..1488: note = Description of Artificial Sequence: Synthetic coding sequence
  source 1..1488: mol_type = other DNA
atgcttttattgggactcctcttactactgccactcctagctggtgctaggctgttgtggaattggtggaaacttcggagtttgcacctgcctccactcgcacctggttttctccatttgctccagcctgacctgcctatctatctgctcggactcacgcagaagtttggccctatctatcgcttacatttaggcttgcaagacgtggtcgtgcttaattctaagaggaccatcgaagaagccatggtgaaaaaatgggctgacttcgcgggtaggccagagccactgacctacaagctggtatcacggaactaccccgatctgtccttgggcgattatagtctgctttggaaggcccataagaaattgaccagaagtgctctgctgctaggcatccgtgacagcatggagcctgtggtcgagcagctcacacaggagttctgcgagcgcatgcgcgcacagccaggcaccccagtggctattgaagaggagttctctcttctgacttgctccattatctgctacctgacgttcggagacaaaatcaaggatgataacctgatgcctgcttactacaagtgcattcaagaggtactgaagacctggagccactggagcattcagattgtggacgtgataccattcttacgctttttcccaaaccccggcctcagacggctgaaacaggccatagagaagcgcgatcacattgtggagatgcagcttcgtcaacataaagagagcctagttgccggtcagtggagagacatgatggactacatgctgcaaggcgtcgcccagccttctatggaggagggcagtggacaactacttgaagggcacgtgcacatggcagctgtggatctgctcatcggcgggactgaaaccactgcgaacacactgagctgggccgttgttttcctgcttcaccaccccgagatccagcagaggttacaggaggagctagatcacgagctgggtcccggagcctcctccagtagggtaccgtataaggacagagctcggcttcctctactgaacgcaaccatagctgaagttcttaggctccgacccgtcgtgcccctggcccttcctcataggaccactagacccagtagcatatccggctacgacatccctgagggcacagtcataatcccaaatctccagggagcccatctcgacgagaccgtttgggaaaggccacacgagttttggcccgatagatttctggaacctggcaagaattctcgcgctctggcattcggatgtggggcgcgtgtctgcttgggggagccattggcacgcctggagctttttgtggtgttgactaggctcttgcaggcttttactctgcttccttcgggcgacgcgctgccaagcttacaacctctcccccactgttccgttatacttaaaatgcagcctttccaagtccggctccaaccccgaggaatgggggcccacagccctggtcagagccagtag

SEQ ID NO: 113686 - DNA, 1398 bp, synthetic construct
  misc_feature 1..1398: note = Description of Artificial Sequence: Synthetic coding sequence
  source 1..1398: mol_type = other DNA
atgctcctcctaggcctcttgctcctcctgccactactggctggtgcgcgactgctttggaactggtggaaattgaggagccttcaccttccacctttggctcctggtttcctacacctccttcagcctgacctccctatatatctgctcggactaacccagaagtttggccccatttataggctgcacctgggactgcaggataagctcgtgtcacggaattaccccgatctgtctttaggagactacagcctgctttggaaggcccacaaaaagcttactcgcagcgccttactcctggggattcgagactccatggagcccgtagtcgaacaactcacacaggagttctgcgagagaatgcgtgcccagcccggaactcccgtggcaatcgaagaggaattttccctcttgacctgcagcatcatatgttacctgacatttggcgataaaattaaagatgacaacctgatgcctgcctactataagtgtattcaggaggtccttaaaacttggtcccactggagcatacaaatcgtggacgtgatcccattcttgagattcttccccaacccagggttgagaaggttgaaacaggcgatcgagaagagagatcatatagtggaaatgcagctgcgacagcacaaggaatcattagtagctggccaatggagagatatgatggattacatgctgcaaggagtggctcagccatcaatggaagaggggagtggtcagctcctggaaggacatgtccacatggctgctgttgatctactaataggcggcactgagaccacagccaacaccctcagctgggccgtggtgttcttactgcatcatcctgagattcagcagagactccaggaggagcttgatcatgaactgggtcccggggcgtcatcttccagggtgccttataaagatagagccaggctcccactgcttaatgccacaatcgctgaggttctccgcctgagacctgtcgttcctttagcgctcccacatcggaccactcgcccgagttctatttccgggtacgacatccctgagggcaccgtcattattcccaatctgcaaggagcgcacctcgacgagactgtgtgggagcgtccccacgaattctggccagaccggtttcttgaacctggcaaaaactctagggctctggcgttcgggtgtggggctagggtttgcctgggggaacctctggcaaggctggaactgtttgtggtgctgaccaggctgctgcaagcattcacactgctcccttccggggacgctcttccttcactgcagccccttccccactgttctgtcattcttaaaatgcagcctttccaggttcgcctacagcccagagggatgggagcgcatagccccggacagtcccagtag

SEQ ID NO: 113687 - DNA, 1398 bp, synthetic construct
  misc_feature 1..1398: note = Description of Artificial Sequence: Synthetic coding sequence
  source 1..1398: mol_type = other DNA
atgctgctcctcgggcttctactgctgctgcctttgctcgcaggggctaggctcctgtggaactggtggaaactgcgtagtctgcatcttccccccctggccccagggtttctgcacctgctgcaaccagacttaccgatctacctgttgggcctgactcaaaagtttggcccaatttacagactgcacctgggtctgcaggataaactagtctccaggaactaccctgatctttccttgggggactactccttactatggaaagcccacaaaaagttaacacgctctgccctgttgttgggtattcgtgacagtatggagcccgtggtggagcagttgacccaggagttttgcgagcgcatgcgagctcagcctggaaccccagtggcaatagaagaggagttttcattgctgacctgctccatcatctgctacctcactttcggcgacaaaatcaaagacgataatctgatgccagcctactacaagtgtattcaggaggtgctcaaaacctggtcacactggtctatccagattgtcgacgttatcccattcttacgattctttccgaatcccggactccggaggcttaaacaagccatcgagaaacgggatcatatagttgagatgcagctgcggcagcacaaggaaagtcttgtagccggccagtggagagatatgatggactacatgctgcagggcgtggctcagccatcaatggaagaggggagcggccagctgctcgagggacacgtgcatatggccgccgtggacctgctgatcggcggaacggaaaccaccgccaatactctgagctgggcggtcgtttttctcctccaccaccccgagattcagcagagattacaggaagagctggaccacgaattgggcccaggagcctcatccagtagagtcccatataaagatagggcccgactccctctattgaacgcaactatagctgaagttcttagactccgtcccgtcgtccctttggcccttccacatcgtaccacccgtccctcgtccatcagcggctacgatatcccagagggcacagtgatcatacccaacctgcaaggcgctcaccttgacgagacagtctgggagagaccccatgagttttggccggaccgttttctggagccaggcaaaaacagtcgcgccctggcattcggttgcggtgcccgcgtttgtcttggcgaacccttggcccgcttggaattgttcgttgtgttaacacgcttgctccaggccttcacactcctcccaagcggcgatgccttacccagccttcagcccctgccccactgttccgttatacttaaaatgcagcccttccaggtccggttacagccccgaggtatgggggcacattcccctggccaatcccagtag

SEQ ID NO: 113688 - DNA, 1485 bp, synthetic construct
  misc_feature 1..1485: note = Description of Artificial Sequence: Synthetic coding sequence
  source 1..1485: mol_type = other DNA
atgctcctgctgggtcttcttctgctgcccctattggcgggcgcccggctcctttggaattggtggaagctgaggtcactgcacctaccaccccttgccccagggtttctgcaccttctgcagccagatctgcctatctacctcctgggcctgactcagaagttcggacctatctaccgcctgcatctggggctgcaggacgtggttgtgctgaactccaagagaaccattgaggaggcaatggtcaagaaatgggctgactttgcagggagacctgagccactcacctataagttggtgtcgaaaaactaccccgatctcagcctgggggattattccttgctttggaaagcgcacaagaaactaactaggtcggcactgctgctgggaatccgcgattccatggagcccgtagtggaacagctgactcaggaattctgtgagcgcatgagagcgcaacctggtactccagtagccattgaggaggaattctctctcttgacttgtagtatcatctgttacctgactttcggggacaaaattaaagatgataacctgatgcccgcgtattataaatgcattcaggaggtgctcaagacttggtctcactggtctatccagattgtcgatgttatacccttcttgcggttctttccgaaccctggattaagacgccttaagcaggctatcgaaaaaagagaccatatcgtcgagatgcagcttagacagcataaagagagtctggtcgcaggccagtggcgtgacatgatggactacatgcttcagggggtagctcagccttccatggaggaaggctcaggacagcttcttgagggacatgtgcacatggcggccgtggacttgttaattggcggaaccgagaccacggccaacaccctgtcctgggcagttgtcttcttactacaccaccccgaaatccaacagaggctccaagaggaattggaccatgagcttggcccgggggcttcaagctccagagtgccctataaggatcgagcccgcctcccattgctcaatgctacgattgcagaggttttgcgcctgcggccagtagtgccccttgccctgccccatagaaccacccgtccttcctccatctccgggtacgatattccagaggggacggtcattatacccaatctccagggtgctcacctggacgaaaccgtatgggaacgcccccatgagttctggccagatcgttttcttgagccaggcaagaatagccgggccctcgcatttggctgcggggctagagtatgtctcggggaacctctggctcggctggagctgttcgtggtgctgacgcgactcctgcaggcgttcactctgctgccctccggggacgccctaccttcgctgcaacctcttccacactgctccgtgatcctgaagatgcaaccattccaggttagattgcagcccaggggcatgggggcgcacagtcccggacagaaccaatag

SEQ ID NO: 113689 - DNA, 1485 bp, synthetic construct
  misc_feature 1..1485: note = Description of Artificial Sequence: Synthetic coding sequence
  source 1..1485: mol_type = other DNA
atgctcctcttgggcctgctgctgcttcctctgctagctggcgcccggctcctttggaattggtggaaacttcgcagtctccacctccctccccttgcgcccgggtttcttcacctgctgcagccagatctgcctatatatcttctcggcctgacacaaaaatttggccctatataccgccttcacctcgggctccaagatgttgtggtcctcaactcaaagaggaccatcgaagaggcgatggtcaagaagtgggctgatttcgccgggcgacccgagcccctgacatataagctggtaagcaaaaattacccagatctcagtcttggagattattcacttttgtggaaagcccacaagaaactgactaggtctgctctcctcttaggaatcagagacagtatggaacctgtagtagagcagctaacgcaggagttctgcgagagaatgcgcgctcagccaggaaccccagtggcgatcgaggaggagttctctcttctgacctgtagcataatctgttacctgaccttcggagataaaatcaaggatgacaacctgatgcctgcatactataaatgcatccaagaggtgctgaaaacgtggtcccactggtctatacagatagtagacgtgatcccgttcttgcggttctttcccaacccaggcctacgtaggcttaaacaggcgattgaaaagagggaccacatagtggaaatgcagctgcgccagcataaggagagtttagtcgctggtcagtggagggacatgatggactacatgctgcaaggagtggctcaaccgtccatggaggaaggatctggccagctccttgaaggacatgttcacatggctgctgtggatctgctgattggtgggaccgaaaccacagccaataccctatcttgggcggtggtgttccttttgcaccaccctgagatccaacagcgacttcaggaagagctggatcatgagttaggtccgggcgcatcctcatcccgggtgccatataaggacagggcacgcctccccctgttaaatgctactattgcggaagttctcagacttaggcccgtagtgccccttgcactcccacatcggactaccagaccttcaagtatttccggttacgacatccccgaaggaactgtgattataccaaacctgcagggggcgcacctggacgagaccgtttgggaacgcccgcacgaattctggcccgatagatttctggaaccaggcaagaatagcagggcccttgcctttgggtgcggagcgcgcgtgtgccttggtgagccactcgctaggctggagttatttgtggtactgacacggctactccaggcctttaccctgctcccatctggagatgctctgccatcccttcagcctctgcctcactgctctgttatcttaaagatgcaaccgtttcaggtgagactgcaaccgagaggtatgggtgcacatagccctggccagaatcaatag

SEQ ID NO: 113690 - DNA, 1488 bp, synthetic construct
  misc_feature 1..1488: note = Description of Artificial Sequence: Synthetic coding sequence
  source 1..1488: mol_type = other DNA
atgctgctcctgggacttcttctccttctgccactcttagccggggcccgcctgctctggaactggtggaaactcagatctctacacctgccaccacttgcaccaggctttctccatctcctgcaacctgatctccctatttacctgctggggctgacccagaaatttggtcccatttatagactccaccttgggctacaagacgtggtggtgctcaatagtaaacgaacaatcgaggaagcgatggtgaagaaatgggccgactttgctggccgcccagagccactgacgtacaagctagtcagccggaactaccccgatttatctttaggtgattattctctgttatggaaggcccacaagaaattaactcgctccgcccttctcctgggcattagggattccatggagcccgtcgtggagcaattgacccaggagttctgcgagagaatgcgtgcccagccggggacccccgtggccattgaggaagaattctcgctcctgacctgcagcataatatgttacctcacttttggcgataagataaaagatgacaatctcatgcctgcttactataaatgtatccaagaagtgctgaagacgtggagtcattggtccattcagattgtggatgtaatccctttcctgaggttcttcccaaaccccggactgcgccgactgaaacaagctattgagaagagggaccacattgtggaaatgcagcttagacaacataaggagtccctggttgccggacaatggcgtgacatgatggactacatgctgcaaggggtcgcccagccttccatggaagaggggtccggccagctcctcgagggccacgtgcatatggctgctgtggacctcctgattggggggactgaaacaacggcgaataccctgtcttgggctgttgttttcctcctgcaccatcccgagatccagcagaggctgcaggaagagttggaccatgaactaggaccaggagcctcttccagcagagtcccctataaagatagggcccgactccctttactaaacgccaccattgctgaagtactcagactccgcccagtagtcccactggccctgccacaccggactactaggccaagctctatctccggctacgacatacctgaagggaccgtgataattcctaatcttcagggggcacatctggacgagactgtgtgggaaagaccccacgaattttggccggatagattcctggagcccggcaagaattcccgggccctggctttcggatgtggagcaagagtctgcctgggggaaccactggcccgcctggagctgttcgtcgtcctgacgaggctgctccaggcttttacattgttaccaagcggggatgccctgcccagtctccagccgctgccccactgctctgtgatcctgaaaatgcaacccttccaagtccgcctccagccccgtggcatgggcgcacattcccctggacaatcacagtag

SEQ ID NO: 113691 - DNA, 1395 bp, synthetic construct
  misc_feature 1..1395: note = Description of Artificial Sequence: Synthetic coding sequence
  source 1..1395: mol_type = other DNA
atgctcttactcggcctcttactcttgcccctcctagccggcgcgcgcctgctttggaattggtggaaactgcggtccttgcacctccctcctctggctcccggctttctgcacttgttgcagccagacctgcctatatatctgctcggactgacacagaaatttggtccaatctaccgcctgcacttggggctgcaggataagctggtgagcaagaattatcctgacttgtcattaggggattattccctgctgtggaaggcccataaaaagcttactcggtccgcgctcctgttgggaatcagggacagtatggaacctgtcgtcgagcaactcacccaggaattctgcgaacgcatgcgagcacagcccgggacccccgtggccattgaagaggaattctcattacttacatgcagcatcatttgctatctgacttttggcgataaaatcaaggatgacaacctcatgccagcatactacaagtgcatccaggaggtgctgaagacatggtctcattggtcaatacagatagtggacgtgatccctttcctccggttcttccccaatccggggctcagaaggctgaaacaggccatagagaagagggaccacatcgtggagatgcaattgaggcaacacaaggaaagtctagttgccggccagtggcgggatatgatggattatatgctacagggagttgcccagccgagtatggaagagggatccggccagctgcttgagggccacgtccatatggccgcggtggacctgctaattgggggaactgagacgactgctaacaccttatcctgggccgtggtgttcctgttacaccaccccgagatccagcaacgcctacaggaggagctggaccacgaactcgggcccggagcatcttcgtcgcgagttccctacaaagacagagcccgcctccccctgcttaacgctaccatagcagaagtgctgaggctgagaccagtggtccccttggctctacctcaccgaacaacccgaccctcaagcatctcgggctacgatatccccgaaggcaccgtaatcatccccaacctgcaaggagctcatttggacgagacagtatgggagcgcccacacgagttctggcccgaccgcttcctcgagccgggaaagaactctagagctctagcgtttggttgtggtgcccgtgtgtgcctcggcgagcccctcgcaaggctggaactatttgtggtgcttactcgactgttacaggcatttaccttactcccctccggcgatgcactgcctagcctccagcccctgccacattgctcggttatccttaaaatgcagccctttcaggttaggctccagccccgcgggatgggcgcacacagccccggacaaaaccagtag

SEQ ID NO: 113692 - DNA, 1398 bp, synthetic construct
  misc_feature 1..1398: note = Description of Artificial Sequence: Synthetic coding sequence
  source 1..1398: mol_type = other DNA
atgctgctgttggggctgctcctattgctgcctttactcgccggagcaaggctgctctggaactggtggaaactgcgcagcctgcatctgccgcccttagccccgggttttctccacctattacaacccgatctgcccatttacctgcttggactgacgcagaaatttgggcccatctatcgcctgcacctcgggcttcaggacaagctggtttcacgaaattaccccgatctttccctgggggattacagtctactttggaaggcgcacaagaaattaacaaggtccgccctcctcctcgggattcgggacagtatggagccagtagtggaacaactgacgcaggagttttgcgaaagaatgagggctcagcctggtacaccagtggctattgaggaagagttttctttgctcacgtgttcaattatatgctacttgacctttggtgacaagattaaagatgataacctaatgccagcctactacaagtgtatccaagaggtcctaaagacatggtcgcactggagtatccagatcgtggatgtcatcccttttctgcgctttttccctaaccccggcctgcgccgtcttaaacaagcaatcgaaaaacgcgatcatatcgtggaaatgcaactgagacagcataaagaatctcttgtcgcgggacagtggagggatatgatggattacatgctccagggtgttgcccagcccagcatggaggagggctccggacagcttctagaaggtcacgttcacatggctgcagtggatctgttgatcggagggaccgagacaacagcaaacactttatcgtgggccgtagtctttctcctccatcaccctgaaatccaacagcgcctgcaggaggagctggaccacgagcttgggccgggagcttcatccagcagggtaccttataaggaccgcgctcgtcttccgctactgaacgcaaccatagccgaggtgttgcgactgcggcccgtggtgccccttgccttacctcatcggacgacacggcccagcagtattagcgggtacgacatccccgaggggaccgtgattataccaaatctgcaaggggcacacctggatgaaacggtgtgggagcggcctcatgagttttggccagatcgattcttagagcctgggaagaattcccgggctctggctttcggctgtggtgccagggtgtgcttgggtgagccgctggcccgtctggagttgtttgtagttcttacaagactccttcaggcctttaccctcctccccagcggagacgctctccccagtctgcagccccttccacattgtagtgtgattctcaaaatgcaaccattccaggtgcgacttcagcctagaggcatgggcgcccactcacctggacaaagtcagtag

SEQ ID NO: 113693 - DNA, 1395 bp, synthetic construct
  misc_feature 1..1395: note = Description of Artificial Sequence: Synthetic coding sequence
  source 1..1395: mol_type = other DNA
atgttactgctcggacttctgctgctccctctgctagccggagcgcggctgctttggaattggtggaagctgcggtccctgcatcttccaccattggccccaggctttctgcatctactccagcccgacctgcctatctatttgttaggtcttacccagaagttcgggccaatatatcgcctgcacctggggctgcaggacaaactagtatctaaaaattaccctgatttatctctcggtgactactctttgctgtggaaggcccataagaaattgaccagatctgccctgctgttgggtatacgggactccatggaacctgtagtcgaacaacttacacaggagttttgcgagcgcatgcgcgcgcagccaggaacccccgtagccatcgaagaggaattttccctgctgacatgtagcataatatgttacctgacattcggtgataaaattaaagacgataatcttatgcccgcgtactacaaatgcatccaggaggtgctgaaaacttggtcccattggtcaatccagatcgtggacgttatcccctttctgcgattctttcctaaccctggcctgaggcggctgaaacaggcgatagagaagcgggaccacatcgtcgagatgcagctcaggcagcacaaggagtctttggtcgcaggacagtggcgcgacatgatggattatatgcttcaaggcgttgctcagccctccatggaagaaggatccgggcagctgttggaagggcatgtgcatatggccgcagtcgaccttctaattggggggactgagaccaccgcaaacacgctgtcgtgggcggtggtatttcttctccaccaccctgagattcaacaacggctgcaggaggaactcgatcatgaattgggccctggtgcttcttcttcccgtgtcccttataaagacagagctcgactaccactgctcaatgctaccatcgccgaggtattgcggctgcgccccgtcgtccccctcgccctgcctcatcggacaacacgtcctagctctataagcggttatgatattccagaagggaccgtcataattcccaacctccaaggggctcatctcgacgaaaccgtttgggaaagaccccacgaattttggccagaccgcttcctggagccaggaaaaaatagccgggccctcgcctttggatgcggtgcacgcgtatgtctcggagagcctctcgcccgcttggagctgtttgtggtcctcactcgtttattacaggcctttaccctcctaccttcaggagatgcgcttccctcccttcagcctctccctcattgctccgtcatcctcaagatgcaacccttccaggtgcgcctccaaccgcgcggcatgggagctcacagtccgggccagaaccagtag

SEQ ID NO: 113694 - DNA, 1488 bp, synthetic construct
  misc_feature 1..1488: note = Description of Artificial Sequence: Synthetic coding sequence
  source 1..1488: mol_type = other DNA
atgctactgcttggcttgctgctgctgctgcctctcctcgctggggctagattgctctggaattggtggaagctgaggagccttcacttgctgccactggcacctggcttcttgcacctgttacagcctgaccttcctatatatctactgggcttaacccagaagttcggcccaatctacaggctgcacttaggcctgcaagatgtggtggtattaaactccaaacgaaccatcgaggaggcgatggtcaaaaagtgggccgattttgctggtagaccagagccactgacctacaaactggtgagcaaaaactatccagacttgtcattaggggactattctctcctatggaaagcacataagaaactgacaaggagcgcattactgctgggaatccgcgattcaatggagcccgttgttgagcagcttacgcaggaattttgtgagcgaatgcgggcacagccagggaccccggtagccatcgaggaggaattcagtctactgacctgttcaatcatctgctacctgacgtttggcgataagatcaaggacgacaatctgatgcccgcctattataagtgtatacaggaggtgctaaaaacatggagccactggtcaatccaaattgtggatgtgatcccgtttctgcgtttttttcccaacccggggctgaggcgattgaaacaggcaatcgagaagcgcgaccatattgtggagatgcagctgaggcagcacaaagagagtctggtagccgggcagtggagagacatgatggattacatgttgcaaggagtggcgcagccaagtatggaggaaggctcaggacagctgctcgagggacacgtgcacatggctgccgtggacctgctgataggaggcaccgagactaccgccaataccctcagttgggctgtcgtgttcctactgcaccatccagagatccagcagcggcttcaggaggaactggatcacgaacttggtccaggcgccagtagtagtcgggtgccatacaaggacagagcacgtttacccctgttaaacgccactattgccgaagtactgagattgaggcctgttgtcccccttgctcttccccaccgcaccaccaggccttcctccatcagcgggtatgatatcccagaagggaccgtcattatccctaacctgcaaggagcccacctggacgagactgtgtgggagcgcccccacgagttctggcccgacaggttcctggagccgggtaagaactctcgggctctggccttcggttgtggggccagagtttgtctaggggaacctctcgctaggctggagctgtttgtggtactgacccggctgctgcaggcctttacgttgcttccttctggcgatgccctcccgtccctccagcctctgcctcactgttcagtgatccttaagatgcagccctttcaagtgaggttacaacctcggggcatgggggcccattctccaggacagaaccaatag

SEQ ID NO: 113695 - DNA, 1488 bp, synthetic construct
  misc_feature 1..1488: note = Description of Artificial Sequence: Synthetic coding sequence
  source 1..1488: mol_type = other DNA
atgcttctattaggtctgttgttacttcttccccttttggccggagcacgactcctctggaattggtggaagctgagaagcctgcacctgcctccactggcccccggcttcctgcacctgctgcaaccggatctgccaatctacctgcttggactcacccaaaagtttggcccgatctatcgtctgcatttgggactgcaagatgtagtggtgctgaactccaaaagaacaatagaggaggcaatggtgaaaaagtgggctgatttcgcagggaggccggaacctcttacatataagcttgtctctaagaactaccccgacctgagcctaggcgattattcgctgctctggaaggcacacaagaaacttactcgtagcgcactgctcctcgggataagggattccatggagcccgtcgtggaacaactcacccaggaattttgcgagcgcatgcgggcacagcctggaacacccgtagcaatagaggaagagttctctctccttacatgctcaattatttgttacttgacattcggcgataaaatcaaagacgataatctgatgccagcgtattataaatgtatccaggaggtcctcaaaacctggtcgcactggtccattcaaatagtggatgtcatcccattcctgcgcttcttcccaaatccgggactcagacgacttaaacaggcgattgaaaaaagagatcatattgtggagatgcaactgagacagcacaaggagtccctcgtggccgggcagtggagggatatgatggattacatgcttcagggagttgcccagccatctatggaagagggttcaggtcaattgctggaaggccacgtgcacatggcagccgttgatctgctgatcggtgggacggagaccacggccaacaccctgagttgggccgttgtgttccttttacaccacccagaaattcaacagcggcttcaggaggagctcgaccacgagttagggccgggagcaagttccagcagagttccgtataaagatagggcgcgactcccattactcaacgccaccatcgcggaggttctgagactgcgaccggtggtgccactggctctcccccacaggaccaccaggccctcaagtatctcaggctacgacatcccagaggggaccgttatcatcccaaacctgcaaggcgcccacctcgatgagacagtgtgggagcgacctcacgagttctggcctgacagatttctggagccaggcaagaacagcagggccttggccttcggctgtggtgcccgggtttgtctgggcgagcccctggctagactggagctgtttgtggtgctgacgaggttattacaagccttcactcttttaccctcaggtgatgctctgccgtctctccagcccctgcctcattgttcagtaatcctgaaaatgcagccattccaggtgcgcttacagccgaggggaatgggcgcccatagccccggacaaaaccagtag

SEQ ID NO: 113696 - DNA, 1398 bp, synthetic construct
  misc_feature 1..1398: note = Description of Artificial Sequence: Synthetic coding sequence
  source 1..1398: mol_type = other DNA
atgctgctgcttggcctactattgctgttgccgctgctggctggcgcccgcctactttggaactggtggaaattgaggagcttacacctcttacctcttgcccctggatttttgcacctcctccagcctgacctccctatctatctcctaggactgacacaaaagttcgggcctatatatcggctgcatttgggtctacaagacaagcttgtaagcaagaattatcccgacttgagcctcggggattactctctgctgtggaaggcccacaaaaagctcacccggagtgccttactgctgggcatccgggactctatggaacctgtggttgaacagctgactcaggagttttgcgaacgaatgagggcacagccaggaacaccggtggcgatcgaggaagagttttccctgctgacctgcagtattatctgctacctgacatttggagataaaataaaagacgataatctgatgcctgcttactataagtgcattcaagaggtgctcaagacgtggtcccattggagcattcaaatcgttgacgtaatcccctttctgcgcttctttcctaatccaggtctccggcggctgaagcaagcaattgagaagagggatcacatagtggagatgcagctgcgacagcataaggaatctctggtagcgggtcagtggcgagatatgatggactatatgcttcaaggcgtggcgcagcctagcatggaggaaggctccggacagctcctggagggacacgtacatatggccgctgtagacttgttgatcggcgggacagagaccacagccaatacccttagctgggcagtggtgtttctgttacaccacccagagatccagcagagattacaagaggagctcgatcatgagctgggtccaggcgcatcctctagccgggtcccgtacaaggatcgcgcccgcctcccgcttcttaacgccaccatagctgaggtgctccgcctgcgcccggtggtccctctggccctgcctcacagaaccactaggccgtcgtcaattagcggatacgacattcctgagggtacggttattattcccaatctccagggtgctcacctcgacgagacagtttgggagcgaccacatgaattctggcccgataggtttttggagcctggcaaaaactcgagggctctcgcttttggctgcggagcgcgcgtatgtctgggagaacccctggccagactcgagctcttcgttgtccttaccagactgctgcaggctttcacactgctgccctcgggcgatgccctgccttccctgcagcccctaccccattgctccgttatcctcaaaatgcaaccttttcaggtaagactgcagcccaggggcatgggagctcactcacccgggcagaaccagtag

SEQ ID NO: 113697 - DNA, 1704 bp, synthetic construct
  misc_feature 1..1704: note = Description of Artificial Sequence: Synthetic coding sequence
  source 1..1704: mol_type = other DNA
atgcacggtagattaaaagtgaaaaccagcgaggagcaggccgaggctaagaggctggaaagagaacagaagctgaaactgtaccagagcgctacacaggctgtgttccagaaaagacaggccggagagctcgatgagtccgttctggaactcaccagccaaatactgggggccaatcccgatttcgcaactttgtggaactgcaggagagaagtgttacaacagctggaaactcagaaatccccagaggagctggcagccctggtgaaagcagagctgggcttcttggaatcttgtcttcgggtcaatccaaaaagctatgggacttggcaccacaggtgctggcttttgggcagattgcctgagccgaactggactcgagaactggagctctgcgctcgctttctggaggtggacgagaggaattttcactgttgggattaccgccggttcgttgccacgcaggccgcagtgcccccggcggaggagctggcttttacagacagcctcataactcgcaacttttccaattactcttcttggcactatcggtcatgtctgcttccacaactccacccccaaccagattccggaccacagggacggctgcccgaggatgtgctgttgaaagaacttgagctggtccagaatgccttttttacagacccgaatgatcagagcgcctggttttaccacagatggctgctgggaagggccgaccctcaggacgcactgcgctgtctccacgtctcccgcgatgaggcttgtctgacggtgtctttcagtcggcccctgctggtcgggtctaggatggaaattctattgctgatggtcgatgatagtcctctaatcgtggaatggagaacgcccgacggtcgaaatcgaccatcccatgtgtggctgtgcgatctcccagccgcatccctgaatgaccagttaccccagcacacttttcgcgtaatctggactgctggggacgttcagaaggagtgtgtgcttctaaaaggcagacaagagggatggtgtagggattccacaacagatgagcagctctttaggtgcgaattgtccgtcgaaaaaagtactgtccttcagagtgaattagaaagctgcaaagagctgcaggaactcgaaccagagaataaatggtgtctgttaaccatcatacttctcatgcgcgctctggatccgcttttgtatgagaaggagaccctccaatattttcagactctgaaagccgtcgacccaatgagagcaacctaccttgatgacctccgttccaaatttttactggagaactccgtgctaaaaatggagtacgcagaggtgagggtgctgcacctggcacacaaggatctgaccgtactgtgtcacttagaacagctcctactagtcacacaccttgatctgtcccacaacaggctgagaaccctgccgccggccctcgccgcgcttaggtgtttagaagtcttacaggcgtctgataatgcaattgagtctctcgatggtgtgaccaatctcccaagacttcaggagctgctgctatgtaacaatcgcttgcagcaacctgccgttctgcagccgctggcctcatgtccccgcttggttctcctcaatcttcaaggaaaccccttgtgtcaggccgttggaattttggagcaactggctgagctgctccccagcgtctcttccgtgctgacatag

SEQ ID NO: 113698 - DNA, 1347 bp, synthetic construct
  misc_feature 1..1347: note = Description of Artificial Sequence: Synthetic coding sequence
  source 1..1347: mol_type = other DNA
atgtcatcccctatttccaaatcccggtcccttgcagcctttctgcagcagcttagatcacccagacagcctcccagacttgtcacctccactgcctatacaagtccacaacctcgagaggtgcctgtgtgtccacttacggccgggggcgaaacacagaacgccgccgccctccccgggcctacttcttggcccctcctgggatcattattgcaaatcctttggaaaggtgggttgaaaaaacagcatgatactctcgtggaataccataagaagtacggcaagatttttaggatgaagctgggctcatttgaaagcgtgcacctgggctccccttgtttgctcgaagccctctacaggacagagtcagcatatccccagcgcctagagatcaaaccttggaaagcataccgtgactacagaaaggagggctatgggttgctcattctcgagggagaggattggcagcgggttaggagcgccttccagaagaaattgatgaagccaggagaggtgatgaagttagataataagattaacgaagtcctcgctgactttatgggccgcatagatgagctttgtgacgagaggggacacgtcgaagatctgtacagcgaactgaacaagtggtcttttgagtcaatttgtttagtgctttatgaaaaaaggttcgggctgctccagaagaatgctggggacgaggccgttaattttattatggccatcaaaacaatgatgagtaccttcggcagaatgatggtgacacccgtggagctacacaagtccctgaacacgaaggtgtggcaggatcacacattagcatgggacactatattcaagtcagtgaaagcgtgcatcgacaataggctcgaaaagtattcccagcagccctcggctgattttctatgcgacatttaccaccagaaccgactctcaaaaaaagaactctacgccgcagtgaccgagctgcagttagctgcagtcgaaactactgctaactccctcatgtggattctttacaacctcagtaggaatcctcaagtacagcaaaagctgctgaaggaaatacagagtgtgcttcctgagaaccaggtgcctagggccgaggacctgagaaacatgccttatctcaaggcctgtcttaaggagtcaatgagattaactccttctgtcccattcaccacccgtacactggacaaggcaactgttttaggagagtacgctctcccgaagggcattgttcgcaaatatgatatccaggcaacggataatgagccggtagagatgctgcattcggggacattagttcccagccgagaactgcccattgccttttgccagcgctag

SEQ ID NO: 113699 - DNA, 1371 bp, synthetic construct
  misc_feature 1..1371: note = Description of Artificial Sequence: Synthetic coding sequence
  source 1..1371: mol_type = other DNA
atggataaactgaacaagatcaccgtgcccgcctcgcagaaactcagacagcttcagaagatggtccacgatatcaagaacaatgaaggggggattatgaataagatcaaaaagctgaaagtcaaggcaccccccagcgtgccccggcgggactatgccagcgagtcacccgcagacgaagaagagcagtggtctgacgatttcgattccgactatgagaatcctgacgaacactcggacagtgaaatgtacgtaatgcccgccgaagagaacgccgacgactcgtacgagcctccccctgtggagcaggaaacacggccggtgcatccagcccttccttttgcgaggggggaatatattgacaaccggtcctcacagcgccactcgcccccattctcaaaaactctgccttccaaaccgtcgtggccctctgaaaaggcacggctgacctcgaccctccccgccttgactgctcttcagaagccacaggtcccccccaaacctaagggcctgttggaggacgaagccgactacgtggtgcccgtcgaggacaatgatgagaattacatccatccaacagagtcttcttctcccccacccgagaaggcgccaatggtgaatcgtagtacaaaacctaatagcagcacccccgcaagtcctcccggaacggccagtggtagaaattccggcgcctgggagacaaagtcgccccctcccgctgcacccagtcccctcccacgtgcgggaaagaaacctactacacccctgaagacaacgcctgttgcgagccagcagaacgcctccagcgtctgtgaagagaaacctattccagctgagcggcaccgaggctcatctcacaggcaagaggccgtgcagagtcctgtctttcctccggcgcagaagcagatccatcagaagcccattcctttacctcggttcactgagggcggcaacccgacagtggacgggcccttaccgtctttttcatcaaatagcaccattagcgagcaggaagcaggggtcctgtgcaaaccatggtatgcgggggcctgtgatcgaaagagcgccgaagaggctcttcaccgatctaataaagacggttccttcttgattcgcaagtcttccggacatgattcgaagcagccttatacgctggtggtatttttcaacaaaagagtgtataacatccctgtaaggttcatcgaagctacaaaacagtatgccttgggcagaaagaaaaacggcgaagagtacttcggtagtgtcgctgagatcatccgtaaccatcagcactcgcccctggtccttatcgactctcagaacaacactaaggattccacccgactcaagtacgcagtgaaggtcagctag

SEQ ID NO: 113700 - DNA, 1287 bp, synthetic construct
  misc_feature 1..1287: note = Description of Artificial Sequence: Synthetic coding sequence
  source 1..1287: mol_type = other DNA
atgaaacgcaggaagtacggttttatctacaagacccatcttttcgggagacccactgtcagagtgatgggagctgacaacgtgcgcagaatacttctgggcgaacatcgattggtgagtgtgcactggcccgcttcagtacggaccatcctcggatccggatgtttgtctaatctacacgacagctcgcacaaacaacggaagaaggtgatcatgcgtgcattcagccgggaggcgttagagtgttacgttccggtgattactgaggaagtgggatccagcctcgagcagtggctgagctgtggcgaaagggggctgcttgtctacccagaggtgaagcgcctcatgtttcgcatagcaatgcgaatactgctggggtgcgaaccacagctcgcaggtgatggagacagtgagcagcaacttgttgaagctttcgaagagatgacgcgcaatttgttttccctgcctatcgacgttcctttcagtggactgtaccgtgggatgaaagcgcgaaacctgatacacgcccgaatcgaacagaatatacgggcaaagatttgcggattgagggcctcggaggccgggcaagggtgcaaggacgccttgcagttgctgatcgagcattcttgggaaagaggagagaggctggatatgcaggccctgaagcagtcgtctacagagctgctttttggcggtcatgagactaccgcctctgccgctacctctctgattacatacctggggttgtaccctcatgttcttcagaaagttagagaagagctgaaaagcaagggactgctgtgtaagtcaaaccaagacaataagctagacatggaaattcttgagcagcttaagtatatcggatgcgtgattaaggaaacactgcgcctcaaccctcccgtcccaggcggcttcagagtggccctgaaaacattcgagctgaacgggtaccagatccccaagggatggaatgtgatctatagcatctgtgatactcacgacgtggcagagattttcacgaataaggaggaatttaatcccgaccgtttcatgttaccacacccggaggatgcaagccggtttagttttatcccttttggcggtgggttacgctcttgcgttggaaaggaatttgcgaaaatactcctgaaaatcttcactgtagagttggctcgccattgcgactggcagttacttaacggaccgccgactatgaagactagtcccaccgtctaccccgttgacaacctccccgcaagattcacccacttccacggagagatttag

SEQ ID NO: 113701 - DNA, 1287 bp, synthetic construct
  misc_feature 1..1287: note = Description of Artificial Sequence: Synthetic coding sequence
  source 1..1287: mol_type = other DNA
atgaaacggcggaagtatggcttcatctacaaaacccatctgtttggtagacccacagttcgcgtgatgggcgccgataatgttcgcaggattttgctcggagagcaccgtcttgtgtctgtccactggcctgctagtgtccgaactattctcggatcaggctgcttatccaatcttcatgactcaagtcataagcagagaaaaaaagtaataatgcgtgccttctcccgggaggccctggagtgttatgtcccagtgatcactgaggaggtggggagctcattagaacagtggctctcatgcggggaaaggggtttgcttgtgtatcccgaggtcaaacgtctcatgttccggattgccatgcgcatcttactaggctgtgagccacagctggcaggcgatggcgatagtgagcaacaactggttgaagcgtttgaggagatgaccagaaaccttttcagcctgcccatagacgtgcccttctccggcctgtacagaggcatgaaggcaaggaaccttattcatgcgcgcatcgagcaaaacatacgtgcaaagatttgcggcctgagagcatcagaggccgggcagggatgtaaggacgccctgcagttactaatcgagcactcatgggaaaggggtgagaggctggacatgcaggcattgaagcagagctcaactgagctgctattcgggggccatgagactaccgcctcggccgcaacttctctgatcacctaccttggattgtacccgcatgtgctgcaaaaggtgcgggaagaactaaagtctaagggactgctatgcaagtcaaaccaggacaacaaattggatatggaaatactagagcagttgaagtatattgggtgcgtcatcaaggagactctccgcctcaatccccccgtaccaggggggtttagagtcgctctaaaaactttcgaactcaatggatatcaaatacccaaaggatggaacgtgatttactccatctgtgacacccatgacgttgcagagattttcaccaacaaagaggagttcaaccctgacaggttcatgctaccacatcctgaggatgcctcacgattttcttttattccattcggtggggggctgaggtcatgcgttggaaaggaatttgcgaagattctgctgaaaattttcactgttgaacttgccaggcactgtgactggcaactactcaatgggccacccactatgaaaacatcccctacagtctaccccgttgacaatctgccagcccgtttcacccacttccatggtgagatctag

SEQ ID NO: 113702 - DNA, 1569 bp, synthetic construct
  misc_feature 1..1569: note = Description of Artificial Sequence: Synthetic coding sequence
  source 1..1569: mol_type = other DNA
atgtttccttggggactgagctgcctaagcgtgctgggagcagctggaacagccctgctttgtgctggcctgctcctctccctggctcaacacttgtggaccctgagatggatgctgtcaagggaccgtgctagtacattaccactacccaagggaagcatggggtggccttttttcggggaaaccctgcattggctggtccagggttctaggttccactcaagcaggcgcgagcggtatgggactgtattcaaaactcacctcctgggaagacctgtgatccgagtatccggcgccgagaacgtaaggacaatcctgctgggagagcatcgccttgttcgttcgcagtggccacaaagcgctcatattctgttaggatcccataccctattgggagcagtcggtgaaccccataggcgcaggaggaaagtccttgctagggtgttctcccgggccgctttggagcgatatgtacccaggttgcagggcgcccttagacacgaggtccgcagttggtgcgcagctggcggtccggtgagcgtgtatgacgcctcaaaagcactcacgttcagaatggctgcgcgaatcctcctggggttaaggctcgatgaagcacagtgtgccaccctcgcgagaacatttgagcagctagttgaaaatctcttttccttgccacttgacgtgcccttctctggtctgaggaaaggcatccgtgccagagaccaactgcacaggcatctggaaggggccatatccgaaaagctgcacgaagacaaagcagctgagccaggagatgcgctcgacctcattattcacagcgcccgcgaactgggtcatgagccttctatgcaggagctgaaggaatctgcagtggagctgctgtttgctgccttctttaccacagcttctgcatctacctctctggtgctgctgttattgcagcaccccgctgccattgccaaaatccgcgaagaactggtggcccaggggctgggacgagcttgcggctgcgctccaggcgctgccgggggctcagagggcccacctccagactgcggatgcgaaccagatctgtcgctagctgcgctcggccgcctgcgatacgttgactgtgttgtcaaagaagtgctgcgtctcctgccgccagtttccggaggctatcgcaccgctcttagaacatttgaactcgacggataccaaatccccaagggctggtcagtaatgtactcaatacgtgatacccatgaaaccgcagccgtgtaccggtcccccccagagggctttgaccccgagaggtttggcgccgcccgcgaggactcaagaggtgctagttctcgatttcattatatccccttcggtggaggagcccgctcctgcttaggtcaagaactggcgcaagccgtccttcaacttctcgcggtcgaacttgttaggactgcccggtgggagctggcaacacccgcattcccggccatgcagaccgtgccaatagtgcaccccgtcgacggcctgcgattgttcttccacccgctgacaccttcagttgctggaaacggcctatgtttgtag

SEQ ID NO: 113703 - DNA, 1596 bp, synthetic construct
  misc_feature 1..1596: note = Description of Artificial Sequence: Synthetic coding sequence
  source 1..1596: mol_type = other DNA
atggctgctcttggttgtgctaggctgaggtgggctctgcgaggggctggccggggcctctgccctcacggtgccagagctaaggccgccatcccagccgctctgccatccgacaaagctaccggggctccgggggctggccccggagtgagaaggcggcagaggtcccttgaagagataccacggctcggacagctgaggttcttcttccagctgttcgtccaggggtacgcactgcaactgcatcagctgcaggtcctctataaggcaaagtacgggcccatgtggatgtcatatctgggccctcagatgcatgtgaacctggcatctgctcccttgcttgaacaagtgatgagacaggaaggaaagtatccggtcaggaatgacatggagctgtggaaggaacacagagaccagcacgacctgacttatggccccttcacaacagaaggccaccattggtatcaactccgtcaggccctgaatcagaggctcctgaaacctgctgaggctgcgctgtatactgatgccttcaacgaggtgatagatgatttcatgacacgcctcgatcaactgcgcgcggaaagcgctagcggaaaccaggtttcggatatggcccaactcttttattatttcgccctcgaggcaatctgctacattctgttcgagaaacgcatcgggtgtctccagaggtccatacctgaagacacagtgaccttcgtcaggtctatcggcctgatgtttcagaactcactctatgctactttcctgccaaaatggacaaggccggtgttaccgttctggaaaagatatctggatggttggaacgctatttttagctttggcaagaagctgatcgacgaaaagctggaggacatggaggcacagctgcaggccgccggcccggacggaatccaggtgagcggttaccttcactttctgttggcatccggacagctcagcccgagagaagcaatggggagtttgccagagcttctcatggccggcgtggatacaacctcaaatacactgacctgggccttgtatcacctgtctaaagatcctgagattcaggaagcactacatgaagaagttgtgggtgtcgttcccgcgggccaagtcccacagcacaaggactttgctcatatgcctttgctgaaagctgttctgaaagaaactctgagattgtatcccgttgtcccaacaaattccaggattattgaaaaagagattgaggtcgatggatttctctttcctaagaacactcagttcgtgttttgccattatgttgtgagtcgcgaccctactgcgtttagcgagccagagagctttcagccacaccgttggctccgcaatagtcaacctgcaaccccacggatacagcatccgtttgggagcgttcctttcggctatggtgtgcgcgcttgcctgggccgtcgtattgccgagctagagatgcagttgctgctcgctaggctcattcagaagtataaggtggtgctggcccctgagactggagaactgaagagtgtggctaggattgttctggtgccaaacaagaaggtcgggcttcagttcctgcagcgacagtgttag

SEQ ID NO: 113704 - DNA, 1572 bp, synthetic construct
  misc_feature 1..1572: note = Description of Artificial Sequence: Synthetic coding sequence
  source 1..1572: mol_type = other DNA
atgagcttccataaggaagatggcgtaaacagtctgtgccagaaggcactacacatcgtgacagaactatgctttgcaggacaggtggaatgggagaaatgttcaggcatttttccccgggaccgaggatctcagggcgggtcaagcaccgatatctctgtctcactactggctgttgtagtgtccttttgcggcttggcactgctggtggtgagcctgttcgtgttctggaaactctgttggccctgttggaaaagcaagcctgtcacctctaatattacgactctgcctcagtctatttcaagtgcgccaacagaggtctttgagacggaagagaagaaagagataaaggagaacgagaagcccgcggtcaaagcaatcgagcccgcaatcaaaatatcccacacctctcctgatatccctgcagaagtgcaaaccgcactgaaagagcacctcattaagcacgctcgggtacagcgccagattaccgaaccgacatcatcaaccagacactcatccttccgacgccacttacctagacagatgcaagtatcatccgtggatttcagtatggggacagaaccagtgctgcagagaggggaaacgaccacctcaattggtcgcatcaagcccgagctatataaacagaaatcggttgattctgaaggcaatcaaaacgaagacgtcaaaatttgcggcaaactaaattttaccctccaatatgattatgaaaacgaactgctagtggtgaagattattaaggctctagacttgcctgctaaggacttcactggaacgtctgacccatatgtgaaaatgtacctgctgcccgaccgcaaaaagaagtttcagactagagtgcataggaagactttaaaccctctcttcgacgagacattccaattccccgtagcttatgaccagttatccaatcgtaagctgcatttcagcgtgtacgacttcgacagattttctagacacgatatgattggagaggtcatcttggacaacctgtttgaagtctcagacttaagtagggaggccaccgtgtggaaagatattcattgcgctactactgaaagcatcgacttgggcgaaataatgttctcactgtgttatctcccgaccgcaggaagaatgactctgacagtgattaaatgcaggaatctgaaagccatggacattactgggagctctgatccctatgtgaaagtgtccttaatgtgtgaaggcaggagactgaagaagcgtaagacaactacaaaaaagaacaccctgaaccctgtctataatgaggctatcatattcgacatccctccagaaaacgttgatcaggtgagcctgagcatcgcagtcatggactatgacagagtgggacacaatgaggtcataggggtgtgccggacagggttggatgctgaaggcctgggacgggaccactggaatgaaatgttagcgtaccaccgaaagccaatcacacattggcacccactgctagagctgccaggacgagcgaccagcttcgattcccaaggttcgtgcccctctcccaaaccgccttcaaccccatag

SEQ ID NO: 113705 - DNA, 1512 bp, synthetic construct
  misc_feature 1..1512: note = Description of Artificial Sequence: Synthetic coding sequence
  source 1..1512: mol_type = other DNA
atggccttgatccctgacctagcaatggagacttggttgttattggccgtgtcgttggtactgctctatctgtacgggacacatagccatgggctttttaagaaacttggcatcccaggcccaaccccccttccattcctaggcaacattctgagctatcataagggtttctgtatgttcgacatggaatgccacaaaaaatatggaaaagtgtggggcttttacgacgggcaacaacccgtccttgcaattacagacccagacatgataaagactgtgcttgtgaaggaatgctatagcgtgttcaccaaccggcgaccctttggccctgtgggctttatgaagtcagcgatatcaatcgctgaagacgaggagtggaaaagactgcgttcactgctttcgcctacattcacctccggaaagttaaaggaaatggttccaattattgcccagtacggagacgtactggttagaaatttgagacgggaagcggagactggaaaacctgtgacgttaaaagatgtgttcggagcatattccatggatgttataaccagcacgagcttcggagtgaacatagacagtctcaataatccacaagacccctttgtggagaataccaagaagctgcttaggttcgattttctcgacccattttttctctccattaccgtcttcccttttctgatcccaatcttggaggtgctgaatatctgtgtcttcccaagagaggtgacaaacttcctgcgtaagtcggtaaaacggatgaaggaatccaggttggaagacacccaaaaacatcgtgtggacttcttgcaactcatgattgacagccagaactcaaaggagacagagtcccataaagccctgtcagatctagagctagttgctcaaagcattatcttcattttcgcagggtacgagacaacatcctcagtgctctcttttattatgtatgaactagcgacccatcctgatgtgcagcagaaactccaggaagagatagacgctgtgctgcctaacaaagcaccccctacatacgatactgtgctacagatggagtatctagatatggtcgttaacgagaccctgcggctgttccccatcgcaatgaggctggagcgagtatgcaaaaaggacgtcgagattaacggcatgtttatcccaaagggggtagtagtgatgatacctagctacgccctgcatcgggaccctaaatactggacagaaccagagaagtttctacctgaacgattttctaagaagaacaaagacaacattgacccttatatttacaccccgtttggatcaggcccccggaattgtattggaatgcgctttgcacttatgaatatgaaacttgccctgattcgggtcctccagaacttttctttcaagccttgtaaagagactcagattcctcttaagttgagtctgggcggcctgctgcagcctgagaaacccgtagtgcttaaagtagagagccgtgatggaaccgtgtcaggcgcctag

SEQ ID NO: 113706 - DNA, 1062 bp, synthetic construct
  misc_feature 1..1062: note = Description of Artificial Sequence: Synthetic coding sequence
  source 1..1062: mol_type = other DNA
atggctctcattccagatctggcgatggaaacctggctcttgctcgctgtttctctggtcttattatacttggtctttggggcatactcaatggatgtgatcacatcaacttcatttggcgtgaatatcgacagtctgaacaatccacaggatccattcgtggaaaataccaaaaaactgctaagattcgatttccttgacccttttttcctctccattactgtattcccgttcttgattccaatcctcgaagtgttgaatatatgcgttttccccagagaggttactaattttctgcgtaagagcgtgaaacgcatgaaagagtcacggctcgaggacacacagaagcaccgggtcgacttccttcaattgatgatagacagtcagaacagtaaggaaactgaaagccacaaggccttatccgatcttgagttagtcgcccagagtattattttcatttttgctggatacgagaccactagttctgtcctctcctttattatgtatgagctggcgacccatcctgacgtccagcagaagttacaagaggagattgatgcagtcttgcctaacaaagctccccctacctacgataccgtcctgcagatggaatatctggacatggtggtaaacgaaaccctgagactgttcccgatagccatgagacttgaacgcgtgtgcaaaaaggacgttgaaatcaatggcatgttcatcccgaaaggagttgtagttatgatcccgtcatatgcactgcaccgggacccaaaatattggaccgagccagaaaagtttctgcctgaaaggtttagcaaaaaaaataaagacaacattgatccttatatatacacaccattcggcagcggacccaggaattgcattggcatgaggttcgcccttatgaacatgaagctggcactcatcagggtgctgcagaatttctctttcaagccctgcaaagagactcaaatcccacttaaattatctctgggaggtctgctccaaccagaaaaaccagtggtgctgaaagtcgagtctcgcgacggtacggtctccggagcttag

SEQ ID NO: 113707 - DNA, 240 bp, synthetic construct
  misc_feature 1..240: note = Description of Artificial Sequence: Synthetic coding sequence
  source 1..240: mol_type = other DNA
atggttcctattatcgcccagtatggcgacgtattagtccgaaacctccggcgagaggctgagacgggtaaacctgtcacgctaaaagacgtattcggtgcttattccatggatgttattacatccacctcttttggggtaaatattgatagcctgaataatccccaggaccccttcgtggagaatacaaaaaagttactaaggtttgacttcctggaccctttcttcctttcaatctag

SEQ ID NO: 113708 - DNA, 1068 bp, synthetic construct
  misc_feature 1..1068: note = Description of Artificial Sequence: Synthetic coding sequence
  source 1..1068: mol_type = other DNA
atggcaaagctaattgcgctgactcttctgggcatggggcttgcgctctttagaaatcatcagtcttcttaccagacccgcctgaatgcactgagagaagtccaacctgtggaactgccaaactgcaatctcgtgaaaggaatcgagaccggaagcgaagatctcgaaatcctccctaacggactcgcatttatcagctccggtttgaaatatcctggaattaagagttttaacccaaatagccctggcaagattctgctcatggatcttaacgaagaggatccgacagtcctggaactcgggatcaccggttcaaagttcgacgtgagctccttcaatcctcacggaattagtactttcaccgacgaagataatgccatgtatctcctagtggtcaaccatccagatgcgaagtcgacagtggagttattcaagttccaggaggaggaaaagtctctcctccatcttaagactatacggcacaagctccttcctaaccttaacgacattgtggccgtcggacctgagcatttctatggaaccaacgatcactacttcctggatccttacctgcagagttgggaaatgtacctgggccttgcgtggtcctatgtggtttattattcaccgtccgaagtccgggttgtagccgaaggcttcgacttcgccaacggaattaatatcagtccagatggaaaatatgtctacatagcggagctactcgcccataaaattcacgtgtatgaaaagcacgccaattggaccctgacccccctcaaatcgctggattttaacacccttgtggataatatctccgtggaccccgaaaccggagatctatgggtggggtgccatcccaacgggatgaagatattcttctacgactcggagaatcctccagctagtgaagtgctgcgtatccagaacattttaacagaagaaccaaaggtcacacaggtgtacgctgaaaacggcacagtcctgcagggatcaacagttgcaagtgtttataagggcaagctgctgatcggaaccgtttttcacaaagccttgtattgtgagctctag

SEQ ID NO: 113709 - DNA, 1263 bp, synthetic construct
  misc_feature 1..1263: note = Description of Artificial Sequence: Synthetic coding sequence
  source 1..1263: mol_type = other DNA
atggacctgattccaaacttcgcaatggagacatgggtgctcgtcgccacgtctctcgtcctgctctatatctatgggacgcactcccataagctatttaagaagcttggcatcccgggaccaacccccctgccgtttttaggtactatcttgttctatctgcgggggctgtggaatttcgacagagagtgcaatgaaaaatacggcgaaatgtggggcctgtacgaaggccagcagccaatgctcgtcattatggaccctgacatgataaagacagtcctggtgaaggaatgctactccgtctttaccaaccagatgcctcttggccccatgggcttccttaagagcgcactctctttcgccgaagacgaggagtggaaaaggattcgcacactcctgtcacccgcatttacctctgtgaagtttaaagagatggttccaatcatctctcaatgtggtgatatgctcgtgaggtctctgagacaggaggcggagaatagtaagtccatcaatctgaaagacttttttggcgcatataccatggatgttattacgggaactctgtttggtgtcaacctggatagccttaacaatccgcaggacccatttctaaaaaatatgaaaaaattgctcaaactcgattttctagaccctttcctgctgctgatctcactgttccctttcctcactcctgtgttcgaggccctcaatattggtctgtttcctaaagatgtaactcattttctgaagaattccattgaacgaatgaaagaatccagactgaaggacaaacagaaacacagagtggatttctttcagcagatgattgacagccagaactccaaagaaaccaaatctcataaggccctgtctgacctggaattggttgcacagagcatcattatcatttttgctgcttacgatactacttccacaacattgcctttcatcatgtatgagctggccacccacccggatgtgcagcaaaagctgcaagaggagattgatgcagtgctccccaataaggcccccgttacttatgatgcattggtgcagatggaatatttagatatggtggtgaatgaaaccttaagattgtttccagtagtgagtcgagtaactcgagtttgtaaaaaggatatagagattaatggcgtgtttataccgaaaggcctcgccgttatggtaccaatttacgctctccatcacgaccctaagtattggacagaaccagaaaagttctgtccggagcgctcgcactag

SEQ ID NO: 113710 - DNA, 843 bp, synthetic construct
  misc_feature 1..843: note = Description of Artificial Sequence: Synthetic coding sequence
  source 1..843: mol_type = other DNA
atgaatctggaaaccgggaacgggccccaccatttcccaatgtggcgttacgtgggagagaaaccggaggccggaagtagggagcaacaagtacatcaactggaacgtttcctttggggtctgcaccacggatgcaaccattggcacataatttggagcgaactcggcttcagccagcaaagcacgagatccctgagcgagaaatacgaagaggcctttaaaatcgggttcttcggatctctgttcacgctaaatatccagtccctagctgtgctgccaagacctgaatgtatggtcaggagtggcttaaccgagacatcaacatcatgggtgagagtaattctactgccacagccacctgaagagctgggcttgcagcacagggtggacttttttcaacaaatgattgattcacagaactcaaaagaaacaaagagccacaaggcgttgtcagacttggagctggttgcccagtctataattatcatattcgcagcttacgacactacatccaccactcttccattcatcatgtacgagctcgccacacatcccgacgtgcaacagaaactgcaggaggagattgacgcagtgctacccaataaggcccccgtgacatacgacgcccttgtccagatggaatacctggacatggtcgtcaatgaaacactcagactcttccccgtggtgagcagagtcaccagagtttgcaaaaaagacatagaaatcaacggagtctttatacccaagggcctggccgttatggttccgatctacgcattgcaccacgaccctaagtattggacagaacccgaaaagttctgtccagaacggagtcactag

SEQ ID NO: 113711 - DNA, 1512 bp, synthetic construct
  misc_feature 1..1512: note = Description of Artificial Sequence: Synthetic coding sequence
  source 1..1512: mol_type = other DNA
atggacctcattcccaactttgctatggaaacctgggtcttagtagccacctcgctggtgttgctctatatctacggcacacactctcacaaactgttcaagaagctcggaattccaggtcctacccccttgccttttctaggcacaattctgttttacttgagggggttatggaactttgaccgggaatgtaacgaaaaatatggagagatgtgggggctgtacgagggacaacagcctatgctagtgataatggaccccgatatgatcaagacggtcctcgtcaaggaatgttactcagtctttaccaatcagatgccactgggtcctatgggttttctcaagtcagctctctcatttgccgaggacgaagagtggaaaaggattaggacactactctctccagcctttacgtctgttaagtttaaagaaatggtgccaattatctcccaatgtggagatatgctagtgcgctctttgagacaggaagccgagaacagcaaatctatcaacctcaaggactttttcggggcatacactatggacgtcatcacagggaccttgtttggggtgaacctcgactccctgaacaaccctcaggacccatttctgaagaacatgaaaaaactgctgaagctggatttcctggatcctttcctcctactgatttccctgttcccttttttaactccagtgtttgaggccctgaacataggcttattcccaaaggacgtaactcactttcttaagaacagtatcgaaaggatgaaggagtcacgactgaaggacaaacagaagcatcgcgtcgattttttccagcagatgatcgactctcaaaacagtaaggaaacaaaatcccataaggctctgagcgacttagagctcgtggctcagagcataatcatcattttcgctgcctacgacaccacatcaaccaccctcccgtttatcatgtacgagctcgccacccaccccgatgtacaacagaaactccaagaagagatcgatgctgtgctgccgaataaggcccccgtaacttacgacgcgttggttcagatggaatacttggatatggttgtaaacgagacattgagactctttcctgttgtttctcgggtgacgagggtctgtaaaaaagacatcgaaattaacggcgtcttcattcctaagggcctagcagtcatggtacctatttacgctctccaccacgatcccaaatactggaccgaacctgaaaaattctgtcccgagcgcttcagtaaaaaaaataaagactcgattgacctctatagatacatcccatttggtgctggccccagaaactgtattggtatgaggtttgcgctcaccaacattaagctggctgttattagggcactgcagaactttagcttcaagccttgcaaagaaacacagatccccttgaagctggataacctccctatccttcagcctgagaaacctatcgtcctgaaggtacacctgagagatggtattacgagtggcccatag

SEQ ID NO: 113712 - DNA, 381 bp, synthetic construct
  misc_feature 1..381: note = Description of Artificial Sequence: Synthetic coding sequence
  source 1..381: mol_type = other DNA
atggacctgatccctaatttcgctatggagacatgggtcctggttgctacctcactagtgctcctgtatatatacggaacacattcgcataaattgtttaaaaaactcggaatccccggccctacgcccctgccttttcttggtacgattttgttctatttgaggggcctgtggaactttgatagagaatgtaatgagaagtttttgtggggacttcaccatggctgtaaccactggcatatcatatggagtgaacttggcttcagccagcaaagcacccgtagcctgagcgaaaagtatgaagaagcgttcaagattggctttttcggctcgctctttacactgaatattaccctgtccattagctatccatctttttag

SEQ ID NO: 113713 - DNA, 225 bp, synthetic construct
  misc_feature 1..225: note = Description of Artificial Sequence: Synthetic coding sequence
  source 1..225: mol_type = other DNA
atggatcttatccccaattttgcgatggaaacctgggttctcgtggccacttctctggtgctcctgtatatctatggtacacattcacacaagctcttcaagaagctgggtatccctggacccacgcccctgcccttcctgggaactatcctgttttatcttagaggactgtggaatttcgatcgcgaatgcaatgagaaatatggagagatgtggggtccctag

SEQ ID NO: 113714 - DNA, 435 bp, synthetic construct
  misc_feature 1..435: note = Description of Artificial Sequence: Synthetic coding sequence
  source 1..435: mol_type = other DNA
atgccaaaagtaaagcggagcaggaaggccccacctgatggctgggagttgattgagcccaccctggatgagcttgaccagaaaatgcgtgaggctgagacggaacctcatgagggcaaacgcaaggtggagagcttatggcctatatttaggatccaccaccagaaaaccagatatatcttcgacttgttttacaagcgcaaagcaatctcgcgggaactttacgagtattgtatcaaggagggctacgcggacaagaacctgattgccaagtggaagaagcagggatatgagaacctttgttgtttgcgctgcattcagacccgggacaccaacttcggcactaactgcatctgtcgtgtcccgaagtccaagctggaagttggcagaattattgagtgtactcactgtggctgccgtggatgttctggctag

SEQ ID NO: 113715 - DNA, 120 bp, synthetic construct
  misc_feature 1..120: note = Description of Artificial Sequence: Synthetic coding sequence
  source 1..120: mol_type = other DNA
atggatctcatccctaacttggcggtggagacatggctattacttgccgtcagccttgtcctgctgtatctgatgagagtgcctaagtcagccaagagtcctttaaccaagcaaacttag

SEQ ID NO: 113716 - DNA, 1479 bp, synthetic construct
  misc_feature 1..1479: note = Description of Artificial Sequence: Synthetic coding sequence
  source 1..1479: mol_type = other DNA
atgcagttgctcatgctggaacttctgctgctctttatagtttacggtacccgcactcacggtctgtttaagagattagggattcctgggcccacacctctgccactactgggcaacgtactgtcctaccgacaaggtctgtggaagtttgacactgaatgctataagaagtatggaaagatgtggggtacctatgaagggcaacttccggtgctagctattacagaccctgacgtcattcgcacagtccttgttaaagaatgctattctgtgttcacaaatcgtagaagtctcgggcctgttggcttcatgaagtctgcaatttcccttgccgaggacgaggaatggaagaggataaggtcattgctgtcgccaacattcacgagcggaaaacttaaggagatgttccccatcatcgcccagtacggggatgtgctggttagaaacctgcggagagaagccgagaaggggaagcctgtcacccttaaagatattttcggggcttactcgatggacgtgattactgggacttctttcggcgtaaacattgattctctgaataacccacaggacccattcgtggaatccacaaaaaagtttctgaagtttgggttcctggacccccttttccttagtatcatactgtttcctttcctgactccagtgttcgaggcgctgaatgtgtctttattcccaaaagacacaataaattttctgagcaaatccgtgaataggatgaagaagagtcgactgaatgataagcagaagcaccgcctcgatttcttgcagctgatgatcgattctcagaattccaaagaaactgagtctcacaaggcactgagcgacctcgaactcgccgcacagtcgatcatttttatctttgccggatacgaaacaactagttcagtgctttcgtttactctttatgagctggctactcacccagacgtgcaacagaagctgcaaaaggaaatcgacgcggtgctgccaaacaaagctccacctacatacgacgctgtggtgcagatggaatacctcgatatggttgtgaacgaaacactccgtctgtttcctgttgccatacggctggaacggacctgtaaaaaggatgtagagattaacggggtttttattccaaagggatctatggtcgtgatcccaacctacgcccttcatcacgacccgaagtactggacagaacctgaggaatttcgacctgagcggtttagcaagaagaaggattctattgatccttatatctatacacccttcgggacagggccgcggaactgtatcgggatgaggttcgccctgatgaatatgaagctggctctgattcgcgtgctgcagaatttctcctttaagccttgtaaagagacgcagattcccctgaagttggacacccagggcctgctgcagcccgagaagccaattgtgctgaaagtcgatagtagagacggaacactgtcaggcgagtag

SEQ ID NO: 113717 - DNA, 1602 bp, synthetic construct
  misc_feature 1..1602: note = Description of Artificial Sequence: Synthetic coding sequence
  source 1..1602: mol_type = other DNA
atggacctaatcccgaatttggccgtggaaacatggcttctcctggccgtctctctgatactcctgtatctgtatgggacacgaacacatggcttgttcaaaaagctgggcataccagggcccacaccccttccatttctcgggaatgcccttagcttccgaaagggttattggacctttgacatggagtgttataaaaaatatcggaaggtttgggggatctacgattgccagcagcccatgctggccataactgaccccgacatgatcaagaccgtactggtgaaggaatgctattccgtattcacgaataggcggcctttcggcccagttggttttatgaagaatgctataagtatcgctgaggatgaagagtggaaaaggatccggtctttactgtcacccacctttacgagtggcaaacttaaggaaatggtgcccataattgcacagtacggcgacgtcctggtgagaaacctgcgacgtgaggccgaaacagggaaacccgtcaccctgaagcacgtttttggggcctactccatggatgtgattacatccactagttttggcgtttcaatcgactcattgaataacccacaggatccctttgtggagaatacaaagaaactcctgcgattcaatcctctcgacccctttgtgttgtccatcaaagtgttcccctttttaacgcccatcctggaagcccttaatatcacagtgtttcccagaaaggtgatcagtttcttgactaaaagtgttaagcagattaaagagggaagactcaaggagactcagaagcatagagtggacttcctgcaactcatgatagattcgcagaactctaaagatagcgaaacacacaaagctctttctgacttggagctgatggcacagtccatcatctttattttcgcaggctacgaaacaactagtagtgtactgagcttcattatctacgaactggctactcatcccgacgtgcagcagaaagtgcagaaggagatcgatactgtattgcccaacaaggcacctcccacatacgatacggtgctccaactggaatatctggacatggtggtaaatgaaactctgaggctgtttcctgtggccatgcgtctggaaagggtatgcaagaaagacgtggaaataaacggcatgtttatccctaagggagtggtcgtaatgatcccttcctacgtcttgcaccatgatcccaagtactggcgtgaacccgagaagttcctccccgagagattttctaagaagaacaaagacaatatcgacccttatatctacaccccttttgggtccggcccgaggaactgtatcgggatgaggttcgccctggtgaacatgaaattagccctcgtccgcgtgctccagaatttcagtttcaaaccatgtaaggagacccagattcccctgaaactgcgctttggcggtctgctcctcacggagaagcctattgtactgaaggctgaaagccgcgacgagacgttcgtggatatggagccaatccacatggactttctgcggtcgctggcctttcagggtccccacctttgttttttttgggaactgctctgtcctacaataagatag

SEQ ID NO: 113718 - DNA, 1512 bp, synthetic construct
  misc_feature 1..1512: note = Description of Artificial Sequence: Synthetic coding sequence
  source 1..1512: mol_type = other DNA
atggacctaatccccaacctcgcagtcgagacgtggttactgctggccgtatcgctaatcctgctatatttgtacggaacacggacgcatggattgttcaaaaagcttggcattccaggccctactcccctgccatttctcgggaatgctctctcctttaggaagggctattggacctttgatatggagtgttacaaaaagtatcggaaggtgtggggaatttatgattgccaacagcccatgctggcgatcactgaccctgacatgattaaaaccgtgctggtgaaggagtgttacagcgtgttcaccaaccggcgaccatttggaccagtcggcttcatgaagaatgccatcagcattgccgaggacgaagagtggaagagaattcggagccttctcagccccacatttacatcaggcaaactgaaggagatggttcctattattgcccagtacggtgatgtgctggtccgcaatttgagaagggaagcagaaaccgggaagcccgttacattgaagcatgtcttcggtgcgtattcgatggatgtcatcacttccactagcttcggagtttctatcgattccttaaacaatccacaagatcctttcgtcgaaaacaccaagaaactgctccggttcaatcccctggatcctttcgtccttagtattaaagtgttcccatttctcacccctatcttggaggcgctcaatatcaccgttttccctaggaaagttatcagctttctaacgaaatcagttaaacagatcaaggagggccggctcaaggagactcagaagcacagggtggactttcttcagttaatgattgattctcagaactccaaggactccgagactcacaaggccttaagcgacctggagctgatggcccaatctataatctttattttcgcagggtacgagactacttcatctgtgctgagttttattatctacgaattggcaactcatcccgacgtgcagcaaaaggtacagaaagaaattgataccgtgctgccaaataaggctcctcccacttatgatacagtgcttcagttggaatatttagatatggttgtgaacgagactttgagactcttccctgtggccatgaggctcgaaagggtgtgcaaaaaagacgtggagatcaatggaatgttcatacccaagggcgtcgtggtgatgatcccatcatatgtgctgcaccacgaccccaagtattggagggaaccggagaagtttctgcccgaaagattttctaaaaaaaataaagacaacattgatccctatatttacactccctttggttccggtcctagaaattgcattggcatgcgattcgcgctagtgaatatgaaactggctttggtgagggtgctccagaattttagctttaagccctgcaaagagacacagataccgcttaagctgcgctttggaggtctgctcctgacagaaaaacccatagtcctgaaggcggagagtcgcgacgagacagtgtctggggcctag

SEQ ID NO: 113719 - DNA, 1410 bp, synthetic construct
  misc_feature 1..1410: note = Description of Artificial Sequence: Synthetic coding sequence
  source 1..1410: mol_type = other DNA
atggagctgatctcccccaccgttatcattatcctggggtgcctggcactgttcttgttactccaacgaaaaaacttgcgccggccaccctgcatcaagggctggataccctggatcggggttggttttgagtttgggaaagcccccttggagttcatcgagaaggcccggataaagtatgggccaatattcacagtgttcgctatggggaaccggatgaccttcgtgaccgaagaagaaggtattaatgtgttccttaaaagcaagaaggtggatttcgagctggctgttcaaaatattgtctacaggaccgcttctatccctaaaaacgtcttcctggcactccatgagaagctctacatcatgttgaagggcaaaatgggcacggtcaacctccatcaattcaccggacagttaacggaggaattacacgagcagctagagaacctgggcactcatgggactatggatctcaataacctggtgcggcatctcctgtacccagtaaccgtcaatatgctcttcaacaaatctcttttctccactaacaagaagaagatcaaggagtttcatcaatactttcaggtttacgacgaggattttgagtatggcagccagctacccgaatgcctgctgcgtaattggtctaagtccaaaaagtggtttcttgagctgttcgaaaagaacattcctgacattaaagcttgcaagagtgccaaggataacagcatgacactcctacaggctacccttgatatcgtcgagacagaaaccagcaaagagaactcccccaattacggcctactgcttctgtgggcatctctgtccaacgccgtgcctgtggccttctggactcttgcatacgtgctgtctcatccagatattcataaagccataatggaaggcatttcctccgttttcgggaaagccggcaaagataaaatcaaggtgtccgaggatgacttggagaatctcctccttatcaaatggtgcgtgctcgaaactatcagactgaaagctccgggagttattacacgtaaggtcgtcaaacctgtcgagatcttgaattacataatacctagcggagacctcctgatgctttcacccttttggctacatcgtaaccccaaatacttccctgaacctgagttatttaagccagagaggtggaagaaggctaatcttgaaaagcattcctttctggactgctttatggcatttggaagtggaaagttccagtgtcccgcgcgctggtttgccctgctggaggtccagatgtgcatcatattaattctgtacaagtacgactgttcactgctggatccgctccctaaacagagctacctacacttagtcggcgtgcctcagcccgaaggacagtgcagaatagaatataaacagcgcatttag

SEQ ID NO: 113720 - DNA, 1560 bp, synthetic construct
  misc_feature 1..1560: note = Description of Artificial Sequence: Synthetic coding sequence
  source 1..1560: mol_type = other DNA
atgtccgttagtgtgctttccccatctcgcctgcttggggacgtgagtgggatcctgcaagcagcttcactgttgattctgctgctcctgctgatcaaggccgtgcagttgtatttgcatcgccagtggcttctaaaagccctccaacaattcccatgcccaccatcccattggctttttggacacattcaagagctccagcaagaccaagagctgcagcgcattcagaagtgggtggagactttccccagtgcatgccctcactggttatggggtggaaaggttcgagttcaactttatgatcccgattatatgaaggtgatactaggaagatcagatcctaagtctcacggcagctaccgctttcttgccccctggatcggctacggtctgctacttcttaatgggcagacgtggttccagcaccgcagaatgctgacgccagctttccattacgatattctgaaaccatatgtgggtctgatggcggattctgtgagggtgatgctcgacaagtgggaagaactattgggacaggatagccccctcgaagtatttcagcatgtgagcctgatgactctggacacgatcatgaaatgcgccttctcacatcagggcagtatccaggtcgacaggaattctcagagctacattcaggcaatcagcgacctcaacaacctagtctttagccgggttagaaatgcattccatcagaatgacacgatatattctctgaccagcgctggcaggtggactcatcgagcatgccagctagcccaccaacataccgatcaggtaatccagctgagaaaagctcagctgcagaaagagggggagctcgaaaagatcaaaaggaaacgacacctggactttctagatatcctccttttagcaaagatggaaaatggtagtatcctgtctgataaagaccttcgtgccgaggtggacactttcatgtttgaaggacatgacaccactgcctccgggatttcctggattctttacgctttggctacgcaccccaaacaccaggaacgttgtcgagaggaaatacactctctgttgggcgacggagcgtcaataacatggaaccaccttgaccagatgccatatacaacaatgtgcatcaaggaggctcttcgtctgtaccctcctgtgccgggcatcggtcgggaactttcaacgccagtcacatttcccgatggacgaagcttgcctaaaggcatcatggtgctccttagcatctacggcctccaccataatccaaaggtttggccaaatcctgaggtgttcgatccatttcgttttgcgccagggagcgcccaacattcacatgcttttctgcctttctccggcggatcacggaactgcattggaaagcagttcgctatgaacgaactgaaggttgctaccgctctcaccctcttacgattcgagttattgcccgaccccactagaatcccaatcccaatcgcccggttagtcctgaaatcaaaaaatggcatccacctgaggttgcgccgcctgcccaacccatgcgaggacaaggaccaactgtag

SEQ ID NO: 113721 - DNA, 1563 bp, synthetic construct
  misc_feature 1..1563: note = Description of Artificial Sequence: Synthetic coding sequence
  source 1..1563: mol_type = other DNA
atgagcgttagcgttctctctccatccagattgctcggagacgtgtccggaatcctgcaggcggcttctctactaatacttcttttgttacttattaaggcagttcagctctacctgcaccgacagtggttgctgaaggcattgcagcaattcccatgtcctccctctcactggctcttcggacacatccaagagctgcagcaggaccaggagctgcagaggattcaaaaatgggttgagacatttccatctgcgtgtccacattggctttggggaggcaaagtgagggtccagctgtacgatcccgactatatgaaagtgatactggggaggtcggatcctaagtcacacggaagctaccgattcctggctccctggatcggctatggtctccttcttctaaacggccagacttggtttcagcatcgccgtatgcttacccctgcctttcactatgatatcctgaaaccttacgttggcctgatggcggacagcgtaagagtcatgctcgacaagtgggaagagttgttaggtcaagactccccactggaagtcttccagcatgtcagcctgatgactctagatactatcatgaaatgcgcattttcccaccagggttccattcaggtcgatcggaactcccaatcttacatccaagcaatatccgacctcaacaatcttgtgttttcaagagtccgcaacgcattccaccagaacgataccatttactcgctgacgagtgctgggagatggactcacagggcatgtcagttggctcaccaacatactggcgatcaggtgatccaactgagaaaagcgcagctgcagaaggagggagagctcgagaaaatcaaaaggaagaggcacctggattttttggacattctgctcctggctaaaatggagaacggcagcattctcagcgacaaggacctgagggccgaggtcgacacctttatgttcgagggccatgatacgactgctagtggcatttcttggattctgtatgctttggcaactcaccccaaacaccaggagcgttgccgtgaggagatccattcactgcttggtgacggtgcaagtatcacctggaaccacctggatcagatgccgtataccacaatgtgcatcaaggaagcattgcgtctgtatccacccgtccccggcatcggcagggaactcagcactcccgttacattccccgacggcaggtctctgcccaagggcatcatggtgttactgagtatctacggcttgcatcacaatcccaaggtgtggcctaatcccgaagtgttcgatccatttcgattcgcaccagggagcgcacaacacagccatgccttcctgcccttctcaggcggaagccggaactgcatcggcaagcagtttgccatgaacgagctgaaggtggctacagcccttacactcctaagattcgaactcctgcctgaccctactcggattccaatcccaatagcccggctcgtgctcaaatccaagaatggcatacacctgcgcttgagacgactgccaaacccctgtgaggacaaagaccagctctag

SEQ ID NO: 113722 - DNA, 1368 bp, synthetic construct
  misc_feature 1..1368: note = Description of Artificial Sequence: Synthetic coding sequence
  source 1..1368: mol_type = other DNA
atgtccgtgtccgtgctctcgccttcaagattgctaggcgacgtgtctggaattctccaggccgccagcctcctcattctgctgctgctgctcataaaagccgtccaactctacctgcacagacagtggcttttgaaggccctgcaacaattcccctgtcctcccagccattggctgttcggacacatccaagaacttcagcaagaccaggagttacagagaatccagaagtgggtggagacctttcctagtgcttgtccccattggctttggggcggcaaagtgcgagtccagctgtacgatccagactatatgaaggttatactgggccggtcagatcccaagtcacacggaagctatcggttcctggccccatggatcgggtacggtttgctgttgctaaacggccagacatggttccagcacagacggatgttgacccccgcttttcactatgatattctcaagccatacgtgggcctgatggctgacagtgtgagggttatgcttgacaagtgggaggagctcctgggacaggactcccccctggaagtattccagcacgtgtctttaatgaccctggacaccattatgaagtgtgcctttagccatcaggggtccattcaagtggacaggaattcgcagtcatatatccaagcaataagcgacttgaacaatctggtgtttagccgcgtgaggaacgcattccatcaaaacgatactatttactccctcacgtcggccggacgatggactcacagggcgtgtcaactggcacaccagcacaccgatcaggtgatccagctgagaaaagctcaacttcagaaggagggggaattagaaaaaataaaacgcaagcgtcatctcgattttttagatatactcttgcttgctaagatggagaacgggagcatcttaagtgacaaagatctgcgtgctgaggtggacacttttatgttcgaggggcacgacactaccgcctcaggcatatcgtggattctgtacgcactggccacacatcccaagcaccaagagagatgtagggaagagatacattcattgctaggcgatggggctagtatcacctggaaccacttagaccagatgccctacactaccatgtgtattaaggaggctctgaggctctacccacctgttcccggtatcggacgggagttgagcacgcccgtcactttcccagacgggcgatcccttcccaaaggaatcatggtcctgctatctatatacggactgcaccataacccaaaggtctggccgaaccctgaggtctttgacccctttagattcgcacctgggtctgcccagcattcacatgcatttttgccttttagtgggggatcacggtag

SEQ ID NO: 113723 - DNA, 474 bp, synthetic construct
  misc_feature 1..474: note = Description of Artificial Sequence: Synthetic coding sequence
  source 1..474: mol_type = other DNA
atgaaagtgatcctgggacggtcagatccaaagtctcacgggagctataggtttctcgctccttggatcggatacggcctcctactgctgaacggacagacttggtttcaacacagacgaatgctcactcccgcctttcattacgatattttgaagccttatgtcgggttgatggccgatagcgtcagagtcatgttggacaagtgggaggaactcctgggtcaggatagccccctggaggtgtttcagcatgtttccctgatgacgctggatacaatcatgaagtgtgccttcagccaccagggatccattcaggtggatcgaccctccgatcccacggaggaggggtctacaactgaagggggcggggcgggtgaagaccaggaggaggaggcttttggcttcagcggatacccgcctctgggccaaaacggggaatgggagcacctcgtccggcaggggccgccttgttag

SEQ ID NO: 113724 - DNA, 1575 bp, synthetic construct
  misc_feature 1..1575: note = Description of Artificial Sequence: Synthetic coding sequence
  source 1..1575: mol_type = other DNA
atgcctcagctgtccctatcctggcttggccttggacctgtggccgcctccccttggctgctgctcctgctggttggagggagctggctgctggcccgagtcctggcatggacatatacattctatgacaattgccgtcgccttcaatgtttcccccagccgccaaagcagaactggttctgggggcaccaaggacttgtgacccctacggaggaggggatgaaaacgctgacacagttggtgaccacttaccctcaggggtttaaactctggctgggcccaacattcccactccttatcctctgccatcccgatattattcgaccaatcactagcgcgtcagccgctgtcgcccccaaggacatgattttctatgggtttcttaagccatggctaggggacggattgttgctgagtggcggagataaatggtcccgacatagacgaatgctcactcccgccttccacttcaatatcctgaagccctacatgaagatctttaacaagagcgttaacattatgcacgataaatggcagaggctcgcatcagaagggtcagccagattggacatgttcgagcacattagccttatgacgctcgacagcttgcaaaaatgcgttttttcattcgaatcaaattgccaggagaaacccagcgaatatatcgctgcaatcctggagttgtccgcgttcgttgagaagcggaaccagcagattctactgcataccgacttcctgtactacctgacacccgacggacagcggtttcggcgcgcctgccacctagtgcatgacttcaccgatgctgtcatccaagagaggaggtgcaccctccccactcagggcatcgatgattttctgaagaacaaggctaaatcaaagacgctggatttcatcgacgtgctcctgttgagcaaagatgaggatgggaaggaattgtcagatgaggatatccgtgctgaggctgacacatttatgtttgagggacacgacacaactgcttctggattgtcatgggtgctctatcacctagcaaaacaccccgaatatcaggagcagtgccggcaggaggtccaggagctccttaaagatagagagccgattgagattgagtgggatgacctggcccagctgccattccttactatgtgtatcaaggaaagcctgcgcctgcatccaccagtccccgtgatttctaggtgttgcactcaggattttgtgttgccagacggtagggtaattccaaaaggtatcgtatgcctaattaacattattggtatacactacaaccccacagtctggcccgatccagaggtatacgaccccttcaggttcgaccaagagaacatcaaagaaaggagtcccctggccttcattcctttctctgccggccctagaaactgcattggccaggccttcgccatggcagagatgaaagtggtgctggcactcaccctgctgcattttaggatcctgcccacgcacacggaaccgagacgaaagccagagctaatactgcgggccgaggggggactctggttgcgcgttgaaccactcggagccaactcccagtag

SEQ ID NO: 113725 - DNA, 1365 bp, synthetic construct
  misc_feature 1..1365: note = Description of Artificial Sequence: Synthetic coding sequence
  source 1..1365: mol_type = other DNA
atgccacaactcagcttatcttggcttgggctgggacccgtcgctgcctcgccgtggttgctgctactcctggttggggggtcctggctactggcacgcgtgctggcgtggacttatacattttacgacaactgcaggaggctgcagtgcttcccacagcctcctaagcaaaactggttctgggggcaccagggtctagtcactccgaccgaagaaggaatgaaaactctcacacaattggtcacaacatatcctcagggattcaagctgtggcttggcccaacatttccactcctcattctgtgtcacccagacattatcaggccgatcacaagcgcatcagcagctgtagccccaaaggatatgatcttctacgggtttctaaaaccctggctgggcgatggtcttctgctgtcgggtggagataagtggagcaggcaccgacggatgctgacaccagcctttcacttcaatattctgaagccctatatgaagatatttaataagtcggtgaacatcatgcacgacaagtggcagcgccttgcaagtgaaggatcggcccggttagacatgttcgagcatatcagcctcatgacgttagactctctgcagaagtgcgtgttctcgttcgaatccaattgtcaggaaaagccctcagagtatatcgcggctatcctcgagctttctgcgttcgtggaaaagaggaaccagcagatcctgctgcacaccgattttctttattacctgacgcccgatggacagaggttcagaagagcctgccatctcgtgcacgattttaccgatgcggtgatccaggagcggaggtgcacgctccccacgcaaggcatcgacgattttctgaagaataaagctaaaagcaaaacgctggattttattgacgtgctactgttgtcaaaggatgaggatggcaaggaattgtctgatgaagatattcgcgccgaagccgatacgttcatgttcgagggccacgatacaacagcaagcggtctaagctgggttttgtaccatctggcaaaacaccccgagtatcaagagcagtgccgccaggaggtgcaagaactcctaaaagatcgcgagccaatcgaaatagaatgggacgaccttgcacagcttccatttctgactatgtgtatcaaggagagcctgcgccttcacccccctgtaccagtcatctcacgttgctgcacccaggactttgtcttacctgacggtagagttattccaaaaggtctccgacctttgccgtttcggccaagagaacatcagggcgaggtgacatccggcttctattccctgctgggtcgcgcacagaaactgcacagggcgggtgtccgacacggctag

SEQ ID NO: 113726 - DNA, 1575 bp, synthetic construct
  misc_feature 1..1575: note = Description of Artificial Sequence: Synthetic coding sequence
  source 1..1575: mol_type = other DNA
atgccgcaactttcactttcgtggctcgggctcggccctgtagccgccagtccctggttactcctgctcctggttgggggctcatggcttctggcccgggttcttgcgtggacctacacattctatgataattgtcgcagactgcagtgctttccgcagcctcccaaacagaattggttctggggacaccaggggttagtgacacccacagaggaaggcatgaaaacactaactcaacttgtaaccacctacccacaaggattcaagctttggttgggccccacattccctctgttgatactttgtcatcccgacataatccgtcccattacctctgcctcagctgccgtcgcacccaaagacatgattttctacgggtttcttaagccctggctaggcgacggtcttttactctccggcggagataagtggtcaagacacaggcgcatgctcacaccagccttccactttaatattctgaagccctacatgaagatcttcaacaagtccgttaacattatgcacgataagtggcaacggttggcttctgaggggtccgcccgactggacatgttcgagcacatctcccttatgaccctcgacagcctccagaaatgtgtcttctcattcgagtccaactgccaagagaaaccctcagagtacatcgctgcaatcctggagctatcagcatttgtagagaaaagaaatcaacagattctgctacataccgattttctgtactacttgacccccgatggtcagagattcagacgcgcatgtcacctcgtgcatgatttcacagatgccgtaatacaggagcgtcggtgtactctaccgactcagggtattgatgatttcctgaaaaataaagccaagtccaagactctggatttcattgatgtgttgttgctctctaaggatgaagacggaaaggagctgtcagacgaagacattagagcagaggccgacacgttcatgtttgaaggacacgatactaccgcatcaggcttgtcgtgggtgttgtatcacttggccaaacaccccgaataccaagaacagtgcaggcaagaggtccaggaattactcaaggatcgggaaccaatcgagattgagtgggacgacttggcacagctgccctttctaacgatgtgtattaaagaaagccttcggctacacccgcccgtgccggtgatttctagatgctgcacacaggacttcgtgctgcctgacggccgagtgattcccaagggcatcgtctgtcttattaatatcatcggaatacattacaaccccacagtctggcccgatcctgaagtttacgaccctttcaggttcgaccaagagaatatcaaagagagaagcccgctcgcattcatcccattctctgctggtcctaggaattgcattgggcaggcttttgccatggccgaaatgaaagtagtcctggctctgacactcctccactttcggattcttcctacccataccgaacccagaagaaaaccggaactaatccttcgcgcggaagggggcctgtggctcagagtggaaccactgggagcaaattcccagtag

SEQ ID NO: 113727 - DNA, 1575 bp, synthetic construct
  misc_feature 1..1575: note = Description of Artificial Sequence: Synthetic coding sequence
  source 1..1575: mol_type = other DNA
atgagcctcctctccctgccctggttgggattgcggccagtcgctaccagtccgtggctgctcctcctcctggtggtggggtcctggctgctggcacggatcctcgcctggacatacgccttctacaataattgtcgtagacttcaatgtttcccccagccgcctaagaggaattggttttgggggcatctcggcttgattaccccaacagaggaagggctcaagaactccacacagatgtctgccacatacagtcaaggttttactatctggctgggacccattataccgttcatcgtactgtgccaccccgacaccatcagaagcattactaatgcttcagcagctatagcccctaaagacaacttgttcatccggttcttgaaaccctggttgggagagggcatcctgctgtcgggaggagacaagtggagtagacataggcggatgctgaccccagccttccactttaatattctgaagagttatataaccatattcaacaagtcagcgaacatcatgctggacaaatggcagcaccttgcttcagagggcagctcctgcctcgatatgttcgagcacataagcctaatgacgttggactccctgcagaagtgtatcttcagctttgactcgcactgccaggaacggcccagcgaatacatcgccactatcctcgagttatccgctctggtggagaaacgaagccagcatattctgcagcacatggactttctttactacctgagccatgatgggcgtaggtttcaccgtgcctgccggctggtgcatgacttcactgatgcagtcatacgcgaaaggcggcgcaccctgccaacgcaaggaattgacgacttctttaaagataaggccaaatcaaagacccttgattttattgatgttcttctgctctccaaggatgaggatggaaaggcactgtccgatgaggacatccgggctgaggcagacactttcatgtttggcggacatgatactactgcttccggcttgagctgggttttatataacttagctagacacccggaatatcaggagcgctgcaggcaggaggttcaagagttgctgaaagatagggatcccaaagagattgaatgggacgaccttgcccaactcccattcctcaccatgtgcgtaaaggagagcctccggttgcatcctcctgcacctttcataagtaggtgctgcacacaggatatcgtgttgccagacggccgcgtgatcccaaagggaatcacttgtttaattgacattatcggcgttcaccacaatccgacagtgtggcctgacccagaagtgtatgacccatttagatttgatcctgagaattctaaaggtcgttcccctctggcattcatacctttttcggcaggcccccggaactgtattggtcaagccttcgccatggcagaaatgaaggtggtgctagcgctgatgttactccatttccgatttcttcccgaccataccgagccaaggcgcaaactggagctgatcatgagagctgagggcggcctgtggctacgagtcgagccgctaaacgtcagtctccaatag

SEQ ID NO: 113728 - DNA, 1575 bp, synthetic construct
  misc_feature 1..1575: note = Description of Artificial Sequence: Synthetic coding sequence
  source 1..1575: mol_type = other DNA
atgtcccttttatcgctcccctggctgggactgcgacccgtagcgacgagcccttggttactactgctgctggtagtggggtcatggcttttggctaggatcttagcctggacttacgccttttacaacaattgtagaaggctgcaatgtttcccacagccccccaagaggaactggttctggggccatctcggactaattaccccaaccgaagagggtctcaaaaacagcacacagatgtccgctacctattcgcaaggatttactatttggttaggcccaatcattccgttcatcgtgctgtgccacccagacactatacggtccattacgaacgccagtgcggctatcgcgcccaaagataacttattcatcaggttcttgaaaccatggctcggcgaaggaattctactgtctgggggagacaaatggtccagacatcggcgtatgctcaccccggcattccatttcaatatactaaagagctacatcaccatattcaacaagtcagcaaatattatgctggacaagtggcagcatcttgcctcggagggatcttcatgcctggatatgtttgaacatatctcactcatgacactagactctttacagaaatgtatattctcctttgacagtcattgtcaagaacgcccttctgagtacatagcaaccattttggaactgtcggctctcgtcgagaagaggtcgcagcacattttacagcacatggatttcctctattatctgagtcacgatggccgcaggtttcaccgcgcttgccggctggtacatgacttcaccgacgcagtgatacgagaacgccgtcgcacactaccaacccaggggatcgacgacttctttaaagataaggcaaaatctaaaacacttgacttcatcgatgttctgctcctgtctaaggatgaagatggcaaagctttgagtgatgaggacatcagagccgaggccgatactttcatgttcggaggccacgacaccacagcatctggcctgtcctgggtgctgtacaacctggcgaggcatcccgagtaccaggaaagatgtcgccaagaagtgcaagagctgttgaaggatagggacccaaaggagattgaatgggacgacctggcgcagttgccatttttgaccatgtgcgtcaaggaatccctccggcttcacccccctgcaccattcatctcaaggtgctgcacccaagacatagtgcttccggacggccgcgtcatccctaaaggaattacctgcctcattgacattattggcgtgcaccacaatcctacagtttggcctgaccccgaggtgtacgaccctttcaggtttgatcccgagaattccaagggaaggagccccctggcgttcatcccattctccgccggtccccgaaattgtatcggtcaagcttttgcaatggccgagatgaaagtggtgcttgcacttatgctgctgcactttcgatttcttcctgaccacaccgagccacgtcgcaagctggaactcataatgcgggccgaggggggcctctggctgagggtcgagcccttaaacgtgagcctgcagtag

SEQ ID NO: 113729 - DNA, 1596 bp, synthetic construct
  misc_feature 1..1596: note = Description of Artificial Sequence: Synthetic coding sequence
  source 1..1596: mol_type = other DNA
atgttgcccattaccgatcgccttcttcatttactggggttggagaagaccgctttcagaatctatgccgtcagcactctgcttctttttttgctgttctttttgttccgcctgctcctgcgctttctgcggctatgtcgctctttctatatcacgtgtcgaaggttaagatgtttccctcaaccccccagaagaaactggcttctgggccacctgggaatgtacttgccaaacgaggccggtttacaggatgagaagaaagtgctcgataatatgcatcatgttctgttggtctggatgggaccagtgctgcccctgttggtgcttgtccaccccgattatattaagcctctactgggcgcatccgccgcaattgcaccgaaggatgatctgttttatggcttcctaaagccttggttgggggacgggctcctgttgtcaaaaggggacaagtggagcagacatagacgcttgttgacccctgctttccactttgatatactgaagccgtacatgaagatctttaaccaatcggccgatatcatgcacgccaagtggcggcacctggccgagggcagcgccgttagtctggatatgtttgaacacatttcactgatgactctggattctctgcaaaaatgcgttttcagctacaattcgaactgtcaagagaagatgtcagactacatctcagccatcatagagctgagcgcactgagtgttaggcgacaataccgattacaccactatctggacttcatttattacagaagcgcagacgggagaaggtttcgacaagcttgtgatatggttcaccattttacgacagaagttatccaggagcgcaggagggctcttcgccaacagggtgctgaggcctggctgaaggcaaaacaagggaagactcttgattttatagatgtactccttcttgcccgcgatgaagatggaaaagagctctcagacgaggatattagagccgaggcagatacattcatgttcgagggtcacgacactacaagcagcggtataagctggatgctcttcaatctagctaagtatcccgaatatcaggagaaatgccgcgaggagatccaggaggtgatgaagggacgcgaactggaagaactggagtgggatgacctgactcagctccctttcacaacgatgtgtatcaaggaatccctgcggcaataccccccagtgactctggtgtctcggcaatgtaccgaggacatcaaactccccgacggccggatcatccctaaagggattatctgtttggtatctatctatggaacacaccataaccctaccgtttggcccgacagtaaagtgtacaacccgtaccgctttgacccagacaacccgcaacagagatcccctctcgcctacgtccccttttcagcaggccccaggaactgcatcggtcaatcatttgccatggctgaacttcgagtggtagtcgcattgactcttctcagatttcggctttctgtcgataggaccagaaaggtcagaagaaaaccagagcttattttacggaccgaaaatggtctctggttgaaggtggagccgcttccacctagagcctag

SEQ ID NO: 113730 - DNA, 1782 bp, synthetic construct
  misc_feature 1..1782: note = Description of Artificial Sequence: Synthetic coding sequence
  source 1..1782: mol_type = other DNA
atggccccatcaggtctcaaggctgtggtgggcgagaagatcctatctggagtaatccgatctgtcaaaaaagatggtgaatggaaagtgctgattatggatcaccctagcatgcgaattctgtctagttgttgcaagatgtccgacatcctggcagagggaattactatcgtggaagacatcaataagagacgcgagcctatacctagcctcgaagccatttatctcctcagtcccaccgaaaaatctgttcaagccttaatcaaagactttcagggaactcctacgttcacctataaggctgcacacattttcttcacagatacttgtccagaaccactcttttccgaattgggccgaagccgcttagccaaagtggtgaaaactctcaaagaaattcatctggctttcctgccatacgaagctcaggttttcagcctggacgctccgcattctacgtataatctctactgcccattccgcgccgaagagaggactcgccagctggaagtcctcgctcagcaaatagcaactctgtgtgccactttgcaggagtaccccgccattagatatcgaaaggggcccgaggacaccgctcaattggcccatgcagttcttgccaaattgaacgcgtttaaagccgacaccccctctctaggagaggggcccgagaagacaaggtctcagctcctcataatggacagggcagctgacccagtgtctcctctgctgcacgaactgacctttcaggccatggcgtatgaccttctggatattgagcaggacacctaccgttatgagaccaccggccttagcgaagcgcgggagaaggctgtacttctggatgaagatgatgatctctgggtcgaactgaggcatatgcacattgcggatgtcagcaaaaaagtgaccgagctgctgaggaccttttgcgaatccaaacggctgacaactgacaaggccaacataaaagacttgagtcagatactgaaaaagatgccacagtatcagaaggaattaaacaagtactccacacatctgcacttggcagatgattgcatgaagcacttcaagggctccgtcgagaaactgtgtagcgtcgagcaagacctggcgatgggttcggacgctgagggtgagaaaattaaggattccatgaaattgatcgtgcccgtgctgcttgatgctgcggtgcccgcctacgataaaattagagtgcttctgctgtacatcctcctgaggaacggggtgagcgaggagaacctagcaaagctgatccaacacgcaaacgttcaagcccatagtagtctgattagaaacttggagcagttagggggcacagtcactaaccctggcggttcaggcactagctccagactggagccccgcgagaggatggagccaacctaccagttatcccgctggacacctgtaattaaggacgttatggaggatgccgtcgaggaccggttggaccgaaatctgtggccatttgttagcgatcctgcgcccaccgctagttctcaggcagccgttagcgcgcgatttggacactggcacaagaacaaagcaggcattgaagccagggccgggccccggttaatagtgtatgtgatgggcggggtggcgatgtccgagatgcgcgctgcctacgaggttaccagagccaccgagggaaaatgggaggtgctcatcggatctagtcacattttgacacctaccagattcctggacgacctgaaggcccttgacaaaaaactggaagacatcgccctgccctag

SEQ ID NO: 113731 - DNA, 1344 bp, synthetic construct
  misc_feature 1..1344: note = Description of Artificial Sequence: Synthetic coding sequence
  source 1..1344: mol_type = other DNA
atgcgcgtgctcacccaacttgtcgcaacctaccctcagggcttcaaggtctggatgggaccaatcttccccgtgattaggttctgccatcctaatataattaggagtgttataaacgccagtgctgcgatcgtgcccaaggataaggtgttttattcctttctgaaaccttggttaggcgacgggttattgctgtctgcaggtgaaaagtggagccggcacagaagaatgctcaccccagcattccacttcaatattctcaagccttacatgaaaattttcaacgagtcagtgaatatcatgcacgctaaatggcagctgctcgctagtgagggtagtgcccgcctcgacatgttcgagcatatttccctcatgaccctcgatagtctgcagaaatgtgtgttttcattcgattcacactgccaggaaaaaccttccgaatatatagctgccatactggagctgtcggcattggtcaccaaaaggcaccagcaaattcttctgtacatcgatttcctgtactatctcaccccagacggccagcgtttccgcagggcgtgcagactagtgcacgattttacagacgccgttattcaggagcggcggcgcacattacccagtcaaggagtggatgactttcttcaagcaaaggctaaatccaaaacgctagactttatcgacgtgctgctactgtcaaaggacgaggatggaaagaaactgtcggatgaggacatccgcgccgaagccgatacttttatgttcgaggggcacgacacaactgcttcaggtctgtcgtgggtgctctatcacctggccaagcatcctgaataccaagaacgttgccgtcaggaggtgcaagagctgcttaaggatagagagcccaaggagattgaatgggacgatcttgctcagctgcctttcctcacgatgtgcatcaaagagagccttcggctgcacccgccggtgcctgctgtgagtagatgttgtacacaggacatcgttctgcctgacggcagggttattccaaaaggaatcatctgcctgatcagcgtcttcggaacccaccacaaccccgccgtctggcccgatccagaggtctacgatccattccgttttgacccgaaaaacatcaaggagcgtagtccactggcgttcatacccttctctgcggggccgcggaattgcatcgggcaggctttcgctatggccgagatgaaagtcgttctgggcctgacactgctccggttccgcgtgcttcctgaccacaccgagccaaggagaaagccggaactggtattgagggcagaaggtggcctgtggctcagggtagaaccactatcttag

SEQ ID NO: 113732 - DNA, 999 bp, synthetic construct
  misc_feature 1..999: note = Description of Artificial Sequence: Synthetic coding sequence
  source 1..999: mol_type = other DNA
atgccgtctatcaccacggccgccgccagcggtgtcagccgcagcccgggaaaccgcaccggaagctgggtgacgtgggcctggaaacctagcgagtatatcaccgccatcatggagctctccgctctggtcgtcaaacggaacaaccagtttttccggtacaaggactttttgtatttcctcaccccctgtggtaggcgattccacagggcctgccgactggttcacgatttcacagacgccgttattcaggaacgcagaagaaccctcacgtcacagggagttgacgacttcctgcaagctaaagctaaatccaagacactggattttattgacgtgctgctgttgtctgaggacaaaaacgggaaagaattgtctgacgaggacattcgcgcagaagcggacacattcatgttcggagggcacgacactaccgccagtggtttgtcctgggtgctgtacaacttagctagacatcccgagtatcaggaacgctgccggcaagaagtccaagagttgttaaaagatcgggaaccaaaggaaattgaatgggacgatttagcccagcttccttttcttaccatgtgcctgaaggaatctttgcggctgcatccaccaatacccacatttgctcggggatgcactcaggacgttgtgctgcccgactctagagtgatacctaaaggaaatgtatgcaatatcaatatttttgcaattcaccacaatcccagcgtctggcccgatcccgaagtctatgatcctttcagatttgatcccgaaaacgcccagaaaagaagtccgatggcttttatccccttttctgccggcccccgtaactgcattggacagaaatttgctatggccgagatgaaagtagttcttgccctgactctcctgcgcttcagaattctgcccgatcatcgggaacctagacggacgccagagattgttctgagagccgaggatggcctctggttgcgagttgagcctctggggtag

SEQ ID NO: 113733 - DNA, 1560 bp, synthetic construct
  misc_feature 1..1560: note = Description of Artificial Sequence: Synthetic coding sequence
  source 1..1560: mol_type = other DNA
atgagcctgctgtccctatcctggctgggcttgcgcccagtggccgcctccccttggcttctcttgctcgttgtcggggctagctggttgctagccagaattctcgcctggacctatgcattttaccacaatggtcggaggcttagatgctttcctcaacccaggaaacagaattggttcctcggacatctggggttggtaactcccacagaagaaggcttacgcgttctgactcagctggttgcaacttacccccagggtttcgtcaggtggctaggccctattaccccaattatcaacttgtgccatccagatatagtgagatcagtgatcaacactagtgacgccatcaccgacaaggacatagtcttttacaaaaccctgaaaccatggcttggggacggtttgctgcttagcgtgggcgataaatggaggcatcacagacggctgacgcctgccttccactttaacatccttaagccttatattaagatcttttccaagtccgcaaatatcatgcacgccaagtggcagaggcttgcgatggagggatcgacctgccttgacgttttcgaacatatctccctaatgactctggatagcttgcagaagtgtattttcagtttcgatagcaactgtcaggaaaagccctccgagtacatcacagctatcatggagctgagcgcgctggtagtgaagcgcaacaaccaattcttcagatacaaagattttctttactttctgacgccctgcggaaggcgcttccatagggcgtgccggctggtacacgactttaccgacgctgtcattcaagagcggaggcggactttgaccagccaaggcgtggatgatttcttacaggcaaaagccaagagcaagactctcgactttattgacgtgcttctgctgtccgaggacaaaaacggtaaggagcttagcgatgaggacatcagggcggaagctgatacatttatgttcggaggacatgatacgacagctagcggactgagctgggtcttgtataaccttgccagacatcccgaatatcaagaacggtgtcgtcaggaagttcaggaactgctgaaggaccgcgaacccaaggagatcgaatgggatgacctggcgcaactgcccttcctcacaatgtgcctcaaagaatctctcagactccacccacccataccaacctttgctcgcggatgtactcaggacgttgtcttgcctgattcccgggtgattccaaaggggaacgtctgtaacatcaacattttcgcgatccaccacaaccccagcgtctggcctgacccggaagtctatgacccttttcggttcgaccccgagaacgcccagaaacggtcgcctatggcttttatacctttttcagcaggcccccgcaattgtatcggacagaagttcgccatggctgaaatgaaagtcgtcctagcccttaccctgctgcgcttccgtatattgcccgaccaccgcgaaccaaggcggactccggagatagttctccgagctgaggatggactttggctccgggtagagccactggggtag

SEQ ID NO: 113734 - DNA, 804 bp, synthetic construct
  misc_feature 1..804: note = Description of Artificial Sequence: Synthetic coding sequence
  source 1..804: mol_type = other DNA
acaccggcatttcactttaacatcttgaagccctatattaagatcttctcaaagtcagcaaatattatgcatgccaaatggcagagactcgctatggaagggtcaacctgcctggatgtgtttgagcatatcagcctaatgaccttagactctctgcagaaatgtatattcagctttgactctaactgtcaagaaaaaccctctgagtacattactgctataatggagctttccgcattggtcgttaaacggaataaccagttcttccggtataaagacttcctgtacttcttaactccatgcggtcgaagattccaccgcgcctgccggcttgttcatgattttaccgatgctgtcattcaagagcgcaggcgcaccttaacgtcccagggcgtggatgatttcctgcaggccaaggccaaatcaaaaactcttgactttatcgatgtgctcctgctcagcgaagataagaatggcaaagaattgtctgacgaggatattagagctgaggctgacacgtttatgttcgggggtcacgacaccaccgcatccgggctctcttgggttttgtacaaccttgcccggcatccagagtatcaggagcggtgcaggcaggaagtccaggaactgctcaaagatcgcgagccgaaggaaatcgaatgggacgatctggcacagctgccttttcttacaatgtgcctaaaagagtccctccggcttcaccctcccatccctacctttgcgagaggatgcacacaggacgtggtcctgcctgactcccgggtaattcctaagggcctctag

SEQ ID NO: 113735 - DNA, 1512 bp, synthetic construct
  misc_feature 1..1512: note = Description of Artificial Sequence: Synthetic coding sequence
  source 1..1512: mol_type = other DNA
atggctgggctgtggctgggactggtgtggcagaaactgctgctttggggggctgccagtgcactgtccttggcgggggcttccctggtgctgtcacttctgcagagggtggcctcttacgcactgctgatgaaacccgatggacgagagttttttcagcagatcattgaatataccgaggagtatcggcacatgcccctgctgaagctctgggtgggtcccgtgcctatggtggccctgtataacgctgaaaacgttgaggttatccttacttcttctaagcagatcgataaaagtagtatgtataagttcctggaaccctggctgggcctggggctgctgacttctaccggcaacaaatggcgatcaaggcgcaaaatgttgacacctactttccatttcacaatcctcgaggacttccttgatatcatgaacgagcaggctaatattctcgttaaaaagctagaaaagcatataaaccaagaagcattcaattgttttttctatattaccctgtgtgctttggacatcatctgcgaaacagctatggggaaaaacattggcgctcagtcaaatgacgactcagagtacgtgcgggcagtttacaggatgtccgagatgatatttaggaggataaagatgccttggctctggctagacctgtggtatctgatgtttaaagagggctgggagcataagaaaagcttacaaatcctgcacacctttacaaactcagtcatagcagaaagagctaacgagatgaacgccaatgaggattgccgtggagacggccgcggtagcgcgccttccaagaataagcgacgagcattcctggacttactactaagcgtcactgacgatgagggcaacagattaagccacgaggacatcagagaagaggtcgatactttcatgttcgagggccatgatacgaccgcggccgccataaattggtctttgtacctcctgggttccaatccagaggtgcaaaaaaaagttgaccacgaactggatgacgtattcgggaagagtgatcgtcccgctacagtagaagacctcaaaaagctgcgctatctcgagtgtgttataaaagaaaccctgaggctgtttccctccgttcctctgtttgctcgctcagtgtcggaagattgcgaggtagccgggtacagagtcttgaaggggaccgaggcggtaatcattccatacgcactgcacagagacccaagatattttcctaatccagaagaattccagccagaacgttttttccccgagaatgcccaaggaagacacccctacgcatacgtgccgttttccgccggccccagaaactgtatagggcagaagtttgccgtcatggaggagaaaaccatactgtcctgcattcttcgccatttttggatagaaagtaatcagaagcgcgaggagttgggtctggaaggtcagttaatcctccgcccgtctaatggcatctggattaagctgaagcgacgcaacgctgacgagagatag

SEQ ID NO: 113736 - DNA, 1578 bp, synthetic construct
  misc_feature 1..1578: note = Description of Artificial Sequence: Synthetic coding sequence
  source 1..1578: mol_type = other DNA
atggcagggttgtggctgggcctcgtttggcaaaagctcctcctgtggggggcagccagtgccctcagcttggctggtgcctctctagttctgagcctcctgcagcgcgtggccagttatgctagaaaatggcagcagatgcgaccgatccccactgttgcccgcgcttaccctttagtgggccatgcactgctgatgaaacctgacgggcgtgaattcttccaacagatcatcgaatacactgaagagtatcgccacatgcccctgctgaagctgtgggttggcccggtgcctatggtggccctgtataatgccgagaacgtcgaggtgatactgacctcatctaagcaaatcgataagagcagcatgtacaagttcctggagccttggctgggacttggtcttttaacctctaccggcaataagtggaggtctcgacggaaaatgttgactccaacctttcacttcactattctggaagatttcctcgacattatgaacgaacaggctaatatactcgtaaagaaactggagaaacacattaaccaagaagcatttaactgtttcttctacataacgctgtgtgcattggatattatttgtgagacggccatggggaaaaacatcggcgcccagtctaatgacgacagcgagtacgtgcgggcagtgtatcggatgtctgaaatgatcttccggaggattaaaatgccgtggctgtggctcgacctctggtacctgatgttcaaagaggggtgggagcacaaaaaatccctgcaaatcctgcacaccttcaccaattcagtaatcgccgagcgcgctaacgaaatgaacgccaatgaagactgtagaggcgatggacgcggcagtgccccaagcaaaaacaagaggagagccttcttggacctccttcttagcgttacagatgacgaagggaataggctttcccacgaagatataagagaagaagttgatacttttatgttcgaagggcacgacaccactgctgccgctattaactggtctctttacctccttggctctaaccccgaagtacagaaaaaggttgatcacgagctggacgacgtgtttgggaagtctgaccggccagctaccgtggaagatttgaagaagctacggtacctggagtgcgtgatcaaagagacgctgcgcttgtttcccagcgtaccactcttcgccagatcagtaagcgaagactgtgaggtggcgggctacagggtgctcaagggaacagaggctgtgattatcccatacgctcttcacagagaccctcgctatttcccgaacccagaggagtttcagccagagcgatttttccccgaaaacgctcagggccgccatccctacgcctacgtaccattcagcgccggtccacgaaactgcatcggccaaaaattcgcagtgatggaggagaagacgattctgagctgtattctccggcacttttggatcgagagcaaccagaaacgggaggaactcgggctcgaggggcagttaattctgcgccccagtaatggaatttggatcaaattgaaacgcaggaatgccgatgaacggtag

SEQ ID NO: 113737 - DNA, 1503 bp, synthetic construct
  misc_feature 1..1503: note = Description of Artificial Sequence: Synthetic coding sequence
  source 1..1503: mol_type = other DNA
atgtctcctggactgttactgttggggtctgcagtgcttctggctttcgggctctgttgcacttttgtgcacagagcccgaagtcggtacgaacacatccctggcccacccaggccatcgttcctccttggtcacctgccatgcttttggaagaaagacgaggtcggggggcgagtcctccaggacgtctttttggactgggcaaagaagtacgggccagtggttagggtcaacgtttttcacaaaacatctgttatagtgaccagccccgagagtgtaaagaagtttttgatgtccacgaagtacaacaaagattccaagatgtaccgggctttgcagactgtgttcggggagcgcctgtttggacaaggcctagtgagcgagtgcaattatgaaaggtggcacaaacagcgccgcgttatcgacctggctttcagcagaagtagcctggtgtcgctcatggaaaccttcaacgaaaaggcagagcagctggtggaaatcctggaggctaaagccgatggacagacccccgtatccatgcaggacatgctgacgtatacagccatggacatcttagccaaagctgctttcggaatggaaacttcgatgttgctaggcgctcagaagcccctgtcccaagccgttaagctcatgctagagggcattactgccagccggaatacactggcgaagttcttaccagggaagagaaaacagctgcgggaggtcagggagtcaatccgttttctgcgacaggtcggacgcgattgggtgcagaggcgccgcgaggctctgaagagaggcgaagaagtccccgcggacatcttaacccaaatccttaaggccgaagaaggcgctcaggacgacgagggattgttggacaattttgtgacctttttcatcgccggtcacgaaacaagcgccaaccaccttgcgtttaccgtcatggagctgtcacgacagcctgaaatcgtcgctaggctccaggctgaagtggatgaggtgatcggatccaagagatacttggattttgaagacctgggccggctccagtacttgtctcaagtactgaaggaatctctgcgactgtatcctcctgcctggggcacattcagactgctggaggaagagactctcattgacggcgttagagttcctgggaacacccctttgctcttctccacttacgtcatgggacgcatggatacatattttgaagatcccctgacattcaatcccgacaggttcggacccggcgcccctaaaccacgcttcacctactttccattctcattaggtcatcgctcttgcattggccagcagtttgctcagatggaagtgaaagtggttatggcaaaactgctgcagcggctggaatttaggctcgtcccgggtcagaggttcgggctgcaggagcaagctaccctgaagccacttgaccccgtcttgtgcacactgcggccgcgaggatggcagcctgctccccctcctccgccatgttag

SEQ ID NO: 113738 - DNA, 1212 bp, synthetic construct
  misc_feature 1..1212: note = Description of Artificial Sequence: Synthetic coding sequence
  source 1..1212: mol_type = other DNA
atgagtaccaagtacaataaggattccaagatgtacagagccctccagaccgtcttcggggaaaggctgttcgggcaaggcctggtcagcgaatgtaactatgagagatggcacaagcaacgacgggtcattgatctggcattctccagaagctccctcgtgagtctgatggaaactttcaacgagaaggccgaacagctggtcgagatcctggaggcgaaggcggacggacaaacccctgtgagcatgcaagacatgctcacatatactgccatggacatcctcgctaaagcagcattcggtatggagaccagcatgcttttgggcgctcagaagcccctgtctcaggcggtgaagctaatgctcgaaggaatcacagcatcccgcaacacgctagccaaattcttgccaggtaaacgaaaacagttgagggaggtgcgggagtccattcggttcctgcggcaggtcggtcgcgactgggttcagcgtagacgcgaagcgctgaaacgcggagaggaggttcccgcagatatcctaacgcagatcctaaaggcggaagagggcgcgcaggacgatgaaggcctcttggacaattttgtgaccttctttattgctggccacgaaacttccgcgaatcacttagcctttaccgtaatggaactcagccgtcagcctgagattgtggcaaggctgcaagctgaggtggacgaagtaatcggtagcaagcggtacctcgactttgaagacctaggccgtctgcagtatttgtcccaggtattgaaggaatcactgcggctgtacccgccagcatgggggacatttcgcttgctcgaggaggaaactctgattgatggcgtgagagtgcctgggaacacaccgttgctgttctctacgtatgtaatgggtcggatggatacgtacttcgaagatccattgactttcaatccagacagatttgggccgggggctcctaagccccgcttcacctactttccgttcagtctgggccaccggtcatgtattggacagcagttcgcccagatggaggttaaagtggtcatggcaaagctgctacagagacttgaattcaggctggttcccggtcagcgattcgggctacaagagcaggcaactctgaaaccccttgaccctgttctctgcaccctgcggccaaggggttggcaacccgcaccaccccctccgccctgttag

SEQ ID NO: 113739 - DNA, 1530 bp, synthetic construct
  misc_feature 1..1530: note = Description of Artificial Sequence: Synthetic coding sequence
  source 1..1530: mol_type = other DNA
atggccgctgccgcaggaatgttacttctgggattgttgcaggcaggaggctctgtgttgggtcaggcaatggaaaaggttacaggtgggaacctgctgtccatgttactgatcgcctgcgccttcactctctccctggtttacttaatccgccttgcggctggtcacctggtacagctgccagcaggagtcaaaagccccccttacatcttctcacccatacccttcctggggcacgcgatcgcttttgggaagtctccaatcgaattcctggagaatgcctatgaaaaatacggacctgttttctctttcaccatggtaggcaaaaccttcacgtatttgctgggcagcgatgcggccgccttgctttttaatagcaagaatgaagatctgaacgccgaagacgtatacagtcggctgaccaccccagtcttcggtaagggagtggcttatgatgtgcccaatcccgttttcttagaacagaaaaagatgttgaaatcgggtttgaatatagcacactttaaacagcacgtctctatcatcgaaaaagagaccaaggaatatttcgaatcatggggggagagcggagagaagaacgttttcgaggcactttctgaactaatcatactgactgccagccattgtctgcatggcaaagaaatcaggtcccagctgaacgaaaaggtagctcaactctatgcagacttggatgggggcttctcccacgctgcttggctgctgcctgggtggctgccactgccctctttccgccgaagagacagggcccatagagagattaaagacatcttttacaaagcgatccaaaaaaggcgtcaatctcaggaaaagatagatgacatactgcagaccttgctggacgccacatacaaggatggccgcccccttactgacgacgaagtcgccggtatgctgattggactcctccttgccggacagcacacttccagtactaccagcgcctggatgggcttctttctggccagagacaagacactccagaagaagtgttacctcgaacaaaaaacagtgtgcggcgagaatcttcctcccctgacgtacgaccagctcaaagacctgaatcttctggaccggtgcatcaaggaaaccctacgcctccggccacccattatgatcatgatgcggatggccagaactcctcagaccgtggcgggatacaccatcccccccggacatcaggtatgcgtaagtcctaccgtgaatcagaggctgaaggacagctgggtcgagagactcgatttcaatccagatagatatttgcaggataatcctgctagtggcgagaaatttgcttacgtcccctttggagccggaaggcaccggtgtatcggagaaaattttgcctacgtccagataaaaacgatttggagtacaatgctcagactgtacgagttcgatttgatcgatgggtatttccctacggtgaattataccacaatgatccacactccagaaaaccctgttattcgttataagagacggtccaaatag

SEQ ID NO: 113740 - DNA, 1215 bp, synthetic construct
  misc_feature 1..1215: note = Description of Artificial Sequence: Synthetic coding sequence
  source 1..1215: mol_type = other DNA
atggtaggcaagacatttacgtatctgctcgggtcggacgcagccgctctgctcttcaatagtaagaacgaggatcttaatgccgaggacgtttactcacgtctcaccacccctgtctttggcaagggcgttgcatacgacgtccctaatcccgtgttcttagaacagaagaagatgctgaaaagtggcctcaatatagcacacttcaagcaacatgtgtccatcatcgaaaaagaaacaaaggaatatttcgaatcttggggtgagtcaggagaaaagaacgtgttcgaggccctaagcgaactgatcattctcacagcctcacattgccttcacggaaaagagattaggagccagctcaatgagaaggttgcgcaactttatgctgacctagatggaggattttctcacgccgcttggctgttacccggatggctgccgctgccaagtttcagacgtagagaccgcgcccaccgagagatcaaggacatcttttacaaagctatccagaagcgaagacagtcccaggaaaaaatagacgatatactgcagacccttctggatgctacttataaggacggacgcccactgacagacgatgaggtagctggtatgctgatcggcctgctgctggctgggcagcatacttcctctacaacctctgcctggatgggattttttctggcgagggataagaccctgcagaagaaatgctacttggaacagaagaccgtgtgtggcgagaatctcccccccctgacctacgaccagttaaaggaccttaatttgctggacaggtgcatcaaagaaacgctacgcctccgacccccaatcatgataatgatgcgcatggcgcgcaccccccagaccgtcgccgggtacactatccccccgggtcatcaggtgtgcgtttctccgactgtgaatcagaggctgaaggacagctgggtcgagaggttggacttcaacccagacaggtatttacaggacaatccagccagtggcgaaaagttcgcatatgtgccgttcggggccggaaggcaccggtgcatcggcgaaaactttgcgtatgtccaaattaaaaccatttggagcactatgctccggctatacgagtttgaccttatcgacggctactttccaactgtgaactacactacgatgattcacacgcctgagaacccagtaattcggtataaacggcgtagtaagtag

SEQ ID NO: 113741 - DNA, 1350 bp, synthetic construct
  misc_feature 1..1350: note = Description of Artificial Sequence: Synthetic coding sequence
  source 1..1350: mol_type = other DNA
atgaaacatgaaaaatctccaccttacattttctcccccatccctttcctggggcacgcgatagccttcggaaagtcacctatcgagtttcttgagaacgcatacgagaagtacggaccagtgttcagttttacgatggttggcaagactttcacctatctattaggaagtgacgccgccgcattactgttcaactccaagaacgaagacctgaatgcggaagatgtgtattcccggctgaccacgcccgtcttcggcaagggtgtcgcttacgatgtgcctaaccccgtcttcctggaacagaagaaaatgcttaaatccggtcttaatattgcccactttaaacagcacgtctctataatcgaaaaagagaccaaagaatattttgagtcttggggggagagcggggaaaagaacgtctttgaggccctatccgagctgatcattctgaccgcctcacactgcttacatgggaaagaaatccggtcacagctgaatgagaaggtggcccagctatatgccgaccttgacgggggattttctcatgctgcttggctcctgcctgggtggctgcccttacccagctttaggcgcagagacagggctcacagggagatcaaagatatcttttacaaggccatccagaagaggcgacagtctcaggaaaagatcgatgatatcttgcagaccttacttgatgccacatacaaggacggccggccgctcacggatgacgaagtggcgggtatgctgatcggactcctgctcgccgggcaacatacctcgtcaacaacatccgcctggatggggttcttccttgcgcgggacaagaccctgcagaagaagtgctacctggagcagaaaacagtttgcggcgagaacctgcccccccttacttacgaccaactcaaagatctcaatcttctcgaccggtgtatcaaggaaactctgcgcctgagacctcctattatgattatgatgcgaatggcgagaacacctcagacagtggcgggctataccatcccgcctggtcatcaggtatgcgtgagcccgacagtgaaccaacgactaaaggactcttgggtggaacgcctggactttaaccccgaccggtatctacaggacaatccggccagtggcgaaaaattcgcctacgtcccctttggcgccggacggcataggtgcattggcgaaaatttcgcctatgttcagataaagacaatttggtcaactatgctgagactatatgagttcgacttaattgacgggtatttccctaccgtcaattacactaccatgatccatactcctgaaaatcctgtgattaggtataagaggaggagcaagtag

SEQ ID NO: 113742 - DNA, 1515 bp, synthetic construct
  misc_feature 1..1515: note = Description of Artificial Sequence: Synthetic coding sequence
  source 1..1515: mol_type = other DNA
atgatgactacatcattaatctggggcattgctatcgcggcatgttgctgcctttggcttatactcgggatacgcaggaggcagacaggtgagccacctctggaaaacggactgattccttacctcggatgcgcactccaatttggggccaacccgctggagttcctgagggctaaccaaaggaagcacggccacgtatttacttgtaaattgatggggaaatacgtgcattttataaccaacccactttcttaccacaaggtactttgtcacggcaagtactttgactggaagaaattccacttcgcaacttcagcaaaggcattcgggcaccgatccatagatccaatggacggcaacacaacagagaatataaacgatacctttatcaaaacgctccagggacacgcattgaatagcctcactgagtctatgatggaaaacctgcagaggatcatgcggccgcccgtatccagtaatagtaagacagccgcatgggtcacggaaggcatgtacagcttttgttacagggtgatgtttgaggcaggctatttgacaatcttcggaagggacttgacacgtagggacacgcagaaagcccacattctcaacaacctcgacaactttaaacagtttgacaaagtcttccccgcactcgtggccggactgcctattcacatgttcagaaccgcacataatgcgcgcgaaaaacttgcagaatctttaaggcacgagaaccttcagaaaagggagtccatctctgaactgatttctctgcggatgtttcttaacgatactctaagcactttcgatgaccttgagaaagcgaaaacacacctagtggtcctctgggcctcccaggccaatacaattccggcaaccttctggagcctgtttcaaatgatacggaatcctgaggcaatgaaggctgccactgaagaagtaaagcggacactggaaaacgccggtcagaaggtgtctctcgaaggaaatcccatctgcctgagtcaggcagagctcaacgatctccctgtcctcgattccatcatcaaggaatctctacgactcagctccgcatcactgaacatcaggacagccaaggaagatttcactctgcacttagaggacggttcatataacatacgtaaggatgacatcatcgccctgtacccccaacttatgcacttagatcctgaaatctatccggacccactgacctttaagtacgaccggtatcttgacgagaacgggaaaaccaagactactttttactgcaatggattgaaactcaaatactactacatgccatttggctctggggccacgatttgtcccggccggctcttcgcgattcatgaaattaagcagttcttgattctgatgctcagttatttcgagctggagctgatcgaagggcaggcgaagtgccccccattggaccagagccgtgcaggcctgggcattctacctcccctcaacgacatagaatttaaatacaagttcaaacacttgtag

SEQ ID NO: 113743 - DNA, 1521 bp, synthetic construct
  misc_feature 1..1521: note = Description of Artificial Sequence: Synthetic coding sequence
  source 1..1521: mol_type = other DNA
atggcaggcgaagtgagtgcggctactggtagattctccctcgagcgcctgggcctgcctggcctcgctctggctgcggcattattgctattggctctttgtctcctggtccgccggactagacgaccaggcgagcctcctcttataaagggctggctgccatacctgggcgtggttctcaatctgcgaaaagatccgttaaggtttatgaagacattacagaaacagcacggcgatacattcactgtgcttttagggggcaaatacatcacctttattttggacccattccagtaccagctcgtaattaagaaccataagcagctctccttcagagttttcagtaacaagttacttgaaaaagcattttctatctcacagttacaaaaaaatcacgacatgaatgatgaactgcatttgtgttaccagttcctgcagggcaagtccctggacatcctgcttgagtccatgatgcagaatctgaaacaggtcttcgagccccagttactcaaaactacttcttgggatactgcagagttgtatcccttttgcagctccatcattttcgaaatcacattcaccacaatctacggaaaggtgattgtctgtgacaacaataagtttatttcagaactccgggacgatttcctgaagtttgacgataagttcgcctacctagtgagcaacattcccatagaactgcttggcaatgtcaaaagtataagggagaagattatcaaatgcttttccagcgaaaagctggctaagatgcagggatggagcgaggtctttcagagtcgccaggatgtccttgagaagtattatgtgcacgaggatctggaaatcggggcccatcacctgggcttcttatgggcgtcagtcgccaataccatcccaaccatgttttgggctatgtattatctgttgcggcaccccgaggcaatggccgccgtgcgggatgaaatcgataggctgctacaatcaaccgggcaaaagaaggggtctgggtttcctatccatctgacacgggaacaattggatagtctgatctgtcttgaaagcagcatcttcgaggcgctgcgcttgtctagctatagtacaactattaggtttgtcgaagaggacttgacacttagctcagagactggtgattactgtgtccggaaaggggacttggttgcgatcttccctcccgtattacacggcgatcctgagattttcgaggcaccggaagagtttcgctacgataggtttatagaggatggaaagaaaaagaccacattttttaagcgcgggaaaaaacttaagtgttatttaatgccgttcgggacaggcacttcgaaatgtccaggtcggttcttcgcacttatggagatcaaacaattgcttgtgatcttgctgacttacttcgacctcgagatcatcgacgataagcctattggactgaattatagtcggttgctgttcggcatccagtaccccgactctgatgtgctctttcggtataaggtgaagtcctag

SEQ ID NO: 113744 - DNA, 1506 bp, synthetic construct
  misc_feature 1..1506: note = Description of Artificial Sequence: Synthetic coding sequence
  source 1..1506: mol_type = other DNA
atggtcctctggggcccggtgctcggcgcgttattagtggtgattgcagggtatctctgcctgccgggcatgctgcgccagagaagaccttgggaaccgcccctcgataaggggacagtcccatggctggggcatgctatggcattcagaaaaaacatgtttgaatttctaaagcgtatgcgtaccaagcacggtgacgtcttcaccgtgcagctggggggtcagtattttacttttgtgatggaccccctctctttcgggtcaattttaaaagacacccagcggaagttagactttgggcagtacgccaagaagctcgttctcaaggtctttggatataggtccgttcagggggaccatgaaatgattcactctgccagcaccaagcacttgagaggcgatggcctcaaagatctcaacgaaacaatgctggattcactaagcttcgttatgctaactagtaaggggtggagccttgatgccagctgttggcatgaggattccctcttccgattctgttattatatactgtttaccgcaggttatttgagcctctttgggtacactaaggataaggaacaagatctgttacaggcgggagagttgttcatggagtttcgtaagttcgatctgctatttccaaggttcgtttactccttactgtggcccagggaatggctcgaagttggaagactgcagcgtctatttcataagatgctgagtgtgagccactctcaggagaaagagggtatctccaattggctcggtaacatgctgcagttcttgcgggaacagggagtgccatctgcaatgcaagacaaattcaacttcatgatgttgtgggcctctcagggaaacactggtccaacctcattctgggcacttctctacttgctgaagcaccctgaagccataagagccgtgcgcgaggaggcgacccaggtgctcggcgaggccagacttgagactaaacagtcattcgctttcaagctgggcgccctgcagcatactcccgttctcgacagtgttgtcgaggaaacactgaggttgagagccgcacccacattgctgagactcgtacatgaagactatactctgaaaatgagcagcggacaagagtatctgttccgccacggtgacatcttggcactcttcccgtacctgtctgttcacatggaccccgatatccaccccgaacccactgtatttaagtatgaccgtttccttaatccaaacggcagccgcaaggtggatttctttaagaccggcaagaaaatccatcattataccatgccatggggctctggagtgtccatctgccccggtcgtttcttcgcactgtccgaggtgaaactctttattctcctcatggtgacgcactttgatctggaactggtggaccccgacactcctctgccccacgtggatccccagagatggggctttggcaccatgcagccatcacacgacgtcaggtttcgatatcgacttcatccaaccgaatag

SEQ ID NO: 113745 - DNA, 573 bp, synthetic construct
  misc_feature 1..573: note = Description of Artificial Sequence: Synthetic coding sequence
  source 1..573: mol_type = other DNA
atggaaaaggtcccaggagagatggagatcgagcggagggaaaggtccgaagagctgtctgaagccgagagaaaggctgtgcaggcgatgtgggccaggctttatgctaattgtgaagatgtgggtgttgccattctggtgaggttcttcgttaattttcctagtgctaaacagtatttttctcaattcaagcatatggaggatccactggagatggagcggagcccccaactgcggaagcacgcttgcagagtcatgggagcacttaacacagtggttgagaatctgcatgacccagacaaggtcagtagcgtcctggccctcgtcggaaaggctcacgccttgaaacataaggttgagcccgtttactttaagattctcagtggggtcatattagaggtcgttgcagaggagttcgctagcgactttccgccggagacccagagagcgtgggccaagcttcggggactgatttattctcacgtgacggctgcctacaaggaggtgggctgggtgcaacaggtccctaatgctacaactccgccggcaaccttgcccagttctggcccctag

SEQ ID NO: 113746 - DNA, 1194 bp, synthetic construct
  misc_feature 1..1194: note = Description of Artificial Sequence: Synthetic coding sequence
  source 1..1194: mol_type = other DNA
atggaagaagatgacagttacgtccctagtgacctgaccgccgaggagaggcaggagcttgaaaacatccggcgacggaaacaagagctgcttgctgacatccagaggcttaaggatgaaattgctgaggtcgctaatgagatcgagaacctggggagtacagaagagcgtaagaacatgcaacgaaacaagcaggtcgctatgggtagaaagaaatttaatatggaccccaaaaaagggattcagttcctgattgagaatgatctgctgaagaatacatgtgaggatatagcgcagttcctgtacaaaggggaaggactgaataaaacagccatcggtgactacctgggagagcgcgacgagtttaacatccaggttctacatgctttcgtcgagcttcacgagttcactgacttgaacctggtgcaagccctccgccagttcttatggtccttccgccttccaggagaggctcaaaaaatagacagaatgatggaggcgttcgcgcagcgctactgtcagtgtaacaacggggtcttccagtccactgatacctgttacgttctgtctttcgccatcatcatgcttaatacttcgctccacaatcccaacgtaaaagataagcctaccgtggaacggtttattgcgatgaacaggggaattaacgacggcggagacctgcccgaagaattgttgaggaatctctacgagtcaatcaagaatgaaccgtttaaaatcccggaagatgacggcaacgaccttactcatacgttctttaatcccgatagagaggggtggctccttaaattgggaggacgagtcaaaacctggaaaagacgctggttcatcttgacggataattgtttatattatttcgaatacacaaccgacaaggagccccggggcattatcccactggaaaatctcagtatacgcgaggtcgaagattccaaaaagccaaattgttttgaactgtacattccagataataaagatcaggtcattaaggcttgtaaaaccgaggccgacggccgggtcgtggaggggaatcatactgtgtaccgaatcagcgctccgacgccagaagagaaggaagaatggataaagtgtattaaggccgctatctccagagatcctttttatgagatgctggcggcaagaaagaaaaaagttagcagcactaaacgtcattag

SEQ ID NO: 113747 - DNA, 1197 bp, synthetic construct
  misc_feature 1..1197: note = Description of Artificial Sequence: Synthetic coding sequence
  source 1..1197: mol_type = other DNA
atggaggaagatgacagctacgtgccctccgatctgactgcggaagagcgacaagaattggaaaacatccgacgccgaaagcaggagctgctggctgacattcagcgccttaaggatgagatcgcggaggtcgcaaatgagatagaaaatctggggtcaacagaggaaaggaagaatatgcaacgaaacaagcaggtcgccatgggcagaaaaaaattcaatatggatccaaagaaaggcatccagttcctgattgagaacgatttgctgaagaacacttgcgaggacatcgcccagttcctgtacaagggggagggtctcaacaagacagcaattggggactatttaggggagagggacgagtttaacattcaggtgctccacgcatttgtggaactacacgagtttacagaccttaacctggtgcaggctctgcggcaattcctgtggtctttccggttgcctggtgaagcacagaaaattgaccgtatgatggaggcctttgcacagcgatactgccagtgtaataatggagtcttccagtctaccgacacttgctacgttctcagcttcgctatcattatgttgaatacatctctgcacaatccaaatgtaaaggacaagccaaccgtggagagattcatagcgatgaacaggggtatcaacgacggcggagacctccccgaggagctgttgcggaacctgtatgagtcaatcaaaaacgagccatttaagattcctgaagatgatggcaacgacctaactcacaccttctttaatcccgacagggaagggtggctactcaaactcgggggcggcagagtcaaaacctggaagagaagatggtttatcttaaccgataactgcctgtattactttgagtatacgacagacaaggaacctcgaggcatcatccctctggagaatttatccattcgggaagtcgaagattcaaaaaagcccaactgctttgagctctacatcccagataataaagatcaggtgataaaggcctgtaagaccgaggctgacggtcgggtagtcgaaggtaaccataccgtgtaccgaatcagcgctcccactcctgaggaaaaggaggaatggataaagtgcatcaaggccgccattagtcgggaccccttttatgagatgctggcggctagaaagaagaaggtttccagcacaaagcgccattag

SEQ ID NO: 113748 - DNA, 657 bp, synthetic construct
  misc_feature 1..657: note = Description of Artificial Sequence: Synthetic coding sequence
  source 1..657: mol_type = other DNA
atgatggaagcctttgcacagaggtactgtcagtgtaacaacggcgttttccagagcactgacacatgctacgtgctgagtttcgctatcataatgctcaacacctcattgcacaatcctaacgtaaaggataagcctactgtcgagagattcatcgcgatgaaccgcggcattaatgatggcggcgacttgcctgaggagctcttacggaacctgtacgagtcaatcaaaaacgagccttttaagatccccgaggacgacggcaatgaccttacccacacgtttttcaatccagatagagaaggctggttgttgaaactggctggagggagagtgaaaacatggaagcggcggtggtttatcctgacggacaactgtctctactacttcgaatacactacagataaggagcccagaggcattatcccgctagagaaccttagcatccgcgaggtagaagattctaagaaacctaactgttttgagttatatatccccgacaacaaggaccaggtaattaaggcctgtaaaaccgaagctgacgggagggtcgtggagggcaatcatacagtataccggatctctgcgccaacccctgaggagaaggaggaatggatcaaatgtattaaattccaggtaagccccggggagccttag

SEQ ID NO: 113749 - DNA, 1197 bp, synthetic construct
  misc_feature 1..1197: note = Description of Artificial Sequence: Synthetic coding sequence
  source 1..1197: mol_type = other DNA
atggaggaagatgactcatatgttccaagtgacctcaccgccgaagagaggcaggagttggaaaacattcgccgcaggaagcaagagttgctcgccgacatacagcgtctcaaagacgaaatcgctgaagtggcgaatgagattgaaaatctgggctctacagaagagcggaaaaacatgcaaaggaacaaacaggtggcaatgggccggaagaagttcaatatggatccaaagaaaggaatccagtttcttattgaaaacgatctactaaaaaatacttgtgaggacattgcacagttcctctataaaggcgagggcctgaacaagacagcaatcggcgattaccttggagaaagagatgagttcaatattcaagtattgcacgcattcgtcgaactccacgaattcaccgatctcaacctcgtccaggccctcagacaatttctctggagttttaggctgcccggcgaggctcagaaaatcgatcgcatgatggaagcttttgctcaacggtattgccaatgcaacaatggggtgttccagagcacagacacctgctacgtgctatcttttgccatcattatgctgaacacctctttgcacaaccctaacgtaaaggataaaccaaccgtcgagcgctttatcgccatgaataggggaattaatgacgggggagatctgcctgaggagcttcttcggaacctgtatgagtcaattaaaaatgagccttttaaaatcccagaagacgatgggaacgatcttacccatacgttttttaaccccgaccgagaggggtggttgctgaaactgggcgggggcagggtaaagacttggaagcggcggtggttcatactgaccgataattgtctttactactttgaatatactacagataaggagccccggggcatcattcctttggagaacctcagtatccgtgaggtggaagactccaagaagcctaattgcttcgagctctatattccagataataaggaccaagttataaaagcttgtaagactgaagccgacggccgggtggtggagggaaatcatacagtgtaccgtattagcgcaccaacccctgaggagaaagaggaatggatcaagtgcataaaagcggcgatttctcgggacccattttatgagatgctggcagccagaaagaaaaaggtcagctccacgaagcgacactag

SEQ ID NO: 113750 - DNA, 1020 bp, synthetic construct
  misc_feature 1..1020: note = Description of Artificial Sequence: Synthetic coding sequence
  source 1..1020: mol_type = other DNA
atgcaacgaaataagcaagtcgcgatgggccggaagaaatttaatatggacccaaaaaaagggatccagttcctgatcgaaaatgacttgctgaagaacacatgtgaggacattgctcagttcttgtacaaaggcgaggggttgaacaagacagcgattggggactacctgggagaacgggacgagtttaacatccaggttctgcatgccttcgtcgaattgcacgagttcactgacctgaatctggtgcaggcactccggcagttcctttggtccttccgcctgcctggcgaggcccagaagatcgatagaatgatggaagcctttgcccaaaggtattgccagtgtaataatggcgtttttcagtccacggatacgtgttacgtgctgtcgtttgccatcatcatgttgaatacttctttgcacaaccccaacgtcaaggacaagccaacagtggagcggttcatcgctatgaacaggggaataaatgatggcggggaccttcctgaagagctactgcgcaacctctatgagtcaatcaaaaacgagccctttaagattcccgaagacgatggtaacgatctgacacataccttctttaatccggaccgtgaaggctggctcttgaagctgggaggaggccgcgttaagacctggaagaggaggtggttcatattgacggacaattgtctgtactacttcgaatatactacggacaaggaacccaggggtatcatccctttggaaaacttatctattagggaagtagaggactcaaagaagccaaactgtttcgagctgtatatccctgataataaggatcaggtcatcaaggcttgcaagaccgaggccgacgggagggtcgtcgagggtaaccataccgtgtatcggataagtgctccaacaccagaggagaaagaggaatggatcaagtgtataaaggccgccatcagtcgggatccgttttacgagatgctcgctgcccgcaaaaagaaagtgagtagcaccaaacggcactag

SEQ ID NO: 113751 - DNA, 1020 bp, synthetic construct
  misc_feature 1..1020: note = Description of Artificial Sequence: Synthetic coding sequence
  source 1..1020: mol_type = other DNA
atgcagaggaataaacaagtagctatgggtcgcaagaagtttaacatggacccaaaaaagggcatccagttcctgatcgaaaacgacctgctgaagaatacatgtgaagacatagcccagtttctgtataaaggggaaggcctaaataaaactgctataggggactatctcggagaaagggacgagtttaacatacaggtgctgcatgcttttgtggagctgcatgagttcacagatcttaatttggtgcaagctctgcgtcaattcctttggtcattccgattgcctggtgaagcgcagaaaatcgatagaatgatggaggctttcgcccagcgctattgccagtgcaacaatggagtctttcagtccacagatacttgctacgttttgagctttgccattatcatgctgaacacttctttgcataacccaaatgtcaaggataagccgaccgtggagagattcatcgcgatgaatcgcggcattaacgatggaggggacctgcccgaagaattactgcgaaatctttacgagagcatcaagaatgagccctttaaaatcccggaagacgacggtaacgatctaactcatactttttttaatcctgatcgggaaggctggctactcaaactcggtggagggcgtgttaaaacctggaagcgcagatggtttatcctgacagataactgcctgtactattttgagtacactaccgacaaagaacccagggggattattccactagaaaatctttccatcagggaagtggaagactctaagaaaccaaattgttttgaactttatataccagataataaagaccaggttatcaaagcttgtaagaccgaggcagatgggcgcgttgtggagggaaatcacactgtttatcggatctctgcccccaccccagaagagaaggaagaatggattaagtgcattaaagccgccattagtagagatcctttctatgagatgctggccgccaggaaaaagaaggtttccagcacaaagcgacattag

SEQ ID NO: 113752 - DNA, 1080 bp, synthetic construct
  misc_feature 1..1080: note = Description of Artificial Sequence: Synthetic coding sequence
  source 1..1080: mol_type = other DNA
atgtcattacagcggctgctgcagcattcctccaatggaaaccttgccgatttttgcgcggggccagcttacagttcttatagcacactgacagggagcctcaccatggatgataacaggcgcatccagatgctcgcagacacagtggccacactaccaagaggccgtaagcaacttgctctgactcgcagctcatccctgagtgacttctcgtggagccagcgcaaactggtgactgtggaaaagcaggacaacgaaacattcgggtttgagatacagagttacagaccccaaaaccagaacgcttgcagctcagagatgttcacactcatctgtaagatccaggaagatagccctgctcattgtgccggactgcaggccggagacgttcttgctaatatcaacggggtctcaaccgaaggtttcacatacaagcaagtggtggatcttattcgcagtagcggcaatttactcacaattgagacattgaatggcacgatgatacttaaaaggacggaactggaagcaaagttgcaggtgttgaaacagaccctgaagcagaagtgggtggaataccgctccctccagcttcaggagcaccggctactgcacggcgacgccgccaactgcccaagcttagagaacatggacctagacgagttatccttgtttggccctttgcctggacctggcccagctttagtcgataggaaccgcctgtccagcgagagcagttgcaagtcttggttaagctctatgaccatggattcagaggacggatatcaaacctgcgttagcgaagactcaagtagaggcgccttctctcgtcaaacaagcaccgatgacgagtgctttatccccaaggaaggcgatgattttctgcgccgaagcagcagcaggcggaaccggagcattagtaacacgagttcagggtcaatgagccccctgtgggaagggaacctgagttcaatgttcggcaccctgccgagaaaatctcgaaaggggtccgtgagaaagcaattgttaaagtttattcccggcctccaccgcgcggtggaggaggaggaatcccgattctag

SEQ ID NO: 113753 - DNA, 762 bp, synthetic construct
  misc_feature 1..762: note = Description of Artificial Sequence: Synthetic coding sequence
  source 1..762: mol_type = other DNA
atgttcaccctgatctgcaagattcaggaagatagtcctgcacattgtgccggactccaagcgggagatgtattggctaatatcaatggggtcagcaccgaagggtttacatacaagcaagtggttgatttgattcgcagcagcgggaacttgctgaccatcgaaactttaaacggcacgatgatactaaagcgcaccgaattggaagcaaagttacaggtactgaaacagacccttaagcagaagtgggtggagtacagatcactccagctacaggagcatcggctgttacatggcgacgcagcgaactgccctagtctggaaaacatggatctcgatgaattgtctctctttggtcctctgcccgggccgggtcccgccttggtagatagaaatcgcttgtctagcgagtcctcctgcaagtcatggctctccagcatgactatggatagcgaggacggttatcagacctgcgtgagcgaagactcaagccggggtgcctttagcagacagacttccactgatgatgagtgttttattccaaaggagggggacgactttctaagacgctcgtcaagtcgtcggaatcggtctattagcaatactagtagtggaagcatgagccccctgtgggaaggaaacctgagttctatgttcggcacccttccacgaaaaagccgtaagggatccgtgaggaagcagctcctgaaatttataccgggcttacatcgggctgtggaggaggaggagagccgattttag

SEQ ID NO: 113754 - DNA, 1203 bp, synthetic construct
  misc_feature 1..1203: note = Description of Artificial Sequence: Synthetic coding sequence
  source 1..1203: mol_type = other DNA
atggaagacggggtttatgagccaccagacctgacccccgaggagcgtatggaactggaaaatataaggcggcggaaacaggaactcctggtcgagatccagcgtttacgcgaggaactgtctgaagccatgtccgaggtggagggcctggaggctaacgaggggagtaagacactccagcgcaataggaagatggcgatgggccggaagaagtttaacatggaccctaaaaagggtatccagtttctggtggagaatgaactgttgcagaacaccccggaggagattgcccgattcctatataaaggcgaggggctgaacaaaacagcgattggtgactatctcggcgagcgcgaggagttgaatttggcggttctgcacgcttttgtcgatctacacgagttcaccgatctgaatctggtccaggctttgcgacaatttctgtggtcctttcggctccccggggaagctcagaaaatcgaccgaatgatggaagccttcgctcagcgctattgcctgtgtaatccaggcgtgttccagtcaaccgacacatgctacgtcttatcctttgctgtgataatgttaaatacctctctgcacaaccctaacgtacgggacaaaccaggcctggagcgtttcgttgcgatgaatcgaggcattaatgaaggaggggacctgccagaagagttgctgagaaatctgtatgactccattagaaatgagcccttcaaaatacctgaggacgatgggaacgatctgactcacaccttcttcaatccagaccgggagggctggctcttaaagcttgctggtggccgcgtcaagacatggaagcggcggtggttcatcttaacagacaactgcctttactatttcgaatacactaccgacaaagaaccgagaggtattatccctctcgagaatctgtcaattagggaggtggatgaccctagaaaaccaaattgcttcgagttatacattccaaataataaggggcagctgattaaggcctgcaaaaccgaggcggacgggagagtggtggagggaaatcacatggtgtatcgtatctccgctcctacacaggaggagaaagacgaatggattaagtccatccaggccgccgtgtccgttgacccattttacgagatgttagctgcgaggaaaaagagaattagcgtcaagaagaagcaagagcagccttag

SEQ ID NO: 113755 - DNA, 1200 bp, synthetic construct
  misc_feature 1..1200: note = Description of Artificial Sequence: Synthetic coding sequence
  source 1..1200: mol_type = other DNA
atggaggatggcgtatatgaacctcctgatcttacccccgaagaaagaatggagctggaaaatattaggaggcgtaaacaggaactcctggtggagatccagcgcctgagagaggaactgagtgaagcaatgagtgaggtcgaaggccttgaggctaacgaagggtccaagaccctgcagagaaaccggaagatggccatggggagaaagaaatttaacatggacccgaaaaagggcatacagtttctcgttgagaacgagttgttgcagaacacacccgaagagattgcacggttcctgtacaaaggggaggggctgaacaaaacggctattggtgattatttaggcgagcgagaggagcttaatctggcagtcctccatgcttttgtagacctccacgagtttaccgatttgaatttggtccaggcgctacgccagtttctgtggtcattccggttgcctggggaggcgcagaagattgatagaatgatggaggcattcgcacagcgctactgcctctgtaaccccggcgtctttcaaagtactgatacttgttatgtcctaagttttgcggtgattatgctgaacaccagcttacacaatcctaacgtgcgagacaagcctggcctggaaaggtttgtggcgatgaatcggggaataaacgagggtggcgatctccccgaagaactgctgcgtaatctctatgactccattcggaacgaaccctttaaaatcccagaagacgatgggaatgacttgacccacacattcttcaatccagaccgagaaggctggttactaaagctgggagggagagtgaagacctggaaaagaagatggttcatcctcacggataattgcctttactatttcgagtatacaaccgataaggagccacggggcatcatccccctcgaaaacctgagtatccgcgaagtggatgaccctcgtaagcctaattgcttcgagctgtacatccctaacaataaggggcagctgattaaagcatgcaaaactgaagcagatggtagagtcgtggagggtaaccatatggtctatcgaatctctgctcctacccaagaagagaaagatgagtggattaagtccattcaggctgcagtgagcgtggaccccttttatgagatgctggccgcaagaaaaaaacgtatcagcgtcaaaaagaaacaggagcagccatag

SEQ ID NO: 113756 - DNA, 1200 bp, synthetic construct
  misc_feature 1..1200: note = Description of Artificial Sequence: Synthetic coding sequence
  source 1..1200: mol_type = other DNA
atggacgaggatggtgggggagaagggggaggcgtgcccgaggacttgagtcttgaggaacgcgaggagctgctcgacatcaggcggcgaaaaaaggagctcattgacgatatcgaacgactgaagtacgagattgctgaggtcatgacggagattgacaacttgacttctgtggaagagtccaagacaacacaacggaataagcaaatcgctatgggtaggaagaagtttaacatggatcctaaaaagggaattcagtttttaattgagaacgacttactacaaagttctcccgaagacgtcgcacagttcttgtataaaggagaaggtctgaataaaactgtgattggcgattacttgggtgagagggacgaatttaacatcaaggtacttcaggcttttgtcgagctgcacgaatttgccgatctgaaccttgttcaggcacttcgacagtttctttggagttttcgtctgcctggagaagcccaaaagatcgacagaatgatggaggcttttgcgagcaggtactgtctttgcaaccctggcgtatttcagagcacggacacttgctatgttctttcatttgctatcattatgctcaacactagcttgcacaatcacaatgtacgcgataaacctacagccgaaagatttatagccatgaaccgaggcataaacgagggtggggatttgcccgaagagctgctgcggaacctgtatgagagcatcaagaacgagccttttaagatacccgaggacgatggcaacgacttgacgcacacatttttcaatccggaccgggaagggtggctgttgaaattaggtgggcgcgtgaagacgtggaagagacgctggtttattctgaccgataattgtttgtactacttcgaatacaccacagacaaggagccccgcggaattatcccactggagaacctgtcgattagagaggtcgaggatccgagaaagcctaactgttttgaactgtataatcccagtcataaaggccaagtgattaaagcgtgtaaaaccgaggctgacggacgggtcgttgagggaaatcatgttgtctaccgcatctcagctccatcaccagaagagaaggaagaatggatgaagtccatcaaggcaagtatttcaagggatcctttctacgatatgctggctacaagaaaaagacggatcgctaacaaaaagtag

SEQ ID NO: 113757 - DNA, 945 bp, synthetic construct
  misc_feature 1..945: note = Description of Artificial Sequence: Synthetic coding sequence
  source 1..945: mol_type = other DNA
atggcactgcctcagttacagacagccatgctggccgccttcctatgggaccccagggacgttgtgctgaccgcccagccaggggccgaacagtgcgccgaatccagtcaacacatccggattctgcagccccaattcaggcttattaggttgcggttctggaaactctacatccagcgaagagtacaggcttggcagttcctgtggagttttaggctccccggggaagcccaaaagatagatagaatgatggaggccttcgcctctagatactgcctgtgcaacccgggagtgttccagagcactgacacttgttacgtgttgtccttcgctattatcatgttgaataccagcctgcataaccacaatgtccgcgataagccaaccgctgagcgctttattgctatgaataggggaatcaacgagggaggagaccttcccgaggaactgcttagaaatctgtacgagtcaattaaaaatgagcctttcaagattcccgaggacgacggaaatgaccttactcacacattcttcaaccccgacagggagggttggttgttgaagctgggtggccgcgtgaagacatggaagagacgctggttcatcctgaccgacaactgcttgtactactttgagtatactactgacaaggaaccgcgcggtattatccccctcgaaaacctgtccataagggaagtggaagatcctcggaaacctaattgcttcgaactgtacaaccccagtcataaaggccaagtcataaaggcctgtaaaaccgaggcagatggcagagtcgtcgagggcaatcatgtggtatacagaatcagcgctcccagccctgaggaaaaagaagaatggatgaaatctattaaggcctccatctctagggatcctttctatgatatgctcgctaccagaaagcggaggatagctaacaagaaatag

SEQ ID NO: 113758 - DNA, 1185 bp, synthetic construct
  misc_feature 1..1185: note = Description of Artificial Sequence: Synthetic coding sequence
  source 1..1185: mol_type = other DNA
atggacctctgtcatcccgaacccgcagagctgtctagtggtgagacggaagagctgcaacgcatcaaatggcaccgaaaacagttactggaggatatccagaaactcaaggatgagattgcagatgtgttcgcacagattgattgcttcgagtcagccgaggagtctagaatggcacagaaagagaaggaactatgtatcggccggaaaaaattcaacatggatccggcgaaaggcatccagtacttcatcgaacacaagctgctaactcccgacgtgcaggatatcgcgaggtttctctacaagggagaaggccttaacaagaccgccatcgggacctacttgggcgaacgggatccaataaacctccaggtgcttcaggccttcgtagattgtcacgagtttgcgaatcttaatctggtccaggccctgcggcagtttctctggtctttcagattacctggagaagctcagaaaatcgaccgtatgatggaagcgttcgccactcgctattgcctgtgcaaccccggagtttttcagtccactgacacatgctatgtgctgagcttctcaatcatcatgctgaatacctcgctgcataatcccaatgtgcgggatcggccgccctttgagcgttttgtcagcatgaataggggtataaataacgggtccgacttgccggaggaccaactgcggaatctcttcgatagcataaaatcggaaccattttctataccagaagacgacgggaatgacctgacacatacgttttttaatcctgacagagaaggctggctgctgaagctagggggccgcgtaaagacttggaagcgcaggtggttcatcctgaccgacaactgcctgtactatttcgaattcacgacagacaaggagccccgtggcataatcccgttggaaaacctgagcgtgcaaaaggtagacgatccaaagaagccattctgcctggagctgtacaatccctcatgcagagggcagaagattaaagcttgcaaaacagacggggacggaagagttgtcgagggcaaacatgaatcctatcgcatttctgcaacttccgccgaagaacgagaccagtggattgagtcaatcagggcaagcattacccgcgtgccattttacgatctggtaagcaccagaaagaaaaagattgcctcaaagcagtag

SEQ ID NO: 113759 - DNA, 474 bp, synthetic construct
  misc_feature 1..474: note = Description of Artificial Sequence: Synthetic coding sequence
  source 1..474: mol_type = other DNA
atggacttgtgtcatcccgaacccgccgaactgagcagtggtgagaccgaagagctgcaacggatcaaatggcatcgcaaacagttactggaggacatccaaaagttgaaggatgagatcgccgatgtgttcgcgcagatcgactgtttcgagagcgcggaagagagtcggatggcgcagaaggaaaaggagctatgcatcgggcgtaaaaaatttaatatggatccagccaagggcatccagtattttatagaacataagttactgacacccgacgtgcaagacattgctcgcttcctatataagggggagggacttaacaagactgccattggcacttatctgggcgaaagggatccaatcaacctgcaggtgctgcaggcatttgtcgactgtcacgaatttgccaatttgaatttggttcaagcactgaggttcagggagggcgcatccgaccttggctttggcggctag

SEQ ID NO: 113760 - DNA, 876 bp, synthetic construct
  misc_feature 1..876: note = Description of Artificial Sequence: Synthetic coding sequence
  source 1..876: mol_type = other DNA
gatcgatctacagggcacctcttccccaggggcgtcggcatggacctgtgccaccctgagcctgccgagctgagtagcggtgaaactgaagaactgcaaagaatcaagtggcacagaaagcaactcctggaagacatccagaaactcaaggacgaaatcgccgatgtgttcgcgcagatagactgcttcgagagtgctgaggaatctcgaatggctcagaaggagaaggagctatgtatcggcagaaagaaatttaacatggacccagccaaagggatccaatatttcattgagcacaagctgctgacgcctgacgtgcaagacatagcccggttcctgtataagggcgaaggcttgaataaaacagctatcgggacataccttggtgagagagacccgataaatctgcaggtgctacaggcctttgtggattgccatgagttcgctaatctgaacctcgtgcaggccttgcgtcagtttctgtggagctttagactgccaggcgaggctcagaaaatcgaccgaatgatggaagcttttgctacccgctactgtctatgcaatcccggcgtgtttcaatctacggatacctgttatgtcctgtctttcagcattattatgttgaacaccagtctgcacaatccaaatgtgagagaccggcccccattcgaacggttcgtctctatgaataggggcataaataacgggtccgacctgccagaggaccagctgagagtcacatgggaatgctcccagcgtagatcccgtgaaaggacatttcagaaagaagaggttgcaagaacagaggcctgcccggactgggagcgccggggtgtgcaatgtggacgggagccactgcgccagcaccaggagtag

SEQ ID NO: 113761 - DNA, 444 bp, synthetic construct
  misc_feature 1..444: note = Description of Artificial Sequence: Synthetic coding sequence
  source 1..444: mol_type = other DNA
tgaacccatacatctggtagtctgagcagccgcgacagtcaggcaggcgacagcgcaagccgcgcgggggggcgcgtgaagacatggaaacgccgctggttcattctgaccgacaactgcctatattattttgaatttaccaccgacaaggaaccccggggaatcatccccctggagaatctgagcgtgcaaaaggttgatgacccgaaaaagcccttttgtcttgagctctataacccttcctgcagaggtcagaaaattaaggcttgcaaaacagacggcgatgggagagtggtggaagggaaacatgagagctatagaatcagcgccacctccgccgaagagagagatcagtggatcgagtcaatacgagcctctatcacacgcgtgccgttctacgatctcgtttctacacggaaaaaaaagattgctagcaaacaatag

SEQ ID NO: 113762 - DNA, 354 bp, synthetic construct
  misc_feature 1..354: note = Description of Artificial Sequence: Synthetic coding sequence
  source 1..354: mol_type = other DNA
atggacctgtgccacccagagcccgccgagctaagctcaggggagaccgaagaactgcagcgcattaagtggcacaggaagcagctgctggaggatatccagaaactgaaggacgaaatagcagatgtattcgcacagatcgattgcttcgagagtgcagaggaaagcagaatggcccagaaggaaaaggaactgtgtatcggccgcaagaaatttaacatggatcccgcgaaaggcattcagtatttcatcgaacacaaactgctaactccagacgttcaagacattgcaagattcctgtataagggggaaggactgaataaaacggctattggcacttatttaggcgagtag

SEQ ID NO: 113763 - DNA, 777 bp, synthetic construct
  misc_feature 1..777: note = Description of Artificial Sequence: Synthetic coding sequence
  source 1..777: mol_type = other DNA
atggttttatgcgtgcagggtccacggcccctgctagcggtagaacgtactgggcagagaccactgtgggcccccagcctagaattgcccaagcctgttatgcagcccctgcccgccggcgcattcctcgaggaagttgccgaaggaacccctgctcaaaccgaaagcgagcctaaagtactagatcccgaggaggacctgctctgcatcgccaaaacattctcctatttacgcgagtccgggtggtactgggggagtattactgcaagcgaagccaggcaacatttgcaaaagatgccggaaggaacctttctggtcagggatagtacacaccctagttatctgtttaccctgagcgttaagaccacgagaggacctaccaatgtaaggatcgaatacgcagatagttcctttagacttgactccaactgtctctctcgaccgagaattttagcatttccagatgtcgtctcgctcgttcaacattatgtcgcttcctgtacagccgatacacggtcggactcccccgatccggcacctactcccgccttgccaatgccaaaggaggatgctccaagtgatcctgcattgccagccccacccccagcaacggcagtgcacctgaagctcgtgcagccatttgtgagacggtcttccgccagaagcctccagcatctgtgccgactcgttatcaaccgtctagtcgccgatgtagactgtctccccctgcctcggagaatggcggattatctgagacagtatccttttcagctctag

SEQ ID NO: 113764 - DNA, 828 bp, synthetic construct
  misc_feature 1..828: note = Description of Artificial Sequence: Synthetic coding sequence
  source 1..828: mol_type = other DNA
atgtatcttgagcatacctctcactgtcctcaccacgacgatgatactgcaatggacacacctttgccccggccaagacccctactggccgtagaacgtactggccagagacccctttgggccccaagccttgagcttccaaaaccggtgatgcaacccctccccgcgggagccttcctcgaagaagtggccgaaggtacccctgcacagactgagagcgaaccaaaagttctcgatcccgaggaagatctactatgtatcgcaaagacgttttcctatcttagagaatccgggtggtattggggttccatcacggcgtcagaagcccgccaacacctccagaaaatgcctgagggcacgttcctggtaagggactcaacgcatccaagctacctcttcactttaagcgtgaagaccacaagaggccccaccaacgtgagaatcgagtacgccgattcatcattccgtctagattccaactgcctgtccaggccgcggattctagccttccctgacgtggtgtcattagtccagcactacgtggcttcctgcaccgcagacaccaggtccgactccccagaccctgccccaacccctgctctgcccatgcccaaggaagacgccccgagcgatccagccctgcctgcaccgcccccagccaccgcagtgcatcttaagttagtgcagccatttgtgcgcaggtctagcgctcgctctctgcagcatctgtgccgtctcgtcatcaatcgacttgtggccgatgtcgactgcctccccctgccaaggaggatggcagactacttacggcagtaccctttccagctgtag

SEQ ID NO: 113765 - DNA, 1269 bp, synthetic construct
  misc_feature 1..1269: note = Description of Artificial Sequence: Synthetic coding sequence
  source 1..1269: mol_type = other DNA
atgcccgcgggtaggcgcgggcctgccgctcaaagcgcgcgtagacccccaccactgctgcctttattattgcttttatgtgtattgggggccccgcgtgcagggtcaggggctcatacagctgtgatcagtccgcaggatccgacgttactgattgggagcagcctgctggccacatgcagcgtgcacggcgatcctccaggcgccacagctgaaggactctactggactctgaacgggaggcggctgccacccgaactgagcagagtgctgaatgcttccacactggccctggccctagcaaacctcaatggctcccgacagcgaagtggcgacaacttggtttgtcacgctagagatggaagtatcctcgccggatcctgtctctacgtcgggctgccccccgagaaacccgttaatatatcctgttggagtaaaaacatgaaagatctaacttgtcggtggacaccgggagctcatggcgagacgttccttcacaccaactattctctgaagtacaagttgcgttggtatgggcaagacaatacctgtgaggaataccataccgtcggaccccatagttgccatatccctaaagacctcgctctgtttactccctatgagatatgggtggaggcgacgaatcgtttaggctccgcaagatctgacgtactaactctggatattctggacgtagttaccacagatccccccccggatgtgcacgtgagccgagtgggaggcctggaggatcagctgagcgtccgttgggtcagtccgcccgccctgaaggactttctgttccaggccaaataccaaattagataccgcgtcgaagactccgtggactggaaggttgtcgacgacgtctctaatcagaccagctgtaggcttgccgggttgaaacccggcaccgtgtacttcgtgcaggtgcgttgcaatccgttcgggatctatgggagtaaaaaagcaggcatatggagcgagtggtcacacccaacggccgcgtctaccccccgctctgagcgcccagggcccggagggggggcatgtgaaccaagaggtggcgagccaagctctggaccagtgcggagagagctgaaacagttcttgggatggcttaagaagcacgcttactgttccaacctgtccttcaggctgtacgaccagtggcgggcatggatgcagaagtctcacaagaccagaaaccaggatgagggaattctgcctagtgggcggagagggaccgctcgaggccctgctagatag

SEQ ID NO: 113766 - DNA, 702 bp, synthetic construct
  misc_feature 1..702: note = Description of Artificial Sequence: Synthetic coding sequence
  source 1..702: mol_type = other DNA
atgggacggctggtcctcctgtggggggccgccgtctttctgctggggggatggatggccctggggcagggtggagctgcagagggcgtgcagattcagattatctacttcaatctggaaacagtacaggtgacctggaacgcctccaagtattccaggactaatcttacatttcattatcgtttcaacggcgatgaggcctatgaccagtgcacgaattatctcttgcaggaaggccacaccagcgggtgtttgctggatgcagaacaacgggatgacattctgtatttttccatccgcaatggtactcacccagtctttacagcttctagatggatggtctattacctgaaaccatcatccccgaagcacgtccgcttctcctggcaccaggatgcagtgaccgtgacttgttcagatttaagctatggcgacctgctctacgaggttcagtatcgatccccatttgataccgagtggcagacacaaagtcgttcggtgacccaggcgggagtgcagtggtgcgacctgtgcctgctgcagccctcccccccccgattcaagagatttagttgcctgtcgctaccgtccagctgggattaccgccacccccccccacgtctggccaatttctgcattattagcagagatggcgtaagcccctgctggcctgggtggtctcgtacgtgcgatctgcggtag

SEQ ID NO: 113767 - DNA, 771 bp, synthetic construct
  misc_feature 1..771: note = Description of Artificial Sequence: Synthetic coding sequence
  source 1..771: mol_type = other DNA
atgggaaggttggtgttgttgtggggggccgcagtgtttctcctcggcgggtggatggcattagggcaagggggagccgccgagggcgtgcagattcagataatttatttcaatctagaaacagtccaagtaacctggaatgcaagcaagtattccagaacaaatctcacctttcactatcgttttaacggcgacgaagcgtacgatcaatgcactaactatctcttgcaggaaggccacacatccgggtgcttactggatgccgagcagagagacgatattttgtacttttcaatccgaaatggcactcaccccgtgttcacagcatccaggtggatggtttactatctgaaacccagctcgccaaaacacgtccgattctcctggcatcaggacgccgtaacggtgacatgttccgatctcagctacggcgatctgctttatgaagtgcaatacaggagtcctttcgatacggagtggcagtccaagcaggagaacacctgtaacgtaactattgaggggctggatgcagagaagtgttatagcttttgggtgcgcgttaaagctatggaggatgtctacggaccggatacatatcctagcgattggtcagaagtgacttgttggcagcgcggggagatcagagacgcatgtgccgagactcccactccacctaaacccaagctcagtaagttcatcttgatttccagcctggctatactgttgatggtttcactcctgctgctctccctctggaagttatggaggtag

SEQ ID NO: 113768 - DNA, 768 bp, synthetic construct
  misc_feature 1..768: note = Description of Artificial Sequence: Synthetic coding sequence
  source 1..768: mol_type = other DNA
atggggcggctggtcctgttgtggggcgctgccgttttcttgctggggggatggatggccttgggccagggcggggcagccgaaggggtccaaatacagattatctacttcaaccttgagactgtgcaggtcacctggaacgctagtaagtattcacgcaccaatctgacttttcactatcggtttaatggggacgaagcctacgatcagtgcactaattatctcctgcaggaagggcacacatcaggctgtctgctggacgccgagcagagggatgacatactgtatttctcaattcgcaacggaacccatcccgtgttcacagcatctcggtggatggtgtactacctgaagccttccagccccaagcacgttcgtttcagctggcaccaggacgccgtgaccgttacatgctcagatttatcttacggcgatttgctctatgaagttcagtaccgcagtcccttcgatacagagtggcaaagcaagcaggagaacacatgcaacgtgaccatcgaaggactggacgccgaaaaatgctacagtttctgggtgcgcgtcaaggcgatggaggatgtctatggacccgacacataccctagtgattggagcgaagtgacatgctggcagcgcggggagattagggacgcctgcgcggaaaccccaactcctcccaaacctaagctcagtaaattcatactcattagcagtctggccatcctgctgatggttagcctgctgctcctaagcctctggaagctgtggtag

SEQ ID NO: 113769 - DNA, 411 bp, synthetic construct
  misc_feature 1..411: note = Description of Artificial Sequence: Synthetic coding sequence
  source 1..411: mol_type = other DNA
atgagaacacctggcccactgcctgtcctgctgttgcttctcgccggcgccccagcagctcgaccaacacctcccacctgttactctcgcatgcgcgctttgagtcaggagatcacccgggactttaatctactccaagtatcagaaccctctgagccatgtgtgcgatacttgccaagattgtatttggatattcataattactgtgttttggacaagctgcgagatttcgtggccagtcccccatgctggaaggtggcgcaggtggacagcctgaaagacaaggcacgaaaactgtacacaattatgaattccttctgtcgacgggacctagttttcctcctcgatgactgcaacgcccttgaatatccgatccctgtaaccaccgtgctgccggataggcagaggtag

SEQ ID NO: 113770 - DNA, 3762 bp, synthetic construct
  misc_feature 1..3762: note = Description of Artificial Sequence: Synthetic coding sequence
  source 1..3762: mol_type = other DNA
atggccgcacaggtcacccttgaggatgccttatctaatgtggatctgctggaggagttgccacttcccgatcagcagccttgtattgagccaccaccgtccagcctcctatatcagcccaatttcaacacaaacttcgaggaccgaaatgctttcgtcactggcatcgcccgatacatcgagcaggcaaccgttcactcatctatgaacgaaatgctggaggaaggacaggagtacgcagtgatgctgtatacgtggcgctcttgcagtcgcgcaatccctcaggtgaaatgtaacgagcagcccaacagagtcgagatctacgagaagacggtcgaagtgctggagcccgaggtgactaagttgatgaattttatgtacttccagcggaatgccatagaacggttctgcggcgaggtgagacggctgtgtcacgccgaacggaggaaagatttcgtttcagaagcttatctcatcacactgggaaagttcatcaatatgttcgctgtcttggacgagctcaaaaatatgaagtgcagtgtgaaaaacgatcactccgcatataagagggccgcccagtttttgcggaagatggccgatccccagtctatacaggaatctcagaacctgtccatgtttctagcaaatcacaacaagatcacgcagtctcttcaacaacaactggaggtaatctctgggtacgaggaactcttggctgacatcgtgaacctttgtgtggactactacgagaacaggatgtatctcacaccttcagaaaagcatatgttgctgaaggtcatgggttttggactgtacctcatggatggaagcgtgtcaaatatctacaagctcgatgctaaaaaaagaatcaatcttagtaagattgataaatacttcaagcaactgcaggtcgtgccgctgttcggggatatgcagattgaactggcaagatatattaagacctctgctcactatgaggaaaataagagcagatggacatgcaccagctccgggtcaagccctcagtacaacatctgcgagcagatgatccagatacgcgaggaccatatgagatttataagtgaattggcccggtactccaactcggaagtcgtgaccggtagcgggaggcaggaggcccagaagacagacgccgagtatagaaaattgttcgatctcgccctgcaagggctgcaacttctttcccagtggagcgcccatgtgatggaagtttactcctggaaactcgtccacccaacagataaatactccaataaggactgtcccgacagcgctgaagagtacgagcgagccacgagatataactatacaagtgaagagaaattcgctctagtggaggtgatcgccatgatcaaaggcctacaggtgcttatgggaagaatggaatccgttttcaaccatgcaattaggcacacagtttatgccgcgctgcaggacttttcgcaagtcacactccgtgaaccactccggcaggccattaagaagaaaaagaatgtgattcagagtgtcctccaggcaatacgcaaaacagtgtgcgactgggaaacaggccacgaaccgtttaacgatcccgcgttgcgaggcgagaaggatcctaagagcggcttcgacatcaaggtgccccgcagagccgttgggccatcttcaacacagctctatatggtgcgcaccatgctggaaagcctgatcgccgataaatctggttccaaaaagaccctacgaagttccctggagggccccactatcctggacatagaaaagtttcatagggaatcattcttctacacgcacctgatcaactttagtgaaactctgcaacagtgttgtgacctgtcacaattgtggttcagggagtttttcctggaactgaccatgggtagacgaatccagtttcccatcgagatgagcatgccgtggattctcaccgatcatatattagagaccaaagaagcctctatgatggagtacgtgctgtactctctagacctgtataacgactccgcgcactacgcacttacccggttcaataagcagttcctttacgatgagatcgaggctgaagtgaatctctgttttgaccagtttgtgtataaattagccgaccagatctttgcttactacaaagtcatggctggatcgctgttgctcgacaagcgtctcaggagcgagtgcaagaaccaaggagctacaatacacctcccaccttccaatcgatacgagacgttgctgaagcagagacatgtccagcttcttggacgctctattgatctgaacagacttatcacccaacgcgttagcgcagctatgtacaagagcctggaactggccataggtcgcttcgaatctgaagatctcacgtctatcgtggaacttgatggtctactggagatcaaccgcatgacccacaagctgttgtctaggtatctcaccctcgacggctttgacgctatgttcagggaagcaaatcataatgtgtcggcaccatatggtcgcatcaccttacatgtcttttgggagctgaattacgacttcttacccaactattgctacaacggatccaccaacaggttcgtgcgcactgtgctcccattctcccaggagtttcagcgagataaacagccgaacgctcaaccacagtacctgcatggctcgaaagcccttaacctcgcctactcatctatttatgggagttacaggaactttgtcggcccaccacacttccaggtaatctgcagactattgggatatcaaggtatagctgtcgtgatggaggaattgctgaaagtggtgaagtctctcctccaagggactatactgcaatacgtgaagacgctcatggaggtcatgccaaagatttgtagactacccagacatgagtacggctcccccggaatcctcgagttctttcatcaccagctcaaggacatagtggagtatgccgagttaaagactgtgtgctttcagaacctgcgtgaagtcggtaatgctatactcttttgtctgctaatcgagcaaagcctgtctttggaggaggtttgcgatctgctgcacgcggccccgtttcagaatatcctgcctagggtgcacgtaaaggagggagagcgactagacgctaaaatgaagcgactggaatccaagtacgccccattacatctcgtaccgctcattgagcgcctgggaaccccacaacaaatcgccatcgctagagaaggcgatttattaactaaggagcgcctgtgttgcggcctgagtatgtttgaggtgattctaacaaggattcggagtttcctggatgatcccatctggcgaggacctcttccttcaaacggtgtgatgcatgtggatgaatgcgtagaattccacagattgtggagtgctatgcaattcgtgtactgcatccctgtgggcacgcacgagttcacagtcgaacaatgttttggcgacggccttcattgggcagggtgtatgataattgtcctgctcgggcaacagcgccgcttcgccgtactggacttctgctatcaccttttgaaggtccagaagcacgacgggaaggacgaaattattaagaatgtcccgcttaaaaaaatggttgagcgaatcagaaagttccagatcttgaacgatgaaatcattacaatcctggataagtatctgaagagcggagacggagagggaacccctgtggaacacgttaggtgtttccagccgccaatccaccagtctctggcgtcatcttag

SEQ ID NO: 113771 - DNA, 3768 bp, synthetic construct
  misc_feature 1..3768: note = Description of Artificial Sequence: Synthetic coding sequence
  source 1..3768: mol_type = other DNA
atgggccctaagcacgtgctgcggcagcctggaccctcggagaggcaccatccagaagttcctgcgtggacgcctagggcggggcccccttgttggctgtgcagacagaggtggggctggaccctgcaccccccgggcagagggtgtccagctctgctgctgtcagaacctcggatggccgcccaagtgaccttggaagacgccttgtccaatgtggacctgcttgaggagctccctctgcccgatcagcagccatgtattgagccccctccctcaagcttactgtaccagaacgagatgcttgaggaggggcaagaatatgcggtgatgctgtacacttggcgtagctgcagccgagcaataccacaggtgaagtgtaacgaacagcccaaccgagtggagatctacgagaaaacagtagaggtcctggaaccggaggttacaaagcttatgaactttatgtattttcagaggaacgccattgagaggttttgcggcgaggtaagacgtctctgtcacgcggaaaggagaaaggactttgtatctgaggcctacctcatcactctaggaaaatttatcaatatgtttgccgtcctggacgaattgaagaacatgaaatgtagcgtgaagaatgaccactctgcttataaacgcgccgcccagttcttaaggaaaatggccgacccacagagcatacaggaatcgcagaacctcagtatgttccttgctaaccacaataagataacccaatctcttcagcagcagcttgaagtgatttcaggttacgaagagctgctggccgatatagtaaacctgtgcgtcgactattacgagaatcgcatgtacctcaccccgagtgaaaaacatatgctgctaaaagtcatggggttcggcttgtatctaatggacgggagtgtctcgaatatctacaagctggacgccaaaaagcggataaacctgtcaaaaatagataagtacttcaagcagctccaggtggttcctttgttcggggacatgcaaattgaactggctcggtacatcaagacttcagctcactacgaggagaataagagtaggtggacctgcacgtccagcggctcctctcctcagtataatatctgtgaacagatgattcagatccgagaggatcacatgaggtttataagcgaactggcccggtattcaaactccgaagtggtcaccggaagcggccggcaggaagctcagaagactgatgccgaataccgcaagctctttgatctcgcattgcagggccttcagctcctgagccagtggtccgcacacgtaatggaggtttacagctggaaactggtgcaccctacagataaatatagtaataaggattgccccgattctgctgaggagtacgagcgcgcaacgagatacaactatacctctgaggagaaattcgcgctggtcgaagtcattgcgatgatcaagggattgcaggttcttatggggaggatggaatcagtatttaatcacgcaatcaggcataccgtgtacgctgctctgcaggatttttcccaggtgacactgagagagcctctgagacaggccatcaaaaagaaaaagaacgtcattcagtctgtgttgcaggccatccgtaagactgtgtgcgactgggagaccgggcacgagccctttaacgaccccgcgttaagaggcgaaaaggatccaaagagtggttttgacattaaagttccaaggcgcgcggtgggaccctcctccacccagttatacatggtaaggactatgttggaaagtctcatcgccgacaagagtggaagtaaaaaaaccctcagaagctccttggagggacctacaattctagacatcgaaaagttccacagagaatccttcttctatacccatctaatcaatttttccgagacgctgcaacagtgctgcgatttatctcaactttggttcagagagttctttctggaactgaccatggggcggaggatccagtttccaatcgagatgtcgatgccttggattctgacggatcatatcttagagacaaaggaagccagtatgatggaatacgtgttatactccctggatctgtacaatgactccgcacactatgcacttacccgatttaacaaacagtttctgtacgacgaaattgaagctgaggtaaacctgtgctttgatcagttcgtgtacaaattggcagaccaaatatttgcgtactacaaggtgatggctgggagccttttactggacaaacgactcagaagcgaatgtaaaaaccagggagcgacaattcatttgcctccctcaaacaggtatgaaactctgctgaagcaacgtcatgtccaactgctaggtaggtctatcgatttaaacagattgattacccagcgtgtgtcagccgcgatgtataagtccttggagctggccattggtcggttcgaatcagaagacctgaccagcatcgtggagctggatggactattggaaattaatcgaatgactcacaaacttcttagccgctatcttaccctggatgggttcgatgccatgttcagagaagctaatcataatgtttcagccccctatgggcggatcaccctgcatgtattttgggagctcaactacgattttctgcctaattactgctacaacggctctaccaataggtttgtgagaaccgtcctccctttttcacaggagttccagagggataagcaaccgaacgcccagccacagtatttgcacgggagcaaagctcttaatctcgcatattcttccatctacggaagctatagaaactttgtggggccgcctcactttcaggtcatttgtaggctgctgggctatcagggaatcgccgtggttatggaggaactcctgaaagtcgtaaaatctctgcttcaaggcactattctgcaatacgtaaagacactgatggaggtcatgcccaagatctgtcggctgcctcgccatgagtatgggtctccaggcatcttggagttcttccatcaccagctcaaggacatcgtggaatatgccgagcttaagacagtctgtttccagaatttacatgccgctccatttcagaatatcttgcctcgggtgcatgtgaaggagggagaacgcctcgatgcaaaaatgaaaaggcttgaatcaaagtacgctcccctgcacctagtgccgttgattgaaagacttgggactccacaacagatcgccattgctcgagagggagacctgctgaccaaagagagactgtgctgtggactgtctatgttcgaagtgatactgaccagaatccgatcctttctggacgatcccatttggcgcggtccgctgccttcgaatggtgtgatgcacgtcgacgaatgcgtcgagtttcatagactgtggtccgccatgcagtttgtctactgtattcccgttggcacacatgaatttactgttgagcagtgctttggtgatggtttgcactgggcagggtgtatgatcattgttctcttgggacagcagcgacgattcgccgtactggacttctgttaccatcttctgaaggttcagaagcacgacggtaaagatgagattattaagaatgtgcccctaaaaaaaatggtggagcgaattaggaagttccagatcctgaacgacgaaattatcaccatcctggataaatacctgaagagtggggatggggaagggacccccgtggaacacgtgcgctgttttcagcctcccatacaccaatctctggcttcttcttag

SEQ ID NO: 113772 - DNA, 2469 bp, synthetic construct
  misc_feature 1..2469: note = Description of Artificial Sequence: Synthetic coding sequence
  source 1..2469: mol_type = other DNA
atggcggagtcgcttggatcagccgaactgcttcggcaacttaaaagcctcggaatggagcgcctcctccacgccgtgaatacttttttacgtcaaagttgcacttacttaccattattgaccttcgggggtaagacatcatttgtgagcctggacgtgtacgggactgaagctaactgttccgcaacctcttgtagcttccccaaggctgccgccacatggccgcggagacaggcccccggccccctgggggaactagtgcggggccccccggaccagggggtcgctgaacagagtttctcgcatggactgttcgaatttggcatcactaacgttccctgtatatttagtccgccacagatgtttccatggataatccagctctatatggtgaggacgatgctggaatccctcatagcagacaagagcggctcaaagaagactcttagatccagtctcgaaggtcccactatcctcgacatcgagaagttccatcgcgagtcttttttctacactcatttgataaatttcagtgaaactctgcagcagtgttgtgatctgtctcaactttggttccgcgagttctttctcgaactcactatgggacggcgaatccagtttcctattgagatgagcatgccgtggatcctgactgatcacatattggagactaaggaggcaagtatgatggaatacgtgctttattctctcgatctctacaatgatagcgcgcattacgctctaacccgattcaacaagcaattcttgtatgacgagatagaggcagaggtcaatctgtgctttgaccagttcgtgtacaagcttgccgaccagatcttcgcgtattacaaggtcatggctggctctctactccttgacaagcgtctcaggtcagagtgcaaaaatcagggggccacaatccatctccctccatccaataggtacgaaaccctattgaaacagcggcacgtccagctactgggtagatccattgacttgaatagactgattacccaaagggtcagcgcagccatgtataaaagtctggagctagcaatcgggcgtttcgaatccgaagatttaaccagtattgttgagctagacggactgctggagattaatcgcatgacccacaaactgcttagccgctacctgacactggacggattcgacgccatgtttcgcgaggccaaccacaacgtgagtgctccttacggtcgaatcactttgcacgtgttctgggaattgaattacgactttctgccaaactactgctataatggttccactaacaggttcgtgaggactgtgttgccattttcccaggaatttcagagggataagcaaccaaacgctcagccacagtatctgcatggaagtaaggctctgaacctcgcgtactcatctatctacggaagctaccggaactttgtcgggcccccacactttcaggtgatatgccgactgttaggctatcaggggatcgccgtggtcatggaggaactcctaaaagtggtcaagagcctgttacaaggcactatacttcagtatgtcaagaccctcatggaggtcatgcccaagatttgtcggttgccaagacacgagtatgggagtcccggcatcctggaattctttcatcaccagctcaaagacattgttgaatacgccgaactcaagacagtgtgtttccagaatcttagagaggtcgggaatgccatcctattttgtctgcttatagagcagtccctgagcctggaagaagtgtgcgatctgctgcacgccgctcctttccagaacattctccccagagtgcacgtcaaagagggcgaacggctggatgccaaaatgaagagactcgaaagtaagtacgccccactccatctggtgccactgattgaacgtcttggtactcctcaacagattgcaattgcccgggagggagatctactgaccaaggagcgtctctgctgtgggttatccatgtttgaagtgattctgactaggattcgctcctttttggatgacccaatatggcggggacctctgcctagtaatggcgttatgcatgtggatgagtgcgttgagttccatcgactctggagcgcaatgcagttcgtttactgcattcccgtaggaacacacgaatttacagttgagcaatgctttggagatggtctacattgggccggctgtatgatcatcgtcttgctaggtcagcaaagaagattcgctgttttggacttttgttatcacctgctgaaagtgcagaagcacgacggtaaggatgaaatcattaagaacgtgccgctgaagaaaatggtggagcggattcggaagttccaaatcctaaacgatgaaatcatcaccatactggacaagtatctcaaaagcggagacggtgagggcactccagttgaacatgtgcggtgcttccagccccccattcaccagagtctggcctcaagctag

SEQ ID NO: 113773 - DNA, 3762 bp, synthetic construct
  misc_feature 1..3762: note = Description of Artificial Sequence: Synthetic coding sequence
  source 1..3762: mol_type = other DNA
atggccgcccaggtaactctagaggatgctctgtcaaacgtggatttgcttgaggaattgcccctccctgaccagcagccgtgcatcgagcccccaccttctagcctcctgtatcagcctaacttcaatactaactttgaggatcgcaacgcttttgtaacagggattgcccggtatatcgagcaggctacagtgcacagttctatgaatgaaatgttagaagagggccaggaatacgctgttatgctctacacctggcggtcctgttctagggcaatcccccaggtgaaatgcaacgaacagcctaaccgcgtggagatctatgagaaaaccgtcgaggtgctggaacccgaggtgacgaagctgatgaactttatgtattttcagagaaacgcaattgagagattttgtggagaagttaggaggctgtgtcatgcggagaggcgcaaggatttcgtgtcagaggcctaccttattaccttaggaaagttcataaatatgtttgcggtgctggatgaactgaagaatatgaaatgctccgtaaagaatgaccactccgcgtacaagcgggcggcccagtttctgaggaaaatggccgatcctcagtccattcaggagtcgcagaacttaagcatgttcctggcaaaccacaacaaaataacccagtcactccagcagcagctcgaggtgatcagtgggtatgaggagctcctggccgacatcgtgaacctgtgcgtggactactacgaaaacagaatgtatctgacaccctccgaaaaacatatgcttctgaaggtgatgggctttggcctgtatctgatggatggctcagttagcaacatttataaacttgacgccaaaaaaaggataaacctgagtaagattgataaatactttaaacagctccaggtcgtaccgctgttcggtgatatgcagatcgagcttgcaagatacataaagacatcagcacactacgaggagaacaagagcagatggacttgcacatcctctggcagcagtcctcaatacaatatctgtgagcaaatgattcagataagagaagaccatatgagatttataagcgagctcgccagatatagcaacagtgaagttgtcaccggaagtgggaggcaggaggcccagaaaacggacgcagagtacaggaaattatttgacctggctctgcaagggttgcagctgctgtctcagtggtctgctcacgttatggaggtctatagctggaagcttgtccatccaaccgataaatactcgaacaaagactgcccagatagcgccgaggagtacgagcgcgccacacggtataactacactagcgaggaaaaatttgctctggtggaggtgatagctatgataaaaggactgcaggtcttaatgggccgcatggagagcgtttttaatcacgccatcaggcacacagtctacgccgcattgcaagatttttctcaggtgaccttgcgcgaacctctgcgacaagctattaagaagaagaagaatgtcatacagtcagtgctgcaagcaatcagaaaaactgtctgtgactgggagaccggacatgaaccatttaacgacccggccctacggggcgagaaggatccgaagagcggatttgacattaaagtgccgcgccgcgccgtgggaccttccagcacacagctctacatggttcgcacaatgctggaatcccttattgccgacaagtccggctctaaaaagacccttagaagctcgctcgaaggccccaccattcttgatatcgagaagtttcaccgggaaagtttcttttatacacatctaatcaatttcagcgagactctccagcaatgctgcgacttaagccagctgtggttcagggaattttttctggagctgaccatgggcagacgcatccaatttccaattgagatgtcgatgccctggatccttacagaccatatcctcgaaactaaggaagctagtatgatggagtatgttctttactcactggatctttacaacgactcagctcattatgccctgacccgattcaacaaacagtttttgtatgacgagatagaggccgaggtgaatttatgtttcgatcaatttgtctacaaactagcagaccagatcttcgcttactacaaggtgatggccggatccctgctcctggacaagcgcttaagatccgagtgcaaaaatcagggcgccacaatccatttacccccatcgaaccggtacgaaacgctcctgaagcaacgtcacgtgcagctcttaggtagaagcattgatctcaatagactgatcacacaacgggtgtctgcagcaatgtacaaatctctggaactggctattggaagatttgagagcgaagacctgacgtccatcgttgagttagacggattgctggaaattaaccgcatgacccataagcttttaagtcgctatctaaccctcgacggctttgacgccatgtttagagaggccaaccataacgtgtctgcgccctacgggagaataacactccatgttttttgggagctgaactatgattttctccccaattattgttataatggaagtacgaatagattcgtgaggactgtgttaccattttctcaggagtttcagcgcgacaaacagccgaacgctcagccgcagtatctgcacggctcaaaggccttgaatctggcttacagcagtatctacggctcatataggaactttgtcggcccaccccattttcaggttatctgccgattactaggataccaaggaatcgcggtagtcatggaggagctgctcaaagttgtcaagagtcttctgcaaggaaccatattgcagtacgtgaaaactctgatggaagtcatgccaaaaatttgtagactgcctcgccatgagtacggaagcccaggcatcctagaattctttcaccatcagttgaaagatattgtggaatatgctgaactcaaaacggtctgctttcaaaatctccgggaagtgggaaatgcgatcctattctgcctattgatagaacaatccctctctctggaggaggtgtgtgacctgctacatgctgccccctttcaaaacatccttcctagagtgcacgtcaaggagggcgagagactggacgccaaaatgaagcggttggagtcaaaatacgccccccttcacctcgtgcccctcattgagcgcttgggcactcctcagcagatcgctatcgctcgggaaggagatctactgaccaaagaaaggctttgttgtgggctgtctatgttcgaagtgattctgactcgcatcaggtcatttctggacgaccccatctggcgtggccccctgcctagtaacggtgtcatgcacgtcgacgagtgtgtggagtttcatcgactgtggtctgctatgcagttcgtctactgcatcccggttggtactcatgagttcaccgtggaacagtgcttcggagatggcctgcactgggccggatgcatgattatcgtgcttctgggtcaacaacgtcgattcgccgttctggacttctgctaccacctgctaaaagtccaaaaacacgatgggaaagatgagattattaaaaacgtgcctctcaaaaaaatggtggagagaattcgcaaatttcaaatcctcaacgatgagataatcactatcctcgacaagtatctcaaaagtggcgacggcgaaggaacccctgtggaacatgtacggtgtttccaacctccgatccaccagtcccttgcgagttcatag

SEQ ID NO: 113774 - DNA, 486 bp, synthetic construct
  misc_feature 1..486: note = Description of Artificial Sequence: Synthetic coding sequence
  source 1..486: mol_type = other DNA
atggccgctcaagttactttggaagacgcactgagcaatgtggacctgctggaagagctgcccctaccagatcaacagccttgcattgagcccccgcccagtagcctcctataccagccaaactttaacaccaactttgaagatcggaatgctttcgtcaccggaatcgctaggtatatcgaacaggctacagtgcactcgtctatgaatgaaatgctggaggagggccaggagtacgctgtgatgctctacacgtggagatcttgctcccgggctatcccccaggtgaaatgcaacgagcagcccaatcgcgtggaaatctacgaaaaaaccgttgaggtgctggagcctgaggtcaccaagctgatgaattttatgtatttccagaggaatgcgatagagaggttctgtggggaggtgcgtagactctgtcacgcagagcgccggaaagattttgtaagcgaggcctacctcattaccttgtag

SEQ ID NO: 113775 - DNA, 456 bp, synthetic construct
  misc_feature 1..456: note = Description of Artificial Sequence: Synthetic coding sequence
  source 1..456: mol_type = other DNA
atggccgctcaggtcaccctcgaagacgcattatccaacgtcgatctactggaggagctcccgttgcctgatcagcaaccttgtatcgagcccccaccttcttcactgctgtatcagcccaacttcaatactaactttgaggataggaacgcgttcgttacggggatcgcacgttatatcgagcaggccactgtccacagctcaatgaatgaaatgctggaagaggggcaggaatacgccgtgatgctctatacgtggcgctcctgttctcgagccatcccccaggttaagtgtaacgagcagccaaatcgcgtcgagatctatgagaagaccgtggaggtactggagcctgaggttacaaaactgatgaactttatgtacttccaaaggaacgcaatagaaaggttctgtggcgaggtcagacgattgtgccatgcagagagaagaaaggattag

SEQ ID NO: 113776 - DNA, 3837 bp, synthetic construct
  misc_feature 1..3837: note = Description of Artificial Sequence: Synthetic coding sequence
  source 1..3837: mol_type = other DNA
atgaccacccacgtcacgctcgaggatgccctctctaacgtggacctgctcgaagaactgcctctgcctgaccagcaaccttgtattgagcctccgccaagttctattatgtatcaggctaatttcgatacgaatttcgaggataggaatgcattcgttaccggaatcgctcggtacatcgagcaggcaacagtgcacagcagcatgaacgagatgctggaagagggccatgagtacgccgtgatgctgtacacttggaggtcttgttcccgcgccatccctagagtgaaatgcaatgaacaaccaaaccgggtggagatatatgagaaaacggtggaggtactggaacccgaagttaccaaactgatgaagttcatgtatttccagagaaaagctattgagagattctgttcagaggtaaagcgcttgtgtcatgctgagaggaggaaagattttgtgtcagaagcgtacctgctgacactcgggaaatttatcaatatgtttgccgtcctggacgaactgaaaaatatgaagtgttctgtgaagaatgatcatagcgcctacaaacgggctgctcaatttcttcgcaagatggctgacccacagagcatccaggagagtcagaacctgagtatgtttttggccaaccacaatcggatcacgcagtgtctgcatcagcagctcgaagtaataccggggtacgaggagctgcttgctgacatcgtaaacatctgtgtggactattatgagaacaagatgtatctgaccccctctgagaagcacatgctgttgaaggtgatgggctttggcttatatctgatggacggcaacgtctcgaacatatataagttggacgccaagaaacgaattaacctatcaaagatcgataagttcttcaagcagttgcaggtggtgccactgtttggcgacatgcaaatcgagcttgcacgctatataaaaactagcgcacactatgaagagaacaaatctaaatggacctgtacccaatctagtatctccccccagtacaatatctgcgagcaaatggtccagatccgagacgatcacatccgctttatttccgaactcgctcgctactcaaacagtgaagtagtgactggcagcggcctggactctcagaagtctgacgaggagtatcgagagctcttcgaccttgctctccgtggccttcagttgctatcaaagtggagcgcccacgtgatggaggtatattcgtggaagttggtccacccaactgacaaattttgcaacaaagactgcccaggcacggctgaagagtacgaaagggctacccggtacaattacacttctgaagagaagtttgccttcgtggaagtgattgctatgatcaagggactgcaggtgcttatggggagaatggaatcagtctttaaccaggccatccgcaataccatttacgcggccctgcaggacttcgctcaagtgaccctgcgcgagcccctcagacaggccgtgcggaaaaagaagaatgtgttgatttccgttcttcaggctataagaaaaaccatttgcgactgggaaggcggccgcgaacctccgaacgacccctgtttgcgcggcgagaaggacccgaaggggggttttgatattaaagtgcccaggcgcgctgtaggcccttcgagtacccaggcctgtcaatggtcgccacgggccttgttccatcccaccggggggactcaggggagaagaggatgccggagcttgctttacatggtgaggacgatgcttgagtcattaatcgccgacaagagtggcagcaaaaagactctgcggtcttcccttgatggaccaattgtcctggcaatcgaagatttccacaagcagtctttcttttttacccacctgcttaatatctccgaggccctgcagcagtgttgtgacttgtctcagctatggtttcgcgagttctttctggagctaacaatgggccgtcgtatacaatttccgatcgagatgtccatgccatggattctcacggaccacattctcgagacaaaggagcccagtatgatggaatacgtgttataccctttggacctgtacaacgattcagcttactacgccttaacaaagttcaagaagcaattcctttacgatgagatcgaggcagaggtgaacctatgttttgatcagtttgtctacaagctggccgatcagatttttgcatactataaggcaatggcaggatccgtgctgctggataagcgcttcagagctgaatgtaaaaattacggggtcatcatcccgtacccaccatctaaccgctacgaaacgctgctaaaacagagacatgtacagttgttgggccgtagtattgatttaaacaggctgataacacaacgaatatcagcagcaatgtacaagtccctggatcaggccatatctcgctttgaatcagaagatctcacgagcatcgttgaacttgagtggctgctagagataaatagattgacccaccgccttctgtgcaagcatatgacacttgattcattcgacgccatgttcagggaagctaaccataatgtgtctgcaccatacggcagaatcactttgcacgtgttttgggaactgaactttgactttctcccaaattactgctataatggttctaccaacagattcgtgcggaccgccattcctttcactcaggaaccccagagagataagccagcaaatgtgcaaccttactatttgtacgggtccaaacctctgaacattgcgtattcacacatctacagttcttatagaaatttcgtgggtcctccccatttcaaaacaatctgccggttgctgggttaccagggcatcgcagtggtgatggaggagctgctgaaaatcgtcaagtccctcctgcaaggcactatcctgcagtatgttaagacactgatcgaggttatgcccaagatttgtcgtcttcccaggcatgagtacgggtctcctgggatcctagaatttttccatcatcagctgaaagacatcatcgagtatgcagagttgaaaaccgatgtgtttcaatcactgagagaagtggggaacgccatcctgttctgtctactcattgagcaagccctcagccaagaggaagtttgtgatctgttacacgccgccccctttcagaacatattgccacgggtgtacatcaaggaaggagagcggcttgaggtgcgcatgaagcgcctggaggccaagtatgcccccctgcacttggttccgttaattgagagactcggcacaccacaacagattgccattgcaagagagggggatcttctcactaaggagcgactttgctgcggtttgagcatgttcgaggtgatcctgacccggattcgcagctatctgcaggaccctatttggcgcggtccccctccaacaaatggtgtcatgcatgtggatgaatgtgtcgaatttcaccggctgtggtctgcaatgcagttcgtctattgcataccggtgggaacgaacgagttcacagcggaacagtgctttggggatggcttgaattgggctggttgctcaatcatcgtacttctcggacagcagcgccgcttcgatctgttcgatttctgctatcacttgctcaaggtccagcgccaagacggaaaggatgagataatcaagaatgtgccactgaaaaaaatggcggacaggattaggaagtaccagatactgaacaacgaggtcttcgctatcctaaacaagtatatgaagtccgtggaaactgactctagtacagtggagcacgtgcggtgtttccaaccgcccatacatcagtctctcgccaccacatgctag

SEQ ID NO: 113777 - DNA, 3762 bp, synthetic construct
  misc_feature 1..3762: note = Description of Artificial Sequence: Synthetic coding sequence
  source 1..3762: mol_type = other DNA
atgaccacccatgtcacactggaggatgcgctgtcaaatgtcgatctgctggaagagctccccctccccgaccagcagccatgtattgaaccgccgccatcatcaatcatgtaccaggccaattttgacacaaacttcgaggacagaaatgcattcgtgacagggatagcgcgctatattgagcaggccacagtccatagttctatgaacgagatgttagaggagggccacgagtatgcagtgatgctgtacacatggagatcatgttcccgggctatccctaaggtgaagtgtaacgagcagccaaatcgagttgaaatctatgaaaagaccgtggaagtgttggaaccggaggtgaccaagctgatgaagtttatgtactttcagaggaaagctatcgagcggttttgctcagaagttaagagactgtgccacgctgagcgtagaaaggacttcgtgtcggaggcatatctgctcactttgggcaagttcatcaatatgttcgccgtactggacgaactgaaaaacatgaagtgttcagtcaagaatgaccattccgcatacaaaagagccgcacagtttctccgcaagatggcggacccccaaagtattcaggagagccaaaacctttctatgtttctggcgaaccacaacagaattacccagtgcttgcaccagcagcttgaagtgatacccggttacgaggagctcctggcggatatagtcaacatctgcgtcgactactatgaaaataaaatgtacttgaccccttcagaaaagcacatgctgttaaaggtgatgggctttggcctgtatttgatggatggaaatgtctccaacatttacaagcttgacgcaaagaaaaggattaacctgtcgaagatcgacaaatttttcaagcagttacaggtagtgcccttatttggtgacatgcagatcgaactcgctcgctacatcaagacctctgcccattacgaggagaataagagtaagtggacctgtactcagtcttcgatctccccacaatacaacatctgcgagcagatggtgcagattcgtgacgaccatatcaggttcatttccgaactcgccaggtatagcaactccgaagtggtgactggatccgggctggactcccaaaagagcgacgaagaatacagagagctttttgatctagctcttcgcggattgcaactgctcagcaaatggtctgcacatgtgatggaagtatattcctggaagctcgtccatcctactgacaagttctgcaataaagattgccctgggactgccgaggaatatgagcgggccacccgctacaattacacgagcgaggagaagtttgctttcgttgaggtgattgccatgatcaaaggcctgcaggtgctaatgggaagaatggagtcagtattcaaccaagcaattcgtaataccatttacgcggctcttcaggatttcgctcaagtgacgctccgggaacctctgaggcaagctgtgaggaagaagaagaatgtgttgattagtgtgcttcaggctattaggaaaacaatctgcgactgggagggcggcagggagccccctaatgacccttgtctgaggggggaaaaagatccaaagggcgggttcgacatcaaggtcccccggcgtgcggtcggcccaagctctacacagctgtacatggtaaggaccatgctcgagagcctcatcgctgacaagtcaggctctaagaaaaccctgcgcagcagtttggatggacccatcgtgctggccatcgaagattttcataagcagtcatttttttttacacatttgctgaatatttcggaggccctccagcaatgctgtgacctctctcagctgtggttccgggaatttttcttagaattaactatgggccggcggattcaattccccatcgaaatgtccatgccgtggatcctcactgaccatatcttagagaccaaagagccatctatgatggaatacgtgctctatccactggacctgtacaacgatagcgcgtattatgctctaaccaaattcaaaaagcagttcctctatgacgagatcgaagctgaagtaaacttatgttttgatcagtttgtgtacaagctggccgatcagattttcgcctactacaaggccatggcaggtagcgtgctgttagataagaggtttagggcagagtgtaagaattacggagtgattataccataccccccttccaacaggtacgagaccctgttaaagcagaggcacgtgcagctccttggtcgatccatagacctcaaccgactgatcacacagcgtatttccgcagccatgtataaatccctcgaccaagccattagtcgcttcgagtccgaagacctgacatcgatcgtggagctggagtggctgctcgaaatcaaccgcctgactcaccggttgttatgcaagcacatgactctggatagcttcgacgccatgtttcgggaggcaaatcataatgtatccgccccctacggtcgcataacactgcacgtcttttgggagctcaacttcgactttttgccaaattattgttataatggttcaacaaaccggtttgttcgcaccgccataccatttactcaggaaccccaaagagataagcctgccaatgtccagccctattatctttacggctcaaagccccttaatattgcttactctcacatctacagtagctatcggaactttgtcgggccgccccactttaaaactatctgtcgcttgctgggctatcagggaatcgcagtcgtgatggaggagcttctgaagattgtgaaatctctactccagggcaccattctgcagtacgtaaagactcttatcgaggtaatgcctaagatatgtaggctgccaaggcatgagtacgggtccccaggaatcctggaatttttccaccaccagctcaaggacattattgagtacgcggagctaaagactgacgttttccaaagccttcgcgaagtgggaaatgccatcctgttttgccttctgatagaacaggcactttcccaagaggaagtgtgtgatctgttgcacgctgcaccttttcagaacattttgcccagggtgtatattaaagagggggagaggcttgaggtgcggatgaaacggctggaagcaaagtacgctccacttcatttagtaccactgatagaacgccttggaacgcctcagcagattgctatagcacgagagggagacctgttgaccaaagaacgcctttgttgtggcctttctatgtttgaggttatccttactaggatacgctcctatctgcaagaccccatctggaggggaccaccacctacgaacggggtaatgcacgtcgatgagtgtgtggagtttcatagactgtggagcgccatgcagttcgtgtactgcataccggttggaaccaatgagtttaccgctgaacagtgttttggtgatgggctgaactgggctggttgttccatcattgttttgctgggtcaacaacggaggttcgacttgtttgatttttgttatcatttacttaaagtgcagagacaggatggcaaagatgaaatcatcaagaatgtgccactgaagaagatggcagaccggattcggaagtatcagatcctcaataatgaagtcttcgccattcttaacaagtacatgaaatccgttgagactgactcatctactgtcgaacacgtgagatgttttcagcctccaatacaccagtctctggctaccacctgctag

SEQ ID NO: 113778 - DNA, 3762 bp, synthetic construct
  misc_feature 1..3762: note = Description of Artificial Sequence: Synthetic coding sequence
  source 1..3762: mol_type = other DNA
atgaccacacatgtcactctagaggacgccttgtccaatgttgacttgctagaagagctgccgctccctgatcagcagccctgcattgaaccacccccgtccagtattatgtatcaggcaaattttgacaccaatttcgaggatagaaatgccttcgtaacaggcatcgcgcggtacatagagcaagccactgtacactcctcgatgaacgagatgcttgaggaagggcacgagtatgcagttatgctctacacgtggcgatcctgttccagggctatccccaaggttaagtgtaatgaacaacccaatcgtgttgaaatctatgaaaagacagtcgaggtactcgaaccagaggtgaccaaactgatgaagtttatgtattttcagcggaaggccatcgaaaggttctgcagtgaagtcaagcgcctgtgtcatgcggaacggcggaaggattttgtgagcgaagcctatctgttgacacttggaaagttcattaacatgttcgctgtactggatgaactcaaaaatatgaagtgctcagttaaaaacgaccatagcgcatacaagcgggcggcacagttcctccgcaagatggccgaccctcaatctatccaagagagtcagaatcttagcatgttcttagctaaccacaacaggatcactcagtgtctacatcagcagctggaagtaattccagggtatgaggagctcctggccgatatcgtgaacatttgtgtggactactacgaaaacaaaatgtacctgactccgtcagagaagcatatgctgcttaaggtgatgggctttggcttgtatctgatggatggcaacgtctccaacatctacaagctggatgcaaaaaagcggatcaacctgtcaaagatagataagttcttcaagcagctgcaagtcgttcccttgtttggagacatgcaaatcgaactcgcccggtacataaagacgagcgcacattacgaagaaaacaagagtaagtggacctgcacccaaagcagtatatctccccaatacaacatctgcgaacaaatggtgcagatccgagacgaccacatacgctttatctccgagttggccagatactccaacagcgaggtggtgacgggcagcggtctggactctcaaaagtccgatgaggagtacagagaactttttgacttggccctgagaggcctgcaactgctgagcaagtggagcgctcacgtgatggaggtttactcatggaaactggtgcacccgaccgataaattctgcaacaaagactgtcctggcacagcagaagagtacgagcgggcgacacgatacaattatacctcggaagagaagttcgcttttgtcgaggtgatcgcgatgatcaagggactacaggtcttaatggggcggatggaatctgtatttaaccaggcgattcggaacacaatctatgcggccctgcaagattttgcacaggttaccctgcgggaacctctcaggcaggccgtacgcaagaagaagaatgtactaatctcagtgctgcaggctatccgcaagactatctgcgattgggaaggcggtcgtgaaccaccgaacgatccctgtctgaggggcgaaaaagaccctaaaggggggttcgacattaaggtccctaggagggcggttggacctagctctacacagctgtatatggttaggactatgctggagtctttgatcgcggataagtctggatccaagaagactctccggagctcactcgacggtccaattgtgctggccattgaagattttcacaaacagtccttcttctttacacatttgctgaatatatcagaagccctccagcagtgttgcgatctgagccagctttggttccgcgaattttttttggagctcaccatgggaagacggatacaatttcctattgaaatgagtatgccttggatcctaacggatcacatcctggagacaaaggagccttcaatgatggagtatgtgctctatccactggacctttacaatgattcagcatactacgctctgactaagtttaagaaacagtttctttacgacgagatcgaggcagaagtgaatctgtgcttcgaccaatttgtgtataagctggcagaccagatattcgcctactacaaggcgatggccggaagcgtactacttgataagcgctttcgcgcagagtgcaagaactacggcgtaattattccctaccctccatccaatagatacgagacactgctgaaacagaggcatgtgcagctcctgggccgtagcattgacctcaatcggctgatcacccagcgaataagcgcagctatgtacaagtctctcgaccaggcaattagccgatttgagagcgaggacctcacaagcatcgtagagttggagtggttgctggagataaaccgacttacccacaggctgctctgcaagcacatgacactcgattcattcgatgccatgttcagagaggccaatcacaatgtaagcgcaccttacggaaggataacactccacgtattttgggagctgaattttgactttctgcccaactactgttataatgggagcacaaatagattcgtgcgcaccgccatccccttcacccaggaaccacagcgagataagccagccaacgtacaaccctattacctgtatggtagtaagcctctgaacatagcctattctcacatttatagctcttaccgcaacttcgtgggccctcctcattttaaaaccatttgccgactactgggctaccaaggcattgcggtcgtgatggaggagttgctgaagatcgtgaaatctctgctgcagggcaccattttgcagtacgtgaagaccctgattgaagtgatgcctaagatctgtagactgccaaggcatgagtacggcagccccggaatccttgagttcttccatcatcagctcaaagatatcattgagtacgccgagttgaaaacagacgtattccagtctcttcgagaggtcggcaatgcaattctgttctgcttacttatcgaacaggctctgagccaagaggaggtgtgcgatctcttgcatgccgcccccttccaaaacatcctcccgagagtgtacatcaaagagggtgagcgcctggaggtgaggatgaagaggctggaggccaaatacgctcctttacatttggtaccgctgattgaaagattaggtacaccacagcagatagcaatcgcaagggagggggatctgttgacaaaggagagactgtgctgcggtctgagtatgttcgaggtgatccttacaaggatccgcagctatctccaggaccccatttggcgcggccccccaccaacaaatggagtgatgcacgttgatgagtgcgtggagtttcatcgactgtggagcgctatgcagttcgtgtactgtatccctgttgggacaaacgaatttacagctgagcagtgcttcggagatggacttaactgggccggctgctccatcattgtgctgctgggtcagcagagacggtttgatttgtttgacttctgctatcatctgctgaaagtacagcgccaggatggaaaagatgaaattatcaaaaacgtacctctcaagaagatggctgacaggattcgtaaataccagatcctgaacaatgaggtcttcgcgatactcaacaagtatatgaaaagcgttgagaccgacagcagcaccgtggaacatgtgagatgcttccaaccccctatccaccagagcctcgctacaacttgttag

SEQ ID NO: 113779 - DNA, 2859 bp, synthetic construct
  misc_feature 1..2859: note = Description of Artificial Sequence: Synthetic coding sequence
  source 1..2859: mol_type = other DNA
gagaaacggcgccgctggacctgcacccagagtagcatttctccccagtacaatatttgcgagcagatggtgcagatccgagacgatcacatccgatttataagcgagcttgcccggtactctaactctgaagtcgtaaccggatccggattggattcacagaagtctgacgaagagtacagagagctcttcgatcttgcgctgcgcgggttgcagctgctgtcaaagtggtcagctcatgtgatggaagtgtactcctggaagcttgtacacccaactgataaattttgtaacaaggactgtcccggtacggccgaggagtacgagagggccactcgctacaattatacttccgaggaaaaattcgcatttgtggaggtaatcgctatgattaagggccttcaggtactcatgggaaggatggagagcgtgttcaaccaggctatccggaataccatctacgccgcgcttcaggatttcgcccaagtcactctgcgagaaccgttaaggcaagcagtccggaaaaaaaagaatgtccttattagtgtgctgcaggcaataagaaagaccatttgcgattgggagggcggacgagagcctccaaatgatccatgcctgcgcggggaaaaggatccaaagggcggatttgatatcaaggtgccaaggcgtgccgtagggccatcttccacacaggcctgccaatggagtccacgcgctctgtttcaccctacggggggaacacagggccgcaggggctgccgaagccttctgtacatggtaaggacaatgctggagtcactcattgccgataagtctgggagtaagaagacgctgaggagctcactggatggacccatagttctggccattgaagactttcacaagcagagtttctttttcacccatctacttaatatcagtgaggccctccaacagtgttgtgacttgtcccagctgtggtttcgggagttctttttagagctcacgatgggccgacggatccagtttcccattgagatgagcatgccctggatactcaccgaccacatactcgagactaaagaaccatcaatgatggagtatgtcttatacccactcgacctatacaacgactcggcctattatgcactcacaaagttcaagaaacagtttctttacgatgaaatcgaggccgaagtgaacctgtgttttgatcagtttgtgtataagctcgcagaccaaatctttgcctattataaagctatggccggtagtgtgttgctggataagcgatttagagctgagtgtaagaattatggcgtcattattccgtaccccccttccaatcggtacgagacactcctcaagcagagacacgtgcagctgttgggcaggtccattgatcttaatcgcttaatcactcagcgtattagcgcagccatgtataagagtctcgaccaagctatatccagattcgagagcgaggatctgacatcgattgttgaactggagtggttgctggagatcaaccgcttgacgcacaggttgctgtgcaagcacatgacgcttgactcttttgacgccatgttccgggaagccaatcacaacgttagcgctccctacgggagaatcactctccacgtgttctgggagcttaactttgattttctccccaattattgctataatggaagcacgaacagattcgtacggactgccataccattcactcaagaaccgcagagggataaacctgcaaacgtgcagccctactatttgtatgggagtaagcctcttaacatcgcctactctcatatttactcaagctaccggaactttgttgggccaccgcatttcaagactatctgcaggctgctgggctaccagggaatcgccgtagtgatggaggagctcctcaaaatcgtcaagtcactcctgcagggcacaatcttgcagtatgtcaagacacttatcgaggttatgcctaaaatatgccggttacctcgccatgagtacggatcacccggaatcctggaattcttccatcaccagctgaaggacattattgaatatgctgaactaaagaccgatgtgttccaaagcttgcgggaggtcggaaatgcaatcttgttttgcttattaatcgagcaggctctatctcaagaggaagtgtgcgacttgctccacgcagctccattccaaaatattctgccacgcgtgtatattaaggagggtgagagactggaggtgcggatgaagagactcgaagccaagtacgctcccctccatctggtgccgctgattgagagactcggcactccacagcagattgctattgccagggaaggggacctgttgaccaaggaaagactgtgctgtggcctgtccatgtttgaggtaatccttacgcgcatacgctcctatctccaggaccccatatggagaggacctccacctacaaacggggtcatgcacgtagatgagtgtgtcgagttccacaggctgtggtctgccatgcagtttgtgtactgtattcctgtggggacaaacgaatttacagccgagcagtgcttcggggatggcctcaactgggccggatgctccatcatcgtccttctggggcaacaacgtagattcgatctgtttgatttttgctaccatcttctgaaggttcaacgccaggacggaaaagatgagattataaagaatgtgcccctcaaaaagatggcagacaggatacgaaagtatcagattctgaataacgaggtcttcgcaatcttgaacaaatacatgaagtctgttgaaacagactcttctaccgttgagcacgtacggtgcttccagcccccgatccaccaatctctcgctacgacttgctag

SEQ ID NO: 113780 - DNA, 651 bp, synthetic construct
  misc_feature 1..651: note = Description of Artificial Sequence: Synthetic coding sequence
  source 1..651: mol_type = other DNA
atggcaggtagtgtcctcctggataagcgatttcgggccgagtgcaagaactacggagtgattattccctatccaccatctaacaggtacgaaaccctgctcaagcagagacatgtgcagctgcttggcaggtcaattgatctcaacaggctgatcacccagcggattagtgccgccatgtacaagtctcttgaccaggccattagccgatttgaatcagaagacctgacatccatagtcgagctcgaatggttactcgagatcaaccgattgacccataggctgttgtgcaaacacatgacgctcgactcctttgatgccatgttccgggaagctaatcacaatgtgtctgcgccgtacggccgcatcaccctacacgtattttgggaattgaactttgactttctgccaaactattgttacaacggatctaccaaccgctttgtaagaaccgcttctttccatccccgcacaacaactcgacagacatgtcagaggcctgcactgctccctctgtggatccaggccagccagcattgcctacagccccatctacagctgctccaagaattcaggggcgctacaagtttccaggactatgcagacagctgggtgatccgtgcgagtctctggagttggcgaaattgctag

SEQ ID NO: 113781 - DNA, 3537 bp, synthetic construct
  misc_feature 1..3537: note = Description of Artificial Sequence: Synthetic coding sequence
  source 1..3537: mol_type = other DNA
atgaccacccacgtgaccctggaagatgcgctaagcaacgttgatctgctggaggagctaccattgccgaacgagcagcctaaccgagtggaaatttacgagaaaacagtagaagtgctcgaacccgaggtgaccaagcttatgaaatttatgtattttcaacgaaaagcgattgaaaggttctgtagcgaagttaagcgtttatgtcacgcggaacggagaaaggatttcgtgagcgaggcatatctgctgacgctaggcaaattcataaatatgttcgcggttctggacgagctgaagaatatgaagtgttcagttaaaaatgatcactccgcatataagcgcgccgcccaatttctgcgcaagatggccgatccgcagagcattcaagagtctcaaaacttgagcatgtttctggcaaaccacaatcgcattacgcagtgcctccatcagcagctagaagtcatcccagggtacgaggagctgcttgcagacatcgttaacatttgcgtggactattacgaaaacaaaatgtacctgaccccctccgaaaaacatatgttgctgaaggttatgggctttggtctgtatttaatggacgggaacgtgtcaaatatttacaagctggatgctaaaaaacggattaaccttagcaaaatcgataagttttttaagcagctgcaggtcgtgccactctttggcgacatgcagatcgagttagctcggtatattaaaacgtctgcacattacgaggagaataagagcaagtggacgtgcacacagtcatccatttcaccgcaatataacatatgcgaacaaatggtccagatccgcgacgatcacattaggtttatctcagagctcgccagatattcgaactcagaggtggtgacaggatccggacttgatagtcagaaatcggacgaagagtaccgtgaactgttcgatctcgcccttagaggattgcagctgttgagcaagtggtcagcccatgtgatggaggtctactcctggaaactagttcaccccacagacaagttctgtaataaggactgcccaggaactgctgaagagtacgagagagctacacgctacaactacacatccgaagagaagtttgcttttgtagaggttattgccatgatcaaggggctccaggtgctcatgggtaggatggaatcggtgtttaaccaagcgatacgcaatacgatttatgccgccctgcaagatttcgcccaagttacactccgcgaaccgttgaggcaggccgtccggaaaaaaaaaaacgtgctgatctccgtgctccaagccattcggaaaacaatttgtgattgggagggtggtagagaacctccaaacgacccctgtctcagaggagagaaggacccaaaaggaggattcgacataaaggttccccgccgggctgtgggccccagctctacccagctgtatatggttagaactatgctggagtcccttatcgcagacaaatcggggtccaagaaaactctccgcagtagtctggatggacccatagtcctcgcaattgaggactttcacaaacagtcattcttcttcacccatctgctcaatatcagcgaagctctgcagcagtgctgtgacctcagccagttgtggtttcgcgaattcttcctcgaactgaccatgggacgcagaatacaatttcccatagagatgagtatgccatggatcctgactgaccacattctggaaactaaagaaccctcaatgatggagtacgtcttatacccacttgacctttacaacgatagtgcatattacgcactgacaaaattcaaaaaacaatttctgtacgatgagattgaggcggaggtaaacctgtgttttgaccagttcgtatataagctggctgaccagattttcgcatactacaaagcaatggcagggagtgtgctgctggacaagagatttagagccgaatgcaaaaactatggagtgattattccgtatccaccaagtaatcggtacgagacccttctcaagcagaggcacgtgcagctgctggggcggtcgatcgacctgaatcggcttatcacgcagcgcatctccgctgcaatgtataaatcgctcgatcaagctatcagcagattcgaaagcgaagacttgacaagtatagtcgaactggaatggctgctggaaatcaaccgcttgacccacaggctgttgtgtaagcacatgacccttgacagttttgatgccatgttccgagaagctaatcacaacgtttccgctccctatggcagaattaccctacacgtcttttgggaactaaacttcgactttctccctaactactgttacaatggtagcactaatagatttgtgcggaccgctatccctttcacccaggaaccccagagagacaaacccgcaaatgtgcagccatactatctgtatggctccaagcccttgaacattgcttattctcatatctacagctcatatcgcaacttcgtcgggcccccccactttaagacaatctgtcgcctcttgggctaccagggtattgccgtggtcatggaggaattacttaagattgtaaaatcactgctgcaggggactatacttcaatatgtgaaaacactgatcgaagtgatgcctaagatttgtcgtcttccaagacacgaatatgggagcccagggattcttgaatttttccatcatcagttgaaagacattattgagtatgctgaactgaagacagatgtgtttcagtctttaagagaagtgggcaacgcaatccttttttgcctcctgatcgaacaagctctctcccaggaggaagtttgtgatcttctgcatgcagcccccttccagaacattcttccaagagtgtacattaaggaaggagagagattggaggtgcgcatgaagagactggaagccaaatatgcccctctccatctggtccctctgatcgaacgcctcggcaccccacagcagatcgccattgcacgggagggagatctgctgactaaagagcggctgtgctgcggcctgtccatgttcgaggtgattctcacccgcatacggtcctaccttcaggatccaatctggaggggtccgcctcctacgaacggcgtgatgcatgtggacgagtgcgtggaattccatcgcctgtggtcagccatgcaattcgtctactgcatccctgtggggacaaacgagttcactgccgaacagtgctttggggatggtctgaactgggctggctgctcaatcatagttctgctaggacaacagcggcgctttgacctgtttgacttctgctaccaccttctgaaggttcagcgccaggacgggaaggatgaaattataaagaatgtgcccttgaaaaagatggccgatcgcatcagaaagtaccagattcttaacaatgaggtgtttgccattttaaacaagtacatgaagtctgtcgagaccgattcctctacagttgaacacgtgaggtgcttccagccacctattcaccagtcactggcgacaacatgctag

SEQ ID NO: 113782 - DNA, 4617 bp, synthetic construct
  misc_feature 1..4617: note = Description of Artificial Sequence: Synthetic coding sequence
  source 1..4617: mol_type = other DNA
atggaaccccgcatggaaagttgcctggcccaggttctgcaaaaagacgtgggcaaaaggctccaggtaggccaggaactaatagattacttctccgataagcagaaatccgcagaccttgagcacgaccagactatgctcgacaagcttgttgatggcttagctacgtcatgggtcaacagctcgaattacaaagtggtgctgttgggtatggacatcctgagtgcactggtgaccaggctccaggacaggttcaaggcccagatcgggacagtgctgccctcactgatcgacaggctgggggatgcaaaggattccgtcagggagcaagaccagacgcttttacttaaaataatggatcaagctgccaacccgcagtatgtatgggatagaatgctggggggatttaagcataagaattttaggactcgggaaggcatctgtctttgtctgatagcaaccctgaatgccagcggcgcacagaccctaactctctctaagattgtccctcatatatgcaatctgctcggagatcccaatagccaggtccgcgatgccgccatcaacagtctggtggagatctatagacacgtgggagaacgtgttcgggctgacctgtcaaaaaagggactcccccagtcgcgtctgaacgtgatattcacaaagtttgatgaggttcagaagtccggaaacatgattcagagtgctaacgacaagaatttcgatgatgaggattcagtggatgggaataggccgagcagcgcatcatccacctctagtaaagccccaccttcttctcgcaggaacgtgggcatgggtacaactcgacggctcggcagctccaccctggggagcaagagtagcgccgccaaggagggcgcaggagcggtggacgaggaagactttataaaggccttcgacgacgtccccgtagtacaaatttatagctcacgagacttggaagaaagtattaacaagattcgggaaatcctaagcgacgataaacacgattgggagcagcgagtaaatgcactcaagaaaattaggtcccttctgctggcgggagccgccgaatatgacaatttcttccagcacctcaggctcctcgacggagccttcaaactcagcgctaaggatttgaggtcccaggtcgtccgggaggcctgcattacactgggccacctgtcctcagtgctcggaaacaaatttgatcacggcgccgaagcgattatgccaacaatatttaacttgatccccaatagcgctaaaataatggccacatccggggtggtggccgtacgcctgattattcgtcatacacatataccaaggctgattcctgtcatcactagcaattgcacgtcaaagtctgtcgcagtgagacgccgatgctttgagttcctcgacctgctgcttcaggagtggcagacacacagcttagagcgccatatcagtgtcctggcggaaaccatcaagaagggtattcacgacgcagattctgaagcaagaatcgaggccagaaagtgctactggggttttcacagccatttttctagagaagccgagcacttgtaccacacgttggaatcttcgtaccaaaaggcattacaaagccatttaaaaaattcagattccatcgtgtcattgccgcaatctgacaggtctagctctagcagtcaggaatctttaaacaggcccctctctgcaaaacggtcacccacaggatcaacgacttcacgggcttccaccgtgagtacgaaatcagtctctacaacggggagtctgcagaggagcaggtccgatatagatgtgaacgctgccgctagtgccaaatccaaggtatcttcaagctcaggaacaacccccttctcttctgcggcagctctgcctcccggctcttatgcttctctcggacgcatcagaaccaggagacagtctagcggctcagccactaacgtggccagtactccggacaatcgtggacggtctcgcgcaaaagtggtgtcgcagagtcagcgaagtagaagtgccaatcccgcaggagccggttccagaagttcctcaccggggaagctgctcggttcagggtatggggggctgacaggcgggtccagccggggtcctccagtgacaccttcctctgagaaacggtccaaaattccccggtcacaaggatgtagccgggagacatccccaaaccggatcggtctggcaagaagctccaggatcccaaggcccagcatgagccagggttgttcaagggacacgtcgcgcgagtccagcagggatacaagccctgcccgtggattcccccccctggatagattcggtcttgggcaacccggtcggatccccggaagcgtgaacgccatgcgcgtgctttccacctctactgacctggaggcggctgtggcagatgcattgaaaaagccagtcaggcggagatacgagccatacgggatgtattctgatgacgacgccaatagtgatgcctcctcagtgtgctcggagcgcagctacggatcacggaatgggggtattccacactacctacggcagactgaggatgtcgctgaggttctaaatcactgtgctagttcgaactggtcggaacgtaaagaagggcttcttggcctgcagaacctgctgaaatctcagagaacactttcaagggtcgagttaaagcgactttgcgagatttttactcgcatgttcgcagacccacactctaagagggtctttagtatgtttctcgaaacccttgtcgacttcattattatacataaggatgaccttcaggattggttgttcgttcttctcacccagctcctaaagaaaatgggggctgatctgcttggcagcgtgcaggcgaaggttcagaaggcattagacgtcacccgtgactcattcccgttcgaccagcagtttaacatattgatgcgcttcatcgtagaccagactcagacgcctaacctgaaggtgaaagtggccatcctcaagtacatcgaatcacttgctagacagatggatcccacagattttgtcaattccagcgagaccagactggccgtctccaggattatcacgtggacaacggaacctaagagttctgacgtccggaaggcggcccagattgtgctcatttccctgttcgaattaaacacaccagaattcacaatgctgcttggggcattgcctaaaacctttcaggatggcgctactaagttgttacacaatcacctgaagaatagtagtaatacatcagtgggatcgccatcaaatacaatcggaaggacaccatctagacatacttcaagccgcacatcccctcttacttccccaactaattgtagtcacggtgggcttagcccatccagactctggggttggtcggcggacggtctcgccaagcatcccccgcccttctcccagcccaacagcatccctactgcaccatcccacaaagccttgcgacgctcctatagccctagtatgctagattacgatacagagaacctcaatagtgaggaaatatacagcagtctgcgtggcgtaactgaggctatcgagaaattcagttttcgcagtcaggaagatctgaatgaacctattaagcgggacggcaaaaaagagtgcgatattgtttctagggacggtggcgctgcctcccctgcgacagaaggccgcggagggtcagaggtcgaggggggaagaacggctctggacaacaaaacctcactgttaaacacacaacccccccgggcttttcctggacctagagcacgggactacaatccctacccatacagcgacgccattaatacgtacgacaaaaccgcccttaaagaagctgtctttgatgacgatatggagcagctccgggatgtgcccattgaccactccgacttggtggcagacttgcttaaggagctgtctaaccataacgaaagagtagaagagcggaagggggccctgttggaactgctgaaaattactcgcgaagatagtctcggcgtgtgggaggagcacttcaaaaccatcctcctcctactgctggaaacacttggcgataaggatcactccattagagctctggcactgcgagtgctgcgcgagatccttcgcaatcagcctgcccggtttaagaactatgcggaacttaccattatgaagactttagaggcgcataaagatagccacaaagaggtggtgcgggctgccgaagaagctgccagcaccctggcaagttccattcaccccgaacagtgtatcaaggtgctgtgtcccataatccagaccgcagactaccccatcaatctcgccgctatcaagatgcagacaaaagttgtcgagaggatcgccaaagaatcccttttgcagctcctggtcgacattatccctggccttctccagggttatgataacaccgagtcctccgtgagaaaagcttctgttttttgtctggtcgctatttactctgtcatcggtgaggatctgaaaccacacctggcacaattaaccggctccaagatgaagctgctgaacctctacataaaacgagcgcagaccacaaactcaaatagcagttcttcctcggacgtctccacacacagttag

SEQ ID NO: 113783 - DNA, 4437 bp, synthetic construct
  misc_feature 1..4437: note = Description of Artificial Sequence: Synthetic coding sequence
  source 1..4437: mol_type = other DNA
atggaaccgcggatggaaagctgtctcgcacaagttctccagaaggatgtgggcaagaggcttcaggttggacaggaactaatcgattatttctccgacaagcaaaagtcagccgatctggaacatgatcaaaccatgctggataaattggtggacggtctggctacctcttgggttaactcatcaaactacaaagtggtactgctgggtatggatatcctctcagccttggtcacccgtttacaggatcgatttaaagcccaaattggcacagtgcttcccagccttattgacagactgggggacgctaaagacagtgtacgtgagcaagatcagactctgctactcaaaattatggaccaggccgctaacccgcagtatgtatgggaccgtatgctcggcggattcaaacacaagaactttaggaccagagagggaatttgcttgtgcctaatagcgacactgaacgcctccggtgctcagacactcacgctgtcaaagatcgtgcctcatatatgtaatctcttgggcgatcccaactcccaggtgcgggacgcagccatcaactctctcgtcgagatctaccgacacgtgggcgaacgggtgagagccgacctgtctaaaaaaggattgcctcaatcccggcttaatgtcatcttcactaaattcgacgaggtgcaaaaatccgggaatatgatccagtcagccaatgataagaatttcgacgatgaggacagtgtggacggcaatcggccctcatcagcaagttctactagtagtaaagcgcctccttcatctcgccgtaacgttggcatgggaaccacaaggaggctgggttcatccactttaggaagcaagagttctgcagcaaaggaaggcgcgggtgccgtggacgaggaagacttcataaaggcatttgacgatgttcccgtggttcaaatatatagtagtcgggatctggaagagtctattaataagattcgcgaaatcttgagtgatgataagcatgactgggaacagcgggttaacgcacttaagaagatccggagcctgcttcttgcaggagccgccgagtatgacaatttcttccaacatttacggctactggacggcgccttcaagctgagtgcgaaagacctaagatcgcaggtcgtgcgagaagcttgtattacactgggccatttatcttctgtcctggggaataagtttgaccacggggccgaggcgattatgcccacaatctttaatctaattcctaactctgccaagattatggctacgagtggtgtggtggctgttcgtcttatcatccgccatacccatattccgaggctcatcccagtgattacaagcaattgcaccagcaaaagtgtggcagtgaggagaaggtgctttgagtttcttgacctcctgcttcaagagtggcagacacactctctggaaagacatatttcagtgctggcagaaacgatcaagaaaggcatccacgatgccgacagtgaagccaggattgaggcccggaagtgctactgggggtttcattcacacttttccagagaggcagagcatctctatcacaccctggaaagttcctatcagaaggctctccaatcacacctaaagaactctgattccattgtgagcctcccgcagagcgatagatcatctagcagtagtcaagagagccttaatcggcctttgtccgccaaaagaagtccaaccgggtctactactagccgggcaagtacagtatctacgaagtcagtgtctactactgggagcttgcagaggagtcgctctgatattgacgtcaacgccgccgccagcgcaaagagcaaagtttctagtagctcaggaacgaccccattctcttcagcggccgcactccccccgggttcttacgctagtctggacggcacgactaccaaagctgaaggcaggatcagaacaaggcgtcaatcgtccggttctgcaaccaacgtggcgtccaccccagacaatcgggggagatctagagccaaggtggtgagtcagtcccagaggagccgctcggcaaatccggcaggcgctggctctaggtcttccagcccaggtaaactgctggggagcgggtacggcggcctgaccggcggaagtagccgggggcccccagtcacaccctccagtgaaaagaggtccaaaattcccaggagccaaggctgcagcagagagaccagccccaatcgaattggcttagatcggttcggcttgggccaacccggaagaattccagggagcgttaacgctatgcgcgtgctgtctacgtcaacagacttggaagccgcggtggccgacgcgcttttactgggagatagccggagtaagaagaaaccagtgcgtaggaggtacgagccctatggcatgtactcagacgatgatgccaatagtgatgcctctagcgtttgttctgaaaggagttacggttcccggaacggggggattccgcactacttgcgacagaccgaggatgtggcggaggtgctaaatcactgcgcatcttctaactggagcgagcgcaaggagggacttttgggtctgcagaacctcctcaagtcacaacggacgctctccagggtggaactaaaacgtctctgcgagatatttactagaatgtttgccgatcctcacagcaaggtcttttctatgtttctggagacactggtcgattttataatcattcataaggatgacctgcaagattggctctttgtgctgctgacccagttgctcaagaaaatgggagcagatctcctcgggagtgtgcaggccaaggtgcaaaaggccttggacgttactagggactcatttcccttcgatcagcagtttaatatactaatgagatttatcgtcgatcagacacagacacccaatctcaaagtgaaggtcgccattctgaaatatattgaatctcttgcccgtcaaatggaccccacagacttcgtgaactcctccgaaacccggctggctgtgagcaggatcatcacctggaccactgaaccaaaatcctctgatgtgaggaaagccgcccagattgtgctgatctctctgttcgagttgaacacacctgaattcaccatgctgctgggcgccctgccaaaaaccttccaggacggcgcgacgaaactgttgcacaaccacctgaaaaattcaagcaatacttcagtgggttccccctccaacactattggcagaacacctagccgacacacatcttcaaggacctccccattgacatcccctacgaattgttcccatggaggcctctcaccgtcaatgttagactacgacacagaaaatctgaactcagaggaaatttactcctctctgaggggggtgaccgaggccatcgagaagtttagctttcgctctcaggaggatctcaatgagcctattaaaagagatggcaagaaggaatgcgatatcgtttcccgggacggcggagcggctagccctgcaaccgagggtaggggcggaagcgaggtggagggtggccggacagccctggacaacaaaacaagcttactgaacactcagccacctagggcattccccggaccaagggctcgcgattacaacccttatccctattccgacgccatcaacacgtacgacaagaccgcacttaaggaagctgtgttcgatgatgacatggaacaactgcgtgatgttccaattgaccacagcgatctggttgctgacctgcttaaagaacttagcaatcataacgagagggtggaggagcgtaagggggccctccttgaactgcttaagattacaagggaggacagcttaggagtctgggaagagcacttcaagaccattcttttgctgctactcgaaaccttgggtgataaggatcactcaattcgtgctctcgccctccgggtgctccgtgagattttgaggaaccagcccgcccgcttcaaaaattacgccgagctcacaatcatgaaaacgctcgaagctcacaaggactcacacaaagaggtggttagggccgccgaggaagcagccagcacgctggcctcatctatccatccggaacagtgcataaaggtcctctgtccgatcatccagaccgcagattatcctattaacctcgccgccataaagatgcaaactaaagtcgtggaaagaattgccaaggaaagtctcctccaactgctggttgacattatcccgggcttacttcagggctacgataatactgaatcaagtgtgcggaaggcttccgttttctgtcttgtggccatctatagcgtcatcggggaggacctgaaacctcacctcgcacagctgaccggttccaaaatgaagctcttgaatctatacattaagagggcgcagaccaccaactccaacagctcctcctcgtccgacgtgtccacccattcatag

SEQ ID NO: 113784 - DNA, 4416 bp, synthetic construct
  misc_feature 1..4416: note = Description of Artificial Sequence: Synthetic coding sequence
  source 1..4416: mol_type = other DNA
atggagccccgaatggaatcttgtctcgcccaagttctccagaaagatgtgggaaaaagactgcaagttggccaggaactgatcgactatttttcagataaacaaaaaagcgctgatcttgagcacgatcagacaatgctggataaactcgtcgatgggctggctacatcctgggtcaactccagcaattacaaggtagtgttgttgggcatggatattttgagtgctttggtgacacggcttcaggaccggtttaaagctcagatcgggacagtgctgcccagtctgattgaccgccttggcgacgccaaggatagcgttagggagcaggatcaaactctacttttgaagattatggaccaggccgccaaccctcagtatgtgtgggaccggatgctaggcggatttaaacacaagaactttaggacccgggaggggatttgtctgtgcctgattgccacgctgaacgcatccggggcgcaaacactaacactctccaaaatcgtgccgcatatttgcaacttacttggggatccgaatagtcaggtgcgcgacgctgctataaattccctggtggaaatttatcgccacgttggagagcgtgtgagggccgatctatctaagaagggactcccccagagccgactgaacgtcatttttaccaagtttgacgaggtccagaaaagtggtaacatgatacagtcagccaacgataagaactttgacgatgaggacagcgtagatggaaaccggcccagctccgccagcagcacttccagcaaagccccccccagctccagacgcaacgtgggaatggggactactagacgcttgggatcctcaacactggggtccaagtcatctgcagctaaggaaggcgctggcgccgtggatgaggaagactttataaaggcttttgatgacgtgcctgttgtgcagatttacagctctcgcgacctggaagagtctataaataagattcgggagatcctttccgatgacaaacatgactgggaacagagagtgaacgccttgaagaaaatccgcagcctcttgctggctggggcagctgagtatgataatttctttcaacatctcagactcctggacggggcattcaaactgtcagctaaggacctaaggagtcaggtggtgcgggaagcctgtattacattagggcatctatcttcagtgctgggaaataagtttgaccacggcgccgaggcaatcatgcctaccatttttaatctgatcccaaactctgcaaaaattatggcaacctctggtgttgtggccgtgcggctgattattcgccacacgcacatccccaggttgatccccgtgatcacatccaattgcacaagtaaatccgtcgcagtcagaaggcggtgcttcgaattcctggatctgctcttgcaggagtggcagacccactcactggagcgccatatatcagtgcttgccgagactattaagaagggaattcacgatgccgactccgaggctcggatagaagctcgcaaatgttattgggggttccacagccatttctctagagaagcagagcacttatatcacaccttggaaagcagctatcagaaggccttgcagtcccacctgaagaatagcgactctatagtgtctctgccccagtctgatcggtcttcctcttcctcccaagaaagcctaaatcgcccgctctccgccaagagaagtcctacaggtagtacaactagcagagcatcgactgtgtcaactaaatcagtctcgacaacagggagcctgcagagaagccgatccgatatcgacgtgaatgccgctgcaagcgccaaatccaaagtaagtagttcctctggaactacgcccttctcctcagccgctgcactgccacctggctcatatgcgtccctgggcagaatccggacacggagacaatcaagcggatctgccacaaacgtggcatccaccccggacaatagaggcaggagtagggccaaagtggtaagccagagccagcgcagcagatcggcgaatccagccggggccgggagtagatccagctcccccggcaagctgctgggcagtggctacggcggactcactggcggcagctcacgggggcccccggtcacccccagctcggagaagcggagtaaaattccaagaagccaaggatgtagcagggaaactagcccgaaccgtattgggctcgataggttcgggctaggtcagcccgggagaattccaggctccgtgaacgccatgagggtcttatccaccagtacggacttggaggctgctgtggcggatgccctccttctgggtgactcaagatccaagaagaagcccgttcgaagaaggtatgaaccctatgggatgtactcagatgatgatgctaactctgatgcaagctccgtgtgctcagaaagatcctatgggtctcggaatgggggcatcccccactatctgcgccagaccgaagatgtagcagaggttctgaatcactgtgcgagctcaaactggtcagaaagaaaggagggactgctgggcctgcagaatctgctcaagagccagcgcacgttgtctcgagtggagctgaagagactttgtgagatctttaccaggatgttcgcagacccacattctaagctagtgttttctatgttccttgagacgctcgtggattttattatcatccacaaggacgatctgcaggactggctctttgtgttgctgacccagctgctgaaaaagatgggtgccgatctccttgggagtgtgcaggccaaggtgcagaaggccttggatgttaccagagactccttcccctttgaccaacagtttaatattctgatgaggttcattgtggatcagacccagactcctaacctcaaagtgaaagtggccattttgaaatatattgagagtctggctcgccagatggaccctacggattttgtaaatagttctgaaacgaggctagcagtgagtcgcataatcacctggacaaccgagccaaaatccagtgacgtgcgtaaggccgctcagatcgttcttatatccctgttcgagctgaataccccggagtttacaatgcttctgggcgcgttgcccaagacctttcaagatggagctactaagctgctccataatcatcttaagaacagctccaatacctccgtagggtcccctagcaatacgataggccgtaccccatcgcgccatacttctagccgaaccagtccccttaccagccccaccaactgctcacacgggggtctttcaccttctatgttagactatgatactgagaatcttaacagcgaggagatatacagctcgctgagaggggtcacagaagccatcgaaaaattctcctttagatcccaggaggacctcaatgagcccataaagagggatggcaagaaagagtgcgatatagtctcgcgcgacggaggagctgcaagccctgccacggaggggaggggcgggtcagaagtggagggcggcagaactgctctcgataacaagacctctctcttgaacacccagccccctcgcgcatttcctgggccacgagcccgggactacaacccctacccctacagcgacgcgatcaacacatacgacaagactgccctcaaagaagctgtctttgacgacgacatggagcaacttagggacgtgccaatcgaccactccgacctggtggccgaccttctgaaggaactcagtaatcataatgaaagagtggaggagcgtaagggtgcactgttggagttgcttaaaattacacgagaggactcattgggtgtctgggaagaacatttcaagacaatactattactgctcctcgagaccctaggagataaggaccactccattagggccctcgcccttagggtgctgagagaaatcctaagaaatcagcccgccagattcaagaattatgctgaacttaccattatgaaaacccttgaagcccacaaggattcccataaagaggtcgtaagagcggctgaggaggctgcttccacattggcctcatctattcacccagagcagtgcattaaagttctgtgtccgataatacagacagccgattaccccattaacctggctgctataaaaatgcaaacgaaggtggttgaacgaattgcaaaggagagcctgttgcagctgctcgtagatatcattccaggcctgttgcaggggtatgacaataccgagtccagcgtcaggaaagcctcagtcttctgcctcgtagctatttattctgtcatcggcgaagacctgaagccgcatctggcccagctcaccggaagcaagatgaagctcctgaatctctacatcaagagggcccagacaaccaatagcaactccagcagctcaagcgatgtctcgactcacagctag

SEQ ID NO: 113785 - DNA, 2115 bp, synthetic construct
  misc_feature 1..2115: note = Description of Artificial Sequence: Synthetic coding sequence
  source 1..2115: mol_type = other DNA
taaacgaagttcgacgaagtccagaaatctggtaacatgattcaaagcgctaacgataaaaactttgacgacgaagatagcgtcgacggtaataggccttcatccgcaagttcaaccagttccaaggctcccccctctagccggaggaacgtggggatgggaacaacacgcagattgggttcatccactctcgggtctaagtcatctgccgccaaagagggcgccggagccgtggatgaagaggactttatcaaggcattcgacgatgttcctgtggtgcagatttattctagcagagacctggaagagagcattaataaaatccgcgagatcctcagtgacgataaacatgactgggagcagagggtaaatgcactgaaaaaaatcagatcccttctgctagccggcgccgccgagtacgataacttttttcagcatttaaggctcctggacggtgcattcaaactgagcgccaaggatctgcgatctcaagtggttcgcgaagcctgtatcactctgggtcatctctccagcgttctcgggaataaattcgaccacggggctgaggcaattatgcctaccatctttaatctgatcccgaactccgccaaaattatggcaacctcaggcgtggtggctgtgcggttgatcattaggcacacacacatcccgcgactgattcccgtgatcacatccaactgcacatccaagtctgtggccgtgcgccgtaggtgttttgaattcttggaccttctgctgcaggaatggcagacacacagcctggaaaggcacatatccgtgctggcggaaaccataaaaaagggcatccacgatgctgacagcgaagctagaatcgaagcacgaaaatgttactgggggtttcactcccatttctccagagaggccgagcatctataccacacgttagaatcatcctatcagaaagctttgcagtctcatttaaaaaactctgacagcatcgttagccttccacaaagcgacaggagctcaagttcttcccaagagtcgttgaacaggccactatctgccaagcggtctcccactggatcgacgacttcccgtgccagtactgtgtctaccaaatcagtctcgaccaccggcagcctgcagcgcagtcgtagtgacatcgacgtaaatgccgccgcgtccgctaagtcgaaagtctccagctcttccgggaccacaccgttcagtagcgccgctgccctgccacccggatcctatgcatccctggggcggataagaacccggcgacaaagcagcgggagcgctaccaacgtggctagtacaccagataacagaggcaggtctagagcaaaggtagtcagccagtctcaacgcagcaggtctgccaacccggccggggcaggctcaaggtcgtcctcgcccgggaagctgctcggaagcggatacggcggactcaccggagggagctcccgagggcctccggtgaccccaagcagcgaaaaacgctcaaaaatcccacgaagccagggctgctcccgcgagacgtcgccaaaccggatcgggctggaccgcttcggtctgggtcaaccgggcaggatccccggatccgtaaatgctatgcgagtgcttagcacatctactgacctagaagccgccgtggcggacgccctgttgctgggagattcccgttccaagaagaaacctgttcgaagacgttatgagccgtacggcatgtactccgatgacgatgcaaattccgatgcgtcctctgtgtgtagtgaacggtcttacggatcccgtaacggtgggatccctcattatctgagacagactgaggacgtggccgaggtccttaatcattgtgcgtcctcgaattggagcgagcgtaaagagggacttctcggcttgcagaacctgttaaaaagccaacgaacactttcacgcgtcgaattaaaaagactgtgcgagatattcaccagaatgtttgctgatccccactccaaaatcgctgattctgaggctgagtgtgaggataaagagggtaacctgttcccctccgaagtatcttgcaccgtctcgttccagtacgtgttcggagatagctgcggtttttacaataattcgtag

SEQ ID NO: 113786 - DNA, 4485 bp, synthetic construct
  misc_feature 1..4485: note = Description of Artificial Sequence: Synthetic coding sequence
  source 1..4485: mol_type = other DNA
atggaacccaggatggaatcttgccttgcacaggtgctgcagaaagatgtggggaagaggcttcaggtgggacaagagttgatcgactacttcagcgacaaacaaaagagtgccgacctcgaacacgaccagaccatgttggacaagctggtcgacggattggctactagctgggtaaactcctccaattataaagtggtactgctcggaatggatattctgagcgctttagttaccaggttacaagatagattcaaggcccaaatcggaactgtgctgccaagccttattgacaggctgggagacgccaaggattctgtcagggagcaggatcagactctcttgttaaagattatggaccaagccgccaacccccagtatgtctgggaccgtatgttaggcggattcaaacacaaaaatttcagaactagggagggcatctgcctctgtttgatagctacgcttaatgcgtccggggctcaaacgttgacactcagcaagatcgttccccacatttgcaacctactcggtgatcctaacagtcaagtgcgcgacgccgcaattaactctctcgttgagatctaccgtcacgttggcgaacgggtgagagccgatctcagtaagaagggcctgccgcagtcacgccttaatgtaatcttcaccaagttcgacgaggtacaaaagagtggtaatatgattcaaagcgctaacgacaagaattttgacgatgaagactctgttgacggaaatcgaccctcctcggcttcttctaccagttccaaggccccaccgtctagccgacgtaatgtcggaatggggactacacgcaggctgggcagttccacgctcggctccaaatcctcagccgctaaagaaggtgctggtgcggtggatgaggaggattttatcaaagcgttcgacgacgtgcctgtggtccaaatctattcatcaagggatctcgaggagagtattaataaaatccgcgagatactgtccgacgacaagcacgactgggaacaacgggtgaatgctctgaaaaagatcagatctctgctgctcgcaggggctgcagaatatgataactttttccaacatctccgcctcctggatggcgccttcaagcttagcgccaaggatctgcgatcacaggtcgttagggaggcctgtattacactcgggcacctgtcttcagtgctgggcaacaagttcgaccatggggccgaggccatcatgcctacgatttttaacctgattccaaattccgctaagattatggcaactagcggcgtagtggccgtgcgcctcatcatccgccacacccatattcccagacttatacctgtgatcacaagcaactgtacaagcaagagtgtcgcggtaagaaggaggtgtttcgaattcctggacttactgctgcaagaatggcagacccattcactggaacgccacattagcgtcctggctgagacaattaagaagggcattcatgatgcagacagcgaagcgcgaatagaagctcgcaaatgctattggggattccactcccatttttctcgggaggccgaacatctctatcataccctcgaatccagctatcagaaggctttgcagagccacctaaagaacagtgactccatcgtgtcactgccccagagcgaccgaagctcgtctagttcccaggagtcactaaatcggccactgtcagcaaaacggtccccgacaggctctactaccagcagggcctccacagtatccaccaagtctgtctccacgactggctccctgcagcggtctaggagcgatatagacgtgaacgctgccgcaagtgccaagtctaaagtgtcctcttcatctggtacaactcctttctcctctgcagccgccttaccacctgggagttatgcctccctaggtagaattagaacgcgtagacaaagtagcggttctgcgacgaatgtggcctctactccagataatcgggggcggtctagggctaaggttgtcagccagtcacaacggtcacgatccgccaacccggccggagcgggaagtcgatcctctagccctggcaaattactgggcagcgggtacggtgggttgaccggtgggtcctcacgcgggcctccggttacaccgtcaagcgagaaaagatcaaagatacctagatcgcaggggtgtagtagggagaccagcccaaatcgtatcggcctggataggttcggcttgggccagcccggacgtatccccggatccgtgaacgcgatgagagtgctcagcacttcaacagacctggaggcagcagttgcagatgccttagttcgaggcacctctacaggtaaaaaaaagccagttaggcgtcgctacgagccttacgggatgtacagcgacgatgatgcaaattctgacgccagctccgtgtgttccgagcgctcctacggatcacgcaacggcggcatccctcactatcttcgccagaccgaggacgttgcagaagtgcttaatcattgtgcatcatccaattggagcgagcgtaaagaagggctcctcggtttacagaacctactgaagtctcagaggacactctcacgcgtcgaacttaaacgactgtgcgaaatttttacaaggatgtttgcagatccccattctaagattgccgattcagaggcggagtgcgaagataaagagggtaatctgttcccctccgaggtgtcttgtacccgcgttttttccatgtttttggaaactttggttgacttcatcattatccacaaggacgacctccaagactggttgtttgtgctgctgacccaactgctcaagaagatgggcgccgacctgttaggttcagtgcaggctaaagttcagaaggccctcgacgtgaccagagatagttttcctttcgaccaacagttcaacattctcatgcgtttcatagttgaccaaacccagacccctaacctgaaggtgaaggtggccattcttaagtacatagagagtctggcccgccagatggatccaacagattttgtaaacagctcagagacccgactcgccgtcagcagaatcatcacgtggaccaccgaacccaaaagctcagacgtacgcaaagctgcacagattgtgctgatcagcctgtttgagttaaatacgccggaattcaccatgttgctgggcgctctgccaaaaacatttcaggacggagctacaaaactgctgcacaatcacctcaagaacagcagtaatacttctgtaggcagcccaagcaataccattgggcgtacccccagtaggcacacgtctagccgaacctccccattgacctcgcctaccaattgctcacacggcggcctctccccgtccatgctcgactatgatacagaaaatctgaactctgaagagatttattcatccctgagaggggtgacagaagcaattgagaagttcagttttaggagccaggaagatctcaatgagcctataaagagggacggcaagaaggagtgtgacattgtttcccgagatggtggcgctgcttcccccgccactgagggcaggggaggatcagaagtggaggggggcagaaccgccctcgataataagacaagtcttctgaacacccagccccctcgggcctttcctgggccccgcgcccgcgactacaacccctatccatacagtgacgccatcaacacatacgacaaaactgcccttaaggaggccgtgtttgacgatgacatggaacagcttagggatgtgcctattgaccacagcgacctcgtagcggacttactgaaagagctgagcaatcataacgagagagtggaagagagaaaaggcgccttgttggagttgctgaaaattactcgggaggattcactgggagtttgggaagagcatttcaagacaatcttgcttcttctcctggagacactgggagataaagaccattcaataagggcgctcgccttacgggtcctgagggagatattgcgcaatcagccagcacgtttcaagaattatgcagagctgacaatcatgaagactttagaggcacacaaagactctcacaaggaggtcgtccgcgccgcagaggaggctgcaagcaccttggcatcatccatccacccagagcagtgtattaaagtactgtgtcctatcatacagacagcggattatcctatcaatttggcagctatcaaaatgcaaacgaaggtcgtggaaagaattgcaaaggaatctctcctccaactgttggtggatattatcccaggcttgcttcaggggtatgataatacagaatcaagtgtgcggaaagcatcagtgttctgtctggtggctatctatagcgtgatcggtgaggacctgaagccacacctcgctcagcttaccggtagcaaaatgaaattgctaaacctgtatattaaacgagctcagacgacaaactctaacagctcgagtagctccgatgtcagtactcatagctag

SEQ ID NO: 113787 - DNA, 4434 bp, synthetic construct
  misc_feature 1..4434: note = Description of Artificial Sequence: Synthetic coding sequence
  source 1..4434: mol_type = other DNA
atggagccccgcatggagtcttgtctggcacaggtgctgcagaaggacgttggaaagcggcttcaggtgggccaggaactgatcgactactttagtgataagcagaagtccgccgacctggaacacgatcaaaccatgctggacaagctcgtggatgggctagctacaagctgggttaactcttccaactacaaagtcgtactgctcggaatggacatactgtctgccttagtcacgcggctccaggataggtttaaagcccaaatcggaacagtcctgcccagcctgattgatagactgggagacgctaaggacagtgttagggaacaggatcaaacgttgctgctgaagataatggatcaggccgcaaatccccagtacgtatgggacaggatgctgggtggattcaagcacaagaatttccggacacgggaagggatctgtttgtgtttgatcgccactctgaatgcgtctggagcacagaccctgactctgtctaagatcgtgccccatatctgtaacttactgggcgatccaaactctcaggtgcgggatgcagccattaattctctcgtggaaatctaccgccacgtaggggaaagagttagagccgacctctcgaagaaaggtctgcctcagtctaggctgaacgtcattttcaccaaatttgacgaggtgcaaaaatcgggcaatatgatccagagcgcaaacgataaaaacttcgacgacgaagattccgtggacggaaaccgacctagctcggcttctagtaccagctcaaaagcacctccatccagtaggcgcaatgtcgggatgggcacaacaaggagactgggcagctctacactaggcagcaagtctagcgcggcaaaggagggtgccggggctgtcgacgaagaggatttcatcaaggcctttgatgacgttcccgttgtccagatttactcatctagagatctggaagagtcaatcaataaaattcgtgagatattgtccgatgataagcatgactgggagcagagagtgaatgcactgaaaaaaatcagaagcttgcttttggccggggccgccgagtacgacaattttttccagcacctgaggctattagatggggcatttaagttgtccgcgaaagacctgagatcccaggttgtacgggaggcttgcatcactctcggccacctgtcttctgtgctgggcaataaatttgaccatggggccgaagcgatcatgcccacaatcttcaatctgattccaaacagcgcaaaaattatggcaacttccggggttgtagccgtgcggctgatcatccggcacacacacattcccagacttattcccgtgatcacaagcaactgtacttcaaagtccgtggctgtgcgcaggagatgctttgaattcttggacctcctgctccaggaatggcagactcatagcctggagcgccacatcagtgtattggctgagacgataaagaagggaatacacgacgccgactctgaggcccgcatcgaggcgcgcaagtgctattggggtttccatagccatttcagtcgagaggccgagcacttgtaccacacgctcgagtcgtcttaccagaaggccctgcagtctcatctaaagaatagcgactctatcgtttctctgccccagagcgacaggagcagtagttcgtctcaggaatcattgaacagacctctgtccgcaaaacggtcacccacaggatcaacaacgagcagggcaagcaccgttagtacaaagtccgtttctactactggcagtttgcagaggtcaagatccgatatcgatgttaatgccgccgcaagcgcaaagtcaaaggtctcctccagttcagggaccacccccttttcttccgccgctgcactgcctcccggttcttacgcgagcttagagtccagacatatgagggaggatatggaatacatagggctggacagtggccgcattcgtacacgtcgccagtcatccggatcagccaccaatgtggcctcgacacccgataaccgtggccgcagccgggccaaggttgttagccagtctcaaccgggatcccggagctcatctccgggcaagctgctgggctctgggtacggtggtctgacaggtgggtcatcccggggcccaccagtgaccccctccagcgagaaacgatccaaaatccccagatctcagggttgctcaagagagacctcccccaatcggattggcttggaccgattcggcctcggacagcctgggcgtattcccgggtctgtgaacgcgatgcgtgtgctgagcacaagcacagacctggaggccgctgtcgccgacgctctcctgttaggagactcccgcagtaaaaagccagtgcggcgccgctatgaaccctatgggatgtattccgacgatgacgctaattccgacgccagctccgtgtgtagcgagagaagctacggtagtcgaaatggtggcataccccattatcttcgccagactgaagacgtggctgaggtcctcaaccactgcgcttcaagtaactggtccgaaagaaaggaaggtctgctaggtttacagaacctgctgaaaagccagcgcacactaagcagagttgaactgaagcgattgtgcgaaatctttactcggatgttcgctgatcctcatagtaagagagtcttcagtatgtttctggagactcttgtcgatttcatcataattcacaaagacgacctgcaggattggctgtttgtgctgctcactcagttgctcaagaagatgggagcggacctcctcggatcagtgcaggctaaggttcagaaggctctggatgtgaccagagacagcttcccatttgaccaacagtttaatatcctgatgcggttcatcgttgaccagacccagactcccaatcttaaggtgaaggtggcgatacttaaatatatcgaatcactggctcgtcaaatggaccccacagacttcgtaaatagctccgaaacgagattggcagtttccagaatcatcacatggactaccgaacctaaatcctccgacgtcagaaaggccgcccagatcgttcttatctcactttttgagttgaacacacccgagttcaccatgctactaggggctctccccaaaaccttccaggatggcgcgacgaaactgctccacaatcacctcaagaattcttccaatacgtctgtgggttcacccagcaacacaatcggtagaacaccctccaggcacacatcatcacgcacgtctccgctcactagccccactaactgctcacacggaggcttgtctccatccatgttggattacgacactgaaaacctaaacagcgaggagatctacagctcattgaggggtgtcaccgaagctatagaaaagtttagctttcgtagccaggaggacctgaatgagcctatcaagcgcgatgggaagaaggagtgcgatattgtaagccgtgatggcggagcagcaagtcctgccaccgaagggaggggcggtagcgaagtggaaggtggcaggactgccttagacaacaaaacgtcactgcttaacacccagccaccccgcgcctttccgggccctagagcaagggactataacccctacccctattctgacgcaatcaatacatacgataaaacagctctgaaagaagcagtcttcgatgacgacatggagcagctgcgcgacgtgccaatagatcacagcgatctggtggctgacctcttgaaggagctgagtaaccacaacgagcgcgttgaggaacgaaaaggagcccttctcgaattgcttaaaattacacgagaagactctctgggagtttgggaagagcatttcaagaccatcctcctactcctgctggagactctgggagacaaggaccactctatcagagcgctggccctgagagtactgagagaaatcctcaggaaccagcctgcccgcttcaagaactacgccgaactgaccatcatgaaaactctggaagctcacaaagacagccataaggaggtggtgagggccgccgaagaggcagcgagtacacttgcaagtagcattcatccagagcagtgcattaaagtactctgccccataatacagaccgccgattatccaattaatcttgccgcgattaaaatgcagaccaaagtggtcgaacgaattgccaaggagtctctgcttcagctgctggtggatatcatccccggacttctacaaggatacgacaatacagagagtagcgtacgtaaggcctccgtattttgtctggttgccatctactcagtaataggtgaggatctgaagccccacttagcccagctcactgggagtaaaatgaaactgctgaacctttacatcaaacgcgcgcagaccaccaactccaactcgagcagtagctctgatgtatccactcactcctag

SEQ ID NO: 113788 - DNA, 3768 bp, synthetic construct
  misc_feature 1..3768: note = Description of Artificial Sequence: Synthetic coding sequence
  source 1..3768: mol_type = other DNA
atgcttcagaattgttctgacaagaactttgatgatgaggattcagtggacggaaaccgtccatcttccgctagctctacctctagcaaggcccccccctcaagtcggcggaacgtcgggatgggcacgaccaggaggctgggctcttctaccttgggctccaaatcatcagcagctaaggagggagcaggcgcagtcgacgaggaggacttcatcaaggcttttgacgatgtgcccgtggtacagatctactcttcccgtgacctggaggaatctatcaacaagatccgcgagattctttccgacgataaacacgattgggaacagcgcgtaaacgcactgaagaagatcaggagtctgctactggcaggcgcagccgagtatgataactttttccagcacctgcggttactggatggagcattcaaactaagtgccaaggaccttagaagccaggtagttcgtgaggcgtgtatcactctcgggcatctctccagcgtgcttggaaacaagtttgatcatggggccgaggcaataatgcctacaatcttcaacctgatccctaatagtgctaagatcatggctacatcgggcgtggtggctgtccggctaatcatcagacacactcacataccgagacttattccagtcataacctcaaactgcacatcaaagtctgtggctgttagacgacgttgctttgagttccttgacttgctcctccaggaatggcagacccacagcctggagcgccatattagtgtgcttgccgaaaccatcaagaaaggtattcatgatgccgactccgaagctagaattgaagcgcgaaaatgttactggggatttcattcccatttttcacgtgaggctgagcatctgtaccacactctcgagtcttcttaccagaaagctctccaaagtcatctgaagaattccgacagcatcgtctctctgccgcagtccgacaggagtagcagttcatcacaagaatctctaaatagacctttatcggcaaagcgctcacctacaggcagcacgacaagccgggcatccactgtcagtacaaagagtgtcagcaccaccggcagccttcagcggagcaggagtgacatcgacgtgaacgccgccgcctcagctaagtcaaaggtgtcttctagcagtggaacgactccattctcaagcgctgccgccctgccacctggatcatatgccagtcttggcagaatccgaactaggcgccagagtagcgggagcgcgactaacgtagcaagcacacctgacaatcgcggccgcagtagagcgaaagtggtctctcagagtcagcgatcacggtctgccaatccagctggagctggctccaggagctcatctcccgggaaattacttgggtctgggtacggcggcctgaccggtgggtcttccaggggcccacccgtaactccctcttctgagaagaggtccaagatcccccgctcgcaaggttgttccagggaaacatcccctaatcgaataggcctcgacagattcggcttgggacagccaggccgcattccaggctccgtcaacgctatgagagtgcttagcacatcaaccgaccttgaggccgccgtggctgatgccctgaagaagccggtgagaaggcgctatgagccgtatggcatgtattcagacgacgacgccaacagcgacgcaagtagcgtgtgcagcgagcgtagttacgggtcgcgaaacgggggaatcccacattacttgcggcaaacagaggacgtggccgaggtgctaaaccactgcgcctcctctaactggagtgagagaaaggaaggccttctggggctgcagaacctgctgaagagccagcggaccctttctagggtggaactaaagcgcctgtgcgaaatttttacccgcatgtttgccgatccccattcaaaaatcgctgactctgaggcggaatgcgaggataaggaggggaacctgtttccaagcgaagtgagttgtacacgagtgttctccatgttcctcgagaccctcgtggacttcatcattatccacaaagatgaccttcaggactggctgtttgtactgttaacacagttattaaaaaagatgggcgctgacctcctcggcagcgtgcaggccaaagtgcaaaaagcccttgacgtgaccagggacagttttcctttcgaccagcaattcaacatcctcatgagattcattgtggaccaaacacagactcccaatctgaaagtcaaggtggctattctgaaatatatagaatctctggcaagacagatggaccctacggactttgtgaactcgtcagagacaagactcgccgtgtcgaggattattacatggacgaccgagcctaagagcagcgacgtgaggaaagccgcccagattgtactgatcagtctgttcgaattaaatacacccgagtttaccatgttattgggggcgctgccaaagacttttcaagatggcgcaactaagctgctgcacaatcaccttaagaactccagcaacacttctgttgggtcaccttccaatactataggccgtaccccgtccaggcacacgtcttccaggacgagtcccctgacatcccccaccaattgttcgcacggcgggctgagtccttctatgctcgactacgacaccgaaaacctaaactccgaggagatatactcctcgctacgcggcgtcacagaggcaattgagaaattcagctttagatctcaggaggacctcaacgaacctatcaagcgggatggcaagaaggagtgtgacatcgtgtcgcgagatggaggagcagcttcccccgcgacggaaggaaggggaggaagcgaggtggaaggaggccggacagccctggataacaagacaagcctgctcaacactcaaccccctcgggcgttcccaggccctagagctagagattacaatccttatccctacagcgacgctattaatacttatgataaaacagcactaaaggaggctgttttcgatgacgatatggaacagctgcgggatgtgcctattgaccactctgacttagtggccgatctcttaaaggagctgagcaatcacaacgaaagggtcgaagagagaaaaggcgccctcctcgagctgctgaagattactagggaagattcattgggcgtctgggaagagcactttaagaccatcctgctcctgttacttgaaacactaggagataaagatcattccatcagagccctggctttacgcgtgcttcgagagattctacggaaccaaccagcgagattcaagaactacgcggagttgaccattatgaaaaccctcgaggcccacaaggactcccacaaggaggtggtccgagcggctgaggaggcagcaagcaccctggcctcgagcattcaccccgagcagtgtattaaagtgctttgtcctatcatacaaaccgcggactacccaatcaatctggcggccattaaaatgcaaactaaggtggtggagcggatcgctaaggaaagccttttacagctgctcgtcgacataatccccgggctgctgcagggatatgataatactgagagtagcgtgaggaaggccagtgtgttctgtttggtggctatatattccgttattggcgaagacctgaagcctcatctggcccagcttacagggtccaaaatgaaactgctaaatctctacatcaagcgagcccagaccaccaactcgaacagcagtagcagcagtgacgtttccactcactcatag

SEQ ID NO: 113789 - DNA, 3738 bp, synthetic construct
  misc_feature 1..3738: note = Description of Artificial Sequence: Synthetic coding sequence
  source 1..3738: mol_type = other DNA
atgacaacagggaaagacaagaactttgatgacgaagatagcgttgacggaaacaggccttcatctgctagctcaacgtccagcaaggcccccccatcctccaggcgaaatgttggaatggggactaccaggagactcggctcctctacattagggtcaaaaagcagtgcagccaaagaaggcgccggtgccgtcgatgaagaggactttatcaaagccttcgacgatgttcctgttgtccagatctactcctcgagagatctggaagaatcaataaataagattcgagagatattgtcggatgacaagcacgattgggaacaacgggtgaacgctctaaaaaagattcgcagcctgctcttagcaggggccgcggaatatgacaacttctttcagcacctgagactgctggatggcgcctttaagctgtcagccaaggatctacgctctcaggtggtgagggaagcttgtataacgctgggccatcttagctccgtcctgggcaacaagttcgatcatggcgccgaagccataatgccaactattttcaatttgattccaaattctgctaaaatcatggccacgtcaggagttgtggctgtgcggttgatcattaggcacacacacatccccaggctcatccctgtgataacctccaattgtacatcaaagagtgtggcggtcagaaggcgctgttttgagtttctggacctgctcctgcaggaatggcagacccattccctagagagacatatctccgtgttggccgagactatcaagaagggtattcacgatgccgactccgaagcccggatcgaggctaggaagtgctactggggatttcactcacactttagcagggaagccgagcatctctaccatacattagagtcaagctatcagaaggccctccagagtcacttgaagaatagcgattctatcgtctcattgccccagtccgaccgctcatcttcatcctcacaagagtcgctcaacaggcctctgagcgcaaaaaggtcccctactggtagtacaaccagccgggcctccacagtttcaacaaagtctgtcagcaccacaggttccctccagaggagcaggagtgatatcgatgtcaatgcagccgcaagcgccaaaagcaaggtcagcagtagcagcggcacaacccccttcagttccgccgcagcattgccacctggatcctacgcgtctctcgacggaacgacaaccaaggccgagggccgaataaggacacgccgccaatcttccggatccgccactaacgtggcctcgacacccgataacagaggaagatcacgcgctaaggtggtgtcccagtcccaaagatcaagatctgctaaccccgcaggcgccggttcacgctcctccagcccgggcaagctcctgggttctgggtatggtggcctcaccgggggaagtagcagaggaccgccagtgacgccaagcagcgaaaagagatccaagattcctagaagccagggttgttcgcgggagacttcacccaatcggatcggcttagatcgattcggcctgggccagcctggtagaatccccgggtcagtaaatgcgatgagggttctttctacttcaaccgatctggaggctgctgtggcggacgcattgttactaggtgacagcaggagtaagaaacccgtgaggcgaaggtacgaaccttatggcatgtatagtgacgacgatgccaatagtgacgcctcatcggtgtgtagcgagcgctcttacggaagcagaaatgggggaattccccactatctaagacagaccgaagacgtggctgaggtgctcaaccactgtgcctcctctaattggagcgaacgcaaggaaggtcttctgggtctacagaacctgctgaagtcgcaacgcacgctctctagagtggaactaaaaagactctgtgaaatcttcacacggatgtttgccgacccccattcgaaagtgtttagcatgtttcttgagaccctggtagatttcataatcattcacaaggacgatctccaagattggttgtttgtgttgctgacacagctgctaaaaaaaatgggagccgatcttcttggctccgtgcaagcgaaagtccagaaagccctggatgtgacaagggactccttcccattcgatcagcagtttaatatactcatgagatttatcgtggatcagacccaaacgcctaatctgaaggtgaaggttgcgattcttaagtatattgaaagcctggccagacaaatggatcctaccgatttcgtaaatagttcagagacaaggctggctgtaagccgcattataacttggaccaccgaaccaaagtcctctgacgtgcgtaaggcggcccagatcgtacttatttcattatttgaattgaatacccccgagtttaccatgctgctgggagcattgcctaaaaccttccaagatggtgccactaagctgttacataatcatctgaagaatagcagtaacacatctgtgggctctccgtccaacactataggtcgcaccccaagccgtcacacctcatctcggacatcacctctgacctccccaaccaactgttcacacggcgggctttctcctagcatgctggattatgataccgaaaacctgaactccgaggagatttactcctccctgagaggagtgaccgaggctattgagaaattttcgtttcgttctcaggaggacctaaatgagcccatcaagagagacgggaaaaaggagtgtgacattgtatcacgagacggtggggccgcttcccccgccaccgaagggagaggcggctccgaagttgagggcggacggacggcactggataacaaaaccagtctgctcaacacacagcctccccgtgcctttccagggcccagggcgcgagattataacccatatccttatagcgatgcgatcaatacatatgataagacagctctgaaggaggcagtgttcgacgatgacatggaacaattgcgcgatgttcctatcgatcatagtgacttggtcgcagatctccttaaggagctgagcaaccacaacgaacgggtggaggagagaaagggggctttgttggagctcctgaagatcaccagggaagattcgcttggggtttgggaagaacacttcaagacaattctgctgcttctcttagagacattgggtgataaggatcacagtatcagggcactggccctgcgggtacttagagaaattctgcggaaccagccagcgcgcttcaagaattatgctgagcttacgatcatgaaaactctcgaggcgcacaaggactctcacaaggaagtagtcagagcggccgaggaggcagcttctacattggcaagctccattcaccccgagcaatgtattaaggtcctatgcccaattattcagaccgccgattaccctattaatcttgctgccattaaaatgcagaccaaggtagtggaaagaattgccaaagagagtttactgcaactcctggtggatattataccgggattactgcagggttacgacaacaccgagtcatcggtccgaaaggcttccgtattttgtctggtcgctatctactccgtgattggagaggacctgaagcctcacctggcacagctaactggctccaagatgaagcttctgaatctctatataaagagggcccagacgaccaatagcaacagctcaagctcatcagatgttagcacacatagctag

SEQ ID NO: 113790 - DNA, 2988 bp, synthetic construct
  misc_feature 1..2988: note = Description of Artificial Sequence: Synthetic coding sequence
  source 1..2988: mol_type = other DNA
atgggactgcggaaccattttcctggtgaagccgagacactctataactccctggaacccagctaccagaagagtttgcagacatatctaaaaagctctggcagtgttgcaagtctcccacagtctgacaggtcatccagtagttctcaagagtcacttaacaggccattctcttcaaaatggtcgacggcaaacccgagtaccgtagccggccgagtgagcgccggcagttctaaagcctcttctctccctggctccttacaaagatcaaggtcagacatcgacgtgaatgccgccgccggagccaaggcccatcatgccgccggacagtctgtgagatcaggtaggctcggcgccggcgcattaaacgcagggtcctatgcctctctggaggacacctcggacaaactggatggcaccgccagcgaggatgggcgtgttcgcgccaagctgtcagccccactggcgggaatggggaatgcaaaagccgactcaagaggccgctcaagaaccaagatggtgtcccagagccagcccggatctcgctccggctccccgggcagggtgctgacaactactgccttgtccaccgtaagtagtggagtgcagagggtgctggtcaattcggcgtccgcccagaaaagaagtaagatcccaagatcgcagggatgtagtcgggaggcctccccctcaagactgagcgtggcacgatcctcacgtatccctagaccctctgtgagtcagggctgttctcgcgaagcgagtagagagagtagtcgtgacactagccctgtgcgctccttccaacccctcggtccaggctacggaatctcgcaatcttcccgactgtcttcgagcgtgagtgctatgagagtgcttaacacaggcagtgacgtcgaagaagcagtcgctgacgctttgaaaaaacccgccagaaggcgctatgaaagttatggcatgcattcagacgatgatgccaactctgacgctagttccgcctgcagtgagaggtcatattcttccagaaacggcagcatccccacttatatgcggcagaccgaagatgtggcggaagttctgaatagatgtgctagcagtaattggtccgaaagaaaagagggactcctgggtctccagaatctgctgaaaaatcagagaacactatctcgggtggagctgaagaggctgtgtgaaatcttcacgaggatgtttgcagatccccatggcaagcgggtgttttcaatgtttctggaaacactggtagacttcattcaggtgcacaaggacgacttgcaggactggttgtttgtgctcctcacccagttacttaaaaaaatgggcgccgaccttctggggtccgtccaggcaaaggtgcagaaagccctggatgttacacgcgagagctttccaaacgacctccaatttaacattctcatgcgattcacagtagaccagacccagaccccttccctgaaagtcaaggtggcaattctcaagtacattgagactttagccaaacagatggaccccggtgatttcattaacagttccgagacacgccttgcagtttcccgagtgatcacatggaccaccgagccaaaaagttcagatgttaggaaggccgctcagtctgtgctcatcagtctgtttgaattaaacacacccgaattcaccatgctgttaggtgcccttcccaaaacctttcaggatggagcaacgaagttattgcacaatcatctccgaaatacaggtaatggcacccagtccagcatgggctcgccactgactcgcccaaccccgcgttcaccagcgaactggtccagccccctgacgtctcccaccaacacctcgcagaacactctaagtccgagtgccttcgattatgacactgagaatatgaattctgaggacatttattcttccttaaggggtgtcacagaggctatccaaaatttttcttttaggagtcaagaagatatgaacgagcccctgaagagagacagtaaaaaggatgatggcgactctatgtgcggagggccaggcatgtcggatcctcgggccggaggcgacgcaactgacagcagccaaacggcccttgacaacaaagcctccctgctgcattcaatgccaacccacagctctccgcgaagtcgggactacaacccatataactactctgattcaattagtcccttcaataaatcagcgctcaaagaggccatgttcgacgatgatgcagaccagtttccagatgatctgtccctggaccacagtgaccttgtggctgaactcctaaaagagctgagtaaccacaacgagagagtcgaagagcggaaaattgccctgtatgagctgatgaagctgacccaagaggagtcctttagcgtctgggatgagcattttaaaactatcctcctgctgctccttgaaaccctgggtgataaggagcctactatcagagcactcgcactgaaggtcctgcgcgagatactgaggcatcaaccagcgcgatttaaaaactatgccgagcttaccgttatgaaaactctggaggcacacaaggatcctcacaaagaagtagtccgcagtgcagaagaggccgccagtgtgctggccaccagcatctcacctgagcagtgcattaaagtactgtgccctattatacagacagctgattatcccattaacctggcggctatcaagatgcagaccaaggttatagaaagagtgtctaaagagacactgaatctcctcttgcctgagataatgcctggtctgattcagggctatgataacagcgaaagttccgtgcggaaggcatgtgtgttctgcctggtcgccgtgcacgctgttattggtgacgaattaaagcctcacttatcacagttaacgggttccaaaatgaagttgctcaacctgtacattaaaagagcacaaacaggcagcggaggcgccgaccccactacggacgtgagcgggcaatcttag

SEQ ID NO: 113791 - DNA, 1296 bp, synthetic construct
  misc_feature 1..1296: note = Description of Artificial Sequence: Synthetic coding sequence
  source 1..1296: mol_type = other DNA
atgaggagattgatttgtaagcgtatctgcgactataagtccttcgacgatgaggaaagtgtagatgggaaccggccatcaagtgcagccagcgccttcaaggttcccgccccaaagacatctgggaacccagccaattcagctagaaaaccggggagcgccggcgggcctaaggtgggaggggccagtaaagagggtggcgctggcgctgtggatgaggacgactttattaaagccttcaccgatgtcccctccatccagatctactcttctagagagctggaggagaccctgaacaagatccgcgaaatcctgtcagacgataagcacgactgggaccagcgggctaatgcactaaagaagattcggtccttgctggtcgccggagccgctcagtatgactgttttttccagcacctgagactgctggacggcgctctgaagctgagtgccaaggacctcagatcccaggttgttcgagaggcatgtataactgtggctcatttaagcaccgtactgggcaataagttcgatcacggagccgaagccattgttccaaccctctttaatctcgtgcccaactctgccaaagtgatggccacctctgggtgtgccgctattagattcatcatccgtcatactcacgtgcctagactgataccgcttatcacttcgaactgcacaagtaagtccgtgccagttagaaggcgatcattcgagtttctagatctgctgttacaggagtggcagacgcacagccttgagaggcatgccgctgttctcgtagaaacgattaagaagggtatccatgacgcggacgccgaggctagggtggaagcaaggaagacttatatgggcctgagaaatcatttcccgggcgaggccgaaacactttataattctctggaaccatcttaccagaagtctttgcaaacatacctgaagtcttccgggtcagtggcatcgctgccccaatcagaccggtcttcaagtagcagccaagagagtcttaacagacctttctcatcaaaatggtctacagccaaccctagtaccgtcgctggccgtgtgagcgcggggagttctaaagcctcttcgctgccgggatcccttcagcgctcaaggtccgatattgatgtaaacgccgccgccggggccaaagcccaccacgccgccggacagtccgttcgatccggtagactgggggcaggcgcgctgaacgcagggagctatgcgagtttagagtgcgaagcgttttggcgcagcggcagaactgccaagctctacagtgtttag

SEQ ID NO: 113792 - DNA, 4518 bp, synthetic construct
  misc_feature 1..4518: note = Description of Artificial Sequence: Synthetic coding sequence
  source 1..4518: mol_type = other DNA
atggagccacgctcaatggaatatttttgcgcccaagttcagcagaaagatgttggcggtcgtcttcaggttggccaggaactgctcctctacctgggtgccccaggcgctatcagcgacttggaggaagatttgggccgactggggaaaaccgtggatgcacttaccggctgggtgggctcctcgaattaccgtgtctcactgatggggcttgagatccttagcgccttcgtggatcgcctgagcacacggttcaaatcctacgtggccatggtgatcgtcgccctcattgaccgaatgggtgacgccaaagataaagtaagagacgaggcccagacactgattttgaaattgatggatcaagtggcacccccaatgtatatctgggaacaactcgcgtcaggcttcaaacataagaatttccgttctagggagggtgtctgtctttgtctgattgagactttaaacatctttggagcccagccactggtgatttccaagctaatcccccacctgtgcatcctgttcggggacagcaatagtcaggtccgggatgctgctattctcgccattgttgagatataccgccatgtcggcgagaaagtacgcatggacctatacaagcggggaatcccccccgccaggctagagatgattttcgccaagtttgatgaggtgcagagctcaggtggtatgatcctaagcgtttgcaaggacaagtctttcgatgatgaagaatcggtcgacggcaaccggcctagctcagccgcttcagccttcaaggtccccgcacctaagacgagcgggaaccccgccaacagcgccaggaaacctggtagcgcaggagggccaaaggtggggggggcctcaaaggagggcggggcgggagctgtggatgaggatgattttattaaggccttcactgacgtcccatctattcagatctactcctccagggaactcgaagaaaccttgaacaaaatccgagaaatattaagtgacgacaagcacgactgggaccagagagctaacgctctgaaaaaaatccggagtctgctagtggctggtgctgcacaatatgactgctttttccagcatttacggctactcgacggagctctgaagctgtcggctaaggatctgaggagtcaggttgtcagagaagcctgcattaccgtggcccacctgtctactgtgcttggcaataagttcgatcacggcgccgaggctatcgttcccactctttttaacttagtcccaaattctgctaaagtaatggccacgtctgggtgtgcagcaatccgattcatcatacggcacacacacgtaccacgcttaatcccactgattacatcgaattgtaccagcaagtcagtgccggtgcggcggaggagcttcgagtttctcgatctgctgctgcaagagtggcagactcactccttggaaagacatgccgctgtcctggtggagacgatcaagaaaggaattcacgatgctgatgcagaagctcgcgttgaagccagaaagacatacatgggcctgcggaaccactttcctggcgaggcggaaacactatacaacagcctcgaaccgagctatcagaagtcacttcagacttacctgaagagcagcggttcagttgccagcttacctcagtctgataggagttcaagttcctcacaggaatccctcaacaggcccttctcttctaagtggagtaccgctaacccttctaccgtggcggggcgagtatccgcaggctccagcaaggcgagttcactcccagggagtctgcagagaagtaggagcgacattgacgtgaacgctgccgccggcgccaaagcccaccacgcagcaggccaatctgtgaggagcggacgcctgggcgctggggcacttaatgctggcagttatgcatccttggaggatacctcagacaagctggacggaactgcgagcgaagacggcagggtaagggcaaaattatctgcccctctggcaggcatgggaaatgcaaaagcagattcacgcggacgcagccgaacaaaaatggtttcacaaagccagcctggttcacggtcaggatcaccgggccgagttcttactacaaccgccctgagtacagtttcgtccggtgtacaacgagtcctggtgaatagcgctagtgcacagaaacggtctaagatccccagaagccaaggttgctccagagaggcctcacccagccggttgtccgtggctagaagcagccgtatacccagaccttcagtgtctcagggttgctcacgcgaagcatctcgtgagagttctcgagataccagccctgtgcgttcttttcagccacttggacctggatacggtattagccaatcgtcacgactttcttcaagtgtgagcgccatgcgggttctgaataccggttcagatgtcgaagaagccgtggcagacgctctaaagaaaccagctagaaggcggtacgaatcctatggaatgcactctgacgacgacgccaactccgacgcaagctccgcttgctctgagagatcatacagctctcgcaacggaagcatccctacatacatgagacagaccgaggatgtggctgaggtgctgaaccgctgcgcatccagcaactggagcgagcgtaaggagggcctactgggcctccagaatctgctcaaaaatcaaagaacactctctcgggtggagctcaagcgcctgtgcgaaatcttcactcgaatgttcgccgatccgcatggcaaggtcttcagcatgttcttggagacattggttgacttcatccaggtccataaggacgatttacaagattggctgtttgtgctgctgacccagctcctgaaaaaaatgggagcggatttgttaggcagcgtgcaggctaaagtgcagaaggccctcgatgtgacaagggagtcctttccaaacgacctgcagttcaatatactcatgaggtttacggtcgatcaaacacagacaccgtccctgaaagtcaaggtggctattttaaagtacatcgaaaccttggctaagcaaatggaccctggcgatttcatcaattctagcgaaacgagactggctgtgagccgcgtgatcacctggacgaccgagcccaaatccagcgacgtgcgcaaggctgctcagtcagttctgatctctctgttcgaacttaacacccctgagtttaccatgttgttgggggccctcccaaaaacgtttcaggatggagcgaccaagttgctacacaatcacctgcgaaataccggcaatgggactcagtcttccatgggcagccccttgacccgcccgaccccgaggagccccgccaattggtcgagcccactgacgtcccccacgaacacatcccagaatactttgagcccgagcgccttcgattacgatacagaaaacatgaactctgaagatatatactcaagcctgcgcggggtcacagaagccatccagaattttagcttccgttcccaggaggacatgaatgaaccactgaaacgcgactctaaaaaagatgatggggactctatgtgcgggggcccaggcatgtcggacccacgggcaggaggcgacgccacagacagcagccagaccgccctcgacaataaagcttctctcctgcattccatgcctactcattctagccctcggagccgggattataatccgtacaattactccgattctattagtcctttcaacaagtcagccttaaaagaagcaatgtttgacgacgacgccgatcagttccctgatgatctgtcactggaccacagcgacttggtggccgaattgctgaaggagttgagcaaccacaatgagagagtggaagaacgcaagattgctttgtatgaactgatgaagttgacacaggaagagtctttttccgtttgggatgaacactttaagacaatactcctgttacttctcgagacattgggcgataaagaacctaccattagagccctggctcttaaggtattgcgtgaaatactgaggcaccagcccgcccgcttcaagaactatgccgagctgactgtgatgaagactctcgaggcccacaaagacccacacaaagaggtggtgcgatccgccgaggaggctgcctcagtgcttgcaacgagtattagccccgagcaatgcattaaagttctttgccctataatccaaactgctgattacccaatcaacctggcagctatcaagatgcagaccaaggtgatcgaaagagtctctaaagaaacgttgaatttattgctgccagagatcatgcctggcctcatacaagggtacgacaattccgagagctctgtgagaaaggcctgcgtattctgccttgttgccgtgcacgccgtgatcggagacgaactgaagccacacctgtctcaactcaccggatccaaaatgaagcttctgaacctatacattaaacgggcccagacagggtccggaggcgccgatccgaccacagacgttagcggacagtcctag

SEQ ID NO: 113793 - DNA, 4542 bp, synthetic construct
  misc_feature 1..4542: note = Description of Artificial Sequence: Synthetic coding sequence
  source 1..4542: mol_type = other DNA
atggaacccaggtctatggaatatttttgcgcccaggtacagcagaaagatgtgggtggacgcttgcaagtgggccaggaacttctgctgtacctgggggctccaggtgccatctccgaccttgaagaagaccttggaagacttggcaagactgttgacgctctcaccggttgggtagggtctagcaattatagagtgtccctgatgggcctggagatactgagtgccttcgtcgaccggttatcaacccgatttaagagctacgtggctatggtgatcgtggctctgatcgatcggatgggcgacgccaaagataaggtcagagacgaagcccaaaccctgatcctgaaactaatggaccaggttgccccccccatgtatatctgggagcagctggccagcggctttaaacataaaaacttcaggagtcgggagggcgtatgtttatgtctgatagagacgctaaatatcttcggggcgcaaccactcgttatctctaaattaataccccatctgtgcattttattcggggactcgaactcccaggtgcgggacgccgccattcttgcaatcgttgaaatttatcgccatgtgggcgagaaagtacgaatggatctctacaagagaggcattccacccgccagactggagatgatctttgccaagtttgatgaggtccagtcctcaggcggaatgatcctgtctgtctgtaaagataagtcctttgatgatgaagagtccgttgatggaaaccggccatcttctgctgccagtgcttttaaggtgccagcacccaagacctctggcaaccccgccaatagcgcaagaaaacccgggagtgccggcggtcctaaagtgggcggagctagcaaagaaggaggcgctggcgctgtggatgaagacgactttatcaaggcattcaccgatgtgcctagcatacagatttactcttcccgcgaactggaggagaccctgaataaaatccgtgagatcctgtccgatgacaaacatgactgggaccagagggcgaatgctctgaagaagattaggtctctgcttgtggctggggccgcccagtacgattgtttttttcagcacctccggcttctggatggagctctgaaattgtctgctaaagatctgcgctcgcaggtggttagagaagcatgtatcaccgtagcacacttaagtacagttctggggaacaagtttgaccacggggcagaagctattgtgccgacactctttaacctagtgcctaacagcgccaaagtgatggctacatctggatgcgctgccattcggttcatcatccgccacacacatgtgccccggctgatccccctgatcaccagtaattgcaccagcaagagtgtccccgtgcgacggcggagtttcgaattccttgaccttctcctccaggagtggcaaactcactccctggagaggcacgcggctgttctggttgaaaccataaagaaggggatccatgacgccgacgctgaggcccgtgtggaggcccggaaaacatatatggggctaaggaatcacttcccgggagaagccgagacactttataatagtcttgaaccttcttatcagaagagccttcagacctatctcaagagtagcggttctgttgcttcgcttcctcagtccgacagatctagcagtagctcccaggagagtctcaataggccctttagctcaaaatggtccacggctaacccctctactgtggctggacgcgtgtccgctggctcatccaaggcaagctctctgcctgggtctctgcaacggtccaggtctgacatcgatgtgaatgccgctgccggcgcaaaggcacaccacgcggccggacagtccgtgaggtccgggagattaggtgcgggcgctctgaacgctgggagctatgcctccctggaggataccagtgacaaacttgatggcactgcaagcgaagacgggcgtgtgcgagctaaactatcagcccccctcgctgggatgggaaatgctaaagcagattctcgcggtaggtccagaacaaaaatggtgtcccagagccagcccggcagccggtccggaagcccggggcgtgtgctcacaactaccgccctgtcaacggtctcgtctggagttcagcgtgtccttgtgaattcagctagcgcacaaaaaagatctaaaatacctaggagtcagggctgctcccgagaagcgtctcctagcagattgagcgtagcacggtcaagcagaattccacgcccaagcgtaagtcaaggttgcagtcgggaggcctccagagagtcctctagggatacgtctccagtcagatcttttcaaccacttggacctggctatggcatttcacagtcaagccgtttatccagctccgttagcgccatgagagtgctgaacaccggtagcgacgtcgaggaagctgtggccgatgcattgctgctgggagacatacgcacgaaaaagaagccagcgcgccggaggtatgagtcatacgggatgcactcagacgacgacgcaaattcagacgcttcgtccgcctgttcagaaaggtcctactcaagccgcaatggaagcatccccacatatatgcgccagaccgaggatgtagccgaagtcttaaaccgttgtgcgagctctaattggagcgagagaaaggagggcctcctggggttgcagaacctgttgaagaatcagcgcacattgtctagggtggagctaaagcgcctctgtgagattttcacccggatgttcgcagatcctcacggcaaagtgttctctatgtttctggagaccctggtagattttattcaagtgcacaaggacgacttgcaggattggcttttcgtcttgctgacccagctgctcaaaaaaatgggagcggatctgctcggttccgtgcaggcaaaagttcaaaaagcattggacgtgacgagggagtcatttccaaatgacctgcaattcaatatcctgatgaggttcaccgtagatcagactcagacaccctctctgaaagtgaaagttgctattttaaagtatatcgaaacattggcaaagcagatggatcccggtgacttcatcaatagctcggaaaccagattagccgtatcacgggttattacttggacaacggagcctaaaagtagcgacgtgcgcaaagcagcccagtccgttctaatctcactgttcgaactcaatactccggaattcactatgctgctgggcgccctgcccaaaacattccaagacggcgccacaaaattgctccataaccatttgagaaacactggcaacggaacccagagctcaatgggaagccctctcacacggccaacgcccagaagccccgctaactggtccagccccctgacaagccccaccaacacctctcagaacaccctttcacccagcgcctttgattacgacacggagaacatgaactccgaagacatctactccagcttgaggggtgtgacggaagctattcagaacttttcattccgctcccaagaagatatgaacgaacctctgaaacgggactccaagaaggacgacggcgacagcatgtgcgggggccccgggatgagtgatcctagggccggcggtgacgcgactgattcatcgcagacagccctggacaacaaagcatctctcttacattctatgccaactcatagctccccccggagccgggactataatccttataattatagtgattccataagcccttttaataagtcggctctaaaggaggctatgttcgacgacgacgcagatcagtttccagatgacctcagtctggatcattcggatcttgttgctgaactactgaaagaactctcgaatcacaatgaacgcgtggaagagcggaaaatcgccctctacgagctcatgaagctcacccaggaagagagcttttctgtttgggatgaacactttaagactattctgctgttgctgctggagacgctcggcgacaaggagcctaccattagggctctcgcattaaaggttttacgggagatcttgaggcaccagccagccaggttcaaaaactatgcggaacttacagttatgaagaccctggaagcgcacaaagatccccacaaggaagtggtcagatccgctgaggaggccgcctcggtactggccactagtatatcaccagagcagtgtataaaagtgctctgtcccataattcaaaccgctgattacccaatcaacttggctgcaatcaaaatgcagaccaaggttatagaacgggtcagtaaggagacactgaatctcctgctccctgagataatgcctggtctgattcaagggtacgataattccgagtcatcagtcagaaaggcctgtgtgttctgtctggtcgcagtgcatgctgtgattggggacgagcttaaacctcatttatcgcaactgactgggtctaaaatgaagctactcaacctgtatatcaagcgggcccagaccggttctggtggcgccgaccctacgaccgacgtttccgggcagtcatag

SEQ ID NO: 113794 - DNA, 4545 bp, synthetic construct
  misc_feature 1..4545: note = Description of Artificial Sequence: Synthetic coding sequence
  source 1..4545: mol_type = other DNA
atggagccaaggtctatggaatacttttgcgctcaggttcaacaaaaagacgtggggggacgacttcaagtgggccaagagctgcttctttatttgggtgcccctggcgctatttcggatctcgaagaagacctgggacggctggggaaaaccgtggacgctctgaccgggtgggtcggcagctcgaattacagagtgagcctgatgggattggagattctttcagcgtttgttgatagattaagtacacgtttcaaaagctacgtggccatggtgatcgtcgccttaatcgacagaatgggagatgcaaaggataaggtgagagatgaagctcagacactgattctcaaactaatggaccaggtggctccccccatgtacatctgggagcagttggcaagcggttttaagcacaaaaacttcagaagccgggaaggtgtatgtctttgcctgatcgaaaccttaaacatttttggcgcgcaacctcttgtgatcagtaaactcattccccacctctgtatcctctttggggattcaaacagccaggtacgcgacgcggctatattggccattgtcgagatttaccgccacgtgggggagaaagttagaatggatttatacaagcgcggtatcccgcccgcgcggttggaaatgatttttgccaagtttgatgaggtgcagtcaagtggtggtatgatcctgtccgtatgtaaggacaagtcatttgacgacgaagagagtgtcgacggaaataggcctagcagtgccgcctcggcattcaaggtccccgcgcccaagacctctggcaaccccgccaattctgctcggaaaccagggagtgccggcgggcccaaggtcggggcaggagcaagcaaggagggcggggccggggccgtagatgaggacgatttcatcaaggcatttaccgacgttccctctattcaaatctattcctcccgagagcttgaagagacactgaataaaatacgcgagattctgagcgacgacaagcacgattgggatcaacgcgccaatgccttaaagaaaatccggagcctcctggtggccggggctgcccaatacgattgcttctttcagcatttgagacttttagacggcgctctcaagctctccgctaaagatctgcgctcgcaggtcgtgagagaggcctgcatcactgtcgcacacctttcaaccgtgttaggcaacaagtttgaccatggtgccgaggcgattgtccctactcttttcaatctcgttcccaattctgccaaggttatggctaccagtggctgtgccgccattcggtttatcattaggcacacccatgtccccagactaattcctcttatcacatccaattgtacatctaagagtgtgcccgttcgaagacgatccttcgagtttcttgacttgctcctgcaggagtggcaaacccactcgctagagaggcatgcagcggtactggtggagacaatcaaaaaggggattcacgacgctgacgccgaagcccgtgtcgaggctagaaaaacatacatgggactgcgcaatcacttcccaggtgaagcagagaccctctacaactccttagaaccatcttatcagaaaagtctgcaaacatacctgaagagttccgggtctgtggcgtccttgccacagtcagatagaagcagttctagtagccaggaatcccttaaccggcccttctctagtaaatggtccacagccaacccaagtacggtagctgggcgcgttagcgcggggagtagtaaagcgtccagcttgccaggctcgctgcaacggagtcggtccgacattgatgtgaatgcagctgctggggcaaaagcccaccacgcagcaggacaatctgttcgaagtggccgcctcggggctggtgcacttaatgctggctcttatgcgtcactggaagatacctctgacaaattggatggcacagcctccgaagacggccgggtccgtgcaaagctttctgcccctctggcgggaatgggtaatgctaaggcggacagtcgcggccgtagtaggacgaagatggtgagccagagtcagccagggagtcggtctggttcaccaggaagagtgctcactacaacagcgctgagcacagtgagtagtggggtgcagagagttctcgttaacagcgcgtcagcgcagaaacggtctaagatcccccgctcccagggctgtagcagggaggcctcacctagtcgtcttagcgtggctagatccagtaggatcccaagaccaagtgtcagccaagggtgtagtcgcgaggcctctcgcgagtcatctcgagatacctctcccgtgcgaagcttccagccgcttggtcccggttacggcatcagccaaagctcacgcttgtcgagtagcgtcagcgcgatgcgggttctgaacaccgggtcagatgtggaggaggccgtggccgacgcactgctcctgggggacatcaggaccaaaaaaaagccggcccgcagaaggtacgaatcctacggaatgcactccgacgatgacgccaattcagacgcctctagcgcatgcagcgagaggtcttattcaagcagaaacggcagcatccctacatatatgaggcaaacagaagacgtggctgaggtgctgaataggtgcgcctccagtaactggtcagagcgaaaggaaggcctgctcgggctgcagaatttattgaagaatcaacggactctcagtagagttgaacttaaacgcctgtgcgagatcttcactcgcatgtttgccgacccacatggcaaagtcttcagcatgtttttggagactctagtcgacttcatacaagtccataaagatgacctgcaggactggctgtttgttcttctgacccaactcctgaagaagatgggcgctgacctcctaggctccgtacaggccaaagtccagaaggccttggacgtcaccagagagtctttccctaatgatctccaattcaatatcttaatgcgcttcacggtagatcagacacagactccgtctctaaaagttaaggtagcaatactcaagtacatagagactctggcaaaacagatggaccctggagattttatcaattcctccgagacgcggctcgcggtctcccgggtgataacttggaccacggagcccaagagcagcgatgtgcgcaaagccgcccagagcgtcctcatttccctgtttgaactcaacacccccgagtttactatgctgctcggggcactccccaagaccttccaggatggtgctactaagctactgcataatcacctgcggaatactggaaatgggacccaaagtagtatggggagtcccctcacccggccaacacccagatctcctgccaattggtcatcccctctgacatccccaaccaacaccagtcagaacactctaagccccagcgcatttgattatgacactgaaaacatgaattctgaggacatatattcctcattgcggggggtcaccgaagccattcagaatttcagctttaggtcgcaagaagatatgaacgagcctttaaagagggacagcaagaaggacgacggggatagcatgtgtgggggccctgggatgagcgaccccagagccgggggggatgccacggattcaagccagactgccttggataacaaggcatcactgctgcatagcatgccgacccatagttctccccgctctcgcgactataatccctataactactccgactccatctcaccctttaacaaaagcgccttgaaagaagctatgtttgatgacgacgcggatcaatttccagacgatctgtctttagatcattcggacctggtagccgagctgctgaaggagctgtccaatcacaatgaacgggtcgaagaaagaaagattgcgctttacgagctgatgaaactcacacaggaagagtcattctctgtttgggacgaacattttaagaccattctgctcctgctgctcgaaaccttgggcgacaaggagcccaccattcgtgccttggctctgaaggtcctgagagaaattctgcggcatcagcccgccaggtttaaaaactatgccgaattgaccgtgatgaaaacactcgaggcccacaaggatccccacaaggaggtagtccgctcggccgaggaagcagccagcgtcttggccacttctataagccccgagcagtgcatcaaagtgctctgcccgatcattcaaaccgctgattaccctataaaccttgccgcaataaaaatgcagacgaaggtgatcgaacgcgtaagtaaagagactcttaacctgttgctgcccgagattatgcctgggttgatccaggggtatgataacagcgaaagctccgtgcggaaagcttgtgtcttttgcctcgtagcagtgcatgctgtgataggggacgaactgaaacctcatctttcgcaactgactggctcaaaaatgaaattgctcaacttgtacatcaagagagcccagacaggttcgggtggcgctgaccccaccaccgatgtatccggccagagctag

SEQ ID NO: 113795 - DNA, 3882 bp, synthetic construct
  misc_feature 1..3882: note = Description of Artificial Sequence: Synthetic coding sequence
  source 1..3882: mol_type = other DNA
atggcgatgggggacgacaagagttttgacgacgaggaatctgtggatggtaacaggcccagttcagccgccagcgccttcaaagtacctgcccctaaaacttcaggaaatcccgctaatagtgcacggaagccagggtctgcgggagggcctaaggtgggaggagcaagtaaggagggaggtgcaggcgcagtggacgaagacgattttataaaagccttcacggatgtaccaagtatacagatatactcttctcgggagctggaagaaaccctgaataagatcagagagatcctttccgatgataagcatgattgggatcagcgcgcaaatgcgctgaagaagatccgtagccttttggtcgccggagcagcccagtacgactgtttcttccagcacctgcgactgcttgatggagccttgaagctttccgcgaaggacctgcgtagccaggttgtccgcgaagcttgtattactgtcgctcatttgtccaccgttctagggaacaaatttgaccacggtgctgaggcaattgttccaaccctgttcaacctcgtgcctaactccgccaaggttatggccacatcgggatgtgccgctattaggtttattatcagacacacccacgtcccacgcctcatacccctgatcacaagcaactgtaccagtaagtccgtacctgtgcggcggcgcagctttgaattcttggatctcttgctgcaggaatggcaaactcactccctggagcggcacgcggccgtgctggtcgaaacaatcaaaaagggaatacatgatgcagacgccgaagccagggtagaggctcgaaagacatatatgggtttaagaaaccactttcctggtgaagccgagactctgtataactccctggagcctagctaccagaagagcctgcagacatatctaaagagcagcggttctgtggctagcctgccccaatccgatagatctagtagctcatctcaagaatccctgaatagacccttcagctccaagtggagcacagccaatccgtcaaccgtggctgggagagtctcagcggggtcttcaaaggcgtcctccctgccgggcagcctccagcggagcaggtccgatatcgatgtgaacgctgctgccggtgccaaagcacatcatgccgcaggacagtccgtgaggagtggtcgactcggagctggagcattgaacgctgggtcatacgccagtctggaggatacaagcgataaattggacgggaccgcctctgaagatggcagggtccgcgccaaattatcagctcctctggctggcatggggaatgctaaggctgatagtcggggcaggtcacggacaaaaatggtcagtcagtcgcaaccagggtctcgctctggttccccaggcagggttctgaccacaacagccctctccaccgtcagttcgggcgtgcagagagtgcttgtcaattctgctagcgcccagaagcgttccaagataccacggtcacaggggtgcagtagagaggcctcacctagcaggctttctgtagcgcgcagctcccgtatcccccgaccttcagtgtcccagggatgcagcagggaggcatccagagaaagttccagagatacatctcctgtgcggtccttccagccccttgcttcacgacaccactctaggtctaccggggccctctacgctcctgaggtgtatggcgcttccgggcccggatatggaatctcacagagctccagattgagctcaagtgtgtctgccatgcgtgtgctgaacacgggttcagatgtggaagaagccgtcgccgacgcactaaagaaacccgcgaggcgtaggtatgaatcctatgggatgcactccgacgatgacgccaactctgacgcctcctccgcctgctcagaaagaagttactctagccggaacggcagtatccccacatacatgcgccagaccgaagacgtcgctgaggtgctgaatcgatgtgcgtcctcgaactggtccgaaagaaaggaaggcttactgggtctacaaaacttactaaaaaatcaacgtaccctgagtcgcgtcgagcttaagcggctctgcgaaattttcactcggatgttcgcagacccccacggaaaggtcttcagcatgttcttagagacactggtggattttattcaggtacacaaggatgatcttcaagattggcttttcgtgctgctgacccagctgctgaaaaaaatgggcgcggatctgctgggcagcgttcaagctaaggttcagaaggctctcgacgtgacacgcgagtctttcccaaatgatttacagttcaacatcctgatgcgcttcaccgtagaccagacccagactccatccctcaaggttaaggtcgctattctcaaatacattgagaccctagctaagcagatggatccaggtgattttatcaacagtagtgagacaaggctggcagtgtcgcgagttattacttggacaactgagccaaagtcttccgatgttcggaaagctgctcaatccgttttgattagcctctttgaactgaacactccagaatttaccatgcttctgggggcactgcccaagaccttccaggatggagcaacaaagctgctgcataatcatctgcgtaatacaggtaacggcacccaaagtagtatgggaagcccacttactcgtcccacacctaggtccccagctaactggtcttcccctctgacttcgcctaccaacactagccagaataccctctccccaagcgcattcgattacgacactgagaacatgaactcagaggacatttattcctctttacggggtgtcaccgaggcgattcagaactttagctttcgctcccaggaagatatgaatgagccactgaaaagagattctaagaaggacgatggcgactccatgtgcgggggccccggtatgtcagatccgcgagctggtggcgatgccaccgattccagccagacggctctcgataacaaggcttcactcctgcattcaatgccgacgcactctagtccacgaagccgggattataacccatataactactcagactccatttcccccttcaacaaaagtgcactcaaggaagctatgtttgatgacgatgccgaccagtttcctgacgatttatccctggatcactcggacttggtggcagaactcctgaaggaattgtctaatcacaacgaaagggtagaggagcgcaagatcgcactatacgagctgatgaaactgacgcaggaagagagtttttcagtgtgggacgaacactttaaaactatcctgctcctgctgctggagaccttaggcgataaagaaccaaccatacgagccctggcattaaaggtcctgcgtgaaatcctgcgacaccagcccgctcgtttcaagaattacgccgagcttacggtcatgaaaacactagaggcccacaaggacccacataaggaagtcgtgcgatcagctgaagaagcagcttccgttctagctacgtccatctcacccgaacagtgtatcaaggtcctgtgccctatcatccagactgctgattatccaatcaatcttgcagctattaaaatgcagactaaagtaattgagcgcgtttctaaagaaacacttaatctccttttaccggagataatgcctggactcattcaggggtatgacaactccgagtcttccgtgaggaaggcatgtgtgttctgtctggtggccgtccatgcggtgatcggtgacgaattgaagcctcatctgagccaattaactggttctaaaatgaaacttctaaatctctacatcaagagggctcagaccggctcaggtggggccgatcccaccactgatgtttccggccaatcttag

SEQ ID NO: 113796 - DNA, 3192 bp, synthetic construct
  misc_feature 1..3192: note = Description of Artificial Sequence: Synthetic coding sequence
  source 1..3192: mol_type = other DNA
atgcgcaggctgatatgtaaaaggatttgtgactataaatcttttgatgatgaagagagtgttgacggcaataggccatctagcgccgcgtccgcattcaaagtcccagcccccaagaccagtggtaatccagctaactctgctcggaaaccaggctctgctggcggtcccaaagtgggagaactgctctccatcatgatatactcgtcgagggaactagaggagacactcaataaaattagggaaattctgtctgatgataaacatgattgggaccagcgagcaaatgcgctaaagaagattagaagtttgctggttgccggtgcggcccagtatgattgcttctttcaacatctgcggttgctggatggagccctcaaactgtcagccaaagatctacgctctcaggtggtgcgcgaagcgtgtatcaccgtggcccaccttagcactgttttggggaataaatttgatcatggggctgaagcaatcgtacccaccttatttaacttagtgccaaatagtgcaaaagtaatggccacatctggctgtgcagcaatacgcttcataatcagacacacacacgtccccagactgatccccctgattacatcaaactgtacctctaaaagcgtgcccgtacgcaggcgatcattcgagttccttgacctcttgttacaggagtggcagacccattcactcgagcgccatgccgccgtgttagtcgagaccatcaagaaaggaattcatgacgcggacgccgaagcacgagtggaggctcgtaagacctatatgggtctgaggaaccactttcccggggaggccgagaccctatacaatagtttagagccttcctaccagaaatcccttcagacttacctcaaaagctccggaagtgtcgcctcactcccgcagtcggaccgctcttcttccagctcccaggaatcgctcaaccgtcctttcagctcaaaatggtccacggctaacccgtccacggtggcaggtcgtgtgagcgccggaagttctaaagcctcaagcctgcccgggtcactccagagaagccggagcgatattgacgtcaatgcagccgccggggcaaaagcccaccatgccgccggccagagtgtcagaagcggccgccttggggccggggcactcaacgcaggctcatatgcatctcttgaggacacatcggataagctggacgacctgttctcagacaacgggcgggttagggccaaactgtcagcgcccctcgccggcatggggaatgccaaagcagacagccgaggaagatcgagaaccaaaatggtgtcccagtcccagagatcatcttcccctgataagaatgagggatcacagagtgctaacaccatcggcgcaggctcccgttctggcagcccaggcagagtgctcaccacaactgccttgtctacagttagttctggagtgcagcgtgtactggtgaatagcgcctcagcacagaagcggtctaagatacccaggtcacagggatgcagtagggaggcctcaccctcgagactctccgtggctcgctcgagtcgcatccccagaccctccgttagccagggctgcagtcgcgaggcttccagggaaagtagcagagatacctcaccagtacggagctttcagcccctgggaccgggatatggaatcagtcagtccagccgcttatcctcttcagtcagtgcaatgagggtactgaacaccgggtccgatgttgaagaggccgtcgccgatgctttggttcttttcgattttaaaactaagaagaagcctgctaggcgccgatacgagagctacggcatgcactcagatgacgatgccaactccgacgcctccagtgcttgctcagaacggtcctatagttctcgtaatggaagcattcccacctacatgcgacaaacggaagacgtcgccgaggtgctgaaccggtgcgcttcatccaactggagcgagcgcaaagaaggacttctgggcttacagaacctcctcaagaatcagcgcaccctgtctcgcgtcgagttaaagcgcctgtgcgagatttttacaagaatgtttgcagaccctcatggaaaggtgtttagcatgtttctagaaacacttgtggacttcattcaggtgcacaaggatgatcttcaggattggctattcgtgctactgacacagctgctcaagaagatgggagctgacctgctgggcagcgtccaggctaaggtacagaaagctcttgacgtcactcgcgagtcgtttccaaatgatctgcagtttaacatactcatgcggtttacggtcgaccaaacccagacgccctccctgaaggtaaaggtagccatcctaaaatatatagaaacactcgcgaaacagatggatcccggggattttatcaactcttctgaaactagattggctgttagccgagtgattacttggacaaccgaacccaaatcatcggatgttagaaaggccgctcaatccgtgctcattagtcttttcgaattaaatacacctgagtttactatgttactgggcgcccttccaaagacctttcaagatggcgctaccaagctgcttcacaatcatctgcggaatacagggaacgggacgcaatccagtatgggcagtccgctgacaaggccaacaccgagaagccctgccaactggtcttcccctctgacttcccccaccaacacttcccagaacaccctctcgcctagtgccttcgactacgacaccgagaacatgaattccgaagacatttattcatcactccgtggggtcaccgaggccatccagaacttttctttcagaagtcaggaggatatgaatgagccgttgaagagagacagtaagaaggacgacggagacagtatgtgtggaggtcctggcatgagtgatccgagggctggcggagacgctacagactcatcccagacggccttggacaacaaagcaagtctcctgcattcaatgcctacacattcaagcccccggagtagagattacaacccctataattattcagactctatatccccgtttaataaatctgctctgaaagaggccatgttcgatgacgacgcagatcaatttcctgacgacctcagcctggatcattctgacctggtggccgagctcctgaaggagctttcgaatcataatgaacgggtgtag

SEQ ID NO: 113797 - DNA, 1680 bp, synthetic construct
  misc_feature 1..1680: note = Description of Artificial Sequence: Synthetic coding sequence
  source 1..1680: mol_type = other DNA
atgccccctccaagcccggacagtgaaaatggattttatcctggactgccaagttcaatgaacccggcattcttccccagcttcagccccgtctcccctcatggttgtaccggtttaagtgtgcctacttcgggcggcgggggaggcggtttcggaggccccttcagcgcgaccgccgtgccccctcccccacctcccgctatgaatattccccaacaacagcctccacctcccgctgccccccaacagccacagtctagaaggagtccagttagccctcagcttcagcagcagcaccaagcagccgcagcagcatttctgcagcagaggaactcctacaaccatcatcaacccttgctgaagcaatctccatggagtaaccaccagtccagcggatggggcaccggcagcatgagttggggagccatgcacggacgggatcacagaagaacaggcaacatgggtatccccggaacaatgaaccagatttcgcctctgaagaaacccttttctggtaacgtgattgctcctcccaaatttacccgctccacgccgtctctgacaccaaagagttggatagaagacaatgtattccgaaccgataataactccaatactcttttgcccttacaggacaggtctcgcatgtatgactctctaaatatgcacagcctggagaattccctaattgacatcatgcgggcagagcatgaccccttaaaggggagacttagctatcctcacccaggcaccgacaatcttcttatgctcaacggaagatctagcctcttccctatcgatgacggactactagacgatggtcattctgatcaggtgggagtgctcaactctcctacttgctactctgctcatcaaaacggcgagcgtatcgagcgattctccaggaaggtgtttgtggggggactgcctcctgacatagatgaggatgaaattacagcttcttttcggcgctttggcccattagtggtggattggcctcataaggccgagtccaaatcatatttcccccctaagggctacgctttcctgctgtttcaggaagagtcttctgtgcaagccctcattgatgcctgtatcgaggaggacggaaagctgtacttatgcgtatcttccccaaccataaaggacaagccagtccagatccgcccatggaacctcagcgatagcgattttgttatggatggctctcaaccattagatccccgtaaaaccatttttgtcggcggtgtcccgaggcccctgagagccgttgaactggccatgattatggacaggctgtatggcggagtgtgttacgccggtatcgataccgatcccgaactgaaataccctaagggcgcaggaagggtggcttttagcaaccaacagagctacatcgccgccatctccgctcgatttgtccagctgcagcacggcgatatcgacaagcgagtggaagtaaagccttacgttctcgacgaccagatgtgtgatgagtgccagggcgctcggtgcggtgggaagtttgctccattcttctgcgccaatgtaacctgcctgcaatattactgtgagttttgttgggctaacatccattccagagcaggcagagagtttcataagcctctcgtcaaggaaggggcagatcgaccgcgccagattcacttccgatggaattag

SEQ ID NO: 113798 - DNA, 1731 bp, synthetic construct
  misc_feature 1..1731: note = Description of Artificial Sequence: Synthetic coding sequence
  source 1..1731: mol_type = other DNA
atgcccccaccgtcccccgactctgagaacggcttttatccgggactcccaagtagtatgaatcccgctttcttcccctccttctctccagtgtcgccacacggctgcactggcctgagcgtgccaccaccacccgcaatgaacattccacagcaacagccaccacccccagctgcacctcaacaaccacaaagcaggcgctctccggtgtcaccacagctccagcagcagcaccaggctgccgctgctgcatttctacaacagcgcaactcctacaaccaccaccagccactacttaaacagagcccttggtcaaaccaccagtccagcgggtggggcacgggatcaatgtcttggggagctatgcacgggagggatcaccgtcgaaccggtaatatgggtataccaggaacaatgaaccagatctcaccattgaagaaaccattcagcggcaacgtgattgcccctcctaagttcacccgcagcacaccgagcctcacccctaagagttggatcgaggataatgtcttccgaactgacaacaacagtaacacactgctcccactccaggtccggtcctccttgcagctgccggcctggggctccgattcccttcaggatagttggtgtacggcagccggcactagccgcatagatcaagacagatcccggatgtacgatagcctgaatatgcacagcctggagaactccctcattgatataatgagggccgagcacgatccgctcaagggaagactgtcctatccccatcccggcactgacaacctcctgatgctgaacgcacgctcctacggtagaaggcgggggaggtcttcactgttcccgatcgacgatggactgctggacgacggacatagtgaccaggtgggtgtccttaattctcctacttgttatagtgctcaccagaacggtgaacggatcgagcggttttcccggaaagttttcgtcgggggcctgccaccagatatagacgaggacgagatcactgcgagtttccggaggttcggtcctctcgttgtggactggccccataaagcagaatcgaaatcctactttccgcccaagggatatgcctttctgcttttccaggaggaatcgagtgtgcaggcccttattgacgcttgcatcgaggaggatgggaagctgtacctctgcgtcagttctcctaccattaaggacaagcccgtgcaaatccgcccctggaacctgagtgatagcgattttgtgatggacggttcacagcctctggatccacgcaaaactatctttgtgggaggggtgccccgccctctgcgggccgttgagctagccatgattatggatcggttgtacggcggtgtctgttacgccggtatcgacacagaccctgagcttaagtatcctaagggtgccgggagagtcgctttttctaaccagcagtcatacatcgccgcaatatctgctagattcgttcagctgcagcacggtgacatcgacaaacgcgttgaggttaaaccgtacgtgctcgacgatcagatgtgtgacgagtgtcagggcgctagatgcggcggcaagttcgcaccctttttttgcgcaaatgtaacatgtctgcagtactattgtgaattctgttgggccaacatccattcccgcgccgggcgggagttccataaacccctggtgaaggagggggcagaccgcccgcgccagatacattttagatggaactag

SEQ ID NO: 113799 - DNA, 1704 bp, synthetic construct
  misc_feature 1..1704: note = Description of Artificial Sequence: Synthetic coding sequence
  source 1..1704: mol_type = other DNA
atgccgcccccttctccagattccgaaaatggcttttaccctggcctgccttccagcatgaatcctgcattctttccatccttctctcctgtctccccacacggatgtacaggcctgagcgtccctacttccggggggggagggggcggttttggtggtccgttctctgcaacggctgtgcctcctcctccccctcctgccatgaatattccccagcagcagccaccgcccccggcagccccacaacagcctcagagcaggagatcacccgtctccccacaactccagcagcaacatcaggccgccgcagccgccttcctgcaacaacggaacagttataaccatcaccaacctctcctaaaacagtctccctggagtaatcaccagtcctcggggtggggcacaggatcaatgtcctggggagcaatgcatggccgcgaccatagaagaaccggaaatatggggataccaggaacaatgaaccagatctcgccattgaagaaaccattttcaggaaatgtgatagcaccaccaaagtttacgcggtccacccccagccttacaccaaaatcgtggattgaagacaacgtattcagaacagacaacaactccaatactctgttgccactccaagatcggagcaggatgtatgacagtctgaacatgcactccttggaaaattctttgatcgacattatgagagctgagcatgacccactgaagggacgcctgtcataccctcatcctgggacagataacctgctgatgctgaatgcccgaagctatggccgcaggagaggacgcagtagcctgttccccatcgacgacgggcttttagacgatggacacagcgatcaggtgggagtattgaattctcccacgtgctactccgcacaccagaacggcgaacggatcgaacgcttctcccggaaagtgttcgtcggaggtctgccgcccgacattgatgaagacgagatcactgcctctttcagacggttcggtccactagtggtcgactggcctcacaaggcggaatctaaaagctatttcccccccaaggggtacgcctttctgctgtttcaggaagagtcctccgtccaggctctgatcgatgcctgtatagaagaagatggcaaactgtacctgtgcgtatcatccccgaccatcaaggacaaaccagttcaaatcaggccttggaacctgagtgactcagactttgttatggacggctctcagcccctggatccacggaagaccatttttgtcggcggcgtgcctagaccgctgcgggcagtggagttggccatgataatggatcgtctgtatggaggagtgtgctacgcaggcattgacacggatcccgagctgaagtatcccaagggggccggcagagtggctttctcaaaccagcaatcttatatcgctgccatcagcgctagatttgtacaactgcagcatggcgatatcgacaagagggtggaggtcaagccgtatgttcttgacgatcagatgtgtgacgagtgccaaggcgccagatgcggtggcaagttcgctccttttttttgcgccaacgtaacctgcctgcaatattattgtgagttctgttgggccaatatacattccagggccggccgggaattccataagcctttagtcaaagagggtgcagatcgccccagacagatacattttcggtggaactag

SEQ ID NO: 113800 - DNA, 1689 bp, synthetic construct
  misc_feature 1..1689: note = Description of Artificial Sequence: Synthetic coding sequence
  source 1..1689: mol_type = other DNA
atgcccccaccatcccccgactccgagaatggattctacccaggactgccttctagcatgaatcccgctttttttccatcgtttagtccagtgagcccccacgggtgcacaggtctctccgtgcccacctccggagggggaggtggcgggttcggcggcccttttagcgctactgcagttcctcccccgccaccaccagccatgaatattcctcagcaacagcctcctccacccgccgcaccacagcagcctcaaagccgtcgttccccggtgtcccctcagctgcaacagcaacatcaagccgccgcagctgctttcctgcaacaaagaaactcatataatcaccaccagcccctgcttaagcagtctccatggagcaaccaccagagctcagggtgggggacagggtcaatgagctggggcgcaatgcacggccgggatcacaggcgaacaggcaacatgggcattcccgggaccatgaatcagatctccccactcaagaagcccttctctggaaacgtcatagcacccccaaaattcaccagatccacccctagtctgacaccgaagtcttggatagaagacaacgtttttcgaaccgacaataatagcaacactctgctaccgctccaggtccgcatggaccgctcccggatgtatgattctctcaacatgcactcgctggagaattcactgatcgacatcatgcgcgcagagcacgatcccctgaaaggccgactgagttacccacatcccggtacggacaacctgctgatgctgaatggccggtcttcactatttcccatagacgacggcctgctggacgacgggcactccgatcaagtcggcgtactaaatagccctacttgctactctgcccaccaaaatggagaacgaatcgagcgattctccagaaaggtgtttgttgggggcctgccaccagatatagatgaagacgagattacggcatcgttccgtaggtttggcccactggtggtggactggcctcataaggcagagtccaaaagttacttcccccccaagggatacgctttcctcctattccaagaggagtctagcgtccaggccctgatcgatgcatgtattgaggaggatggaaagctgtacctctgtgtcagcagccccactataaaagataaaccggtacagatcagaccatggaacctctcggattccgatttcgtgatggacggaagccagcccttagatcccagaaagaccatctttgtgggcggggtcccccgaccactgcgggccgtagagctggctatgatcatggatagattgtatggcggagtgtgttacgccggaattgatacagaccccgaattaaaatacccaaagggcgctggaagggtggccttttcaaaccaacagagctacatcgctgctatcagtgctcgatttgtgcagttgcagcacggggatatcgataaacgtgtggaagtcaaaccctacgtgctggacgatcaaatgtgtgatgagtgccagggcgctaggtgcggcggcaagtttgctcccttcttttgcgcaaacgtcacctgtctgcagtattattgtgaattttgctgggccaatatccactcacgggctgggcgggagttccataagccactcgtaaaggaaggcgctgatcgtccccgacagatacatttccggtggaactag

SEQ ID NO: 113801 - DNA, 3024 bp, synthetic construct
  misc_feature 1..3024: note = Description of Artificial Sequence: Synthetic coding sequence
  source 1..3024: mol_type = other DNA
atgcgtgactttggattcggagtgctgcagaccgcccctcttagaagttcttccccagggccactattctgtggcgaagcctacggtccatacgccgtgggctctgtcaacccactaccgtctgcaaccccatttggaccactcagcccacccccattacctgtgacgggtttcctcgaagccgcatcacctttctccgtacccctcgggggcggtgcaggctcccctgctgcagcagcctcgagcagtagcccctttctggcacaccagcaaaccatgcaggacgagctattattgggcttgacccagcagccagcaagaccgttgagcggggccgccgcaaccgaaaagctgcctgaccaccatccaggaggaggcacgatcgcaggggtgacccatttgctgccctctcaggattttaaacctagtctgcaccaccccagctccagctcagccagctcatgctgttgctgtaggacgtcaagccctcaggacttcagcaagagacaacagcagcaactgtcttcccaaaaacggaaggagtttagccctccacacctgccacacccccccgacagtaaaccacctccccctccgccaccactgcactgccctggccggttctcccctcccccgccaccggccggcccgctgctgcagccggcacagctggcccagcgccagcagcagcagcctcctcaacaattcagcctgcttcaccagcagcacctatccccgcaggactttgcccctagacagagacccgcagacctaccgcctctcccacagctgccacccagtccccccgccgctccccgccgcagacatggcggggccggttcccctcgcaaaacccccgccgccggagaggggagtgctgcagagtctccaaacgcaggcctggcatcgtcgacccctgttaaccccgcccctggttccatggaaagccctaaccaccctctactgaattcaccctccaaccttttaccagggggcgcgctcggtgccggcgctttctcctccctgcagagcccggacttgcctcaccccggaggcggtggcggcggcggcggcggaggccctccaggggggggcgggggtggaggttctgcgagccctccacctctgccgggtttcgggaccccctggtctgtgcagacagcaagcccccccccgcaaccccagcaacctccccctacacagccacagcaacagcctccaccacctcagcagcccccacaaccccaacctcagccccctggaagtagcgcaaccactcctggggggggcagcggaggcagtctgtccgcaatgcctccgccatcccctgacagcgagaacggattctatcctggcttgcctagcagtatgaatcctgcttttttccccagcttcagtcctgtgtccccccatggttgtaccggcctgagcgtcccgacttctggcggtggaggcgggggattcgggggccctttttctgccaccgctgtgccaccccctccacctcctgcgatgaatatcccacaacagcagccccccccgcccgccgcaccgcagcaaccacagtcaagacgatcacctgtgtccccacagctgcagcagcagcaccaggctgcagcagcagcgttcttgcagcagagaaacagctacaaccaccaccagcccttgctgaagcagagtccctggtcaaaccatcagtcatctgggtggggcaccggaagtatgtcttggggagccatgcacggccgcgaccacaggcggacaggcaatatggggattccgggtactatgaatcagattagccctttaaagaaacccttctcagggaatgtgattgctccacccaagttcactcggtctactccgagcctgacgcccaaaagctggattgaggacaatgttttcagaactgataataacagtaatacattgctccccctgcaggtgcgaatggaccggagtcggatgtacgactccctaaatatgcattcgctggagaattctctgatcgacataatgcgagcagaacacgacccgctgaaaggacgccttagctatccgcaccccggtacagacaatctgctgatgctgaatgcgagaagctacggaagaagaaggggtcgctcctctttatttccaattgatgacggattgctggacgacggacattcagaccaggtgggagtgctcaattcaccgacctgttactctgcacatcagaatggagagagaatcgaacggttctcacgcaaagttttcgtgggcgggctcccgcctgacattgacgaggatgaaatcacagcttcttttcggaggttcggacctctggtagtcgactggcctcataaggctgaatcaaaaagttactttcccccaaaaggctacgcctttcttctttttcaggaggagtcttcggtgcaggcactgatcgacgcctgcatcgaggaagacggaaaactgtacctgtgtgtgagtagtccaaccattaaagacaagccagtccagattagaccgtggaacctaagtgatagcgatttcgtcatggacggatcacagccactggacccccgcaagactatctttgtgggaggggtgcctcgcccactgcgcgccgtcgagctggcgatgatcatggacagactgtatggaggagtctgctatgcgggaatcgacacagacccagaactgaaataccccaaaggtgcaggtcgcgtggcattttcgaatcagcaaagttatatcgcagctatctccgcgaggttcgtccagctccaacatggggacattgacaaaagagtggaggtgaagccctatgtgttggatgaccagatgtgtgacgagtgccaaggtgctcgctgcggtgggaaatttgccccatttttctgtgctaacgttacatgcctgcagtactactgtgagttctgttgggccaacatacatagtcgggccgggcgtgagtttcacaagcctctggtaaaagagggagcagatcggcctagacagatacatttcagatggaactag

SEQ ID NO: 113802 - DNA, 1770 bp, synthetic construct
  misc_feature 1..1770: note = Description of Artificial Sequence: Synthetic coding sequence
  source 1..1770: mol_type = other DNA
atgccacctccttctccagattctgaaaatggtttctaccccggtctcccatctagcatgaatcccgctttctttcccagcttcagtcctgtctctcctcatggctgcactggcctttccgtgccaacttctgggggaggcgggggaggattcgggggaccttttagtgctaccgccgtgccaccccccccccccccagccatgaatatcccacaacaacagccacctcctcctgccgcgccccagcagcctcagtcacgccggtctccagtatccccccaactgcagcagcagcatcaggcagccgccgccgcatttcttcagcagagaaatagttacaatcaccaccagcctctgttgaagcagagcccatggtcgaaccatcagtccagcggctggggcaccggatctatgagttggggagctatgcatgggcgagatcatagacggacagggaatatggggattccaggaacaatgaaccagattagtcccctcaaaaagcccttctccggaaatgtaatagcaccgcctaaattcacaagaagtaccccgtctcttactcccaaaagttggatagaggataatgtttttagaactgataacaattctaacacactgttacctctgcaggtaagaagctcactccagctcccggcatgggggtctgacagcctccaagatagctggtgtaccgccgctggcacctcccggatcgatcaggaccgttcacgaatgtatgattccctgaacatgcattcgttagagaattctctcatcgacataatgcgggccgagcatgacccgctaaaaggtcgccttagctacccgcaccctggtaccgacaatttactgatgctcaatggacggagttccctttttcctatagacgacggtctgcttgatgatggacactccgatcaggttggcgtcctcaacagtcccacgtgttactccgcccatcagaacggagaacgaatcgagcgtttcagccgtaaggtcttcgttgggggattgcctcctgatattgacgaggacgagattacagccagctttcgtcgcttcgggccactggtagtggattggccccacaaggcagagagcaaaagctattttccgccaaaaggctacgcgttcctgctgttccaagaggagagcagcgtccaggccctgattgatgcttgcattgaggaggatggtaaactatacctgtgcgtttctagtccaactattaaggacaagcctgtccagattaggccctggaacttgagtgacagcgatttcgtaatggacggctctcagccactggacccacgaaagacaatcttcgtgggcggcgtccctcgaccactgcgcgccgtcgagctggccatgatcatggataggctctacgggggcgtgtgctacgcgggtattgacacagacccagaactcaaataccccaagggcgcaggacgcgtggcattctctaaccagcaatcttacattgcagctatctcagcccggtttgtccagctgcagcatggagacattgataaaagggttgaggtgaagccctatgtgctggatgaccagatgtgtgatgaatgtcaaggggcccgatgtggaggcaagtttgctccgtttttctgtgccaatgtgacatgtctgcaatattattgtgagttttgttgggccaatatccattccagggccggacgtgagttccataaaccactagtgaaggagggcgctgatcgaccccgacagatccattttcggtggaactag

SEQ ID NO: 113803 - DNA, 3105 bp, synthetic construct
  misc_feature 1..3105: note = Description of Artificial Sequence: Synthetic coding sequence
  source 1..3105: mol_type = other DNA
atgcgagatttcgggtttggcgtgctacaaacagcacccttgaggtcttcctcacccggcccgctcttctgcggggaggcctatgggccttacgctgtgggtagcgtcaaccccctccccagcgctacgcccttcggacctctttcccccccccctctgcctgtgaccggcttcctggaggctgcatccccgttttcagtgcccttaggtggcggggcgggctcacctgctgctgctgcatcctcttcctctccgttcctggcgcaccagcagaccatgcaagatgagttgcttctaggcctgacgcaacagccagcaagaccgttatcaggagccgccgccaccgaaaagctacctgaccatcatccggggggagggaccattgctggcgtgacccacctgcttccatcccaggatttcaaacccagcctccatcatccatccagttcatcggcatcatcatgttgttgctgtaggacctccagtccccaggacttttccaagaggcaacagcagcagctgtcatctcagaaacgcaaagaattttcaccgccccatttgcctcaccctccagactccaagcctccacctcccccccctccgctccattgtccaggacggtttagcccaccaccacctccagctggtcctctgctgcagcccgctcagctagcacagcgccaacagcagcaaccacctcaacaatttagcctcttacatcaacagcacctgtctccacaggattttgcgcccaggcagaggcccgctgaccttccgcctctcccacagttgcccccctcacctcctgccgccccacgtcgaaggcacggtggggccggaagccctagaaaaactccagccgccggcgagggttcagcggccgaatcacccaacgccgggttagctagttccactcccgtgaatccagccccgggatccatggaatcccccaatcacccccttcttaatagtccctcgaacctgctccctgggggggctctcggcgcaggagcctttagctccctgcagtccccagaccttcctcaccctggcgggggtggagggggcggtgggggaggaccgccaggaggagggggtggaggtggaagcgcaagtccccccccgctccctggctttggcacgccctggagcgtacagacagctagtcctcctccccagccacagcaaccacctcctacccaacctcaacagcaaccccctcctccgcagcagccaccacagccccagccgcagcccccaggctccagcgccaccacaccaggaggcggcagcgggggatctctttcagcaatgccccctcccagtcccgactccgagaacggcttttatcctggattgccgtcctccatgaatcctgccttttttccatctttcagccccgtgtcgccccacgggtgtacagggctcagcgtgccaactagcgggggcggaggtggagggttcggaggcccattctctgccaccgcggtgccaccgccgccgcccccagctatgaacattccgcagcagcagcctccacctccggccgctccacagcagccacaatcccgacggtccccggtatctccccagttacagcagcagcatcaagcagccgcggcagcatttctgcagcagagaaactcctataaccaccatcagcctctgttaaagcaatctccctggagtaatcaccagtcaagcggttgggggactgggtctatgtcttggggagcaatgcatggcagggaccatcggagaaccggcaacatggggatcccgggcacaatgaaccaaatctctcccttaaagaaacccttctccggaaatgtcattgcgcctccaaaatttacccgaagcacgccctccctgacaccaaaaagttggatcgaagacaacgtctttcgcacggataataacagcaacactctgttaccgctacaggtgcggtctagcctgcagctgcctgcctggggatccgactcactgcaggactcgtggtgtacagccgcaggaacatcaaggatcgatcaggatcgcagtagaatgtacgattcgctgaatatgcattcactagaaaattccctaatagatattatgcgggcagagcacgacccactgaagggtagattgagttatccccaccctggtacagacaacctattaatgctcaacgctcgcagctatggaagacggcggggcaggtcatcccttttccccatcgacgacggtctcttagacgacggacactccgatcaggtgggagtcctgaactcacctacatgctactctgcccaccagaatggagaaagaattgagagatttagccggaaagtttttgtgggcggactgccaccagacatcgacgaagacgaaatcacagcatcttttagacgttttggacccctggtcgtcgactggcctcacaaggctgagtccaaaagttacttcccacccaagggttatgccttcctcctctttcaggaggaatccagcgtacaggcgcttatcgacgcctgcattgaggaagatggaaaactgtatctgtgcgtgtcttcccccacaattaaggacaaacccgtacaaatcaggccctggaatctgagcgacagtgacttcgttatggacggctctcagcccttggatccgagaaagactatattcgtgggcggcgtgccccggcctctcagagccgtagaacttgctatgatcatggaccgactgtacggtggggtctgctacgcgggcatcgatactgatccagagcttaaatatccaaagggcgcgggcagagtggcattctctaatcagcaatcctacatcgcggcgataagtgctcgcttcgtacagttacagcatggcgacattgataaacgcgtcgaggtgaagccatatgtgctcgatgaccaaatgtgtgacgagtgccagggggctcgatgtgggggcaaattcgccccttttttttgtgcaaatgtgacctgcctccagtactattgcgagttttgttgggcgaacatacattccagagctggacgtgaattccataaaccactggttaaagaaggagcggataggcctcgccagatccactttcggtggaattag

SEQ ID NO: 113804 - DNA, 3081 bp, synthetic construct
  misc_feature 1..3081: note = Description of Artificial Sequence: Synthetic coding sequence
  source 1..3081: mol_type = other DNA
atgcgcgatttcgggtttggagtccttcaaacggcgcctctgcgcagcagttccccgggccctttattttgtggggaggcctatggtccctacgctgtcggatccgtgaacccgctcccgagcgctactccattcgggcccctctcacctccccctcttccggtgaccggattcctcgaagcagcttcgcccttctccgtccccttggggggcggagctgggtctccagcggcagctgccagctccagttccccatttctcgcacaccagcagactatgcaagacgagcttttgctcggactgacccagcagcccgcccggccactaagcggagccgcagccactgagaagttacctgaccaccatcccggaggggggaccatcgccggagtaacacacttactgccaagccaagacttcaaaccgagcttgcaccaccctagcagttcatcagcctcatcctgttgctgctgccgcacatcttcccctcaagatttttccaaacgacagcagcagcaactttctagccagaagagaaaggagttttcacctccccacctaccccatccccccgactccaaaccaccccctcctcccccaccacttcattgccccggtagatttagcccccccccccctccagccggcccactgctacaacccgcccagttggcacagcggcagcagcaacagcctcctcagcagttcagtctgctgcatcaacaacacttgtctccacaggatttcgcacctcgtcaacgcccagcagaccttcccccactcccccagcttccccctagtcccccagcagccccaagacggagacacggcggcgccggttctccacgtaaaacacccgccgcgggggagggaagcgctgctgaatctcccaatgccggtctcgcttcctccacgcccgtcaatcctgcaccgggttccatggaatcccctaaccaccctcttcttaactcaccctctaatctgctccctggaggtgccctaggcgcgggggcattttcctctctgcagtcccctgatctgccccaccctggtggcggggggggcgggggaggtggcggcccccctgggggaggaggcggcggcggatcagcgtcaccaccccccctgccgggctttggaacgccctggtccgttcagacggcctccccgcccccacagccacagcaacccccacccacccaaccccagcagcagccacctcccccccagcagcctccccagccccagccgcagccccccggcagcagcgcaacaacccccggtgggggctcaggtggatccctatccgccatgcctccaccatcacctgatagcgagaatggcttttacccgggcctgccctcttcaatgaaccctgcattcttcccctcattttcacctgtaagcccccatggctgcaccgggctgtccgtgcctacatcaggaggtggcggtggggggtttggcgggccattctctgcaacagctgttccccctccccctccccctgccatgaatatccctcagcagcagccacctcctcctgccgccccacaacagccacagtcgcggaggtctcccgtaagtcctcagctgcaacagcagcaccaggcggctgctgccgcgtttctgcagcagcgcaactcttataatcatcaccagccacttttgaagcagtcaccctggtctaatcatcagagttctggatgggggacaggctcaatgagctggggggctatgcatggcagggatcaccgcaggaccggcaatatgggaatccctggcacaatgaaccagataagcccactcaagaaaccattttcaggcaacgtcatcgcacccccaaaattcacacggagcaccccttccctcacccccaagagctggatcgaagacaacgtgtttcgaacagataataattcaaacactctgctacctctccaggtgcggagctccctgcaactgcctgcttggggatcagatagcctgcaggactcttggtgtacagccgccggaacttctcgcatcgatcaggacagaagtagaatgtacgactctctgaacatgcactctctggagaacagccttatcgatattatgcgcgccgagcatgatccactcaaagggaggctcagctatcctcaccctgggactgataacctgttgatgttgaacggacggagttctttgtttcctatcgatgatggtttgctggatgacgggcattctgaccaggtgggtgtgctcaactcacctacctgctatagcgcccaccagaatggggaacgaatcgaacgattttcgcgtaaggtattcgttgggggactgcctccagatatagatgaggatgaaattaccgcatccttccggcgcttcggccctctcgttgtcgattggccccataaagccgagtccaaaagctatttccccccgaaggggtacgctttcctgctctttcaggaggagtcctccgtccaggcccttatcgatgcctgtatagaagaggatggaaagctgtacctgtgtgtgtcgagccccaccatcaaagataaacccgtacagattaggccctggaacctgtctgatagcgacttcgtcatggatggatctcagccccttgacccgaggaaaactatctttgtcggcggagtcccacgtcccctgcgagcggtcgagttagccatgatcatggaccggttgtatggtggtgtatgctatgctggcatcgacacagaccctgagttgaagtaccccaaaggcgccggacgggtggccttctctaaccagcagagttatatcgctgccatttcagccagattcgtccagcttcagcacggggatatagacaaacgcgtggaagtaaagccctacgttttagatgatcaaatgtgcgatgaatgtcaaggggcacgatgtggaggcaaatttgccccctttttctgtgccaatgtgacatgcttacaatattactgcgaattctgctgggccaacatccatagtcgcgccggaagagagtttcacaaaccattagtgaaggaaggtgcagatcgtccacgacagatccattttcgttggaattag

SEQ ID NO: 113805 - DNA, 2097 bp, synthetic construct
  misc_feature 1..2097: note = Description of Artificial Sequence: Synthetic coding sequence
  source 1..2097: mol_type = other DNA
atgcaggatgacctgctgatggacaaaagcaagacccaaccccagccccagcagcaacagcgccagcagcaacaaccccagccagaatcaagcgtcagtgaagctccctccacccccttgtcctcagagactccgaagccagaggagaattctgccgtacctgctctttctccagccgccgccccgcccgcgcctaacgggccagacaagatgcaaatggaatcccctctcttgccaggcctctcattccaccagccaccccaacagcctcctcctccgcaggagcctgcagccccaggcgcctctctctccccttctttcggaagtacatggtccacgggaaccacaaacgccgtcgaggactctttttttcagggcattacccccgtgaacggtaccatgctgttccagaactttccacatcacgtcaaccctgtttttggggggaccttttctccccagatcggcctggcccagactcagcaccatcagcagccacccccaccagcccccgcgcctcagccagctcagccagcccagccaccccaggcacaaccgccccagcaaaggaggtcccctgcttcacccagccaggctccatatgcccaaaggtccgctgctgcggcctatggccaccaacccattatgactagtaaaccgtcaagttcgtcagcagtcgccgctgcagccgccgcagccgctgccagctctgcatcgtcatcctggaacactcaccaatcagtgaacgcagcttggtcagcccctagtaacccttggggcggactgcaagcaggaagagaccccaggagggctgtgggcgtgggagtgggtgtgggagtcggagtgccttcccctctgaatccgatctcacctcttaagaagcccttcagctcgaacgtcatcgctcctccgaagtttccacgggcagcccctttaacatcaaaatcctggatggaggacaatgccttcagaacagataacgggaataacttactcccatttcaggaccggtctcgaccgtacgatacctttaatctccacagcctggaaaactctctcatggacatgatccggacagaccacgagcccttaaaaggtaaacactaccccccatccggccccccaatgtcctttgcagatattatgtggcgtaatcatttcgccggtcgcatgggaattaattttcatcaccccggcacggacaacataatggccctcaacaatgcgttccttgatgactcccacggcgatcaggccctgagctccggtcttagctccccaaccaggtgccagaatggggagagagtcgaacgatatagccggaaggtgtttgtcggggggctcccccctgacatcgatgaagacgaaataaccgcttccttccgccgctttggccccttagtagtggattggcctcacaaggccgagagtaaaagttattttcctcccaagggatacgcatttctcctgtttcaagaggagtcatcggtgcaggcactgatcgatgcatgccttgaagaagacggaaaactgtatctgtgcgtaagctctcccacaatcaaggacaagcccgtgcaaatacgaccctggaacctgtccgacagtgactttgtaatggacgggtctcaaccattagatccccggaaaactatctttgtcggcggggtgccacgcccgcttagagctgtcgagttagcgatgatcatggaccggttatacgggggcgtgtgttacgccggcattgacactgatcctgagctgaagtacccgaagggggccggacgtgttgccttttccaaccagcagagctatattgcagccatctccgcaaggtttgtccaattgcagcataacgatattgacaaaagagttgaagtaaagccatacgtgttggacgatcaaatgtgcgacgagtgtcagggaacgaggtgcgggggtaaattcgctccgtttttctgcgcaaacgtgacgtgtctgcaatattactgcgaatactgttgggccagcatccacagtagggccgggagggagttccataagccgctggttaaggaaggaggtgaccgcccccgccacgttccatttcggtggtcctag

SEQ ID NO: 113806 - DNA, 2055 bp, synthetic construct
  misc_feature 1..2055: note = Description of Artificial Sequence: Synthetic coding sequence
  source 1..2055: mol_type = other DNA
atgcaggacgacctgctgatggataagagtaaaacccaaccacagccacagcagcaacagcgacagcagcagcagccccaacccgagtccagcgtgtcagaggcaccatctacccccctgtcttccgagacccctaagccagaagagaattcagcagttcctgcgctgtcccccgcggctgcaccccctgcacccaacggacctgacaagatgcagatggagtctccattgttacccggcctgagttttcatcagcccccccagcagccacctcctccacaagaaccagccgcacctggcgcatcactctccccttcctttgggagcacttggagtactggcaccacaaacgcagtagaggactcattttttcaggggattacccctgtgaacggcacaatgctgtttcagaacttcccccatcacgtcaaccccgtctttggtggtactttctcccctcagataggactcgcacaaactcagcatcatcagcaaccgcccccgccagcaccagccccacaacctgcgcaaccagcccagccgccccaggcccagcctcctcagcagcgaagaagccctgcttcccccagccaggctccttacgcccagaggtctgccgcggcagcctatggccaccagccaatcatgactagcaaaccatcttcttccagcgcagtggccgctgcagcggccgccgctgccgcaagttctgctagttcaagttggaacacccatcagagtgtgaatgccgcgtggagtgctccgtccaacccttgggggggtctccaagccgggagggacccacgccgcgcagtgggggtgggggtcggtgtcggagtgggagtaccaagcccattgaatccgatctccccattaaagaagcctttctcctccaatgtgattgcaccccctaagtttcccagagctgccccattaacaagtaaatcctggatggaagacaatgcctttcggacagacaatgggaataatttactcccttttcaggacagatcacgcccatatgacactttcaatctgcattcactggagaatagtctgatggatatgattaggacagaccatgaaccgctaaagggacggatgggtattaactttcaccaccctggaaccgacaacatcatggccctcaacagcagatcctcactcttcccgttcgaggatgccttcttagatgatagccatggcgatcaggccttgtccagcgggctgagtagtcctacccggtgtcagaacggcgagcgagttgagcgctactcacgtaaggtattcgtgggtgggctgcccccggacatcgatgaggatgagatcacggcctcatttcgtcggttcggacctttagtggtggattggcctcacaaggctgagagcaagtcctatttccccccaaaggggtacgctttcctcctctttcaggaggagagctcagtgcaggcgctgatagacgcttgcctggaggaggatggaaagctttatctctgtgttagcagtccgaccattaaggataagccagtacagattagaccctggaacttatcggattccgactttgtgatggatggtagccaacccttggaccccaggaaaacaatcttcgttggcggagtccctcgcccactgagggcagtcgagctcgccatgatcatggacagactgtatgggggcgtgtgctacgccggaattgacacagaccctgagcttaaataccctaagggtgcagggagagttgcctttagcaaccagcagtcctacattgcagcaatttccgctcgattcgtgcagctgcagcacaatgacattgataagagagtcgaagtcaaaccctatgttctagacgaccagatgtgcgatgagtgtcagggaactaggtgcggcggcaagtttgcaccttttttctgtgcaaacgtgacttgcctgcagtattattgcgaatattgctgggcatctatccactcgcgtgccgggcgggagtttcacaagcccttagtcaaagaagggggggatcgacctcggcacgtaccctttagatggagctag

SEQ ID NO: 113807 - DNA, 2055 bp, synthetic construct
  misc_feature 1..2055: note = Description of Artificial Sequence: Synthetic coding sequence
  source 1..2055: mol_type = other DNA
atgcaagacgatctcctgatggacaaaagcaagacacagccccagccgcagcagcagcaacgtcagcagcagcagccccagcccgaatcatcggtgagcgaagcgccgtctacaccattaagtagcgagaccccaaagcctgaggagaatagcgctgtaccagccttgagcccagccgctgctccaccagctccaaatggtcccgacaaaatgcagatggaatcgccactcttgccaggcctctcgttccaccagccaccacagcagccgcctcctcctcaggaacccgctgcacccggagcctcactcagtccaagctttggatcaacctggagcacaggcacaacgaatgcagttgaagattcctttttccagggaatcactcctgtgaatggaacaatgttgttccaaaatttcccacatcacgtgaacccagtgttcggaggaacattttccccacagataggcctggcccagacccagcaccaccagcaaccccccccccccgccccagcaccccagcctgcccagccagcacagcctcctcaagcccagcccccacagcagcgccgtagccccgcctctcccagccaggccccatacgcccagcggagcgcagcggccgcctacgggcaccagcctattatgaccagcaagccttcttcctcttctgctgtcgctgcggcagcagccgctgccgctgccagctctgccagttcatcttggaacactcaccagagtgtgaatgcggcatggagcgctcctagtaacccctggggcgggttacaggctgggcgtgacccacggcgagctgtcggagtcggagtaggggtaggagtcggggtgccgagcccccttaacccgatttccccgctcaagaaaccattttcttctaacgtgattgcaccgccgaaattccctcgcgctgcacccctgacttcaaagagttggatggaagataacgccttccggacagacaatgggaataacttgcttccattccaggataggagcaggccatacgatacttttaacttgcactccttagagaattccttgatggatatgattcggactgatcacgagccactgaagggacggatgggcattaatttccaccacccaggcacagataacatcatggcgctgaactcaaggtctagcttattcccctttgaggatgctttcctggacgattctcatggagaccaggccttgtcttcaggactctcttcccctacccgctgccagaacggggagcgggtcgagcgctacagtagaaaagtttttgtaggcggtctgccacctgatatcgacgaagacgagattactgcgtcgttcaggcgatttggacccctggttgttgattggcctcacaaggctgagagcaaatcctactttcctccgaagggttatgctttcttgctgttccaggaagagagctccgtgcaggcactcatagacgcctgcctggaggaggacggaaaactttacctgtgtgttagtagcccaactatcaaggataaaccagtgcagattcggccgtggaatctgtccgattctgacttcgtcatggacggttcacaacccttggaccccaggaagacgatattcgtggggggagtccccagacctttgagggccgtagaattggctatgataatggacaggctttacggtggtgtctgttacgctggcatcgacactgatcccgaactgaagtatcctaaaggggccggacgagtagcattttctaatcaacagtcctacattgccgctatttctgctcgcttcgtgcagcttcagcacaatgatatcgataagagggtggaggtgaagccctacgtactggacgatcagatgtgtgatgagtgccaggggaccaggtgcggaggcaagttcgctcccttcttctgcgctaacgtcacatgcctacagtactactgtgagtattgttgggcttcaatacatagcagagccgggcgtgagttccacaagcctctggttaaggagggaggagataggcctcgacacgtcccttttagatggagttag

SEQ ID NO: 113808 - DNA, 2190 bp, synthetic construct
  misc_feature 1..2190: note = Description of Artificial Sequence: Synthetic coding sequence
  source 1..2190: mol_type = other DNA
atgggagactatggcttcggggtgctggtccaaagcaatacaggcaataagtccgctttcccggtgagattccacccacacctgcagccacctcatcaccaccagaatgctacccccagcccagcagcctttattaacaataacacagctgccaacggcagcagtgctggcagtgcctggctgttcccggctcctgcgactcacaatatccaggacgaaatcctgggttccgagaaggccaagagtcagcagcaagaacagcaggatcctctggaaaaacagcaactctccccttcccccggtcaggaggctggaatcctgccagagactgagaaagccaagagtgaggagaaccagggcgacaatagttcagagaatggaaatggcaaggaaaagatccgaattgaatctcccgtcctcaccggattcgattaccaggaggcaaccggcctaggcaccagcacacaacctctcacctccagtgcttcttcccttaccggtttttccaactggtcagcagctattgccccaagttcatctaccattatcaatgaggacgcgagctttttccatcagggcggggttccagcagccagcgccaacaacggcgccctgttgttccaaaactttcctcatcatgtgagtccggggttcggaggatctttctcaccacagatcgggcctctgagtcagcatcatccccatcatccccactttcagcaccaccattctcagcaccagcagcagcgcagatctcctgcttcgcctcacccaccaccttttacacacaggaatgccgcctttaatcagctacctcatcttgccaataacctgaacaagccaccctctccctggtccagttatcagagtccatcccccacccccagctcctcttggagtcccggaggtggcgggtacgggggctggggaggttctcaaggaagagaccatcggagaggcctgaatggcggtatcacaccccttaacagtatctcaccactgaaaaagaactttgccagtaatcatattcagctgcagaagtatgctagaccctctagcgcctttgctcctaagagttggatggaggatagcctaaaccgggccgataacattttcccattcccagacaggcctagaacgtttgatatgcactccctagagtcgtcactgatcgacatcatgcgggccgagaatgataccatcaaaggacggctgaattatagctatccagggagcgattcttctcttttaattaacgctaggacgtatggaaggcggagagggcagagttcactttttccgatggaggacgggttcctggacgatggaagaggcgaccagcctctgcatagtggcttggggtcaccacattgcttcagccatcagaacggagaaagagtggagcggtactccagaaaggtgttcgtgggcggattgcccccagatatcgacgaagatgaaatcaccgccagttttaggcgcttcggtccgcttattgtggactggcctcataaggctgagtctaaaagctactttccaccaaaaggatatgcctttcttttgtttcaggatgagagtagcgttcaggccctgatcgatgcatgcattgaggaggacgggaagctgtatctgtgcgtgagctctcccacgatcaaggacaaaccagtgcaaatccgaccatggaacttgagcgacagtgatttcgtgatggacggttctcagcctctggatccacggaagactatcttcgtcggcggtgtccctaggccacttcgggctgtggagctagcaatgatcatggaccgcctgtacgggggcgtttgctatgctgggattgatacggatccagagctgaaatatcctaagggcgccggccgagtcgctttcagcaaccagcagagctatattgcagcgatttctgccagatttgtgcagctgcagcatggggaaattgataagagagtggaggtgaagccctacgtgttggatgatcagctgtgcgacgagtgtcagggtgcccgatgtggcggcaaatttgcccctttcttttgtgctaacgttacttgcctgcagtactactgcgagtattgttgggctgccatccatagtagggccggccgtgagtttcataaacctcttgtcaaggagggaggggaccggccacgccatatatccttccgctggaattag

SEQ ID NO: 113809 - DNA, 2139 bp, synthetic construct
  misc_feature 1..2139: note = Description of Artificial Sequence: Synthetic coding sequence
  source 1..2139: mol_type = other DNA
atgggcgattatggttttggggttctcgtgcagagcaacacgggtaataagagtgcatttcctgtgcgcttccatccgcacctacagcctccgcatcatcatcagaatgcaactccaagtcctgccgcgtttataaacaacaatacagcagccaatggcagcagtgccgggtctgcatggctgttccctgccccagcaacgcataacatccaagatgaaatccttggcagtgagaaggccaagtctcagcagcaggagcagcaggatccacttgaaaagcagcaactcagcccctcgcctggtcaggaagctggcatcttgccggagacagagaaagcaaaatcagaagagaaccaaggagataatagctctgaaaatgggaacggaaaagagaaaattcggatcgagtctcctgtcctgactgggtttgattaccaagaggccactgggctcggcaccagcacgcagcccctcacctccagcgcctcttccttgactgggttcagcaactggtctgccgccatagcaccatcttcatcaactataattaacgaagatgccagctttttccatcagggcggcgttccggccgctagcgcaaacaatggggctctcctgtttcagaacttcccccaccatgtgtcaccaggcttcggagggagcttctcaccccagatcggtcctctgtcccagcaccacccccatcatccacactttcagcaccatcatagccagcaccagcaacagcggaggtcacccgccagtccacaccctccccctttcacacatagaaatgccgccttcaaccagctcccccacctggccaacaatctcaataagccaccctcaccctggtcatcctaccagtcccctagccctacaccatcatcgtcttggagccccggcggtggcggttatggcggctggggcggttctcaggggcgagatcaccggcggggtctcaacggcgggataacacctttgaattccatatcgcctttgaagaagaattttgccagtaatcacatccaactccaaaaatacgctcgtccaagctctgcattcgcccccaaatcctggatggaagactccttgaatcgagccgataacattttcccattcccagacaggccaaggacatttgacatgcactctttggaatcgtccctcatcgacattatgagggctgaaaatgacactattaaagcacgtacttacggacggcgcagaggacagtcaagcctgtttcctatggaggatggtttcttagacgatggaagaggtgaccagccactgcactcaggcctgggatccccccactgtttttctcatcagaacggcgaaagggtggaaaggtactccaggaaagtgttcgtaggtggacttccccccgacatcgacgaggacgaaatcaccgcatcattcagacgcttcggccctctcatcgtagattggccacacaaagctgaatctaaatcatactttccccccaaggggtatgcgttcctgctattccaagatgagtctagtgtacaggcccttatcgacgcctgtatcgaagaagacggcaaactgtatctctgcgttagttcccctaccatcaaagacaaacctgtgcagattcggccttggaacctgtccgacagcgacttcgttatggatgggagtcagccactggacccccggaagactatcttcgtggggggcgtgcccaggcccttacgggccgtggagctagcgatgataatggaccgtctgtacggcggcgtgtgctacgccgggatcgataccgatcccgagctaaaatatcctaaaggggcaggaagggtggccttctccaaccaacagagctacatcgcggctatcagcgcccgattcgtccaattgcagcacggcgagattgacaagagggtggaggtgaagccatacgtattggacgaccagctgtgcgacgaatgtcagggggctcgctgtggaggcaagtttgccccctttttttgtgcaaacgtcacctgcctgcaatactactgcgaatattgttgggctgctatccacagcagagcaggcagagaatttcacaagcccttggtgaaagaggggggcgacagaccacgccacatctcatttaggtggaattag

SEQ ID NO: 113810 - DNA, 2049 bp, synthetic construct
  misc_feature 1..2049: note = Description of Artificial Sequence: Synthetic coding sequence
  source 1..2049: mol_type = other DNA
atgagtacgccagctgtcccccaagaccttcagctcccaccctcacagcgcgcgcagtctgccttcaaagaacagcgacgtcaaaaactcaaagaacacttactgaggcggaagaccctgttcgcctacaagcaggagaacgagatgcttagcagcagagatcaacgagtcgtaacttctgaagaccaagttcaggagggcacaaaagttttgaaactgaagactaagatggccgacaaggagaatatgaaacgacctgcagagagtaagaacaatacagtggttggcaagcattgcattcctcttaagccatccaatgagctgacaaattccacagtggtgatagatacacataagcctaaggatagtaatcagacccctcaccttctgctaacagaggacgacccccaaagccagcacatgactttgagccaggctttccatctgaagaacaactccaagaagaaacagatgactacagagaagcaaaagcaagacgctaacatgcccaaaaagccagtcctgggaagctaccgcggccaaatcgtgcaatccaagatcaactcctttagaaaaccccttcaggtaaaggacgagtcctcagctgcgacaaagaagcttagcgctactattcctaaagccacaaagccacagcctgtcaacacgagctcggtgacagtcaagagtaacaggtcctctaacatgacagctactactaagttcgttagcactacaagtcagaacactcagctcgtgcgccctccgatcagatctcatcactccaacacacgcgacactgtaaagcagggaatcagccgaacttcagccaacgttaccattcggaaggggcctcacgaaaaggagctacttcagtctaagacggctctgtcctctgtgaaaaccagtagtagtcaaggaatcattcgcaacaaaaccttaagccgctcgattgcttctgaggttatcgcgaggccggcctccctgagcaatgataagctaatggagaagagtgagcccgtggatcagaggaggcacactgcgggaaaagcaatagtggatagcaggagcgcgcagcctaaagaaacatcagaagaacgtaaggccagactttctgagtggaaagcaggcaagggacgcgttttgaagcgcccgccaaatagcgtggtcacccagcacgagcccgcaggtcaaaacgagaaaccagtgggaagcttttggaccactatggcggaagaagatgaacagcggttgttcaccgaaaaagtaaataacacattctccgaatgcctcaacctgattaacgaggggtgccctaaggaggacattctggtcaccctcaacgaccttataaagaacattcccgatgcgaagaagctagtgaagtactggatctgtctggccctgattgaacccattacttcgcctattgagaacatcatagcaatctacgagaaggccatcctggccggagctcaacccatagaggagatgcgccacacaattgtcgacatcctgaccatgaaaagccaggaaaaggctaatctaggtgaaaacatggaaaaaagctgtgcgtccaaggaggaggtgaaggaagttagtatagaggataccggcgttgatgttgatccagaaaaattggagatggagtcgaagctccacagaaatctgctttttcaggattgcgagaaggagcaagataataaaaccaaggacccaacccacgatgtgaaaacgccaaacactgagacaaggacctcctgcctgatcaaatataacgtgagcaccacaccatatctccagagtgttaaaaaaaaggtccagtttgatggaaccaattcagccttcaaagagctcaagttcttgacacccgttcgcaggtctcgccgtctgcaggaaaagacttccaagctcccagatatgctgaaggatcactacccttgcgtgtcaagcctcgagcagttaacggagctgggaagggagactgacgcattcgtgtgcagacccaatgctgctctctgcagggtttattacgaagccgacaccacttag

SEQ ID NO: 113811 - DNA, 1485 bp, synthetic construct
  misc_feature 1..1485: note = Description of Artificial Sequence: Synthetic coding sequence
  source 1..1485: mol_type = other DNA
atgagcactccagcagtacctcaggatctgcagctccccccctctcagagggcacagtcagcctttaaagaacagaggcggcagaagttgaaagagcaccttcttcgcagaaagaccttgttcgcatacaaacaggagaacgagatgctgtcctctcgagaccaaagagtggtgacatctgaagatcaggttcaggagggaacaaaggtactgaagctcaagacaaagatggcagataaggaaaatatgaagagacctgctgagtccaagaataacacagtagtcggtaaacactgcattcctctaaagccatctaacgaattgaccaactccaccgtagtgatcgatactcacaaacctaaagacagtaatcagaccccccatctgttactaactgaggatgaccctcagtcacagcatatgacactgtcacaagctttccatctgaagaataattccaaaaaaaaacagatgacaactgagaagcaaaaacaggatgccaatatgcccaagaagccagtgcttggctcataccgggggcagatagtccaatctaagatcaactcgttcaggaagcccttgcaggttaaagacgaatctagcgcggccactaaaaagttgtcagcaactatccctaaggcgaccaagcctcagcctgtgaacaccagctctgttacagtgaagtcaaacagatccagtaatatgactgctacaaccaaatttgtgtccactacttctcagaacacccaactggttcgaccaccgatccgcagtcatcattctaatacacgcgacaccgtcaaacagggcatctcccgcactagcgcaaacgttacaattagaaagggcccccatgaaaaggagctgctccagtccaagacagccctatcctctgtaaaaacttcttcttcccagggaattatccgaaacaaaacactgtctcggagcattgcgagcgaggtgatcgcgagacccgcctcattgagcaatgacaaattgatggaaaagagcgagcctgtggaccagaggcggcatacggcaggaaaagccatcgtggactcccgcagcgcccagcccaaagaaaccagcgaagaacggaaggcgagattgtctgagtggaaggctgggaagggtagagtgcttaaaaggcccccaaatagcgtggtgacccagcatgaacctgctggccaaaacgagaaacccgtcggctccttctggacgactatggctgaggaggatgagcagcgcctttttaccgagaaagtgaataacaccttctctgagtgcctgaacctgatcaatgaagggtgcccaaaggaggacattttggtgaccctgaatgacctaattaagaatattcctgacgcaaagaaactggtcaaatactggatatgccttgctctcatagaacctataacatctcccatagagaatatcattgccatctacgagaaggccattcttgccggagcccaggtgagatag

SEQ ID NO: 113812 - DNA, 2052 bp, synthetic construct
  misc_feature 1..2052: note = Description of Artificial Sequence: Synthetic coding sequence
  source 1..2052: mol_type = other DNA
atgtctacaccggccgttccccaggatcttcaactccctccttctcagagggctcaatcagcttttaaagagcagaggcggcagaagctcaaggaacacttgctgagaagaaaaaccctgtttgcgtataaacaggagaacgagatgctttctagtagccgtgatcagagggttgtgaccagtgaggaccaggtccaggaaggcactaaagtgctaaaattgaagaccaaaatggcagacaaagagaacatgaagcgccccgcggaaagcaaaaataacactgtcgtcggaaagcactgcattcctttgaagccctctaatgagcttaccaattccaccgtggtgattgatacacacaaacccaaagactcaaatcagacaccccaccttctgctcactgaagatgacccacagtcacagcatatgaccctgagccaagcatttcatctgaagaataacagcaagaaaaaacagatgactactgaaaaacagaagcaggatgctaacatgcccaaaaagcccgtgctgggttcttatcgtggacaaattgtgcaaagcaagattaatagcttccggaaacctctgcaggtgaaagacgaatcatccgctgccaccaagaaactcagtgccacaatccctaaagccacgaaaccacagccagttaacacatcttctgtgaccgtgaagtccaatcgatcatcaaacatgaccgccaccacaaaattcgtgagcacaacatctcagaacacccagctggtgcggcctcccatcagaagccaccattccaatacccgtgatacagtgaaacagggcatctcacgcacctcggccaacgtgactatccgtaagggaccccatgagaaggagcttttacagtccaagaccgccctttccagcgtgaaaaccagcagcagccagggcattattcggaataagactctgtctcgatccatcgccagcgaagttattgcgagaccagcttctttgagcaacgacaagttgatggagaagtctgaaccggtagatcagagacggcataccgccgggaaggctatcgtcgatagcagatccgcccagcccaaggagactagtgaggaaaggaaggcaaggctctccgaatggaaggccggaaagggaagggtcttaaaaagaccgcctaacagcgtggtgacacagcatgagcccgcaggacagaatgaaaagcctgttggctctttctggactaccatggcagaggaggacgaacaacgtctcttcacagagaaggtgaataacacatttagcgaatgcttgaaccttatcaacgagggatgtcctaaggaagacattctcgtgaccctgaacgatcttatcaagaatattcccgatgccaaaaaactcgtgaagtattggatttgcctggcgttgattgagcctatcacttcaccaattgagaacattatcgcaatttatgagaaggccattctcgcaggtgcccagcccatagaggaaatgagacacaccatcgttgatatccttacaatgaaatcgcaagaaaaagctaacctgggagaaaacatggaaaagtcgtgcgcatctaaagaggaagttaaagaagtcagcatcgaagacacaggggtggatgtcgatcctgagaagttagaaatggagtctaaattgcatcgcaacctgttgttccaggactgcgagaaagaacaggataacaaaacgaaagaccccactcacgatgttaaaacaccaaacaccgaaacaaggacatcttgcctaatcaaatataatgttagcaccacaccctacctgcagtcagttaaaaaaaaagtgcagtttgacggcaccaactccgcctttaaggagcttaagtttctgacccctgtgcgccgctctcgccggctgcaggaaaagaccagtaagctccctgacatgttgaaggaccactacccttgcgtgtcatcattagaacagctgaccgagctgggtcgcgagacagatgccttcgtctgtagacctaacgccgccctgtgtcgggtgtattacgaagcggataccacctag

SEQ ID NO: 113813 - DNA, 1488 bp, synthetic construct
  misc_feature 1..1488: note = Description of Artificial Sequence: Synthetic coding sequence
  source 1..1488: mol_type = other DNA
atgtcaactccagcagtcccgcaagacctacagctcccgccctcacagcgggctcagtccgccttcaaagagcagagaagacagaagctgaaggagcatctgcttagacgtaaaaccctgttcgcatataagcaggaaaacgaaatgctgtcctctagtcgggatcaacgggttgtcacctctgaggatcaggttcaggaaggcactaaggtgctcaagctaaagacaaaaatggcagataaggaaaatatgaagcgtcccgccgaatcaaaaaacaatacagtggtaggcaaacactgtatcccgctgaagccttcgaatgaactgaccaacagtaccgttgtgattgatactcacaaaccaaaggattcaaatcagaccccccacctgcttcttaccgaagatgaccctcagtctcagcatatgactctgtcacaagcctttcatttgaaaaacaattcgaagaaaaaacagatgaccacagagaagcaaaaacaggatgccaacatgccaaagaagcctgtgctggggagttaccgaggtcagatcgtccagtcaaagatcaatagcttcagaaagcccctgcaggtcaaagatgagagttccgctgctaccaagaaactgtctgctacgattcctaaggctactaagccgcaacctgtgaacactagctcagtgaccgtgaaatcaaaccggtcatccaatatgaccgcaaccacaaaattcgtgagtactacttctcagaacacacagcttgtgcgccctcccatccgttcccatcactccaacacccgggacaccgtgaagcaaggtatctcacgcacaagtgccaatgtcactatacgcaagggccctcacgaaaaggaactccttcagagtaagaccgccctctccagtgttaagaccagttccagccaagggattattcgtaacaagacgcttagtcggtcaattgcatccgaagttatcgcacggccggccagccttagcaatgataagctgatggagaagtccgagccagtggatcagcgtcgacatacagctggtaaagctatcgtggactcccgttccgcccagcccaaagaaacgagcgaagagcgcaaagccagactgtctgaatggaaggctggaaaggggcgtgtgctaaagagacccccaaactccgtggtgacccaacacgagcctgcaggacagaatgaaaagcctgtcgggtccttttggactacaatggctgaggaagatgaacagagactgtttacggaaaaagtaaacaataccttttcggagtgcctgaatctaattaatgagggctgtccaaaagaagatatcctcgtcacactcaacgatctgatcaaaaacatccctgacgcaaaaaagctggtgaaatactggatctgcctagcactgatcgagcccatcaccagcccaatcgaaaatatcatcgccatttatgaaaaggccatcctggcaggcgcgcagcacatatag

SEQ ID NO: 113814 - DNA, 5919 bp, synthetic construct
  misc_feature 1..5919: note = Description of Artificial Sequence: Synthetic coding sequence
  source 1..5919: mol_type = other DNA
atgggagatgattccgagtggctgaagctgcccgttgaccaaaaatgcgagcataaattatggaaggcaaggctaagcggatacgaggaagccttgaaaattttccaaaagattaaagacgagaagtcaccagaatggagtaaatttctgggcctcatcaagaagtttgtaacggattcaaacgcagtcgtgcagctgaagggcctcgaggctgccctcgtttacgtcgaaaatgcccatgttgcgggaaagactaccggcgaagtggtctctggtgtcgtgagtaaggtttttaatcagcctaaagccaaagcaaaagagttgggcatcgagatctgtctcatgtatatcgagattgaaaagggcgaagctgttcaggaggaattgctgaagggactcgacaacaaaaaccccaagattattgtggcctgcattgagacactccgaaaagccctttctgaattcggtagtaagattatcctgcttaaaccaataataaaggtgctcccaaagttgttcgagtcacgcgagaaggccgtaagagacgaggccaaattaatcgctgtggagatctatcgttggattcgcgacgccctccgcccacccctccaaaatattaattcggtccagctcaaggaactcgaggaagagtgggtcaaacttcccaccagcgctcccagacctaccaggtttctcagaagtcagcaagaactggaggcgaagctggagcagcagcaatccgctggtggcgacgccgaaggcgggggggatgacggtgacgaggtgccacagatcgatgcctatgagttgcttgaagcggtggagatcttaagtaaacttccgaaggacttctacgataagatcgaagccaagaaatggcaagaacgtaaggaagcccttgaatctgtcgaggtcctcattaagaatccaaagttggaagccggtgattatgccgacttagtgaaggcactaaagaaagtggtgggaaaggatacaaatgtgatgttggtcgccttggctgctaagtgcttgacgggtcttgcagtgggactgcgtaaaaagttcggccaatacgccggccatgtcgtgccaaccattcttgagaagttcaaagaaaaaaaacctcaggtcgtccaggcgctccaggaggccattgacgctattttcctcacaacgacacttcagaatatatctgaggacgtcctggcagtgatggacaacaagaaccccactatcaagcagcagacctctttattcattgctagatcattccggcactgtacagcaagtaccctgcctaaaagccttctaaagcccttttgcgctgccctcctgaaacatatcaacgattccgcgccagaagtgcgggatgcggcctttgaggcgttggggacagcgctcaaggtcgtaggggagaaggcagtgaatccattccttgcagacgtagataagctgaaactggataaaatcaaggagtgctccgaaaaggtcgagctcatccatggtaagaaggccggcctggcagcagataagaaagaattcaaaccccttcccggcagaaccgctgcatctggagcagctggggataaggacaccaaggacattagtgctccaaaacccggtcctctcaagaaggcccctgccgccaaggcaggcgggcccccaaaaaaaggtaagcctgccgccccagggggtgctggaaacacaggaactaagaacaagaagggcctagagaccaaggagatcgtggagccagagctttccatcgaggtctgtgaggagaaggcatccgcggttcttcctccaacttgtattcagctgttggactctagcaattggaaggagagactggcttgtatggaggagttccaaaaggccgtggagctcatggatcgcacagagatgccatgccaggccctggtgcggatgctggccaagaagccaggatggaaggagacaaatttccaggtaatgcaaatgaagctgcacattgtggctttgattgcccagaagggcaacttcagcaaaacctccgcgcaggtggttctcgacgggctagtggataagatcggcgacgtcaagtgtggaaacaatgcaaaggaagccatgactgctatcgccgaagcatgtatgcttccatggaccgccgagcaggtggtctccatggctttttcgcagaagaacccaaaaaaccaatcagagactcttaactggctttccaatgccattaaagagttcggctttagcgggctgaatgtcaaggcctttataagtaacgtaaagacagcactggccgccactaatccggctgtcagaaccgccgctatcactctcctcggggtgatgtatctttacgtgggcccatctcttcgcatgttttttgaagacgaaaagcctgccctgctcagtcagattgatgccgagtttgagaagatgcaagggcagtcccctcctgctcccactcgaggtatttccaagcactctacgtccggcacggacgaaggcgaggatggagacgagcccgatgacgggtctaatgatgtggtcgatctgctcccacgcaccgaaatcagtgataagatcactagcgaacttgtcagtaaaattggggacaagaactggaaaatcaggaaggaagggctggacgaagtcgccggtatcatcaacgatgccaaattcatccagccaaacatcggagagctcccaactgcgctgaaaggacggctcaacgatagtaacaagatccttgtgcagcagacactgaacatactccagcagctggctgttgcgatgggacccaacattaagcagcacgtaaagaatctcggaattcctataattactgtcctgggtgactcaaaaaataatgttcgggctgctgccctggctacagtgaacgcttgggcggaacagacagggatgaaggaatggctcgagggcgaagacctttcagaggaattaaagaaagagaatccatttctccggcaggagctgctggggtggcttgctgaaaagctccccacactcagaagtacacccactgatctgatcttgtgcgtgccacatctttacagctgtctagaggataggaacggagacgtgcggaagaaggcccaggatgcgctgcctttcttcatgatgcatctcggatacgagaaaatggccaaagccacaggcaaactgaaaccaacgtcgaaagatcaggtcctggccatgctggagaaggccaaggtgaacatgccggctaagccagcccccccgacaaaggctaccagcaagcccatgggcggaagtgcccccgcgaagttccagcctgctagtgccccagcagaggattgtattagctcttcaacagaaccaaagcctgaccctaaaaaggcaaaagcccccggactgagcagcaaagcgaagtccgcgcagggtaagaaaatgccatcaaaaaccagcctgaaggaggatgaagataaaagcggtcccatttttatagtcgtccccaacgggaaagaacagcgaatgaaagatgaaaaaggacttaaagtgttgaaatggaactttacaactccacgcgacgagtatatcgagcagctgaaaacccagatgtcaagctgcgtggccaagtggctccaagacgagatgttccatagcgatttccagcaccacaacaaggccctcgctgtgatggtggatcacctcgagtcggaaaaggaaggagtcatcggctgcttggatcttatactaaagtggctgactctgcggtttttcgatacgaatacctcagtgctgatgaaagcactggaatatctgaagctcttattcacgctgttgtcagaagaggagtatcaccttaccgaaaatgaggccagtagctttataccttatctggtcgttaaggtgggtgagccaaaagacgtgatcaggaaggatgtaagggccattctaaatcggatgtgcttggtttacccagcatctaaaatgttcccttttataatggaggggaccaagagtaagaactccaagcagcgggccgagtgtctcgaggagctcggctgcctcgttgagtcatatggcatgaatgtatgtcagccaacaccaggaaaggctctgaaagagattgccgtccatatcggcgatcgagacaatgcagttcgcaacgccgcactgaataccatagtgactgtatataacgtccacggcgatcaggtgttcaagctcattggaaacttaagcgagaaagatatgagcatgctcgaggaacggatcaaacggagcgctaagaggccatctgctgctccaatcaaacaggtggaggaaaagccacagcgggcgcaaaatataagctccaacgccaacatgctgcggaaaggtccggccgaggatatgtcctcaaaacttaaccaggcaagatccatgtcaggccatccagaagcggcacagatggtgagacgcgagtttcagctggatctggatgagatcgaaaatgacaatggcacagtgagatgtgaaatgcccgagctggtacaacacaaactggacgatatctttgagccagtgttaatcccggagcccaagattcgggcagtatcccctcacttcgatgatatgcacagtaataccgccagtacaatcaattttattattagtcaggtggccagtggcgacatcaacacaagcattcaggctctgacgcagcttttccagatcgagtcgttggcacgggaagcatctacgggagtgctcaaagacctcatgcatggtctgatcacactcatgctggactcccggatcgaggatctggaggaggggcagcaggtgattcgtagtgtcaatctgctagttgttaaggtgcttgagaagtctgaccagactaatattttgagcgccctgcttgtgcttctgcaggactccctgctggcaacagctagctcccccaagttcagcgagttggtgatgaagtgcctctggagaatggtcagactccttccagacacaattaattccattaacttagatcggatactgttggacatacacatctttatgaaagtgtttcctaaggagaagctgaagcagtgtaaaagcgagttcccgattagaactttgaagacccttctccatacgctctgtaagctgaagggtcctaagattctcgaccacttgactatgattgacaacaagaatgagtctgagctggaggcccacttgtgccggatgatgaagcacagcatggaccagactggatctaaaagcgacaaggagacagaaaagggcgcatcaagaatcgatgaaaaaagctctaaagcgaaggtgaatgatttcctcgcagaaatcttcaaaaagattggctctaaggagaacaccaaggaggggttagccgaactgtatgaatacaaaaaaaaatatagcgacgctgatattgagcctttcctgaaaaactcttcccagttttttcagtcctacgtggaaagagggctccgtgttatcgagatggaacgggaaggaaaggggcggatctccacctctaccgggatttcccctcaaatggaggttacctgcgtgcccactcctacctctacagtgtcgagcataggcaacaccaacggggaagaggtgggccccagtgtctatctcgagagactcaaaattctgaggcaacgttgtggcctggataatacgaagcaggatgatagaccaccactcacaagcctgctgagcaaacccgccgtgccaaccgttgctagtagcactgatatgctacacagcaagctctctcaactgagggagtcccgcgaacagcaccagcactcagacttggatagtaatcagactcattcatctggcactgtcacttcctcaagctctaccgcgaacatcgacgacctgaagaaacggctggagcgcatcaagtccagcaggaagtag

SEQ ID NO: 113815 - DNA, 5919 bp, synthetic construct
  misc_feature 1..5919: note = Description of Artificial Sequence: Synthetic coding sequence
  source 1..5919: mol_type = other DNA
atgggggacgactccgaatggcttaagctcccggtcgatcagaagtgcgaacataagttgtggaaagctcgactgagcgggtacgaggaggctctgaaaatctttcaaaaaattaaagacgagaaatctccagagtggagcaaattccttggcttaatcaaaaagtttgtcacggatagcaatgccgtggttcagttgaaaggcctcgaagcggccctggtttacgtggaaaacgcgcacgtggcggggaaaacgacgggcgaggtcgtgagcggcgtagtctctaaggtgtttaatcagcctaaggctaaggctaaagagctgggtattgaaatatgcttaatgtacatagaaatagaaaagggtgaagctgtgcaggaggagctgctgaagggtctcgacaataaaaatcctaaaatcatcgttgcctgcattgaaaccctgcggaaagccctttcagaatttggaagcaagattatccttttgaagcccataatcaaggtgctgcctaagctgtttgaaagcagagagaaagccgtgcgcgatgaagccaagctcattgccgtggagatttacaggtggataagagacgcccttcgcccccctctgcagaatattaactccgtccagctcaaggaattagaggaagagtgggtgaagctgcctacttcagctccaagacccacacgcttcctcagatcccagcaggaactcgaggcaaagctggaacagcagcagagcgccggtggcgacgccgaaggcggaggagacgacggcgatgaagtcccacagatagacgcttatgagctcttagaagccgtggagatcctgtctaagctgccgaaggacttctatgataaaatcgaagccaaaaaatggcaagagcgcaaggaagcactagaatcagtggaggtcttaatcaagaatcctaagttggaggccggggattacgctgacctcgtcaaagcactgaagaaggtggtgggtaaagacaccaacgtaatgttggtggctcttgcggctaagtgcctgaccgggttggccgtgggactccgcaagaagttcgggcaatatgctggccatgtggtgccaactatactcgaaaagttcaaggaaaaaaagccgcaggtagtgcaggccctgcaagaggctattgatgctatttttctgaccaccacactgcagaatatcagcgaagatgtcctggctgtgatggataacaagaatcccacaattaagcaacagactagtttgttcattgcaaggtcctttagacactgcaccgcatccaccctgcccaaaagtttattgaagccattttgcgcggcgctgctcaagcacatcaacgatagcgcaccagaggtgcgggacgctgctttcgaagctctcggcacagccctcaaagtcgtcggagagaaagccgttaatcccttcctggccgacgtcgacaagttaaaactggataaaattaaagaatgttctgagaaagtggaactcattcatgggaagaaggctgggctggccgccgacaagaaggagtttaagcccctgcccggacgaactgcggcctctggagccgctggtgacaaggacaccaaagatatctccgctcccaagcctggccccctcaaaaaagctcctgccgccaaagccggcggcccacccaaaaagggcaagccagcagcgcctggcggcgcaggtaatacaggaactaagaataaaaaagggttggaaaccaaagaaatagtggaacccgagctctctatagaggtctgtgaggagaaggccagtgccgtactgcccccaacttgtattcagctcctggattcgagtaactggaaggagcggttagcgtgtatggaagagttccagaaagccgtggagctcatggatagaactgaaatgccctgccaagccctggtacgtatgctcgcaaagaagccaggttggaaggagacaaattttcaggtgatgcaaatgaagctacacattgttgccctgattgcgcaaaagggtaactttagtaaaacctccgctcaagttgtcctggatggacttgtggacaagattggagacgtgaaatgtggcaacaacgcaaaggaagcaatgaccgctatagctgaggcctgtatgttgccatggactgccgagcaggtcgtctcaatggcgttcagccaaaagaatcccaagaatcagtccgaaactttaaattggctcagcaacgccatcaaagaattcggatttagcggattgaacgttaaagcattcataagcaacgtgaaaacggcgcttgcggcaaccaatcctgctgtacggaccgccgccatcacactgctcggggtgatgtacctgtacgtgggcccgtccttaagaatgttcttcgaagatgaaaagcctgccttattgtctcagatcgacgcagagttcgagaagatgcagggccagtctcctccagccccaacccgaggaatctccaaacactccacttccggaactgacgaaggcgaggacggcgatgagccagacgacggaagcaatgacgtggtggatttgttgcctcgcacagagatctcagacaagatcacttccgagttggttagcaagatcggagataaaaactggaaaatacgaaaggaaggcctcgacgaggtggcaggcatcatcaatgacgccaagtttatccagcccaatattggcgaacttccaacagccttaaaggggcggcttaacgactcaaacaaaatactggtgcaacagaccctgaacattttgcagcagcttgccgtggcaatgggtccaaacatcaaacagcacgtgaaaaacctcggaattcccatcataacggtcctgggcgacagtaagaacaacgtgcgagccgccgccctggccaccgtgaacgcctgggctgagcagacgggaatgaaggaatggctagaaggggaggatctgtccgaggagttgaagaaggaaaatcccttcctcagacaggaactgctaggatggctggccgaaaagcttccgactctgaggagtacccctaccgacctgatcctatgtgttccacatttgtactcctgtctggaagatcgcaacggcgatgtgcgcaaaaaggcccaagatgcgctcccgtttttcatgatgcaccttggatatgagaagatggcgaaggcaactggaaaactgaagcccacctccaaagatcaggtgctggctatgttagagaaggcaaaggtgaacatgcccgctaaaccagccccgcccactaaagccaccagtaaaccaatggggggcagcgcccccgctaagttccagcccgcgtccgccccggcagaagactgtatcagtagcagcaccgaacccaagccggaccccaaaaaggcgaaggcacctggcttatcgagcaaggccaagtctgcgcagggcaaaaaaatgccgagtaagactagtctgaaagaggacgaggacaagagcggacctatattcattgttgtgccaaatgggaaggagcagcggatgaaagatgagaaggggctgaaagtgctgaagtggaacttcaccactcccagggatgaatacatcgagcagctgaaaacccagatgtcttcgtgtgtagccaagtggttgcaggacgaaatgtttcactctgacttccagcatcataataaggccctggctgtcatggtggaccatcttgaatcagaaaaggagggcgtgatcggatgtttggatcttatcctgaagtggctgacactccggttttttgatacaaacacttctgtactcatgaaagccctggagtatctcaagctcctgtttactctactgtcagaggaggagtaccacttgaccgagaacgaggctagctcgtttattccgtatctcgtggttaaggtgggcgaacctaaagatgttatcaggaaagacgtgcgggccatccttaaccgtatgtgtttggtgtatcccgctagcaagatgttcccctttattatggaaggcaccaaatcaaagaattcaaagcagcgggccgagtgtctggaggagcttgggtgtctggtcgaatcttacggcatgaacgtgtgtcagcccacacctgggaaggccttgaaggagatcgcagtccatattggagaccgcgataacgccgtccgaaatgcggccctgaatacgatcgtgacagtctacaacgtacacggagaccaggtgtttaaattgatcgggaatctatccgagaaggatatgagtatgctcgaagaaagaataaagcggagcgccaagcgaccttctgccgcacccatcaaacaagtagaggagaagccacagcgcgcacagaacatttcctcgaacgcgaacatgctgcgaaaggggcccgctgaagatatgtcatccaaactgaaccaggcgcggtccatgtcaggtcaccctgaagctgctcagatggtacgacgggaattccaactcgacctggacgagatcgaaaatgataacggaaccgtccggtgtgagatgcccgaactggtgcaacacaaactggacgacatcttcgagccagtgttgatcccagaacccaagatccgggcggtgagccctcattttgacgatatgcactcaaacacggcatccactataaacttcattatcagtcaggtcgccagcggagatattaatacatccatccaggcgctgacccaattattccagatcgagagtctggcacgggaagccagtacgggggtcctcaaagatctcatgcacggtttaattacactcatgctagactcccgaattgaggatctggaagagggacagcaggtcattcggtctgtcaatcttcttgttgtcaaggtacttgagaagagtgatcagaccaatattctgagcgcattgttggtgcttctccaggattcacttcttgctaccgccagcagcccaaagttctctgaactggtgatgaagtgtctgtggcgaatggttagactgctgccagacactataaactctattaacttagatcggatcctcttggacatccacattttcatgaaagtcttcccgaaagagaagcttaaacaatgcaaatcagagttccctatccgcaccttgaagaccctgctgcacacactatgtaaattaaaaggacccaaaatcctggaccatctaactatgatagacaataaaaacgaatccgagttagaggcccatctctgcaggatgatgaagcactcgatggatcaaaccgggagcaaaagcgacaaggaaaccgaaaaaggtgcatccagaatcgatgagaaaagctcgaaagccaaggtgaacgattttctggccgagatcttcaaaaagattggatccaaggaaaatacaaaggaggggctagcagaactgtacgaatataaaaaaaaatactctgacgctgacatcgaacccttcctcaagaattcttctcagtttttccaatcctatgtcgaacgggggctaagagtcatcgaaatggaaagggagggaaaggggcgcatctcaactagtacgggtatcagtccacagatggaggttacctgcgtcccaactcctacctctacagtgtcaagtataggaaacaccaatggggaagaggtgggcccaagcgtgtacttggaacggctgaaaattctgcgccagcggtgtggcctggataacacaaaacaggacgataggcctccgcttacttcactgctgtctaaaccggcagtaccaacggtcgcaagttccactgacatgttgcactcaaaacttagtcagctgagggaatctcgcgaacagcatcagcactcagacttggatagcaatcaaactcattctagcggcacggtgacctcttcgtcctcaacggccaatattgacgaccttaagaagcggttggagcgtatcaagagtagccgcaaatag

SEQ ID NO: 113816 - DNA, 906 bp, synthetic construct
  misc_feature 1..906: note = Description of Artificial Sequence: Synthetic coding sequence
  source 1..906: mol_type = other DNA
atgggcgatgactccgagtggctgaaactgcccgtcgatcagaaatgtgagcacaagctgtggaaggctcgcctctccggctatgaggaagccctcaaaatctttcaaaaaataaaagacgaaaaatccccagagtggtctaaattcctgggactaattaagaagttcgtgaccgacagtaatgcagtagttcagcttaagggtctggaggcagctctcgtgtatgtggaaaatgcacacgtggccgggaagacaaccggagaggtggtgtcaggggtcgtgagcaaggttttcaaccagccaaaagcaaaagctaaagagctagggatcgaaatctgcctgatgtacatcgaaattgaaaagggcgaagcagttcaagaagaactactcaaggggctggataacaaaaaccctaaaattattgtggcttgcatagaaactctgcgaaaggccctgtcagaattcggttctaagatcatcctccttaaacctatcattaaggttctgcccaaattatttgagtcccgggaaaaggctgtcagagacgaggcaaagctgatcgctgtagagatctataggtggatccgtgatgcactgcgtcctccattgcagaatatcaactcagttcagctaaaagaactcgaggaagaatgggtgaaactaccaacctctgcacctcgcccaactcgtttcctccgctcccagcaggaactggaagccaagttggaacaacaacagtcggccgggggggacgcagagggcggcggcgatgatggtgacgaggttccgcagatcgacgcatacgaactcctagaagcagtggagatcctttctaagcccaagacatttatgaccaagctgcggcaaaagaatggaaagcgcgagaagcgcccttggtcactctag

SEQ ID NO: 113817 - DNA, 6120 bp, synthetic construct
  misc_feature 1..6120: note = Description of Artificial Sequence: Synthetic coding sequence
  source 1..6120: mol_type = other DNA
atgggcgacgacagcgagtggctcaaactgccagtagaccagaaatgcgagcacaaactgtggaaagctaggctatcaggctacgaggaggccttgaaaatctttcagaagattaaggatgaaaaatccccagagtggtccaaatttctaggactaatcaagaaatttgtcacagatagtaatgcggtggtccagctaaagggcctggaggcagcactcgtatacgttgaaaacgcgcatgttgccgggaagacaaccggcgaagttgtgagcggtgttgtgtctaaggtattcaatcaacccaaggctaaggctaaagagctgggaattgaaatctgtctaatgtatattgagatcgagaagggagaagctgtgcaggaggaattgctcaaaggtctggataacaaaaatcctaagattatcgttgcatgcattgagactctgagaaaggccctaagcgaatttggatccaagattattctgctaaagcctataatcaaagtactccctaagctgttcgagtcacgggagaaagctgttcgggatgaggctaaactaatagctgtggaaatctatcgctggattagggacgccctgcgacctcctttgcagaatattaactccgtacaactgaaggaactggaggaggaatgggtcaagctgcccaccagtgctccccgccctacccgttttctgcgctctcaacaggagctggaggcaaagctagagcagcagcagagcgctggcggggatgctgagggaggtggggacgatggagatgaagttcctcagatcgacgcatatgagttacttgaagccgtggagatccttagcaaattacccaaggatttttatgataaaatcgaggccaaaaaatggcaagaacgcaaagaagccctagaaagtgtcgaggttctgattaagaatcccaagctggaggcaggagactacgccgatcttgtgaaggcactgaagaaagtggtgggcaaggacactaacgttatgttggtggcactggcggcaaagtgtctcactggactggctgtgggactgcgcaagaaattcggccagtatgcgggtcacgttgtcccaaccattttagagaaattcaaggaaaaaaagccgcaggtggtacaagcactacaggaggctatcgacgcaatttttctgacaaccacacttcagaacatttctgaggatgtgcttgctgtgatggataacaagaatcccactattaagcaacagacgagcttgtttatagcaaggagttttcggcactgcactgcttcaaccctgcccaagagtcttctcaaaccattctgtgcagcccttctgaagcacattaatgattccgcgccagaggtgagggatgccgcctttgaggctcttgggaccgcccttaaggttgttggtgagaaagcagttaatccttttctggcagatgtagacaaactaaaactcgataagatcaaagaatgctccgagaaagtggaattgatccatggcaagaaagccggcctggcagccgataagaaggagttcaagcccttgcccgggcggaccgccgcgtccggggcagctggagacaaggacacgaaagacatttctgctcccaagcccggcccccttaaaaaagccccggccgcaaaagctgggggtcctccaaaaaagggcaaaccagccgccccaggtggggcaggtaatacaggcaccaaaaataagaaagggttagagaccaaggagatagtggagccagagttgtccattgaggtgtgcgaggagaaggcgtcagctgttctccctcctacttgtattcagctgttggattcttctaattggaaagagcgtctggcctgcatggaagagttccagaaagcggtggagttaatggatcgcaccgagatgccatgccaggctcttgtgcgaatgctggccaagaagcccgggtggaaggaaaccaactttcaggtcatgcagatgaaactgcacattgtggccttaatcgctcagaaagggaacttcagcaaaacatccgctcaggtcgtgcttgacgggttggtggataaaatcggggatgtgaaatgcgggaataatgctaaggaggctatgactgccattgccgaggcatgcatgctgccatggacagctgagcaggtggtgtccatggccttcagccagaagaaccccaagaaccaatcagagacacttaactggttaagcaatgcaatcaaagagttcggcttcagcggcctgaacgtgaaagcatttataagtaatgttaagacagctctggcggctaccaatcccgctgttcgtaccgccgccatcacactgcttggagtaatgtacctctatgtcggtccaagcctgcgcatgttcttcgaggatgaaaaacccgcactgttgagccagatcgatgccgagttcgaaaaaatgcagggtcaaagcccccccgctccaacgcgcgggatttctaagcacagtacgtcgggtaccgacgaaggagaggacggcgatgagcccgatgacggctccaacgacgtggttgaccttttacctagaacggaaatcagcgataagatcaccagtgaactcgttagcaagattggcgacaagaattggaaaattagaaaggaggggctggacgaggtcgccggaattattaatgatgctaagttcatccagccaaatattggcgagttgcctactgcccttaagggccggcttaatgatagtaataagattctggtccaacagaccctgaatatcttacagcagctggcggtggcgatgggcccgaatataaaacagcacgttaagaacctcggaatacctattattaccgtgctcggcgactctaagaataacgtccgcgcggcagccctagccacagtgaacgcctgggcagaacagactggcatgaaagagtggttagagggggaagacttgtcagaggaactcaagaaagaaaatccgttccttcggcaggagctcctcgggtggttggcggaaaagctgcccactcttcgctcaacacctaccgacctgatcctctgcgtcccacacctgtatagctgcctcgaagataggaatggcgatgtgcgaaaaaaagctcaggacgccctccccttttttatgatgcacttgggttacgagaaaatggcaaaagccaccggcaaacttaaacccacaagcaaggaccaggtcctggctatgctggaaaaggccaaagtgaacatgcccgctaagccagcgcctccaaccaaggcaacgtccaaacccatgggaggcagtgctcccgcaaagttccagccagcatcagcacctgcagaagattgcattagctcctctactgaaccaaagcctgatccaaagaaggccaaagcaccagggctctcgtccaaggctaagagcgcccagggaaaaaagatgcccagcaaaacttcattgaaggaagacgaggacaagtcagggcccatctttatcgtcgtgccaaacggcaaagaacagcgcatgaaggacgagaagggattaaaagtgctgaaatggaactttacaactccgcgggatgagtatattgagcagttaaagactcaaatgtccagctgtgtggccaagtggcttcaggacgaaatgttccacagcgactttcagcatcacaacaaggccttggccgtcatggttgatcatctggaatctgagaaagaaggcgtgatcgggtgtttagatcttatcctgaagtggttaaccctgcgcttttttgatacaaatacttccgtgctgatgaaggccctggagtacttgaagctcctctttactctgctcagcgaggaagagtatcatctgaccgaaaacgaggccagtagtttcataccatatctagtggtgaaggtaggcgagccaaaggacgtgatccggaaagacgtccgagccatcctaaaccgaatgtgtctagtgtatccagcctctaagatgttcccgtttatcatggaaggaaccaaaagtaaaaactctaagcagagggctgagtgtttggaggagctaggttgcctggtggaatcttatggaatgaacgtctgtcagccaacacctggcaaggcgctgaaagaaattgccgtccacatcggcgatagagataatgccgtgcgtaatgcagctttaaataccatcgtgacagtatacaacgttcatggggatcaggtcttcaagttaattgggaatctctccgagaaggatatgtctatgctggaggagaggatcaagcgctctgccaaacgcccgtccgcggctcctattaagcaggtagaggaaaaaccacagcgggctcagaatattagcagcaacgctaacatgctacgaaagggccctgccgaggatatgtcctccaagctgaatcaggcacggtccatgtccgggcatccagaggctgcgcagatggtccgaagagagtttcagctagatctggatgaaatcgaaaacgacaacggcactgtgaggtgcgaaatgcctgagctggtgcagcacaagttagacgacatctttgagcccgtgttgattcccgagccgaagatccgcgcagttagtcctcacttcgacgacatgcattccaacaccgccagtaccataaactttattattagtcaggttgcttcaggcgatatcaatacctccatccaagcccttacacaaattgatgaggtgctcaggcaggaagataaggctgaggccatgtcaggccatatcgaccagttcctgatagcgactttcatgcagctcagactcatctacaatacgcacatggctgacgaaaaattagagaaagatgagatcatcaaactttacagctgtattatcgggaatatgatatccttgttccaaattgagagcctggcaagggaggcctcaacaggagtgctgaaggatctgatgcatggactgatcactctgatgcttgactctcgtatcgaggacttggaagagggtcaacaggtgatcaggtcagtcaatttactcgtggtgaaagtgttagaaaaatctgaccagacaaatatcttgagcgctctattagttctgctccaagactcacttctggcaactgcctcaagcccgaaattctccgagctggtcatgaagtgcctctggcggatggtcagactgcttccggacaccatcaacagtattaacctcgacagaatcctgctggacatccatatatttatgaaggtgttccctaaggaaaagcttaaacagtgcaaaagtgagttccccatacgtacactgaagaccttgctgcacacactttgcaagttaaaaggccctaagagctgtatgtgcctgccacagattctggaccaccttacgatgatcgataacaaaaatgagagcgagcttgaggcccacctgtgtcggatgatgaaacactcgatggaccagacaggctcaaaaagcgacaaagagaccgagaagggggccagcaggatcgacgagaagtcctctaaggcaaaagtgaacgacttcctggcagagattttcaagaaaataggttccaaagagaacacaaaagaaggactggcagagctctatgagtacaagaagaaatactccgacgctgacattgaaccgtttctaaaaaattcctcccagttctttcaaagttatgtagaaaggggcctccgagtgatagaaatggagagggaagggaaaggaagaataagcacttcaacagggatatccccacagatggaggttacttgtgtacccacacccacaagtactgtttcttccatcggaaatactaacggcgaagaggtgggcccaagtgtttatcttgagcgcctgaagatcttgcggcagagatgcggactcgacaataccaaacaagatgacaggccacccttgacgagcttgctgtccaaacctgccgtccctactgtggcgagttctaccgatatgttgcacagtaagctttctcagctcagagagagccgggagcagcaccaacactcggacctggattccaatcagacccactcatccggtaccgtgacgagttcttcttctacagccaatattgacgacctgaagaagcggctcgaaaggatcaagtccagccgcaagtag

SEQ ID NO: 113818 - DNA, 456 bp, synthetic construct
  misc_feature 1..456: note = Description of Artificial Sequence: Synthetic coding sequence
  source 1..456: mol_type = other DNA
atgggcgacgactccgagtggctgaaacttccagttgaccagaagtgtgaacataaactttggaaggcaagactctcaggctatgaagaggcacttaaaatctttcagaaaattaaagatgagaagtctcctgagtggtcgaaattcttaggcctcattaagaagttcgtgaccgacagtaacgcagtggtccagctgaagggactcgaggccgcgctcgtgtatgtcgagaacgcccacgtggcaggaaaaactacgggtgaggtggtctccggagtcgtcagtaaggtgtttaaccaacctaaggctaaggctaaagagctgggaatcgaaatctgcctgatgtatattgagattgagaaaggcgaggcggttcaggaggagctgttgaaaggactggataataagaacccaaagatcattgtggcatgtatcgagacactcagaaaagcctag

SEQ ID NO: 113819 - DNA, 6099 bp, synthetic construct
  misc_feature 1..6099: note = Description of Artificial Sequence: Synthetic coding sequence
  source 1..6099: mol_type = other DNA
atgggagatgattcagagtggctcaagttaccagttgatcagaaatgcgagcacaaattgtggaaggcccgattgtctgggtatgaagaagcactcaaaatcttccagaagattaaagatgaaaagtcccccgagtggtcaaaatttctgggattaataaagaagtttgtgactgatagcaacgcagtggtgcagctgaagggtctcgaagccgccttggtctacgtggagaacgcgcatgttgctggaaaaaccacgggggaggtggtcagtggagttgtttcaaaggtgtttaatcagcctaaggctaaggcgaaagagctaggcattgaaatctgccttatgtatattgagattgagaaaggcgaggctgtccaggaagagctgctcaagggactggataacaagaatcctaaaataattgtggcttgcattgagacgctgcgcaaggccctgtcggaatttggttcaaaaatcatcttactgaaaccaattataaaggtactaccaaaactgttcgagtctagggaaaaggcagtgagggacgaggctaaactgatcgcggtcgaaatttacaggtggatcagggatgctctccggccgccacttcagaatatcaacagtgtccaacttaaggagctggaagaagagtgggtcaagctgcccaccagtgccccccgccccacccgttttctgagatcacagcaagagttggaagcaaaattggaacaacaacaaagcgcgggcggagacgcggagggaggaggcgacgatggagatgaggtgccacaaatcgatgcgtacgaacttttggaggcagtagagatcctgtcaaagctgcccaaggatttctatgacaagatcgaagcaaagaagtggcaagagcgcaaggaagccctggaatcagtcgaagtgctaattaagaaccctaagcttgaggcaggtgattatgccgacctggtgaaggcgctcaaaaaagttgtgggcaaagatactaacgtcatgctcgtagctttagccgctaaatgcctgacaggactggccgtgggactcagaaagaagttcggacagtacgcaggccacgtggtgccaaccattctcgagaagtttaaagagaagaaaccccaggttgtccaagctctgcaagaggctatagatgccatatttctcacgactaccttgcagaacatctcggaggacgttttagccgtgatggacaataagaatcctactatcaaacagcagacatccttattcattgcacgctcatttcgacactgcaccgcgagtacattgcccaagtcactgctcaaacccttttgcgctgctcttctgaaacatattaacgattccgcaccagaagtcagagacgcagcgtttgaagccctgggtaccgctcttaaggtggtgggagagaaagccgtcaatcctttcctcgccgacgttgacaaactgaagcttgacaagattaaggagtgctctgagaaggtggaactgatacacggaaagaaggcggggctagccgccgacaagaaagaatttaagcctctgcctggccgcaccgccgcatcaggcgccgccggcgacaaagacaccaaagatatcagtgccccgaagcctggccccttgaagaaagctccagcagccaaagcaggcggtccccctaagaagggtaaacccgcggcaccaggtggcgctggcaataccggcacgaagaacaaaaaggggttggagaccaaagagatcgtcgagccagaactttccatcgaggtttgcgaggagaaggccagcgccgtgctgcctcctacctgcattcagcttctagattctagcaattggaaagagcgcctggcttgcatggaggagttccagaaggccgttgagttaatggatagaaccgaaatgccctgtcaggccttagttaggatgctcgcgaaaaagccggggtggaaagaaaccaacttccaggtcatgcagatgaagctgcatatcgtcgcactcatagcgcaaaaaggcaactttagcaagacgtccgctcaggtggtgctcgatgggcttgttgataaaattggcgatgtcaagtgtggaaataacgccaaggaagcgatgactgctattgctgaagcatgtatgctgccatggactgcagaacaggtggtgagcatggcattcagccaaaaaaatcctaagaaccaatccgagactctgaattggctctccaacgcgataaaggagttcgggttttcgggcctgaacgtgaaggccttcatttcgaatgtgaagaccgcactggccgccaccaaccctgctgtgcgaaccgccgcaataacactgttgggtgtgatgtacctgtatgtcggaccctcattaaggatgttcttcgaggatgaaaaacccgctctgctgagccagatagatgccgagttcgagaagatgcaaggacagagtcccccagccccaacacgaggcatttctaaacacagcaccagcggaacagacgagggggaggacggagatgagccggatgatggaagcaacgacgtggtagatctgctgcccaggacagaaatctctgataaaataacctccgagttagtgtccaagatcggggacaaaaactggaaaatccgcaaagagggcctggatgaagtggctggcattataaacgatgcaaaattcatccagcccaatataggcgaactaccaacagccttaaaggggagattgaatgatagcaacaaaatcttggtgcagcagacactgaatatactgcagcagctggcagtagcaatgggcccaaatatcaaacagcatgttaaaaatcttggcatccctattataacagtgttgggggattccaagaacaacgtgagagcagctgcactcgctaccgttaacgcatgggctgagcagactggcatgaaggaatggctggagggagaagacctctccgaggagcttaagaaggagaatcctttcctgaggcaagaacttctgggatggcttgccgagaaactcccaacactcaggtctaccccaaccgatctcatactgtgtgttccccatctctattcgtgtctggaagaccgcaatggggacgtgagaaaaaaagcacaggatgccctgcccttctttatgatgcacctcgggtacgagaaaatggccaaagcaacaggtaaactaaaacctactagcaaagaccaggtgctcgcaatgcttgagaaagccaaggtcaacatgcccgctaaacccgccccccctacaaaggccacatccaaacccatggggggcagcgcaccagcaaaattccaacctgcatccgcccccgcggaagattgtatcagttcttctacagagcccaagcctgatcccaagaaggcgaaggcacctggactttccagcaaggccaagtcggctcaaggcaagaagatgccaagcaaaacctcactgaaagaagatgaggacaagtcgggacccatctttatagtggtgcctaacggcaaagagcaacgtatgaaggacgagaagggtcttaaggtcttgaagtggaacttcactacaccacgggatgagtacattgagcagttaaagactcagatgagctcctgtgtcgcaaagtggctacaggatgagatgttccacagcgactttcaacaccataacaaggcccttgcggtaatggtggaccacctagagtctgagaaggaaggagtaataggctgccttgacctcatcctgaagtggctcacacttcggttcttcgacactaacacatctgttctgatgaaggctctcgaatatctgaagctgctgttcactctactttctgaggaagagtaccatttaacagagaacgaagccagctcttttataccttatctggtggttaaggtgggggagccaaaggacgtgatccgaaaggatgttcgcgcaattctgaatagaatgtgcctagtgtaccctgcttcaaaaatgtttccatttatcatggaagggacgaaatccaaaaactcaaagcaaagagccgaatgcttagaggagctcgggtgtctcgtggagagctacggcatgaacgtatgccagcccacccctggaaaggccctcaaagagatcgccgtgcatattggcgaccgcgataacgcggttcgaaatgcagctctgaataccattgtgaccgtatataatgtgcatggtgatcaggtgtttaagcttatagggaatttgtccgagaaagatatgagtatgctcgaggagcgtattaagcggtcagccaagcgaccctctgccgcaccaatcaaacaggtagaggagaagccacagcgagcccaaaacatttcatcgaacgccaacatgttacggaaaggacctgccgaggacatgtcctctaagctgaaccaagccagaagtatgtcaggccaccctgaggcagcccagatggttcgacgcgaattccagctcgatctggacgagattgagaacgataacggaaccgtgaggtgtgaaatgccagagctcgtccagcataagctggacgatatctttgaacctgttttaatccccgaaccaaaaatacgagcagtgtcgccgcattttgacgacatgcattcaaatactgcctctaccatcaacttcattatcagccaagtggcgtcaggggatattaatacctctattcaagctctgactcagattgacgaggttttgcgccaggaggataaagcagaggccatgtctgggcatattgaccaatttcttattgcaacattcatgcagctgcgcctaatttacaacacccatatggcggacgagaaacttgaaaaagatgaaatcattaaattgtacagttgcattatcgggaacatgatcagcctttttcagattgagagcctggcccgggaggcatcaactggcgtgcttaaggatttgatgcatgggctcatcaccctgatgctcgactcccggatagaagacctggaagagggtcaacaggttatcaggagcgtgaacctgctcgtggttaaggtgctagaaaaaagtgatcagacgaatattctgagcgcgctgctggtcctgttgcaagactccctcctggccactgcctcaagtcctaaattcagcgagttagtgatgaaatgtctttggagaatggttaggctgttgcctgacaccattaactcaataaacttagaccggattctcctcgacattcacattttcatgaaagtgttccctaaagaaaaactgaagcagtgcaagagcgagtttcccatcaggacactgaagacactgctccacactctgtgcaaattgaaaggaccaaagattttggatcatctcactatgattgataacaaaaatgaatccgagctggaagcccacctgtgcagaatgatgaagcacagcatggaccagaccggctcaaaatccgacaaggaaaccgagaaaggggcaagccgcattgatgagaagtcctcgaaagctaaagtaaacgatttcttagctgagatttttaaaaagatcggaagtaaggaaaacacgaaagaaggtctcgccgagctctacgagtacaaaaaaaagtattctgacgcagatatcgagccgttcctcaaaaattcgtcccagttctttcagtcttacgtggagagagggcttcgtgttattgagatggagagagaaggcaaaggcagaatctctaccagcaccggtattagtccccaaatggaggttacgtgcgtgcccacccccactagtactgtgtcttcgatcgggaacacgaatggtgaagaagtcggccccagcgtgtatctcgaaagacttaaaatcctgcgccagcgctgcggattagacaatacaaagcaggatgataggccccctctcacgagtctgctttcaaagcccgcagtcccgacagtggcctctagcactgacatgcttcactctaagttgtcacagctgcgagagagtcgagagcagcaccaacatagcgatcttgacagcaatcagacccactcttcgggaactgtgacctcaagttccagtaccgctaatatcgatgatctcaaaaagcggctggaacgtattaagtcttctaggaagtag

SEQ ID NO: 113820 - DNA, 1020 bp, synthetic construct
  misc_feature 1..1020: note = Description of Artificial Sequence: Synthetic coding sequence
  source 1..1020: mol_type = other DNA
atgaaagactctttagtgctgctgggtcgggtgcctgctcaccctgactcgagatgttggtttctagcatggaaccctgccggaacactgctagcatcctgcggtggggaccggcgcatccggatctggggtacggaaggagatagttggatttgcaaaagcgtgttgtctgaggggcaccagcgcacagttcggaaggtcgcttggagcccgtgtggtaattacttggcatctgcttcctttgacgccacaacctgtatctggaagaagaatcaggatgactttgagtgcgtcactacgctggaggggcatgagaatgaggtgaaatcagttgcgtgggctccaagtggcaatctcctcgctacctgcagcagagataagtctgtatgggtctgggaagtggacgaggaagacgaatacgagtgcgtttccgtgctaaactctcatacacaggatgtgaaacacgtagtttggcacccctcacaggaactgctcgccagtgcctcctacgatgataccgtcaagctatacagagaggaggaagacgattgggtgtgttgtgctacgctcgaaggtcacgagagcaccgtatggtcactagcctttgatcccagtggtcagagactcgcatcctgcagtgatgaccggaccgtccgtatctggcggcagtacctgccaggcaacgagcagggtgtggcttgttccggaagcgacccttcttggaagtgcatctgcacactttccggctttcacagtagaacaatatacgatattgcctggtgccaattgactggagctctggcgactgcatgtggcgacgatgccattcgtgtgttccaggaggaccccaatagcgaccctcagcaacccacgttctccttgacagcgcacctccatcaggcacactctcaagacgtcaactgtgttgcctggaatcccaaagaaccgggtctactggccagctgtagcgacgatggtgaagtggccttttggaagtaccagcggccagaaggcttgtag

SEQ ID NO: 113821 - DNA, 1380 bp, synthetic construct
  misc_feature 1..1380: note = Description of Artificial Sequence: Synthetic coding sequence
  source 1..1380: mol_type = other DNA
atggctgccagcggtgcggtggaaccagggccacctggcgccgctgtggccccctctccagcccccgcgccccccccagcccctgatcatctctttagacccattagtgccgaagacgaagagcagcagcctactgagatcgaatctctctgtatgaactgctattgtaatggaatgaccaggctcctactgacaaagattccattttttcgcgagataatcgtgagcagcttcagttgcgaacactgcgggtggaacaacactgaaattcagtctgctggacgcattcaggaccagggtgtccgctacacactgagcgtccgtgccctcgaagacatgaatagggaagtcgtgaagacggactctgctgctactagaattcctgagctggacttcgagattcccgccttctctcagaagggcgccctcacaacggtggagggcctgatcacacgagcaatctccggtctcgaacaggaccagcccgcacgcagagcaaacaaagacgcaactgccgaacgcatcgatgagttcattgtgaagctgaaggaactcaagcaggtcgcttctcctttcaccctcatcatcgatgacccctcaggcaacagtttcgtagagaacccccatgcccctcagaaggacgatgcactggtcatcacacactacaatagaacaagacagcaggaggaaatgctgggtctgcaagaggaggcccccgccgaaaagcctgaggaggaggacctcagaaacgaggttctccaattttctacaaattgtccggagtgcaacgccccagcacaaactaatatgaaactggtccagattcctcattttaaggaggtcatcattatggctacaaattgcgagaactgcggccacaggaccaacgaagtaaaatcaggcggggccgttgaaccattggggaccagaataaccctgcacatcacagacgctagcgatatgaccagggacctattgaagagtgagacgtgcagcgtcgagatccctgagcttgagttcgaattgggaatggccgtgctgggcggcaagtttacaacgctcgaaggactgctgaaggatatacgagagcttgtcaccaaaaacccgttcacgttgggggatagttccaatccggggcaaactgagcgactgcaggaattcagccagaaaatggaccagatcattgaggggaatatgaaggctcattttatcatggatgaccccgccgggaactcttatttacagaacgtgtacgctccagaagatgaccctgagatgaaagtcgagaggtacaagcgtaccttcgaccaaaacgaggagctcgggctgaacgatatgaagacggaaggctacgaagccggcctggccccccagagatag

SEQ ID NO: 113822 - DNA, 585 bp, synthetic construct
  misc_feature 1..585: note = Description of Artificial Sequence: Synthetic coding sequence
  source 1..585: mol_type = other DNA
atgtgggttaaattgctgagtattgtggccgagttctgtttcagcccgtttctggtcacagatgaagaaacagcatcagatgctctggaacgcaattccctgtcttctcaagacccccagcagcctacctctacagtgtccgttacggaggattccagtacttccgagattgacaaagaggagaaggagcagaccacccaagatccggatctgactacagaggccaaccctcaatacctgggcctagctcgtaagaagagtggaatcctcttactcaccctcgtgtcctttctgattttcattctgtttatcatagtgcaactgttcatcatgaagctccgaaaggcccacgtgatttggaagaaagaaaatgaagtctccgaacatacccttgagtcttatagatcgaggtcaaacaacgaagaaacttcctccgaggaaaaaaacggccagtcgtctcatcccatgaggtgcatgaattacattaccaagctctattctgaggccaagactaagaggaaagaaaacgtgcagcattctaaacttgaagagaaacatatccaagtccccgaatctatcgtgtag

SEQ ID NO: 113823 - DNA, 525 bp, synthetic construct
  misc_feature 1..525: note = Description of Artificial Sequence: Synthetic coding sequence
  source 1..525: mol_type = other DNA
atggcctgtctgggctttcagagacataaagcacagttaaacttggccacacgcacctggccctgtacacttttgtttttcctattatttattccagtgttttgcaaagccatgcacgtggctcagcccgctgtcgtattagcctcctctcgaggcatcgcatccttcgtctgtgaatatgcctctccaggcaaagccaccgaggtgagagtcaccgtccttagacaggcagacagtcaggtaactgaagtctgtgctgcaacttacatgatgggtaacgagctcactttcctggatgattccatctgcactgggacctcttcaggaaaccaagtgaatcttacaatccaaggtttgcgtgctatggacacgggactctatatctgcaaggttgaactgatgtaccctcctccctactacctgggtataggaaatggaactcagatttatgtgatagctaaggagaagaaaccaagctacaacagaggcttgtgtgagaatgcacctaatcgggcccgcatgtag

SEQ ID NO: 113824 - DNA, 672 bp, synthetic construct
  misc_feature 1..672: note = Description of Artificial Sequence: Synthetic coding sequence
  source 1..672: mol_type = other DNA
atggcttgtctaggcttccagcggcataaggcacagcttaatttagcaaccaggacctggccctgtaccctgcttttcttcctcctattcattcctgttttttgtaaagcaatgcatgtcgcccagcctgccgtggtcctcgccagctctcggggcatcgctagtttcgtctgcgaatacgcttcacccggtaaagccacggaagtgagagtgactgtattgcgccaggccgactcacaggttaccgaagtgtgtgcagcgacatacatgatggggaacgaactgacgtttctcgatgactctatttgtacaggaacctcttccggcaatcaagttaaccttaccatccagggactgcgcgccatggataccggcctgtacatctgcaaagtcgagctgatgtatcccccaccttactacctgggaattggcaacggcacacaaatctacgtgattgacccagagccatgtcccgacagtgattttcttctgtggattctcgctgccgtaagctctggcctctttttttattcgttcctcttaaccgcagtcagcttaagcaagatgctaaaaaaacgttcgcctctgactacgggtgtgtacgtgaagatgccccccacggagcccgaatgtgagaagcagttccagccctatttcatcccgattaattag

SEQ ID NO: 113825 - DNA, 414 bp, synthetic construct
  misc_feature 1..414: note = Description of Artificial Sequence: Synthetic coding sequence
  source 1..414: mol_type = other DNA
atgcacgtagcccagcctgccgtggtgctcgcctcttcccgtggaatcgctagttttgtctgcgaatatgccagtcccggcaaagcaaccgaggtaagagtcaccgtattgaggcaagctgatagtcaagtaaccgaggtctgcgctgcaacctatatgatgggaaacgagctgacattcctggacgattccatatgcaccggtacctcctccggcaaccaagttaacctcactattcagggcctgagggctatggatactggtctctatatttgtaaagtggagttgatgtatcctccgccgtactacttaggcatcgggaacggcacgcagatttacgtcatcgccaaagaaaaaaaaccctcatataatagagggttatgtgaaaacgccccaaatcgcgcacggatgtag

SEQ ID NO: 113826 - DNA, 171 bp, synthetic construct
  misc_feature 1..171: note = Description of Artificial Sequence: Synthetic coding sequence
  source 1..171: mol_type = other DNA
atggcatgcctggggttccagaggcataaagctcagctgaatctggcaaccaggacttggccgtgtactctgctgttttttcttctctttatcccagtgttctgcaaggtaccgccgacagaaccagaatgcgagaaacagttccaaccttacttcattcccattaattag

SEQ ID NO: 113827 - DNA, 660 bp, synthetic construct
  misc_feature 1..660: note = Description of Artificial Sequence: Synthetic coding sequence
  source 1..660: mol_type = other DNA
atggcctctgcaggtgacacccaggccggaccgcgggatgctgctgaccagaatttcgattatatgtttaagctgctgctcattgggaacagttccgtcgggaaaacttccttccttttcaggtacgccgacgactccttcacccccgcctttgtgtccacggttggaatcgattttaaggttaaaacagtttaccgccacgacaagagaataaagttacagatttgggacaccgccgggcaggagcgctatcggactatcaccaccgcctattatagaggtgcaatgggcttcctgctcatgtacgatattgcaaatcaggaaagcttcgccgctgtgcaggattgggccacccagattaagacatatagttgggataatgctcaggtcatcctcgtggggaacaagtgtgacctggaggacgagcgggttgtgcctgctgaggacggccggcggctggcagacgacctgggttttgagttcttcgaagctagcgccaaagagaacattaacgttaagcaagtatttgaaagactagtggatgtgatttgtgagaagatgaacgagtcgctggagccaagttcctcatccggtagcaatgggaagggccccgctgtcggggatgcccctgctcctcaaccatcttcatgcagctgctag

SEQ ID NO: 113828 - DNA, 1566 bp, synthetic construct
  misc_feature 1..1566: note = Description of Artificial Sequence: Synthetic coding sequence
  source 1..1566: mol_type = other DNA
atgctgcctcgcagacctctggcctggccagcttggctgctgcgcggtgctccgggtgccgctggcagctggggccggcccgtgggccccctcgcccgtaggggctgctgcagcgcccctgggacgccggaggtgccactcacaagagagcggtatcctgtacgacgacttcccttcagcactgtcagcaaacaagacctcgccgcttttgaaaggatcgtgcccggtggagtcgttaccgaccccgaagccctgcaggcccctaatgtggactggcttaggactttacgcgggtgttccaaggttcttctccgacctcgaaccagcgaagaggtctcccacatcctccggcattgccatgaaaggaacctggcggtgaaccctcaggggggcaacactggcatggtcggaggaagcgtaccagtgtttgatgaaatcatactctctacggcacgcatgaatagggttctgtcttttcattctgtgagtggtattcttgtttgtcaggccgggtgtgttttggaggagctctcgaggtacgtagaggagcgggacttcattatgccccttgatctcggggcaaaaggcagctgtcacatcggtggcaatgtggctacaaatgccggcgggctccgatttctgcgttatggttctctccacgggactgtgctgggactagaggtggtgctggccgacggcacagtgctggactgtctgacgtcgctccggaaggataacaccgggtacgaccttaagcagctcttcattggctctgagggaacattaggaatcatcactacagtttcaatcctgtgccctccaaaacctcgcgccgtgaatgttgcttttctaggatgcccaggtttcgccgaggtgttacagacattcagtacatgtaagggtatgctaggcgagattctttctgccttcgagttcatggacgcagtctgtatgcagcttgtaggcaggcacctccacctggcgtcccctgtgcaggaaagcccattctacgtgctgattgaaacctcaggcagtaatgcaggccacgatgccgaaaaattaggacactttcttgagcacgcacttggaagtggcctggtgactgacggaacaatggctacagatcagaggaaggtaaagatgttgtgggctcttcgagagcggattactgaggcgctgagtagggatggatatgtttataaatatgacctctcactgcctgtggagcggctgtatgacattgtcacagatctgcgtgcgcgcctgggacctcacgccaagcacgtggtgggatatggtcacttaggagatggaaatttacatctaaacgttacagcagaagccttctctccttctttgctcgccgcactcgagccacatgtctacgaatggacagccgggcagcaggggagcgtctctgctgaacatggcgttggtttccgcaagcgggatgtgctaggatattccaaacccccaggtgccctccagctgatgcagcagttaaaggcccttctggaccctaaggggattttaaatccatataaaacattgcccagccaggcttag

SEQ ID NO: 113829 - DNA, 960 bp, synthetic construct
  misc_feature 1..960: note = Description of Artificial Sequence: Synthetic coding sequence
  source 1..960: mol_type = other DNA
atgctgccacgcaggccgctggcttggcccgcttggttgttgcggggagcgccaggagctgcaggaagctggggtcgtccggtgggccccctagcccgccgcggttgctgtagcgcccccgggactccggaagtaccccttacccgggaacgatacccagtgaggcgtctgccattttcaactgtgtctaaacaagacttggctgcttttgaaaggattgtcccaggcggtgtagtgaccgaccctgaggccttgcaggctcccaatgttgattggctgaggaccttgcggggctgctccaaggtcctgctccgccctagaaccagtgaagaagtatctcacatcctgcgccactgccacgagcgcaacctcgctgtcaatcctcagggagggaatacaggcatggtcggcgggagcgtccccgttttcgacgagattattctgagtaccgcacgtatgaatagggttctcagcttccattctgtatctggcatcctcgtgtgtcaggcggggtgcgtcctggaggagctttctaggtatgtcgaggagagggatttcattatgcccctggatttgggcgcaaagggtagttgccatatcgggggcaatgtagcaacgaatgccggcggccttaggttcctgcgatacggaagtcttcatgggaccgtcctcggcctagaagttgtgctagccgacggaactgtcttggattgcctcactagtcttaggaaagataatactgggtacgacttgaaacaactgttcatcggttcagaaggtaccctgggcattattacaacagtttccatactctgtccacctaaaccccgggccgtgaatgtagctttcttagttacttgcgtgcctcctgcctgcggaccaggcagtccaagacctgcccgcctgcctcaccccgctcttagaactcccggggtgtgcccgcagcccctgcgcctctag

SEQ ID NO: 113830 - DNA, 1164 bp, synthetic construct
  misc_feature 1..1164: note = Description of Artificial Sequence: Synthetic coding sequence
  source 1..1164: mol_type = other DNA
atggtggggggctcagtgcctgtgtttgacgagattatcttatcaaccgcaagaatgaatcgggtccttagctttcatagcgtgtcgggcatcttagtctgtcaagcgggatgcgtgttggaggaattgagtcgctacgttgaggagcgcgacttcatcatgccgttagatctaggtgctaaagggagctgccatataggcgggaacgttgcaactaatgctggcggcctgcggttcctgaggtatggtagcctgcacggcaccgtcctagggcttgaggtggtgctggcagacggaacggtgctggactgcctgactagcctgaggaaagataatactgggtatgaccttaagcagttattcatcggtagcgagggaactctgggcatcattacaacggtgtcaatcttgtgtccccctaagccccgggccgtcaatgtagcctttctggggtgccctggatttgcagaagtgctgcagactttcagcacatgtaagggcatgctaggggagatcttaagcgcttttgagtttatggacgccgtttgcatgcagttagtgggccgccacctacacttagcctcccctgttcaggagagtcccttttacgttctgatcgaaacgtccgggagcaatgctggtcacgatgccgaaaagctgggccattttttggagcatgccctgggaagcggcctcgttacggacggcaccatggccacagaccagcggaaagtgaagatgttgtgggccctgagggaacgaatcaccgaggctctttctagagatggttacgtttataagtacgatctcagtctgccggtcgagcgcctgtacgacatcgtgaccgatctgcgcgcccgtctaggcccccatgcaaagcacgtcgtcggttacggacacttaggtgacgggaacttgcatcttaatgtgacggccgaggccttttctccttcccttctggcggcccttgaaccacatgtctatgagtggacggccggacagcagggctccgtgtcggcagaacacggcgtaggctttcgaaagcgtgatgttcttggatatagcaagcccccaggcgctttacagctaatgcagcagctgaaggctttgcttgacccgaagggtatcctgaatccctacaagacattaccgtctcaggcatag

SEQ ID NO: 113831 - DNA, 978 bp, synthetic construct
  misc_feature 1..978: note = Description of Artificial Sequence: Synthetic coding sequence
  source 1..978: mol_type = other DNA
atgctgccgagacggcccctggcttggcccgcttggttgctcaggggggccccaggggctgccggctcatggggtaggcctgtcggcccacttgcccgccgtggctgctgttcagccccgggaacccccgaggtgccacttacacgcgaacggtatcccgtgagaaggctacccttttcgaccgtttcaaagcaggatctcgctgccttcgagagaatcgtgcctggaggcgttgtgaccgaccctgaggcactccaggcccctaatgtagactggctgaggacattacggggctgctcaaaagtcttgctgcgaccaagaacaagcgaggaagtatcccatatcttaaggcactgccatgaaagaaacctggccgtgaacccccagggcggtaacactggtatggtgggcggctcggttcctgtgttcgatgaaatcatcctcagcacagctcgcatgaacagagtgctgtccttccactccgtctctggcattctcgtatgccaggcagggtgtgtcttggaagaactgtctaggtacgtagaggaacgggactttattatgccacttgatttaggagccaaagggagctgccacattgggggcaacgtggcaacaaacgcaggtgggctccggttcctgcggtacggatcgttgcacgggaccgtcttgggacttgaggtggtgctggcagatggcactgtcctggactgcctgacatctctccgcaaagacaacaccggctatgatctgaaacagctgttcattggatccgaaggcacactcggaatcataaccaccgtgagcatcctctgtcctcccaagcccagagccgtgaacgttgccttcctggtgacttgtgtgccccctgcctgtggcccaggttcacctcggccagcgaggctgccccatcctgcactgcgcacaccaggtcttagacaagagtccctggcttcttcctgccatgcgcatgtgtag

SEQ ID NO: 113832 - DNA, 426 bp, synthetic construct
  misc_feature 1..426: note = Description of Artificial Sequence: Synthetic coding sequence
  source 1..426: mol_type = other DNA
atgctgtgggccctgagagaaagaattactgaagcactgtctagagatggatatgtctacaagtacgatcttagcctgcccgtagagagactctacgatatcgtgactgacctcagagcccggctggggccacatgctaagcacgtggtaggatacgggcacctaggcgacgggaacctccacctgaacgtgaccgccgaggctttttctccttcccttttggccgcgcttgagccccacgtctatgagtggaccgctgggcagcaaggttctgtttcagccgagcacggggtaggttttcgcaaacgagacgtacttggctactcaaagcctcccggcgctctgcagcttatgcagcagcttaaagctcttctagatccgaagggcatcctcaatccctacaagactctgccttctcaggcttag

SEQ ID NO: 113833 - DNA, 609 bp, synthetic construct
  misc_feature 1..609: note = Description of Artificial Sequence: Synthetic coding sequence
  source 1..609: mol_type = other DNA
atgtcattccccccattatggcctacccgtcacgtgcctgcgtcgcaccctacctgcccgctcctccctgggccatgctgttgtccacattgcttgtgtgatagtgctccaccttcccttccttgtccaaccctggtccagggggctagtagacctatattaatattgcgagcctttccgggcccttgtcactcggtgccttgccacgacttgaaactgcaggtgggggcgtctccctttcgacatggatgtccaccctccgtcaggtgtccttcacgccttattgctggcgtacccggctgttctgtgctgtcctggtccctgggtcacagtctgtccggtatcgattcccgcgtgggggcaactccaggtctgggccacagcctgtcctgggtgagggccccaccagggcttgggcactccttatccggtgtaggcgccacacccggcctcggtcatttgctgagcggggttggcgcttctcccggggaagatactgagcatgctgccgcactcaccccatgcggtgtcccccccgtgcccggatgtcggagccactctcagcccctgagccatctcgttagcagctctaggtgttgtggaccctag

SEQ ID NO: 113834 - DNA, 849 bp, synthetic construct
  misc_feature 1..849: note = Description of Artificial Sequence: Synthetic coding sequence
  source 1..849: mol_type = other DNA
atggcccttagctgctcttcctggtgtaggtctcctcagtggaagttcgaagcctctaaaagccatgctaaccaccgacctatctgcctatcccccagaatctggccggggtctgcctccgcgaccagcactgtatgttcatcaagtgagtcctttctgcccaggggtccgcctgctgtatcccttttgcttcatggaccgcctactgtatcctttccacccccctggcccacgcaccatgtcttgcccagtcctgtggcccaccctccctgcccttgtctgccgcctgacatgccgcttgagctgcctggaccctgttgttgtccacactgtttgtgtgacagcgccccaccttctctgccatgtcccacacttgtccaaggcgcctctagaccgattctgatcctcagggcgttcccaggtccctgtcacagcgtgccatgtcatgatctaaaactgcaggttggagcatctccctttagacatggttgtccaccttccgtgcgctgcccctcccggctgatcgcaggcgtacctgggtgctcagtcctgagctggtctttgggacactccctgagtggaattgacagcagggtgggcgcaacacccgggcttggccatagcctgtcatgggtgagagccccacccggattgggacattcacttagcggcgtcggagccacaccaggcctgggccatctgctgtccggcgtaggagcatcaccgggagaggatacagagcatgcggcggccctgactccgtgtggtgtcccacctgtgccgggctgtcgaagtcattcccagcccctgtcccatctggtctcatcatcaaggtgctgtggcccctag

SEQ ID NO: 113835 - DNA, 1245 bp, synthetic construct
  misc_feature 1..1245: note = Description of Artificial Sequence: Synthetic coding sequence
  source 1..1245: mol_type = other DNA
atgggtggcctgagcgcaagaccaaccgccggacgaacagatcccgccggcacatgttggggtcaagatcctggatcaaagatggcaaccgtgatccctggacccctctccttaggggaagatttctatcgcgaggccatagagcattgtcgctcctataacgcacgcctgtgtgctgaaaggtcattgcggttgccattcttggacagccagacaggcgtggcccagaacaactgctacatttggatggaaaagacacacagaggcccgggactcgcccctggtcagatttacacataccccgctagatgctggcggaagaagcgaaggctgaatatactggaggatccacgactccgaccctgtgaatataaaatcgattgcgaggcccccttgaaaaaagagggaggcctgcctgaaggtcctgttctagaagccttactatgcgcagagactggcgagaagaagatcgagttgaaggaggaagaaacaatcatggactgccagaaacagcagctattagaattccctcacgacctcgaagtggaagacctggaggacgatatacccagacgtaaaaatagagctaaggggaaagcctacggcatcggtggcctgcgcaaacgacaagacacggccagtctggaagatagagacaagccatacgtatgtgatatatgtggaaagcgctacaaaaatcggccaggcctatcttaccactacacccatacccacctcgccgaggaggaaggcgaagaaaatgctgagaggcacgcattaccctttcatcgtaagaacaaccacaaacagttctacaaggaactggcatgggtcccggaagctcagaggaagcatactgcaaagaaggctccagacgggaccgttataccaaatggatactgcgatttttgcctgggcggttctaaaaagacagggtgccccgaggacttgatctcttgtgcagactgcggacgatcagggcaccccagctgtctgcagttcactgtgaatatgacagccgccgtgcgcacctaccgctggcagtgtattgagtgcaagtcttgttcattatgcggtacatcagagaacgacgatcaattgctcttctgcgacgattgtgaccggggttatcatatgtactgcctgagcccacccatggccgagcctcctgagggtagctggtcatgccacctgtgtttaaggcatcttaaggagaaggcttcagcttatattacactgacctag

SEQ ID NO: 113836 - DNA, 1074 bp, synthetic construct
  misc_feature 1..1074: note = Description of Artificial Sequence: Synthetic coding sequence
  source 1..1074: mol_type = other DNA
atggccacagtaatccataaccccctcaaggctctgggggaccagttctacaaagaggctattgagcattgtagatcttacaatagcaggctctgtgctgaacgcagtgtccgcttgcctttcctcgactcccaaacaggagttgctcagaataactgctatatatggatggaaaaacgtcatagaggcccagggctggctcctggccaactttatacctatcctgccaggtgctggcggaagaaaaggcgattgcaccctccagaagatcccaagcttcgtctcctagagattaagcccgaggttgagcttccactgaagaaagacgggttcacatccgagagtacaacccttgaggcactcctgcgtggggaaggcgtcgagaagaaggtagatgcccgcgaggaagagtcaatccaggagattcagcgtgttctcgagaacgatgagaatgttgaagaggggaatgaggaggaggacctcgaggaggacatcccaaagcgaaagaaccgcacccgcggtagagccaggggctcagccggggggagaaggcgccacgatgctgcctcgcaggaggaccacgacaaaccttacgtatgtgacatttgcggcaaacggtacaagaatcgccccgggctatcataccactacgcacatacccatctggctagcgaggagggcgacgaagctcaagaccaggagaccagaagcccgccaaatcatagaaacgagaaccaccggcctcaaaaagggccagacggtactgtcataccaaacaattactgtgacttttgcttgggaggctcgaatatgaataagaagtctggccggcctgaggagctcgtgagctgcgctgactgcggaagatccgcccacctggggggcgaggggcggaaggagaaagaggccgccgccgccgcccgcacaaccgaagacctgtttgggagtaccagcgaatccgacacctccacgttccacgggttcgacgaggatgacttggaagagccaaggagctgtcgtggccgcaggtcaggtagaggtagtcccactgcggacaaaaagggttcttgttag

SEQ ID NO: 113837 - DNA, 999 bp, synthetic construct
  misc_feature 1..999: note = Description of Artificial Sequence: Synthetic coding sequence
  source 1..999: mol_type = other DNA
atggagaaaacacacagggggccagggcttgcccccggccagatctacacgtacccagctagatgttggcggaaaaagcggcggctgaacattctggaagatccaaggctacgtccttgcgagtataaaattgactgtgaggctccactgaagaaagaaggtggccttcccgaggggccagtgcttgaggctttgctatgtgccgagaccggagaaaagaagattgaactgaaggaggaggaaaccattatggattgccaaaagcaacaactccttgagttcccgcatgacctggaagttgaggatctcgaggatgatatcccccgccggaagaaccgcgcaaaggggaaagcatacggcatcgggggactgcggaaaagacaggatacggcgagtctggaagacagagacaagccttatgtttgtgacatctgtgggaagcgatacaaaaaccgtcctgggctgagctaccactatactcacactcacctggcagaggaagagggcgaggaaaacgctgaacggcatgctttgcccttccatcgcaaaaacaaccacaaacagttttataaggagctggcctgggtccctgaagcccagaggaaacacacagccaaaaaggcccctgacggcacagtgatccccaatggttattgcgacttctgtttaggcggctccaaaaaaacagggtgccctgaggatcttatatcttgtgcagactgcggaagatctggccacccctcttgtctgcaattcaccgttaacatgaccgccgcagtgcggacctacagatggcaatgcatagaatgtaagtcgtgcagtctgtgcggaacaagcgaaaacgacgatcagcttttattctgcgatgattgtgatcgtgggtaccacatgtattgtttaagtccacctatggctgaaccgccagagggatcgtggagctgccacctctgtctgaggcacctgaaagaaaaagcctctgcctacattactctgacctag

SEQ ID NO: 113838 - DNA, 1143 bp, synthetic construct
  misc_feature 1..1143: note = Description of Artificial Sequence: Synthetic coding sequence
  source 1..1143: mol_type = other DNA
atggggggactgtcagcccggcctacagcaggcagaactgacccagcgggaacatgctggggccaggaccccggctcaaagatggcgacagtgatccccggacccctgagtctgggtgaagacttttaccgtgaagccatcgaacactgccgatcttacaatgccagattatgcgccgagcgctctcttcggctgcctttcctggactcccagacgggcgtggcccagaataattgctacatttggatggaaaagactcaccgcggacctggactcgcaccaggccagatttacacttaccccgccagatgctggcgaaagaaaaggaggttgaacatactggaggatccgaggctcaggccttgtgagtataagatagactgcgaagcacccttaaaaaaggaaggagggctccctgagggtccagtgctggaagctctgctttgcgccgaaacgggtgaaaaaaaaattgagttaaaggaagaagagaccatcatggattgccaaaagcaacagctgttggagtttccacatgatctagaggtggaggacctggaggatgatatacctagacgcaaaaatcgggctaagggcaaggcctatggaattggggggctgaggaagcggcaggatacagctagcctggaagaccgagataagccctatgtgtgtgacaagttctataaggagctggcttgggtgcccgaggcgcagagaaagcacaccgcaaagaaggcacccgatgggacagtgattccaaatggatactgcgatttttgtctcggaggctcaaagaaaactggctgcccagaagacttaatctcctgcgctgattgtggccggtctggtcatccctcctgcctccagttcacagtgaacatgaccgccgccgtgagaacctaccggtggcaatgcatagaatgcaagagctgcagcctctgcgggaccagtgagaacgacggcgctagttgggcaggccttactcctcaggaccagctccttttctgcgacgattgcgatcggggctaccacatgtattgccttagtccaccaatggcagagcctccggagggctcatggtcctgccatctgtgcctaagacatttaaaggaaaaagcgtctgcgtacatcactctcacctag

SEQ ID NO: 113839 - DNA, 612 bp, synthetic construct
  misc_feature 1..612: note = Description of Artificial Sequence: Synthetic coding sequence
  source 1..612: mol_type = other DNA
atggccacagccatacaaaatccacttaaaagcttaggggaggatttctaccgcgaagccattgagcactgtcgctcctataatgctaggctctgcgcagagagaagcttgcggctgccttttctggactctcagactggggtagcccagaataattgctatatttggatggagaagacccatagggggcctggtctggcacccggtcaaatctacacataccccgcacgctgctggcgtaagaaacgacggctgaatatactggaggacccaagactccggccatgtgaatacaaaatcgattgcgaggcaccattgaagaaggaagggggtctgccggagggacccgtcctggaggccctcctctgcgccgagaccggcgagaagaaaattgagttgaaggaagaggagaccattatggactgccagaaacaacagctcctggagttcccacatgatttggaggtcgaggacctcgaagacgacatccccaggagaaagaaccgagccaaagggaaggcatatgggatcggaggccttcgcaagagacaggacacagcttccctggaagatcgcgacaagccgtacgtgtgcgactctgaaagtttttag

SEQ ID NO: 113840 - DNA, 1245 bp, synthetic construct
  misc_feature 1..1245: note = Description of Artificial Sequence: Synthetic coding sequence
  source 1..1245: mol_type = other DNA
atgggcggcctcagcgcccgtcctaccgccggacggaccgaccctgcgggcacttgttgggggcaggatcctggcagcaagatggcaactgtgataccaggtccgcttagcctgggggaagacttttatcgcgaagcgattgagcattgtcgctcctacaacgcccgactctgcgccgagagatcgcttcggctcccctttctcgacagccagactggtgtcgcacagaataactgttacatctggatggagaagactcacaggggcccagggctagctcctggacagatctatacctatcccgcccgctgttggcggaaaaagcgtagactcaacatcctcgaagaccctcgcctgcggccttgcgaatataagattgactgcgaggcaccactaaaaaaggaaggtggtttacccgaagggcctgtgttggaggccctgttatgtgccgagacaggagagaagaagatcgagctgaaagaggaggaaaccatcatggactgccagaagcaacagctcctagaatttccccatgatctggaggtggaggatctggaagacgatattcccaggagaaaaaatagagcgaagggtaaagcttatggcatcggaggccttagaaagaggcaagacaccgctagcctcgaggatcgagataaaccttatgtctgcgacatttgcggtaagcgctacaagaacaggcccggcctgagttaccactacactcatacccacctggcggaggaagaaggcgaggagaatgcagagaggcatgctttaccattccacagaaaaaacaatcataagcagttctataaagagcttgcttgggtgcctgaggctcaacgaaagcacacagccaagaaagcacccgatggcactgtcattccaaatggatactgcgacttttgtttaggaggctccaaaaagactggatgccctgaggaccttatctcttgcgctgattgcggtcgatcaggccacccgtcctgtctgcagtttaccgtgaacatgacagccgcggtccgtacttatcgatggcaatgtatagaatgcaaaagttgtagcctttgtggcacaagcgaaaatgatgaccagctgctgttctgcgacgactgcgatcgtgggtatcacatgtattgtctttctccccctatggccgagccacctgagggctcctggtcgtgccatctatgtctgagacacctgaaggaaaaagcatcagcttacatcactttgacgtag

SEQ ID NO: 113841 - DNA, 1167 bp, synthetic construct
  misc_feature 1..1167: note = Description of Artificial Sequence: Synthetic coding sequence
  source 1..1167: mol_type = other DNA
atggccacagccatccagaatcccttaaaatccctgggagaagatttctatcgagaggccatagaacattgtcgatcctacaacgctcggttgtgtgccgagcgctcactgagactgccttttctggattctcagaccggcgtcgcacaaaataattgttacatttggatggaaaaaacccatcgagggcccgggttggcaccaggtcagatatatacctatcctgcccggtgctggaggaagaaaagacggctcaacattctggaagacccccgtttgaggccatgcgagtataagatcgactgtgaggcccctctcaagaaagagggagggctgcctgaaggaccggtactcgaggctctgttgtgtgcagaaactggggagaagaagatcgaactaaaagaggaagagacaattatggactgtcagaaacagcaacttctggagttcccccacgacttggaagtagaggatcttgaggacgacatacctcggagaaagaatagagctaaggggaaagcttacgggataggagggctgcgtaagagacaggacacggcgtccctcgaggatagagataagccttatgtgtgcgatatttgtggaaaacgctataaaaaccgccccggactaagctaccattacactcatacgcatcttgccgaggaggagggcgaggagaatgccgagagacacgccctgcccttccatcggaagaataatcacaagcaattctataaggaacttgcttgggtgcccgaggcgcagaggaaacacaccgccaagaaggcccccgacgggacagtgattccgaatgggtattgtgacttttgcctgggcgggtccaaaaagaccggctgccccgaggacctgatcagttgtgccgattgcggacgttctggccatcctagctgtttgcagttcacagtgaacatgaccgcagccgtgcggacttaccggtggcagtgtatcgaatgcaaatcttgctcactttgtggaacctctgagaacgacgaccaactgcttttttgtgacgactgtgatagaggctatcatatgtactgcctgtccccacctatggctgagccccctgaaggctcatggagctgccacctgtgcttgaggcacctgaaagaaaaggcttcggcttacatcactctgacatag

SEQ ID NO: 113842 - DNA, 1176 bp, synthetic construct
  misc_feature 1..1176: note = Description of Artificial Sequence: Synthetic coding sequence
  source 1..1176: mol_type = other DNA
atggcagcagtcgtcgagaatgtggtgaaattactgggagagcaatattataaagatgccatggaacagtgtcataactacaatgcccggctgtgcgctgagagaagcgtccggttgcctttcctcgactcccagacgggcgtggcacagagcaactgttacatctggatggaaaagaggcataggggccccggactagcctcagggcagctttatagttatcctgctcggcgctggcggaagaagagacgagcccacccacctgaggaccctcgtttaagtttcccaagtataaagcctgacactgaccagacactgaaaaaggaggggcttatttcccaggatggaagctctctcgaggcactcctgcgaactgatcccctggagaaaaggggggctccagacccacgcgtggatgacgattctctcggtgaatttccagtgaccaatagccgtgctaggaagcggatccttgaacccgacgatttcctggacgatctcgatgacgaggactatgaggaagacacccctaaacgccgcgggaagggcaaaagcaagggtaagggtgtgggctctgctcgcaagaaactggacgccagtatcttggaggatcgggataagccttacgcatgtgacatctgcggcaagcgctacaagaatagacctgggttgtcataccactacgctcactcacacctcgccgaggaggagggggaagataaggaggatagccagccgcctactcccgtgagccagcggagtgaggaacagaaaagcaaaaaagggcctgacggattggccctgccaaataactattgtgacttctgtcttggcgattctaaaattaacaaaaagaccggacagcctgaggagctggtgtcttgttccgattgcggaagatctgggcacccttcttgcctacaattcacacctgtgatgatggctgccgttaaaacgtacagatggcagtgtattgagtgcaaatgctgtaatatttgtgggacaagcgaaaacgatgatcagctcctcttctgtgatgactgcgataggggttatcatatgtattgtctgaccccctctatgagcgagcctcctgagggctcctggagctgccatttatgccttgacctccttaaagagaaagcaagtatttatcaaaatcaaaattcatcctag

SEQ ID NO: 113843 - DNA, 1134 bp, synthetic construct
  misc_feature 1..1134: note = Description of Artificial Sequence: Synthetic coding sequence
  source 1..1134: mol_type = other DNA
tctagtatcatccaaaatagactgaagaagctgggcgatcaattttacaaggaggccattgagcactgtaggagctataattcgcgactgtgtgccgagagatccgtgcggctgcccttcttggactctcaaacgggcgtcgcccagaataattgctacatctggatggagaaaagacatagaggcccagggctcgccccaggacaactttacacctaccccgctaggtgttggcgaaagaagaggagactccacccccccgaagatccaaaattacgcttgctcgaaatcaaaccggaagtcgagctcccacttaagaaggacggtttcacatctgaaagcactaccttagaggctcttctccgcggagagggggtggagaagaaagtggatgccagagaagaagagtcgattcaggagattcaaagggtcctcgagaacgacgaaaacgtggaagagggcaacgaagaggaagacttggaggaggacatcccgaagaggaagaataggacccgaggtagggcccggggatcagccggaggccggcgcagacacgacgctgcgtcgcaggaagatcacgacaagccctatgtatgcgacatctgcgggaaaagatacaagaataggccagggttgtcctatcactatgcccacacccacttggcatctgaagagggagacgaggcccaagaccaggagacacgctccccccctaatcacagaaacgaaaatcataggccccaaaagggccctgacgggactgtgatccccaacaactattgcgacttctgcttgggggggtcaaacatgaacaagaaaagtggcaggcccgaagaactggtgagttgtgctgattgcggaaggagcggccaccccacatgcctgcagtttactctgaacatgacggaggcggtgaaaacatacaaatggcagtgcatcgagtgcaagagctgtattctgtgtggaacctccgagaatgacgatcagcttctgttctgtgacgactgcgaccgcggctatcacatgtattgtttaaaccctccggttgccgagcccccagagggttcctggtcatgtcacctgtgttgggaactgctgaaagaaaaggcctccgcattcggttgccaggcatag

SEQ ID NO: 113844 - DNA, 1074 bp, synthetic construct
  misc_feature 1..1074: note = Description of Artificial Sequence: Synthetic coding sequence
  source 1..1074: mol_type = other DNA
atggccactgtgattcataaccccctcaaagccctcggggatcaattttataaggaggctatcgaacattgccgatcttacaactcacgcctgtgcgctgaacgatccgtcaggctgccctttctggattctcagactggcgtcgctcaaaataattgttatatttggatggagaaaaggcacagaggcccgggactcgcacccggtcaactgtatacctatcccgcaagatgttggaggaaaaagcgtcgactgcaccctccagaggatccaaaacttcgtctcctggagatcaaaccagaggtggaacttcctttaaagaaagacggattcacttccgaaagcaccaccctggaggcgctgcttagaggggaaggcgttgagaaaaaggtggacgcccgggaagaggagtctatccaagagatccagagagtactggagaatgacgaaaacgtggaggagggtaatgaggaagaagacctggaggaggatatccccaaacgtaagaataggacccgaggacgggcccgaggcagcgccggagggcggcgacgccacgacgcagcatcccaggaagaccacgataagccgtacgtttgcgacatctgtggtaagcggtacaaaaatcggcctgggctcagctatcattatgcccacactcacctggcgtccgaggagggggacgaagcacaagaccaggagaccaggtctccacctaatcacaggaatgagaaccatagaccacagaaaggcccagatggcactgtcattcccaacaattattgcgatttctgcctgggagggtccaatatgaacaagaagagtgggcgccctgaggaattggtgagttgtgctgactgcggccgcagcgctcatctgggtggagaaggacgcaaagagaaagaagctgcagctgctgccagaactactgaagatctctttggatccacatccgagtccgatactagcactttccatggattcgacgaggacgaccttgaggagccgcggagctgtcgtggcaggcgctctgggcgtggctctccaacagcagataagaaaggcagttgttag

SEQ ID NO: 113845 - DNA, 1137 bp, synthetic construct
  misc_feature 1..1137: note = Description of Artificial Sequence: Synthetic coding sequence
  source 1..1137: mol_type = other DNA
atggctacagtaattcataatcccctgaaggcccttggcgatcagttctataaggaggccatcgaacactgtcgctcctataacagcagactatgcgctgagcgaagcgtgcgcctccctttcctggactctcagacaggcgtcgcacaaaataattgttacatttggatggaaaaacgccatcgaggcccaggtctggcccctggtcagctctacacataccccgctaggtgctggagaaagaagcgacgattacacccccctgaggatcctaaactgcgtctcctggaaatcaaaccagaagtggaactcccactgaagaaagatggctttacctctgagtcaaccactttagaagccctgctgcgaggggagggggtagaaaaaaaagtcgacgccagagaagaggaatctattcaggagattcagagagtactggagaatgacgagaatgttgaagaaggcaatgaagaggaagacctcgaggaagacataccaaagagaaaaaatcgaacccgaggaagggcaagggggagtgctggcgggcgccgcaggcatgatgcggcatcccaagaggatcatgataagccttatgtctgcgacatttgtgggaagagatacaaaaacaggcctgggctgtcctaccattacgcccatacccatctggcctccgaggagggcgatgaagcccaggatcaggaaacgcgtagccccccaaaccacagaaatgagaaccataggcctcagaagggtcctgacggcaccgttatccccaacaactactgcgatttttgcctgggcgggtcaaacatgaataaaaagtcaggacgacctgaagaattggtcagctgtgcagactgtggacgatctggacaccccacttgtctccagttcacactgaatatgaccgaggcggtgaagacctataagtggcagtgtattgagtgcaagtcgtgtatcctttgtggcacctctgagaacgatgaccaacttctcttctgtgacgattgcgatcgggggtaccacatgtactgtcttaaccccccagtggctgaaccacctgaggggagctggtcctgccacttgtgctgggagctgctgaaagagaaggcgagtgcattcggctgccaggcctag

SEQ ID NO: 113846 - DNA, 4110 bp, synthetic construct
  misc_feature 1..4110: note = Description of Artificial Sequence: Synthetic coding sequence
  source 1..4110: mol_type = other DNA
atgagtccatgcggaaggaagatgggcgaagggcgccagcaacgtcgcgccccagtgggtaaactgctgttgctaccggggaggagggacaccccacacggacgttcaggtagcagcggtgcgcgcacccagcgaagtttgttgtggcttctcgtgcatgtctggctgtgggcggcctcggggtcatctgcccagctgttcaatctcactctttcggtggatgagggcctgccacccgatacactagtgggggacattcgcgctggccttccagccgcccagcagcaagagggatcaggcttctttctttctgaagattcagatgacagtccacttctggacgatttccatgtgcaccctgacaccggaataatccggaccgcgaggcgccttgatcgcgaacggcgggatcactattctttcgttgcggccactcttttgggtgcggtggtacaggttgaaattcgggtgaacgatgtcaatgatcatagccctcggttcccgctggatagtctgcagctcgacgtgagcgaactctccccccctggaacagcgttccgactgcccgtggcacatgatccggacgccgggctcttctcaacccaaggttacaccctggttcaaccatctgatctgccaaaggacccggctgggccctttttccagttgcggtatcgaacccccggcccgctcccgtctccactactgcccgggtcctcgagtccactggagcctttagacctggtgttgctgaggcggctggatcgtgaggaggccgctgcccacagacttcagattgaggcttgggacggcggcagaccgcggcgcacgggcttgcttagcgtcgaacttagggtgctggatgagaacgacaatcctcctgttttcgagcaggatgagtacagagctgccgtgagggaagacgcgcagcccggggccgaggtttgtcgtgtcagagccacagaccgggacttgggacccaacgggttcgtgagatattctgtgagagcaaggcaagtgcctggcgccggtagtggcggcggagcccttggagatgccgcgtattttgcggttgaagaacttagcggcgtggtacgtgtatggagacccctggacagggaagcgcaggcctggcatcagctggtggtcgaggcccgggatgggggtgccgaacccgaagtggcgacagtgagggtgtctatagctgtactggacgttaacgacaaccgacctgctatccacgtcctcttcctgacagaaggtggggtggcaagagtgtccgagggagcacgaccaggcgactacgttgctcgggtgagtgtgtcggatgctgacggagattgggagaaagaggacgaggctaccggggagctgggcgtgggcctcggagatggctcaattagcctcagcctggagggcggggaaggtgacttcgccctactccccggcggtccacccggagtctttttcctgtgtgtggagggtccccttgaccgggagtctagagacttgtatgagttattgcttgtggccacagacgccggttccccccccttgtccaccgaagagacgcttctgctccgagtggcggatcttaatgaccagccccccttatttagccaacagcattacaaggccagcgtgtccgaagctgcagccccagggacggtcgtcatgtgggtctccgcttcggatgccgatgaggccggtagtgatcacgcttggcttagatacaccgtggttcagctctccgcaccatgtaacctgggctccctgcagtctaaaatggtgcatacagcggaatgtggaccatcgttcgcgatcgatagtgagtccggagccattagcaccattcgcacgcttgatcgggaggtacaggaagccgttgagcttaaagtagttgctcaagatctgggggagcctcctctctctgccacatgcctggtctcaatcacagtcgatgacgtcaacgataatgaacctatcttttggcgacaagtctacaatgctaccatcgctgaacacgccccggttggtcattgcttcctccaagtgacagcttccgacgcagatagtggcctctacggctttatcgagtattctctgtacgatggattcctgtcttacgaagccccacaggctttccggatcgacccacacgatggacagatctgcgtgtcccaggatatcgaccgagagcgcgatccagccacctatgatctgttggtggaggcaaaagatggtgggggacttagtgcccaggctttcgtgcgcgtcgatctggaggatgtgaacgataaccatcccgtttttaacccttccacttatgtgacctctattagcgatgagacccaacccggtacagaaattattaatgtcctggccaccgaccaggactctgggatttacggcactgtcgcctacgagctcattcctgggaacgttagttccctctttaccatcgatagcactacaggaatcatctatctgacgttgccactttcccatcttgagtcaaccacactcagcttgatggtgtctgcccaagatggaggcggcctcacagccgtgatcaatgccgacgttacaatccatatatttcagactactctggccccagctgagttcgaacgccctaagtacacgttcctcgtttatgaagacgtgccagaggatagccccataggcactgtgaaagcgcgcgaaccactaaattcctctgaacccattttctatcgaatcagcagtggcgatctggggggaaagttttcaatccaccccaggctaggtacaatccggaccaggaagccactggatcacgaaactcaacctgtcgttgtattaacagtgcaagcacagctcgggagcgcgcccgcctgctcctctactgaggtaaatatcacagtaatggacgtgaatgataaccatcccgcattcctccgaactagcgatgagatccgcattagtcagaccaccccacctggtacagcactgtatctggcacgggccgaggaccgcgactctggacgaaacggcctgatacgctacagtatcgcctccccacagcctggggtatttgctatagacagagcgcttggggtgctgttcctgaacgggtctctgggcgccggcgagcagcgcgaactaaccctgacacttcgcgcggaagatcaaggcgtacaccctcaagcagcactcctggttctaacggtcgttatcgagaagcgcgagcactctccgtcctggactttcgagcaccttgtttatcaggtagaggtctccgaatccctgagccccatgacacaaatgctgcaaacccaggcccacccactgggcccccagagagccgcaagccccctgagatactctctagaaccatccgtcgactctgcaatgtttggtattcgcccttataccgggtggatctaccttcggaggcagtttgactacgagtccacgcagacctataacttcagggtgttcgcatggatcccggaggacgggttcctgcagaatgtctcgacaaccgtcattgtgcgggtgtgggatgaaaatgacaacagcccaaccttcttacacgatgtgctgtttctgaaggtcgaggagagtccggtgccgcagggggtaatcggcaaaataaccgccatcgacatggatagtggcaagaatggacagctactgtacttcctgctgagtgacggaaaatttttcaagatgaaccctaacaccggggaactgatcaactgggttgcactagatagggaacaccggggccaccatgaaatgactgtgctcgtaaccgatagggggtctcctccacgcaacgccacaatggccgtgtatgtgtcagtgacagacataaatgacaatcgccctttcttcccccagtgcctcccggggaaggaactacacgtcaaagtgttggaggggcagcccgtgaacatgctggtgaccaccgtattcgctaaagatccagatgaaggcaataatgccgaagtgacgtacagcgtttcgtcagcgaggcctatgcccctgaagggaaaaacagcatttggtaaacaaagctgcaagaaacagacaaataagcaaactaacaaaattttaacttag

SEQ ID NO: 113847 - DNA, 8751 bp, synthetic construct
  misc_feature 1..8751: note = Description of Artificial Sequence: Synthetic coding sequence
  source 1..8751: mol_type = other DNA
atgcgtctagacgagatcaccaaatctgagaacgaggacggtgagaagaagatgtttacgcagcaattcgaatctacagatgcttgcgtttacgaggtgtacgtgaaaatcaattccatcgtgaaaagccagagtcagtgcgggcttaagcggggatccccagaaactgagctctggggggctatagttttccgtagtcaagaggagaacgccaagccagttaaggagactgaagttactgcaagcgatgccgacagtggcttatacggattcatagagtatagcctgtacgacgggtttctctcgtatgaagcaccacaggcatttaggatcgacccgcatgacggacaaatttgcgtgagccaggacatagatagagagcgggatcctgcaacatatgacctcctggtggaggctaaggatggggacgaacagcggatgacgcacctggcacttgtgaagggagggctaagtgcccaggccttcgtgcgggttgacctcgaggatgtgaacgacaaccatcccgtcttcaacccttcaacatatgtcacctcaatatctgatgagacgcagccaggtacggaaattattaacgtcctcgccactgatcaggactccggaatttatggaaccgtggcttatgaactgattccggggaatgtgtcatctttgttcacgatcgattctacaacaggcttgtattcacctgaggttgagatcctgtcagccgtaaacttctctgcagataaggaggttatgaacagcttggagatgttccttcctcttcttcgacacttcaagaaggttgagagagacgaagaagcagccgagaagaaattcgaggcgagccgcgggtggtttatgcgatttaaaggtcgacgccacctgcactacctgaaggtgcaggacgaggctgctagcgctgatggcgaggccgcggcccggtacgttgccaacctcgctaagatcctgggggaaggcattatatacctgacattaccattgtcacatctggaaagcaccactctttctctgatggtttccgctcaagacggggggggccttactgcagttattaatgcggacgttaccatacacatttttcagactacactggctcccgcagagttcgagcgaccaaaatatacgttcttagtttatgaagacgtgcctgaggacagtccaattggcacagtcaaagcacgagagcctctgaattcatcagaacccattttctaccgcatttcctctggcgacttgggcggtaaattctcaatacatccccggctgggtaccatacgtactcggaaacctttggaccatgaaactcagccagtggtggtgctcactgttcaggcgcaacttggctcagccccagcctgctcatccactgaggtgaatatcaccgtcatggacgtcaatgataaccaccccgcctttctacggaccagtgacgagatccgcatttcccagaccactccccctggaactgccctctaccttgctagggccgaagatagagactcaggccgcaatggacttatcagatattccatagctagcccccagccgggcgtgtttgccattgaccgtgccttgggcgttctgtttcttaacggtagtttgggtgcaggcgagcagcgcgagctgacgctgaccctgagagccgaggatcagggggtccacccccaagctgccctgctcgtgctgacggtagtgattgagaagagggagcactctccaagctggacctttgagcacttggtatatcaagtcgaggtgtctgaatccttatcccctatgacacagatgttgcagacacaggcacaccccttaggcccccaacgggctgcaagtcctctcaggtactctctggagcctagcgtggatagcgctatgtttggcatcaggccttatacgggatggatatacctcagacgacagtttgactatgagtcgacccagacctacaacttccgggttttcgcgtggattcctgaagacgggttccttcagaatgtctctacgaccgtgatcgtccgcgtctgggacgaaaacgacaattctcctactttcctgcatgatgtactctttctgaaggtggaagagagtccagtgccccagggcgttatcggcaaaattacagccatagatatggactctggcaaaaacgggcagctactgtacttcctccttagtgacggtaagtttttcaaaatgaaccctaacacaggtccagcaggtaccatctatgttattacttgggccgatggcgcggcagcttttagcgggacggattttgccttcagttcggatgaactgcaagcatttgtgcttaaatctttgttctgcgaactcggagaaggagagctgattaattgggtggccctcgaccgcgagcatcgcggccatcacgagatgactgtccttgttacagaccgagggtctccaccacgtaatgccacaatggccgtttatgtctctgttacagatatcaatgacaatcggcccttcttcccacagtgtctcccaggtaaagaacttcacgtgaaggtgcttgaaggacagcccgtcaacatgttagtgacgacggtatttgctaaggacccagatgaaggaaacaacgccgaggtaacatatagcgtatcatcagaggactccagcgaccatttcaaaatcgatgccaataatggcgaaattcgaaccacgacaatcctctcatacgattatcgccctagttatcgcatgtcagtcatcgctaccgaccagggggtgccccctcttcagggccaggccgttgtgaacatccaggttatacctctgtccaaaggcagggccataatgtcgcagaacatcagacatctgatcattccggagaatttgaagcccaccaaaatcatgagcctgataaagtccagcgaccacctacagcaacactataatggtaaactccatttttccattgtcgctgacgacaaggatggtcacttcgagattgattcatctactggggatctgttcctcagtaaagaattagactacgagaccacatcccactatctctttagagttatcacaaccgatcatagcaagaatctctcactctcctcaaccgtcttcctgtcaattgacgtcgaggatcagaacgaccactcgccaagcttccaggacgaactcatcgtgatatctgtcgaagagaatgtgcccatagggaccctggtctacgtctttaatgccaaggatgacgatggctcttttctcaattcgcgtatacagtattatatcgagtcacacaatcccggaacaaatcctttccttatccacccttctttcggtactcttgtcacagtgagcaggcttgatcgcgaaagtatcccaactgtgatactcaccgttactgctagtgaccaggctgtcaatgtgactgaccgccggctgcggtctctgaccgcacagatcgtgattctcgacgttaacgatcataatcccaccttcatctcttttcctaatgctcacgtgaaggaggacgtgacagttgggtctctcgttcaccacatcaccgctcatgatcccgacgaagggcgaaatggcaaggtgacatactccatactgagtgggaacgaaaatatgaccttcatgttggatgaatcaagcggactcttgacaaccacatgtcccctcgattatgaaatgaagacccaacatattctaaccgtgctcgccctggatgacgggactccagctttgtctagctctcaaaccttgacagtaacagtcctagacgtgaatgacgaggcccctgtgttcaaacagcacctgtacgaagccagtgtgaaagaaaaccaaaaccccggcgaattcgtgactcgcgtagaggctctagaccgggattctggagtcaactccaaattgcagttcgaaatcatgcctggcgccagttttgagctcttcgaaattaacagcgatactggcgaagtcgtcaccaccaccattcttgacagggagatccaggaggtatttacccttcgcgtcctggtgcgtgacggcgggttcccttctcttagctccaccacaaccattctctgtaccgtggaggatgagaatgaccacgcgcccgaattcatcgtaagttcttacgacattgaggtgttagagaaccaggagccagaggtagtttacacagtcctggcgtctgatatggatgcaggcaacaatcgcgccgtggagtatcacatcatcgatggcaataccgatgagtgtttcactataaatgaaatgtctggcgagctgagtacgaccagagccctggatagagagcagatctccaatttcacactggtcattttgtgttcggatctgggcgatccacctcgcagttcagtgattcacctacaggtgagagtcttggatgccaacgaccattctccatcttttccaaccctgtattatcagtcttccgtgcgggaggatgccgaggtgggcactgtggtgttagttctttcagctgttgacaaggatgagggactgaatggccagacagagtatttcctgacagacgaagcatcgggcgcatttaccatagacccaatgagcggaacacttaagacgtcaaacacgctcgatagagaggcccggtcccagcataccttctcagcagtggcaagggactgctctattcagggctctaggtctaccaccgtcattatcaaagtgtatgtgaccgatgtcaacgacaacgaccccgtgcttgagcagaacccattcgatgtttttctgtcccccgagtcacccaccaatcagaccacagtgattgtgcgcgccgacgatttggatttagggccgaacggtaccgtggtattttcattcgcagaaactcaaagtatgttttctatcgacaaatacaccggcgagattcagttccagcagaatcctagctctgaatacttccccatatggttacagcttaaggtgacagaccaggggatcccagcgcgaaccactaccggcttgctcgtcatccacatggaaggcgaggacgttaagatctccttctctcaccacctttacaaagggctggttaccgagaactgcgaagctggcacgtccatcgtgactgtgaaggcctttgctcctgacagcattcaggattcaatgaaatactcgatattcagtggcaatgaggacggtgtcctttctctgtgctcaaaaagcggccagttgaccgtaaaggaacctaagtttctggatttcgaggtgcggaatgaggtgcagctgattgtgctcgcggagagtagtggacatcgcgcttattgcaaagtcgcagtactgatccaggacgagaatgacaacagtccctgcttcgagcagtccatatatcaggcaagcgtatcagaatcgcagctatacaatgcacatgtaattcaggtcttcgctacggaccttgactcgggattaaacggccttattgaatactctatcctgtcgggcaatcaggaagaagcattccaaatagatgcactgtcgggggtcattactacaaaggctatcctcgattacgagttgacatcaagttacagcctcatagtgcaagctactgataagggtatgcccagactgtccaacaccacggtcatcaaggtccaggtgaccgatattaatgataacgccccagccttcctgccatcagaagccgttgagatcacagaagacagcttgcccggcgtgatcgtcacccacgtttccgtccacgatgtggatctaaactccgcttttatcttctccttcgccaaggagagcaaccctgggactaagtttgcaatagaccagaacactggggtcgtcgtgcttgtgaaaaccctcgactttgaggagatgaccgagtacgaactgttgattcaaatctccgattccgtgcattatacagagggtgctctggtggtgcgtgtcctcgatgtcaacgacaaccctcctgtgttctcacaagatttctaccaagtcaccgtgccggagtctatacccgtgggctattcggtgcttactcttagtgcaaccgacctggaatccaacgagaatatctcttatcgcatcctgagttcttcaaaagaattctctattgaccctaagaatggcacaatcttcacaatatctcccgtcctgctgctcgacactatcagcaccacccagttccttgttgaggcaagtgacgggggaaacccagatctccgggcattgacactagttgaaattgggatcgaggatatgaacaactacgctccagagttcaccgtgaagagttataacctgagcctgtccgaggacgccctggtgggtagcactctggtcacattctccaacattgatcatgactggacccgcgaaaatacctatgtagagtactcgataatctccggaaatagccagaataacttccacgtggaaacgaaattctttcatagcgagtatccatacaagcaggtgggatatctcgttctcctgcactccctggacagggaagcctctgcgagccacgagctcgtgattcttgcatccgactccggctgtccacctctatcctctactgctgtcatttccatccaagttctagatgtgaacgataatcctccaaatttctcctctctctcatatcacactcatgtgaaggaaagtacgcccctaggatcacacatcactgttgtgtcagctaatgacagagacaccggcagccacgcagaaatcatctataacatcatctcagggaatgagaaggggcatttctaccttgaggagaacaccggggttctgtacctcatcaaaccacttgattacgagaaaatgaccaaattcacactgacagtccaggcatccgacgctgaaaagaaacacttcagtttcgccgtggtgttcgtaagtgtgctcgacgataacgaccacgctccgcagtttatgttctcatcattctcttgcatcgtgccagagaatctaccaatctcgtctacaatctgttccatcaacgcactggatttcgacgccggcccatacggcgaactgacctacagcatagtgagcccctgtttcctcacccacgggatgagctacgaccatgatctcttcctcatagaccctctgactggcgatatccatgccaaacagatcttggactacgaaaacgggaacaagtattgcctgaccgttcaggctaaagacaaaggagacgccacggcgtctctggtggtctgggttgacatcgagggcattgacgaatttgagcctatattcacacaggaccaatacttcttcaccctacccgagaagaataaggataggcaacttattggaagagtcgaagcctccgacgcggatgctgggattgatggcgtgatcctgtactccctcggaacctcctctcccttcttttcagtaaataagaccaatggaaacatctatcttatcagggcactacctctgatcaaaagtcagttaaacaaggaagacaccctggagatgaagattatagcacatagccccaagtccgactcaaagtttgccagctgtaccgtattcgttaatgtgtcctttagttcagaggggacccctttagcagtcttcgccagctccttctctataagcctagtggtatcctttttagtcttcttgatcctcatttgcatcctgatcgtgatgattctgcgccacaagcaaaaagacactatcaacaattacgaagagaagaaaacaagttcactcgatgcagacctaagagtaactcgagacgccagcgtgcttaaggccttccagaagaccgacgattgttcaaacgaagttgtcccagtggatgccaccccggagtggctgagcctgatctctataatggagaaggacatcgtgaacctgtacagacattctaattccagcgggcactgtagcgtggaaggggaaacggctgaggacaaggaaatccagagaattaatgagcacccctacaggaagtgcagtgactccgccttatcggaccacgagagcagagtacctgacagcgggatccctcgggatagcgatcagctgagttgtcttagcggcgaaaccgacgttatggtcacagccgaaaccgcagaggcctcacagaccttcggcgaaggggaccagggagagggctgttccacgacctgcgctcaaaataatgtgctgccccaaactgtccagaagcgcgaagctaaggagtctatcctagctgatgtgagaaaggagtcagtgtttattagcggtgatcaagaagtacgatgcgcagctctttccacgcagaccaccagtgatcatgacggcaaagacaactatcattggaactacctactgtcatgggagccaaagttccagcccctagcatcggtgtttaatgacatcgctaagcttaaagacgaacacctgcacatgccggggattcccaaggaaaagaagtcgttcgtgttcccccccccactgattactgctgtggcccagcccggtatcaaagcagtccctccccgcatgcctgcggtgaatctgggacaagtgcctcctaagcatcccaggtcccctatcccctaccatctggggtctctccctgagggtatgacacccaattttagccccagtctgagtctgctgacaatgcagcctccagctctgagccctctgttacgagaaggagagctgctgggtacccacataagcggcacttgtcatgagctgaaagcagaggacgaagtccagatttag

SEQ ID NO: 113848 - DNA, 2130 bp, synthetic construct
  misc_feature 1..2130: note = Description of Artificial Sequence: Synthetic coding sequence
  source 1..2130: mol_type = other DNA
atgtcaccttgtggccggaagatgggcgaaggacggcagcagcgcagggcccctgtggggaagttgctgcttcttcctgggaggagagataccccccacggccgttcaggatcgtcaggcgctcgcacccagcgctccttgctgtggctgctggtgcacgtgtggctctgggcagccagcggtagctcagcccagttgtttaatctgacgctgtctgtggacgaagggcttcctcctgacacactggtcggggacatcagggccggcctgcccgctgcacaacagcaggagggaagtggcttcttcctgtctgaagacagtgacgactcacctttgctggacgacttccacgttcaccccgataccgggattatcagaactgcccgtagactggatcgcgagcgccgggatcactactctttcgtcgctgcaactctgctgggcgccgtggtacaggtggagatcagggtgaacgacgtcaatgatcattccccccgattcccgttagattctctccagcttgacgtctcggagctgtcccctccaggaactgcattccgactgccggtggcccacgatccagatgcaggcttgtttagcacacagggctacacgctcgttcagccgagtgacctacctaaggaccccgccggtccgttctttcagctgcggtatagaaccccaggaccccttccctctccacttctcccggggtcctcctcaccattagagccgttggatttggttttgctgcgccgcctagatcgggaggaagcggccgcccacagactgcagattgaggcctgggacggtggaagaccaaggagaaccggactgcttagcgtcgaacttagggtgctggatgagaatgataacccacccgtgttcgaacaggatgagtaccgggccgctgtgagagaggacgcccagccgggagctgaggtgtgcagggtccgagctactgaccgtgacctagggccaaacgggtttgtccgatattctgtcagagcccgccaggttcctggggctggctccggagggggggccctgggggatgcagcctacttcgctgttgaagaactgtccggagtggttagagtatggcgccctctggatagagaggctcaggcctggcatcagctcgtggtcgaagcgagggatggcggggctgagcctgaggtggctacagtgagggttagtatcgctgtgttagatgtgaatgacaacaggcctgcgattcacgtgcttttcctgaccgagggtggcgttgcgagagtgtccgaaggagccaggcctggtgattatgtcgcgcgagtctcagtttcagacgcagacggcgattgggagaaggaagatgaagccaccggagaactcggcgtgggcctcggggacggctcgatctcactttcactggagggaggggagggggactttgctttgttaccaggcgggccaccaggagtgttttttctgtgtgtcgaaggacctttggaccgagaatcccgagatctgtatgagcttctgctcgtggcaacagacgctggcagtcctccattgagcaccgaggaaaccttgttgctacgggtcgccgatctgaacgaccagccccccttgttttcacaacagcattataaggcaagcgtgtcagaggctgcggcccccggcaccgtagtcatgtgggtgtctgcctccgacgcagatgaggccggcagcgaccatgcatggctccggtatactgtggtgcagctgagcgctccatgtaatctaggttccctgcagtcaaagatggtccatactgcggagtgtggaccgtccttcgcaattgacagtgagagcggggcgatctccaccataaggaccttagatcgagaggttcaggaagctgtcgagctcaaagtggtggctcaggatctgggggagccacccttgtccgctacgtgtcttgtttccataaccgtggacgatgtgaacgataatgagcccatcttttggcggcaagtctataatgcgacaattgctgaacatgctcccgtaggccattgcttcctgcagctcatctctgctcaggtggcctttgtcaaaatcaagcagaaacagaaagagatacaagagaaacagaacctcgcatag

SEQ ID NO: 113849 - DNA, 2109 bp, synthetic construct
  misc_feature 1..2109: note = Description of Artificial Sequence: Synthetic coding sequence
  source 1..2109: mol_type = other DNA
atgggggaagggagacagcagaggagggctcccgtaggcaagcttctcctgctgcccggaaggagagataccccccatggcaggagtggctcctccggtgctcgtacccagaggtccttactatggctgttagtacatgtttggctttgggctgcgtctggttcaagcgcccagctattcaacctgactcttagtgtcgacgaggggctcccgccagatacacttgtgggggacattcgcgccgggttgccagccgcccagcagcaggaagggtctgggttttttctctcagaagacagtgacgactccccactgctcgacgatttccacgtgcatccagatactggaatcatcaggacggcaaggcgcttggaccgggaaagacgcgaccattactcctttgtggcagccacactgctcggtgccgtggtgcaagtggaaataagagttaacgacgttaacgaccactctcccagatttccgctggacagtctacagcttgatgtctccgagttatccccccctgggaccgctttcaggctgccagtggcccatgaccccgacgcgggattgttcagcacccaggggtatacattggtgcaaccttctgatctgcctaaggaccccgccgggcccttttttcagctgaggtaccgcacacccgggccactgcccagcccgttactacctgggagttcttccccacttgaacctctggacctcgtgctgctcagacgcctagacagggaagaggctgctgcccatcgcctgcagatcgaggcctgggatgggggccggccccgacgcaccgggttgcttagcgttgaacttagggtgttagatgagaacgataaccctcctgtgtttgaacaggacgagtatagggccgcagttcgggaagacgcccagccaggggccgaggtttgccgcgtccgggcgacggaccgcgacttaggccctaatggcttcgtgaggtatagcgtcagggccaggcaggtcccaggagccgggtccggcgggggggctctgggcgatgccgcttactttgctgtcgaggagctgagcggggttgtgcgcgtctggcgccccttggatcgcgaagcccaggcctggcatcagctggtggtcgaggcccgcgatgggggggctgagccagaggtggcaaccgtgcgcgtcagcattgccgtgttggatgtgaatgacaacagaccagctattcacgtcctgtttctgacagagggaggcgtagctagggttagcgaaggtgcgcgccctggggattacgttgcccgtgtctcggtgagtgacgccgatggtgattgggagaaggaggacgaagctaccggcgaacttggggtggggctcggtgatggcagcatcagcctgtccctggagggcggagaaggagactttgccctcctgccgggcggcccccctggcgtcttctttctgtgtgtcgaagggcccttggacagagagtctagggatctgtacgagctgcttttggtggcaacagacgccggcagtccccccctaagtaccgaagagactctactacttagggtcgcggacctgaacgatcagccccccctgttctcacagcagcattataaagccagtgtttccgaagcagcagcccccggaaccgtggtaatgtgggtgtctgcttctgacgccgatgaagccggctccgaccacgcatggctgcgatacaccgtcgttcagctcagtgctccatgtaatctaggtagcctgcaatcaaaaatggtgcataccgcagaatgcgggccgtcgtttgccattgacagtgaatccggcgccatttctaccataaggacactggacagagaagtgcaagaggccgtcgaactcaaagtggttgcacaagacttgggtgaaccacccctttcggccacatgtctggtaagtataactgtcgatgatgtgaacgataatgagcccattttctggcggcaggtgtacaacgccacaattgccgaacacgccccagtggggcattgtttcctgcagctgatcagcgcacaggttgcatttgtgaagatcaaacagaaacagaaggaaatccaagaaaaacagaacctggcgtag

SEQ ID NO: 113850 - DNA, 4101 bp, synthetic construct
  misc_feature 1..4101: note = Description of Artificial Sequence: Synthetic coding sequence
  source 1..4101: mol_type = other DNA
atgagcccctgtggtcgtaaaatgggagagggcaggcaacaaagaagagcgccagtcggtaagctgcttctcctacccgggcgacgcgacaccccgcatggccgcagtgggagctccggcgcaaggactcaacgttctcttctctggttattggtgcatgtgtggctgtgggcagcttccggttccagtgctcagcttttcaatctaaccctgagtgtggacgagggtctccctccggacacacttgtgggcgacattcgcgctgggctccctgctgcccaacagcaggaaggcagcgggttcttcctgtctgaggattcggatgactccccactcctggacgatttccacgtgcaccccgacacaggcattatccgaactgcacgtaggttagaccgggagcgtcgcgatcactattcgttcgtggctgcaacactgttaggcgcggtcgttcaggtagagataagagtgaatgatgtcaacgatcatagccctaggttcccactcgactcacttcagctcgatgtttctgaactcagtccacccgggactgctttccgtctgcccgtcgcacatgatcccgatgccggattgttttcaacccagggctataccctggtgcagccaagcgacctccccaaagatcctgccggaccattttttcagttgcggtaccgtacacccggccctctcccgagtcccttgcttccgggatcttccagcccactcgaacccttagacttggttctgctcagaagactagacagagaagaggcagcggctcatcggctacaaatcgaagcttgggacgggggcaggccccgcaggacgggactgctgtctgtggaactcagggtgctcgacgagaacgacaaccccccagttttcgaacaagacgaatacagggccgctgttagggaagacgctcagccaggcgcagaggtctgcagggtgagagctacggaccgggacctcggacccaacggattcgtccgctactcggttcgggccagacaggtgccgggagcgggatccggcggaggcgctctgggagacgctgcctattttgcggtggaggagctgtcaggggtggtgcgggtctggcgcccgctggacagagaagcgcaggcctggcatcaactggtcgtggaggcacgcgacggaggtgctgagccggaggtggccactgtgcgcgtgagcattgccgtcctagatgtcaatgacaaccgccctgcaatccatgtattatttctcacagaaggcggggtggcccgggtctccgagggggcgcgacccggggattacgtagctcgggtgtccgtctctgatgccgacggcgactgggagaaggaagacgaggccaccggtgaactaggtgtgggtttaggcgacggctcaatttctctcagccttgaggggggagagggggacttcgccctgctccctggtgggcctcctggcgttttttttctttgcgtcgaagggccgctggatcgggagagcagggatctgtacgagctgctgctggtcgctacggacgcagggtcacctccactctccaccgaggaaacacttctcctgcgggtggctgacctcaacgaccagccacctctgttctcccagcagcattataaggcctctgtaagcgaagctgccgcgcccggcaccgttgtcatgtgggtctctgcctccgatgctgacgaagccgggagcgaccacgcatggctgagatacaccgtggttcagctgagtgcaccctgcaatctgggtagcctgcagagcaaaatggtgcataccgccgaatgtggccctagtttcgcaattgacagcgaatctggcgcaatctccacaattcggacactggatcgcgaggtgcaagaagccgtagaattaaaggttgtcgctcaggatctgggagaacctccattgtcagccacttgtcttgtttcaatcaccgttgacgatgttaatgacaatgagcccatattctggcgtcaggtttataatgccactatcgcagagcacgcccctgtcggtcactgttttctgcaggtcactgcctcggatgctgattctggactgtacgggtttatcgagtactccttgtatgatgggttcctgtcctatgaggcacctcaggccttcaggattgacccccatgacggtcagatctgcgtgtcacaagatatcgacagagaaagagatcccgcaacctacgacctcctagtagaagctaaggacgggggggggctgtctgctcaggcgttcgttcgtgtggatctggaggatgtaaacgacaatcatcccgtcttcaatcccagcacatatgtcacatccatctcggacgagacacagcccggcaccgagataattaatgtgctcgctacggatcaggacagtggtatatatggaaccgtggcatatgagctgattccgggcaatgtgtcaagtctgttcacaattgacagtacaaccggcatcatttacctcacactgcccttaagccaccttgagagcacaaccctttccctcatggtgagcgcccaggacggcgggggtctgactgccgtgatcaatgccgatgtgaccatccacattttccagacaacgctggcccccgccgagttcgaacgccccaaatataccttcttagtgtacgaggatgtgcctgaggatagtccaattgggacagtgaaagctcgggagcccctaaactccagcgaacccattttctaccgaatctcatcaggcgatctcggaggtaagttcagtattcaccctaggcttggaacaatccggacccggaaaccactggatcacgagacgcaacctgtcgtggtgttaaccgttcaagcacaactcgggtcagcccctgcttgctccagcactgaggtaaacataacggttatggacgtgaatgacaaccaccccgcctttcttagaacctcagacgaaattaggatctcccagactacaccaccggggaccgctctgtacctggcacgagcagaggaccgggactctggccgaaacggactgatcagatacagtattgcttctccgcagccaggggtcttcgccatagaccgcgccctgggggtgctctttctaaatggcagtctgggagctggcgagcaaagagaactgaccctcaccctgagggccgaagatcagggtgtgcacccccaggctgcgttgttggtgcttactgttgtgattgaaaaaagagaacacagcccatcatggactttcgaacatttggtatatcaggtcgaggtcagtgagtccttgtccccaatgactcagatgctccagacacaggctcaccctctgggaccacagagggctgcctcaccattgaggtattcgcttgagccttctgtggatagcgccatgtttggcatcaggccctacaccgggtggatttatcttagaagacaatttgactatgaatccacccagacatacaactttagagtgtttgcttggatccccgaggacggattcttgcagaacgtctcgaccacagtgattgtaagagtctgggatgaaaatgataattcacccacattcctccacgatgtgttgttccttaaggtagaagaaagccctgtccctcagggcgttattggtaagatcactgcaatagacatggactcgggcaaaaacgggcagctgctctattttctcctgtccgacggaaagttctttaaaatgaaccctaatactggggagttgattaattgggtggcactggacagggaacacagggggcatcatgagatgaccgtgttggtcaccgataggggtagtccccctcgtaacgctaccatggctgtgtatgtgtccgtgacggacataaacgataataggcccttctttccccagtgtctaccaggaaaggagctgcacgtgaaggttttagaggggcaaccagtgaacatgcttgtgacaaccgtgttcgcaaaggatccagatgaaggcaacaatgccgaggtcacctacagtgtgagtagcgcacgaccgatgccactgaaaggcaagaccgctttcgggaaacagagctgcaagaagcaaacgaacaaacagactaaaagctag

SEQ ID NO: 113851 - DNA, 462 bp, synthetic construct
  misc_feature 1..462: note = Description of Artificial Sequence: Synthetic coding sequence
  source 1..462: mol_type = other DNA
atgctcgaaaaactcatgggagctgattcactccagctgtttagatcaagatataccctcggcaaaatatactttatcggctttcagaggtcaatactgctgtcaaagagtgaaaactctttaaactccattgcaaaagaaacagaggaaggcagagaaacagtcacccgcaaggagggctggaagcgtcgccatgaggatggatacttggaaatggcccagcgacacctccagcgaagcttgtgcccgtgggtgtcctacctgccccaaccatacgcagagctggaagaggtcagttcacatgtggggaaggtcttcatggcaagaaactatgaattcttagcatatgaggcaagcaaagacagacgtcagccgctggagcgcatgtggacctgtaattataaccagcagaaagatcagagttgcaaccacaaggagattacttcaacgaaggccgaatag

SEQ ID NO: 113852 - DNA, 249 bp, synthetic construct
  misc_feature 1..249: note = Description of Artificial Sequence: Synthetic coding sequence
  source 1..249: mol_type = other DNA
atggctcagcggcatctccagcgatcactatgtccatgggtatcttacctcccacagccttatgcagagctcgaagaggtgtccagccatgttggcaaggtgtttatggctcgcaactacgagtttctagcgtacgaggctagcaaggataggcggcaaccactggagcgaatgtggacatgtaattacaaccagcagaaagaccagtcctgcaatcataaagagattactagcacaaaagcagagtag

SEQ ID NO: 113853 - DNA, 378 bp, synthetic construct
  misc_feature 1..378: note = Description of Artificial Sequence: Synthetic coding sequence
  source 1..378: mol_type = other DNA
atgcggacagccatttggaagtggcacaggggtatctacagagatcattatgtgctcggaagtttgacttttcttagtcccatgcagcgcgccgggactagcaatcagtggaacatggggaaagtgatgaccttggattctggtgacgaggttactttccataaaacatggccaacagagacgggctccccttatcgcctcgaggaggtatccagtcatgtggggaaggtcttcatggccaggaattacgaattcctcgcatatgaagccagcaaggaccggcgccagcccctggagcgaatgtggacttgtaactataaccagcagaaggaccaatcatgcaaccacaaggagatcacttccaccaaggctgaatag

SEQ ID NO: 113854 - DNA, 1725 bp, synthetic construct
  misc_feature 1..1725: note = Description of Artificial Sequence: Synthetic coding sequence
  source 1..1725: mol_type = other DNA
atggagctgaaggcggaagaggaggaagttggcggagttcagccagtcagcatacaggcctttgccagttcatccacactgcatggcttggctcacatattctcttacgaaaggttgagtcttaagcgggccctgtgggcgttgtgttttctgggatcactcgctgtgctgttatgtgtctgtaccgagagagtgcagtactactttcactaccaccacgtcactaagttagatgaggtcgctgccagccagctgaccttccctgctgtgactttatgtaacttaaatgagttcaggttctctcaagtaagcaagaacgatctgtatcatgctggggagcttttagcactgctcaacaacaggtatgagatccccgacacgcaaatggccgacgagaaacagttggagattctccaggacaaagccaacttccgctccttcaagccaaagccattcaatatgcgcgaattttatgacagagccgggcatgacatacgggatatgttactctcatgtcactttcgtggtgaagtttgcagtgcggaggactttaaagttgttttcactaggtacggtaaatgctatacctttaatagtggtagagacgggcgcccaagactgaagactatgaagggaggaaccgggaacggtctcgaaattatgctcgacatccagcaggacgagtatcttccagtttggggcgaaaccgatgagacaagttttgaagcaggcataaaagtacagattcactcccaagatgaaccaccatttattgaccagctgggtttcggggtcgcccctgggttccagacatttgtggcttgtcaggagcagaggctcatttatctgccccccccttggggtacatgcaaggcggtcacaatggactcggatctcgactttttcgattcctattcgataaccgcatgcaggatcgactgtgaaacacgctacctggtggaaaattgcaattgccgtatggtacatatgccaggggatgctccttactgtacacctgaacagtataaagagtgcgccgatccagctctggactttctggtcgagaaggaccaggaatactgtgtatgcgagatgccttgtaacctgaccagatatggaaaggagctgtctatggtaaagatccccagcaaagcatctgcaaagtatcttgctaagaagttcaacaaatcagagcagtacattggcgagaacattctggtgctcgatatcttctttgaagtgctcaactacgaaactatcgagcaaaagaaggcttacgagatagctggcctcctcggcgagttactcatgaccccagtccccttttcttgtcacggccacggtgtggctccttaccatcccaaggctgggtgcagcctgttgagccatgaaggaccccctccccaacggccattccccaaaccctgctgcttaggcgacatcggaggccagatgggcttgttcattggtgcatccattcttaccgttttagagctttttgactacgcgtatgaggttatcaagcacaaactctgtcgcaggggaaagtgtcagaaggaagcaaagagatcatcagctgataagggggttgccctgagtctcgacgacgttaagcgtcacaacccttgcgaatccttgcgaggccatccagcagggatgacctacgccgctaacattctgccacaccaccccgctaggggaacatttgaggatttcacttgttag

SEQ ID NO: 113855 - DNA, 594 bp, synthetic construct
  misc_feature 1..594: note = Description of Artificial Sequence: Synthetic coding sequence
  source 1..594: mol_type = other DNA
atgcgagtggtcgtgattggcgcaggagtgatcggcctgtcaacggccctttgtatccacgaacgatatcactctgtgttgcagccgttggacattaaggtgtatgccgaccgctttactccgctaaccacgacagacgttgctgccgggctgtggcaaccgtacttaagtgacccgaacaaccctcaggaagcagactggtcacaacaaacatttgattacttgctgtcccacgtccactctccaaatgctgagaatctgggtctttttctcattagtggatataacttgttccacgaggccatcccggaccctagttggaaggataccgtgctcggcttccggaagttgacgcctcgcgagctcgatatgttccctgattatggatatgggtggttccacacttctctgatcctcgagggaaagaattacctgcagtggctgactgagcgcctgacagaacggggcgtgaaattcttccagagaaaggtggagagttttgaagaagtcgcgcgggagggcgccgacgtcattgttaactgtactggggtttgggccggagctttgcaacgcgatccactcctgcagccatag

SEQ ID NO: 113856 - DNA, 2400 bp, synthetic construct
  misc_feature 1..2400: note = Description of Artificial Sequence: Synthetic coding sequence
  source 1..2400: mol_type = other DNA
atgaagccatcgccagcgggaactgcaaaggagctggagccgcctgcaccagcccggggagaacagcgcacagctgaacccgaaggcagatggagagaaaaaggcgaggcggacactgagagacagcgtacacgggaacggcaagaggccacattggccggcctcgccgagctggaatacctgaggcagcgccaggagctgctcgttcggggtgcactacgcggcgctggcggggcaggggcagcggcaccgagagcaggtgaattgttgggtgaagcagcccaacgcagccggcttgaggaaaagttcctagaggagaacatcctgctgctccggaagcagctgaattgcctgcggagacgggacgctgggctgcttaatcagctacaagaactggacaagcagatttccgacttgaggctcgatgtcgagaaaactagtgaagagcacctggagaccgattcaagaccgagcagcgggttttacgagttgagtgacggagcctcagggtccttgagcaactcatccaacagcgtgttctcagaatgcctgagtagctgtcacagtagtacatgtttttgtagccccttggaggcgaccctatcactgagtgacggctgcccaaaatctgctgacgtgaatcccaagtaccagtgtgacttagtctctaagaacggaaatgacgtgtaccgctatccatctccccttcacgccgttgccgtgcagagcccgatgtttctcctgtgcctgaccggcaacccactgagagaggaagacagactgggcaaccatgcctctgatatttgcggaggaagcgagctggacgccgtgaagacagattcatctctaccctcaccgagttcattgtggtctgccagccatccttctagtagcaaaaagatggacggatatattttgagtttagtgcaaaaaaaaactcaccctgtgcgcaccaataaaccacgaacaagtgtcaacgctgacccaaccaaaggacttctgcgtaatggatcggtatgcgtacgcgcaccaggaggagtatcccagggtaacagcgtaaatctgaagaactccaagcaggcctgcctgccctcagggggaatccccagcttgaataatggtactttttcaccccctaaacaatggtcaaaggagagcaaagccgagcaagctgagtcaaagcgagtgcccctccctgaaggctgtccaagcggagctgcctccgacttgcagagtaaacatctgcctaagacagccaagccggcctctcaagaacacgcgagatgctctgcaatcggaacaggtgagagtccaaaggagagtgcgcaactttccggcgcctctccaaaagaatctccgagcagaggtcctgctccaccccaggagaacaaggtcgtccagcccctgaagaaaatgtctcagaaaaactcccttcagggggtgccacccgctacacccccactactttccaccgccttcccagtggaggaacgccccgccctggatttcaaaagcgagggatcttcgcaatcccttgaggaggcacacctagttaaagcccaatttatccccggacaacagccaagcgtccgactccatcgaggccaccgtaacatgggcgtagtcaagaacagcagtcttaagcaccgaggacctgctctgcagggtctggagaacggtctgccgactgtgagagagaaaacccgggccgggtcaaaaaagtgtaggtttccggatgacctggacacaaacaagaagctgaaaaaagcgtcttcaaagggaagaaaatccggaggaggacccgaggctggcgtcccgggcaggccggctggaggcggacaccgggccggttctagggcacatggtcacggtcgggaagctgtggtggctaaaccaaagcacaaacggacagattaccggaggtggaagtctagcgcggaaatatcttatgaagaagctctgcgtcgagctcgccgcgggagacgggagaacgtcgggttgtaccccgcccccgttcccctgccgtatgccagtccttatgcatacgtggcatcagactccgaatactcggcagagtgcgaaagtctgttccacagcaccgtggttgatacgagtgaagatgaacaatcaaattatacgacaaactgtttcggggattccgaatcctcagtgtccgaaggagagttcgtaggcgagagtactaccacttccgacagtgaggagagcggaggcctgatatggagccagtttgtccagacactgcctattcagacagtgacagcgcctgatttacataaccatcctgccaagacgtttgtcaaaatcaaagccagccacaacctgaagaaaaagatcttgcgatttcgatccggatcactcaagcttatgactactgtctag

SEQ ID NO: 113857 - DNA, 2511 bp, synthetic construct
  misc_feature 1..2511: note = Description of Artificial Sequence: Synthetic coding sequence
  source 1..2511: mol_type = other DNA
atgaaaccctcccctgcggggactgcaaaggaacttgaaccccctgcaccagcgcggggtgaacaaaggacagccgagcccgagggccgttggagggagaagggtgaggccgatacagaacggcagcgtacacgggaaaggcaggaggctacgctggctggactggccgagctagaataccttagacaacggcaagagctgctcgtgagaggcgccttgcggggcgccggtggcgcaggtgctgccgctccgcgtgcaggcgagctcctaggcgaggcggctcagcgatctcgactagaagaaaagtttctcgaagagaatatactactcctgcgtaaacagttaaattgtctacgacgcagggacgccgggctgctgaatcaactgcaagagttagataaacaaatcagcgacttacgcctcgatgtcgaaaagacgtccgaagagcacctggagactgattctcggccatcttctgggttctatgagctgagcgacggcgcaagcggaagtctgtccaacagctccaattccgtcttttctgaatgcctttcctcctgccactcttcaacgtgcttctgctcgcctttggaagctaccttgtccctgtcagatgggtgcccgaagagcgccgatctgattggcctcttggagtacaaggagggacactgcgaggatcaggcctcaggagcagtgtgccgatcgctgtccacaccccagttcaactctctggacgtgatagctgatgtgaatcccaaataccagtgcgatttggtaagtaagaatgggaacgacgtgtatcgctatcctagcccgcttcacgcagttgcggttcagtcacctatgttccttctttgcctgactggaaaccctctgcgtgaggaggatcgcctcggtaatcacgcgtctgatatatgtgggggttcagagctcgatgcagtgaagaccgattccagccttccatccccatccagtctctggtctgctagtcaccctagcagctctaagaagatggatgggtatattctgtccctggtgcaaaaaaaaacgcaccctgtgcgtaccaacaagcctcgaaccagcgtgaacgctgatcctacaaaaggcctgttacgaaacggctccgtttgtgttcgagcgccaggaggggtgtcgcagggtaacagcgtgaatcttaagaattcgaagcaggcctgtttgccgtcagggggaattccttctctgaacaacggcacattctctccacctaaacaatggagcaaagaatcaaaagcagaacaggccgagtctaagagggtaccactgccggaggggtgcccaagcggcgctgcttccgacctgcaatctaaacacctgccaaagacagccaaaccagctagccaggagcacgccagatgttctgccataggaactggggagtctcctaaggagtcggcccagctcagcggggcgagccctaaggaaagtccatctcgtggaccagcacccccccaggagaataaagtcgttcagccgctgaagaaaatgtcccaaaaaaatagcttgcagggcgtgccacccgccacacctccgctgctgtccaccgcttttccagtcgaagaaagacccgccctcgatttcaaaagtgaggggagcagtcagtcgctggaggaagcccaccttgttaaagctcagtttatccctggccagcagcccagcgtgagactgcatagagggcaccgcaacatgggtgtcgtaaagaacagttcattaaagcaccgaggccccgccttgcaggggctcgaaaacggcttacccactgttagagagaaaacaagggccggttctaaaaaatgtcgatttccagatgatctcgataccaacaaaaaattgaagaaggctagcagcaagggcaggaagtctggaggtgggcctgaggccggggtgccgggaagacccgccgggggaggccatcgggcgggaagccgcgcccatggacacggccgggaagccgtagtggctaaacctaagcacaaacgaacggactacagacggtggaagagttcagcagagataagttatgaagaggcccttcgccgagctcgccgagggcggcgcgagaatgtcgggctctatccagccccggtgccgctcccatatgctagtccctacgcctacgtggccagcgactcggaatactccgcggagtgcgagtcattgtttcactccaccgtcgtcgatacctctgaggacgaacaaagcaactacaccacaaactgttttggagatagcgagagttcggtctctgagggagagttcgtgggagagagcacaaccactagcgatagtgaagagagcggtgggttgatatggtcgcagtttgtgcagacactgcccatccagaccgttaccgctcccgacctgcacaaccaccctgcgaagacgttcgtgaaaattaaggcttcacataacttgaagaagaaaatcttgagatttaggtctggttcgcttaaactcatgactactgtctag

SEQ ID NO: 113858 - DNA, 2325 bp, synthetic construct
  misc_feature 1..2325: note = Description of Artificial Sequence: Synthetic coding sequence
  source 1..2325: mol_type = other DNA
atgtggaccccagggggacccccagggtctgcaggctgggacagacggagactgggggcccgcctgcgggcggcatttgccggtttacaggagctccagggacttcgcgccacccagcaggaacgggtcaggggggccctcgctctgcagcctccaccagctccagctgcaccttgcggcccccacggtctgcatgggcccgaacagcaactcgaggccgctctcgccgccctccaagaacagttgtcccgactgcgtcagcaggacattggattgaaaacccaccttgatcagctcgacctgcagatcagcaaattgcaactggacgtgggcactgcaagcggagaagccctggattctgacagccgcccttccagcggattttatgagatgagcgatggcggctcctgtagcctcagcaccagttgtgctagcgtgtgcagcgaccatatcagcccgagccttggtagtttgctgcccgtcgcacaggcgcacaaggctcggcccagtatgggggattggaggccccgaagtgtagatgaaacaactgtgccagcttggcgtccacaggcaacagaggaaggagcgcgaccgcccggttcagtcgaagacgccggccaaccgtggggcaccttttggccccgtcccgtgtcaacaggtgacttggatcgggcgctgccagccgatactggacttcagaaagcgtccgccgacgcagaactgctgggacttctatgtcaaggagtggatatcccactccacgtgccagatccgaaatatcgccaggatctggtgagtcagggggggagagaggtctacccttacccttcgccactccatgctgtcgctctgcagagccccctgttcgtcctcacgaaagagacaccacagcgcggggggccgagctttcccagagagtccccacgggggccggccggcctaaacaccatacaaacggggcccgtgctcgaagcaggccccgcccgcgctagagcctatattgatcgcctcctgcacctgtggggtcgagagactccagctaagggctccgaaggggagcaaggtcccctgagacacgcggcctctccatccccacaacgacaaggcggatggtcaaccgacggcggcggcagattactggtctttgctccaggtagggaggatgagggagggccagcgcagtctcgaggtgctggtagagggggccctcagcagcaaggctatatgccattagagggaccacaacagtcaggctcactcccagaggaaggttcaaagcccagcaacagctgcgtgctcagggaaaccatggttcaggcgagcccctcttccaaggcccagcaaaccccttccgcccaggactacggtcgcggaaacatcatttctccatcgcgaatgctagacaaaagtccctcgccagcctccgggcattttgcacacccttcgttcgctgcatctctgaagatgggcccacccaagagcaaagctgaaaaaataaagaggtctcctatggataaggttctgcgatttgccagacagccgcttctcctgctggacaggcctgagggcgctcatgctgcgcctcagccttcactggagtgggatcccgcccattggcccaccggccggggcggtttacaaagacgccccgccctagcatgggaggcccccggacggtcttgctccgaaagcactttatatccaatgccagtcctggtcccgcttgctgtagctccacaagaatcccacagaaccagcgcccaggctttgttccccttcgaggcttccttactcacatccgtggccagacgaaagcatagacgatggcaatctacagtggaaattagcgctagagctcggctcgcctcctgtcccgaatcaaatctgggcccccctcgccctgtggcgaggagggcaggggggcccctggcgaggggccggcccagtctggtgcgccaggatgcttacacaagaagcgattctgaaccaagtaagcactccgccgagtgtgacccccgctttcccagtgtcataccggagactagtgaaggagaatccagcgaccatacgaccaaccgtttcggggaccgtgagtccagttcttctgacgaagaaggcggcgctcaatctcgggattgtgacctggccctgggatacgttgccgccgggcatgccgaactggcctggacacaggaagctcccgtgtcctctggaccattactctcaccggtgcccaagctctgccgaataaaggctagtaaggctttgaagaagaaaatccgccggttccaacccacggccctcaaggtcatgactatggtgtag

SEQ ID NO: 113859 - DNA, 843 bp, synthetic construct
  misc_feature 1..843: note = Description of Artificial Sequence: Synthetic coding sequence
  source 1..843: mol_type = other DNA
atgtggacacctggaggccctcctggtagtgccggttgggatcggcgtcgccttggggccagactgcgggccgcgtttgccgggcttcaagagctgcagggtctgcgggcaacgcagcaggaacgcgttagaggcgcgctggctttgcagcccccaccagcgcctgccgcaccctgcggaccccacggactccatggtcccgagcagcagctagaagcggccttggctgcccttcaggagcagctgtcacgcctgcggcagcaagacatagggctcaagacacacctcgaccagctggatctgcagatctctaaactgcagttggatgtggggactgcaagcggtgaagcgttggacagcgattcccgcccttcaagcggattttatgagatgtctgacggcggctcctgctccctctccacttcctgtgcaagcgtgtgttcagaccatatatctccgtcattgggctctttgcttcccgtggcacaggcacacaaagccaggccctctatgggcgactggcgcccgcggtcagtcgacgaaacaacagtgccggcgtggcgccctcaagctacggaggagggagctcggcctccggggagcgttgaagacgccggccagccttgggggacattctggccacgcccagtgtccactgaactctgtaatgcccctggtgaactggatatgcatgcaccaccagccggctgtacgagcagctcactaaccggggtcggctcaggtttaaggggaaagtgcgggctttgcggttgccagttgccattctgctccgtgaacacaagctcgaagaccaagtcgtccggtatatcccgccagcagtag

SEQ ID NO: 113860 - DNA, 1890 bp, synthetic construct
  misc_feature 1..1890: note = Description of Artificial Sequence: Synthetic coding sequence
  source 1..1890: mol_type = other DNA
atgattagggcttttagctttccagtgagtcccgaacgcggcagactacgaggttggctggagggaagtttagccgggttgtgcgagctgcattggctgcgggagagacaggagtaccgcgtacaacaggcactgagactagcccagcccgggatgggcggcgccgaggccgaggacgaagaagacgcagacgaggacgaggatgcagcggctgcccgaagggcagcggccgcccttgaagagcagctggaagcactgcccgggctggtgtgggatcttggccaacaactcggagatctctcattagagtccggcggcctcgaacaggagtccgggcggtcctcaggcttttacgaggatcctagctccacagggggtccagacagtcctccttccacgttttgcggtgactccggctttagcggatcctccagttacggcagactaggtccttctgaaccacgaggaatatatgcttccgagcgacctaaatccttaggagacgcatccccatcggcccctgaggtggtgggtgctagagcggccgtccctcgcagttttagcgcaccttacccaacagcaggcggcagcgcaggccctgaagcatgctcgtccgctgagcgccgtgcccgtgccggtccgttccttacaccgagccctctccacgccgtagccatgcggtctccgcgaccttgtggccgacccccaaccgattccccggacgcaggaggtgccgggcgaccacttgatgggtacatctcggccttgctgagaaggcggcgccgccgaggcgctggccagccccgcacaagtcctgggggagcagacggcggacctagaagacagaattcggtccgacaacggccacctgacgcttctcctagcccaggctctgctaggcccgcccgtgagcctagcctggagcgggtcggggggcatcctacaagccctgccgcactaagtcgtgcgtgggccagttcctgggagagtgaagccgctcccgaacccgctgcccctccagccgctccaagcccacctgacagtccagccgaggggcggctcgtcaaagctcaatacattccaggagcccaggccgctactaggggtctacctggtcgcgccgcccggaggaagcccccaccactcacaagaggtagatctgtcgagcagtcccctccacgggaacgtcctagagcagctgggcgcagaggcagaatggctgaggcttctgggcgccgtggcagccctagggcacgtaaggccagtcggagccagtctgagacatccttgctgggtagggcgtctgcagtaccatcgggccctccaaagtatcctacggcggaaagagaagaacctcggcctcctaggccccgacggggccctgccccaactctggccgcccaggctgccggttcatgtcgaaggtggcgttccacggcagagatagatgccgccgatggtcgacgggtgagaccgcgggcccccgccgccagggtacctgggcccgggccctccccatcagccccacagcgacggttgctctacggttgcgccgggtctgattccgaatgttcagcaggtcggctgggccctctcggccggcgagggccagctggtggagttgggggagggtacggcgaaagcgagagttccgcttccgagggagagtctccagcatttagtagtgcaagcagcgacagtgacggatcgggcgggcttgtctggccacaacaactggtggccgctactgctgcatcaggaggcggggcgggagccggggcccccgctggacctgccaaggtgtttgtgaagattaaagcatcccatgccctaaagaaaaagatccttaggttcagatcgggcagtctgaaggtgatgactacagtgtag

SEQ ID NO: 113861 - DNA, 2025 bp, synthetic construct
  misc_feature 1..2025: note = Description of Artificial Sequence: Synthetic coding sequence
  source 1..2025: mol_type = other DNA
atgaattctggcgctatgcgtattcacagcaaaggtcattttcaagggggcatacaagtcaaaaatgagaagaatcgccctagtctgaaatctctcaagaccgacaatagaccagagaagagcaagtgtaagccactgtggggtaaggtattctacctggatctgccatctgttaccatctccgaaaagctgcagaaggacatcaaagacctggggggaagggtggaagagtttctatcaaaagacatctcatatttgatcagcaataaaaaggaggctaaattcgcacagacattagggaggatttcccccgtacccagcccagagtccgcctataccgccgaaaccacctcaccccacccttcacacgacggctctagttttaagtcccccgatactgtctgtctttcccggggtaagctgttggtggaaaaggcgattaaagatcacgactttatcccatctaacagcatcttaagcaacgccttgtcatggggcgtgaagatccttcatatagatgatattagatactatatagaacagaaaaaaaaggaactttatttgctcaagaagtcaagcacgagcgtacgggatggcgggaagcgggtggggtcaggagcccaaaaaacacggacaggtcgcttgaaaaagccgttcgttaaggtcgaagatatgagccagctctacagacctttctacctccagctgacgaatatgccgttcatcaactactctattcagaagccatgtagtccgttcgacgtggacaagcctagctccatgcagaaacagacacaagttaagctcaggatccagactgatggagataaatatgggggaacttctatccaactgcagctgaaggaaaagaagaagaaaggctattgtgaatgttgtctacaaaagtacgaggatctcgagacacatctcttgtctgaacaacaccgtaacttcgctcaatctaatcagtaccaggtggtggacgatattgtctccaaattggtcttcgactttgttgagtacgaaaaggacacccccaagaaaaaacggatcaaatattccgttggaagtttgtcacctgtgagcgcaagtgtcctcaagaagacagagcagaaggaaaaggtggagctgcagcacatttcccagaaagactgtcaggaagatgacacaacagtgaaagagcaaaactttctctacaaagaaacacaggaaacagagaagaaactgctcttcatcagcgagcccataccgcatccatcaaatgaactgcgcggcctgaacgagaagatgagcaataaatgctccatgctgagcaccgctgaagacgacatcaggcagaatttcacccagctcccattgcacaagaacaagcaagaatgcatcctggatatctcagaacacacgctttcagagaacgatctggaggagttgcgtgtggaccactacaagtgcaatatccaggccagtgttcatgtatccgatttttccactgataactctggcagccagccaaagcagaagtcagataccgtgctgtttccagccaaggacctcaaggagaaggacttgcattccatttttacacatgattcaggactgattactatcaacagctctcaggagcacctcacagttcaagccaaagccccttttcacacaccccccgaggagcctaatgagtgcgattttaagaacatggattcccttcctagcgggaaaatacaccgcaaggtcaagatcatcctcgggcgcaatcgaaaggagaaccttgaacccaacgccgagttcgacaagagaactgaattcattactcaggaagaaaataggatttgcagtagtcccgtgcagagcctgctcgacttgtttcaaactagcgaggagaaaagcgagttcctggggttcaccagttacacagaaaagtctggcatctgcaatgttctcgacatctgggaggaggaaaattctgacaatctccttacagctttcttctctagcccttctaccagtacatttaccggtttttag

SEQ ID NO: 113862 - DNA, 654 bp, synthetic construct
  misc_feature 1..654: note = Description of Artificial Sequence: Synthetic coding sequence
  source 1..654: mol_type = other DNA
atgaacagcggtgcgatgcgaatccattcaaaaggccacttccaaggcggcatacaagtgaaaaacgaaaaaaatcggccgagcctgaagagcttgaagacagacaaccgtcctgaaaaaagcaaatgtaaacctctgtggggcaaggtcttctaccttgacctcccaagcgtaacaataagcgaaaagctgcaaaaggacattaaagacttgggtggaagagtggaggagtttctgtctaaggacatctcgtacctgatctcaaacaagaaggaagccaaattcgctcagaccctggggcggatttcccccgtgccgtcacccgagtccgcttacacggctgaaacgacaagcccacatccttctcacgacgggtccagcttcaagagtcctgataccgtttgtctttcaagggggaaactcctggtggaaaaagccataaaggaccacgattttattccctccaactccatcctgagcaatgcgctcagctggggcgttaaaatcctgcacatcgacgacataaggtattatattgagcagaagaagaaggagttgtacctgctgaagaaatcttctacgtccgtgagggatggtggcaaacgagttggctctggcgcacagaaaacgcgcaaggcgttacaatcgatttag

SEQ ID NO: 113863 - DNA, 1848 bp, synthetic construct
  misc_feature 1..1848: note = Description of Artificial Sequence: Synthetic coding sequence
  source 1..1848: mol_type = other DNA
atgtctgagcctggaaagggagacgactgcctggaattggaatccagcatggccgaaagccgcctgcgtgcgccagatctcggcgtgtccaggtgccttgggaaatgtcagaagaactccccaggcgcccggaaacatccattttccggcaagagcttttacctggatttgcctgccggtaagaacttgcagtttttaacaggggccatccagcagctgggtggcgtcatcgaagggtttctctccaaggaggtgtcctacatcgtgagctcacgccgagaggttaaggctgaatcttccggcaagtcgcacaggggatgcccatcaccgtctcctagcgaggtgagagtggagacatccgcgatggtggacccaaagggatcacacccaaggcctagtaggaagcccgtcgactcagtccctctgagcagaggcaaagagcttttgcagaaggcgattagaaatcaggggtcgattagtgggggaggctcaggcggtagcagcagtctactcactaatgctcggtcatggggcgtgcgtatcttgcacgttgatgaaatgatgatgcacgtacagcagctcagcctggccagcctgtgcgtaaagaagcaacaaccaaagaagccagaaggaacgtgccccgctgctgagtccagaacccgtaaggtggcccggctcaaagctcccttcctgaagatcgaggatgagtcaaggaaattcagaccctttcaccatcaatttaagagcttcccagaaattagctttctgggtccaaaggatgcaagtccctttgaagccccaactacactcggttccatgcaccatacgcgcgagtcaaaggacggggagccttcaccacgctccgctgcccatactatgcctcggaggaaaaaaggatactgcgagtgctgccaggaggcctttgaagaactgcacgtgcatctccagtccgcacagcacaggtccttcgctcttgaggcccacttgtacgcagaagtcgaccggatcattgcccagctgtcacactcatttgctgatattcctttccaggccggtctccctcgctggtctggttcaccggcgtccgattgcgatcctttgtgcccagagactttacatccacaccagcctagccatcccagggccgcctccccccgtatccggaaagaagattcttgtcaggcctccgtcacgcaaggccgcgctgcaggacagcagagatggacagaatcattggacggcgtgatggggccacccgcttcacacacctgcgtgtccgccactactctgctcccagcactccccaaaggcagcagggagcagggttgtctctgcccctgtccagccagttttacccaatcccatctggtaacgtcactggctttactcccaggagaatggtccccagccgaagatatgccgctgcacccctcccaggagaattcattcgctcctgcagacatccccgttaaggggcccctcctctttccagaagcccgcccctggctaatgtctgcaagatgctgggttcgtcctttcccattcgtcacctggggctgtctgattccacacgataccactcctctccatgaggaggtttcaccttgcccgtgtctgcgactggggtatctgtatctgcttctgacacagagtctgtggtgtcgtgtgcgggtcccctcactcagtactgccggccctattccacgcacgtctcatccatgcaccctagccttccccagctatctaaacgaccacgacctgggacacttatgtcaggcaaagccacaggggtggaatacccctcaaccgttcctgcactgcggatttttggcagtagacagcggctag

SEQ ID NO: 113864 - DNA, 1296 bp, synthetic construct
  misc_feature 1..1296: note = Description of Artificial Sequence: Synthetic coding sequence
  source 1..1296: mol_type = other DNA
atgtctgaaccagggaagggagatgactgtctggagctcgaatcttccatggccgaatcccgcttgcgggccccggacctgggagtctcgcgatgcctcgggaagtgccagaagaattccccgggggcacgcaagcaccccttcagcggaaagagtttctacctggatctgcccgccggtaaaaacttacagtttctcacaggcgccatccagcagttaggcggcgtcatcgagggatttttgagtaaggaagtctcttatattgtttcatctcgccgggaggtgaaggcggagtcttcaggtaaatcacaccgcggttgtccatctccctctcctagtgaggtcagggtggagacgagcgctatggtcgaccccaaagggagccatcctaggccatccagaaagcccgttgattctgtgcctctttctcggggcaaagaattgttacagaaggctatcaggaaccaagggagtatttctggtggtggctcaggtggatcatcaagtctgctcaccaatgcacgcagttggggagtgaggatcctgcatgtggacgaaatgatgatgcacgtccagcaattgtcactggcctctctgtgcgttaagaaacagcagccaaaaaaacccgaagggacctgcccggcagcagagtcccgaaccaggaaagttgcccgcctcaaagctccgttcctgaagatcgaagacgagagccgcaaattccgtccttttcaccaccaattcaaaagtttccctgagatttcattcttaggccctaaggacgcctcacctttcgaagcccccacaacattgggcagcatgcatcatactagggaaagtaaagatggcgagccctccccacgttccgcagctcacacaatgccacggaggaaaaagggctactgcgagtgctgtcaggaggcattcgaggaactgcatgttcaccttcagtccgcgcaacatcgctcctttgccctcgaggcgcacttgtacgcagaggtcgaccgaattatcgcccagctgtcccactctttcgctgatatcccttttcaggccggactgccacgctggagtggcagccctgcttccgattgcgaccccctgtgcccagagaccctgcatcctcatcagccaagccatccacgagccgcctcaccacgcattcgaaaagaagacagctgccaagccagtgtgacccagggcagagcagcaggacaacaaagatggaccgagagtttagatggcgtaatgggccctccggcctcgcacacctgtcacagaccttgtcgtcttccctag

SEQ ID NO: 113865 - DNA, 474 bp, synthetic construct
  misc_feature 1..474: note = Description of Artificial Sequence: Synthetic coding sequence
  source 1..474: mol_type = other DNA
atgtctgagcccgggaagggtgacgactgcttagaactggaatcgtcaatggctgagagcagattgcgggctccagatcttggcgtgtcccggtgtttgggtaagtgccagaagaattcccctggcgcccgcaaacacccctttagcggcaagtccttttatctggacctccccgctggtaagaaccttcagtttcttaccggcgccatccagcagttgggaggagttatcgagggcttcctgtctaaagaagtttcttacatagtgtcttcacggagagaggtgaaggctgaaagctcagggaagagtcacagagggtgcccatcaccatcccctagtgaggtgcgtgtggagactagcgctatggtggaccccaagggcagtcatccccgcccctcaagaaaacctgttgattcggtgcccctctcccgcggtaaagaactccttcagaaagccatccgcaatcagaaatag

SEQ ID NO: 113866 - DNA, 570 bp, synthetic construct
  misc_feature 1..570: note = Description of Artificial Sequence: Synthetic coding sequence
  source 1..570: mol_type = other DNA
atggtgggaggcgggcagccttgtggcccaaatatgtctgaagtcagctgcaaaaaaagagacgactacttagaatggccagaatatttcatggccgtggccttcttgtccgcgcagcgctctaaggacccaaattcccaagtcggggcctgcattgtaaattctgagaacaagatcgtcgggatcggatacaacgggatgcctaacgggtgctccgatgatgtcctcccctggaggcgaaccgccgaaaacaagctcgataccaagtatccatatgtctgccatgcagagttgaatgccatcatgaacaaaaattccactgatgttaagggatgtagtatgtatgtggctctgtttccatgtaatgaatgtgcaaaactcatcatccaggccggaataaaggaggtaatctttatgtcagataagtatcatgacagcgacgaggcaacagccgcgaggcttctcttcaacatggctggagtcacttttcggaagttcatccctaagtgttctaaaatcgtgattgattttgactccatcaacagccgccccagccagaaattgcaatag

SEQ ID NO: 113867 - DNA, 537 bp, synthetic construct
  misc_feature 1..537: note = Description of Artificial Sequence: Synthetic coding sequence
  source 1..537: mol_type = other DNA
atgagtgaagtgagctgtaagaagagagacgactacttggagtggccggagtacttcatggccgtagccttcttgtcagcacagaggtcgaaggatcctaactcacaggtgggtgcttgcatcgttaacagcgagaataaaatcgtgggaatcggctataatggcatgccgaacgggtgctcagatgacgttctgccgtggcggcgcactgccgagaacaagctggatactaagtacccctacgtgtgtcatgccgagttaaatgcaatcatgaacaaaaatagcacagacgtcaagggatgttctatgtacgtggcactgttcccttgcaacgagtgtgccaaattgatcatccaggccggaatcaaggaagtcatttttatgtccgacaagtatcacgattctgatgaggcaacagccgcccggctgctatttaacatggccggagtcactttccgcaaatttatacccaaatgtagtaaaatcgtaattgatttcgatagtatcaattcccggccaagccagaaacttcagtag

SEQ ID NO: 113868 - DNA, 510 bp, synthetic construct
  misc_feature 1..510: note = Description of Artificial Sequence: Synthetic coding sequence
  source 1..510: mol_type = other DNA
atgtcggaggtctcctgcaagaaaagagacgactacctcgagtggccggagtattttatggccgttgctttcctcagcgcacagagatcaaaggaccctaactcccaagttggcgcctgtattgtcaactccgaaaacaaaattgtgggaatcgggtacaatggaatgcctaacggctgcagtgatgatgtgctcccctggcgaagaacagctgagaacaaactggacactaagtacccatacgtctgccacgccgagctcaacgccataatgaataagaatagcaccgacgttaaagggtgctccatgtacgttgctctttttccttgtaacgagtgcgccaagttaattattcaagcaggcatcaaagaagtgatattcatgtccgataagtaccacgactcggatgaggcgaccgccgcccgcctcttgtttaacatggccggcgtgacgtttaggaagtttataccaaagtgtagcaaaatcgtgatcgattttgattctatctag

SEQ ID NO: 113869 - DNA, 222 bp, synthetic construct
  misc_feature 1..222: note = Description of Artificial Sequence: Synthetic coding sequence
  source 1..222: mol_type = other DNA
atgtcggaagtgtcatgtaaaaaacgagacgattacctggagtggccagagtactttatggctgtggccttcctgtctgcccaaaggtcaaaagatccaaatagccaggtgggagcctgtatcgtcaattcggaaaacaagatcgtgggcatcggctacaacggaatgcccaacggatgtagcgatgatgtgctgccatggaggagaacggctgaaaattag

SEQ ID NO: 113870 - DNA, 180 bp, synthetic construct
  misc_feature 1..180: note = Description of Artificial Sequence: Synthetic coding sequence
  source 1..180: mol_type = other DNA
atgtccgaagtctcatgtaaaaaacgcgacgactatctggagtggccggagtacttcatggctgtcgcttttctgtccgcacagcggagcaaagatcctaattcccaagttggcgcctgtattgtgaactcagaaaacaagatagtaggaattggctataacggcatgcctaacggatag

SEQ ID NO: 113871 - DNA, 72 bp, synthetic construct
  misc_feature 1..72: note = Description of Artificial Sequence: Synthetic coding sequence
  source 1..72: mol_type = other DNA
atgtcggaggtaagctgcaagaaaagggacgattatctcgagtggcccgaatacttcatggccgtcgcctag

SEQ ID NO: 113872 - DNA, 363 bp, synthetic construct
  misc_feature 1..363: note = Description of Artificial Sequence: Synthetic coding sequence
  source 1..363: mol_type = other DNA
atgtcagaggtgtcgtgcaagaagagagacgactaccttgaatggccggagtacttcatggctgtggccttccttagtgcccaacgtagcaaggacccaaatagtcaggtcggggcctgcatcgtaaattccgagaacaagattgtagggataggctacaacggcatgcccaacggatgctccgatgatgtattgccatggagaagaacagccgaaaataagctggacactaaatacccgtacgtttgtcacgccgagctaaacgctataatgaataaaaattctacagatgtgaagggatgctccatgtatgtcgctctgtttccctgtaatgagtgtgcgaagctcatcatacaggcttag

SEQ ID NO: 113873 - DNA, 537 bp, synthetic construct
  misc_feature 1..537: note = Description of Artificial Sequence: Synthetic coding sequence
  source 1..537: mol_type = other DNA
atgagcgaagtctcttgcaaaaagagggacgactatctggagtggcccgagtacttcatggcagttgcttttctgtccgcccaaagatcgaaggatccaaattcgcaggttggggcgtgtatcgtgaattctgagaacaaaatcgtgggtatcggatacaatggtatgcccaatggctgtagcgatgatgttttaccgtggagacggacagccgaaaataagctggacaccaaatatccttacgtttgccatgcagaactaaacgctattatgaacaagaactccacagatgtgaaggggtgtagcatgtacgtcgcgcttttcccttgcaacgagtgtgctaagctaatcatccaggctggcataaaggaagtcatcttcatgtctgataagtaccacgactccgatgaagccaccgccgctaggcttttgttcaatatggccggcgtcacgtttagaaagtttatccctaaatgctccaagattgtgatcgatttcgactctattaatagccggccatcgcagaagctgcaatag

SEQ ID NO: 113874 - DNA, 360 bp, synthetic construct
  misc_feature 1..360: note = Description of Artificial Sequence: Synthetic coding sequence
  source 1..360: mol_type = other DNA
atgtccgaggtcagttgcaagaaacgtgacgattacttggagtggcctgaatattttatggccgttgcctttcttagcgcacagcggtctaaggaccccaactctcaggtcggagcatgtatcgtaaacagtgaaaataaaatcgttggaattggatacaatggcatgccgaacggttgttctgacgacgtgctgccctggcgtaggaccgccgagaacaagttagacaccaaatatccatacgtatgtcacgcagagctgaacgccattatgaacaaaaactccactgacgtgaaaggatgctccatgtatgttgctctctttccctgcaacgaatgcgctaagctgattatccaatag

SEQ ID NO: 113875 - DNA, 297 bp, synthetic construct
  misc_feature 1..297: note = Description of Artificial Sequence: Synthetic coding sequence
  source 1..297: mol_type = other DNA
atgtcagaagtcagttgtaagaaaagggacgactacctagagtggcctgaatacttcatggccgtcgctttcctgagtgctcaaagaagcaaggatccaaatagccaagtcggagcgtgtatcgtaaacagcgagaataaaatcgttgggattggatacaacggcatgcctaacgggtgtagtgacgacgtgctgccctggcggcgtaccgccgaaaacaaactcgacactaaatatccttacgtgtgccatgccgagcttaatgctattatgaataaaaacagcacagacgtttag

SEQ ID NO: 113876 - DNA, 780 bp, synthetic construct
  misc_feature 1..780: note = Description of Artificial Sequence: Synthetic coding sequence
  source 1..780: mol_type = other DNA
atgaataagctgaaatcttcacagaaagacaaggtccgccaattcatgatctttactcagtcaagtgagaagaccgccgtttcgtgcttgtctcagaacgattggaaactcgatgtggcaacagacaatttctttcagaaccccgagctttatatcagggaatcagtgaagggctcactggatagaaaaaagttagagcagctgtacaaccggtacaaggacccacaggatgaaaataaaattgggattgatggaatccagcagttttgtgatgacctggcgctcgatcccgcctctatcagcgtgctgataattgcatggaagttcagagctgccacacagtgtgagttcagcaaacaagagttcatggacggaatgactgaactgggatgcgacagcatagaaaaactaaaagcgcagataccgaagatggagcaggagctgaaggaacccgggagatttaaagatttctatcaattcacattcaattttgctaagaatcctggccagaaggggctggatctcgagatggccatcgcttactggaacctggtcttgaacggacgattcaaatttctagacttgtggaacaagttcctgcttgaacaccataagagatcaatcccgaaggatacatggaacctgctcctcgatttctccactatgatcgccgacgacatgtcgaactacgatgaagaaggggcgtggcctgtgttgatcgatgattttgtggagttcgcccggccacagatcgctggaaccaagagtaccaccgtgtag

SEQ ID NO: 113877 - DNA, 660 bp, synthetic construct
  misc_feature 1..660: note = Description of Artificial Sequence: Synthetic coding sequence
  source 1..660: mol_type = other DNA
atgaacaaactaaagtcctcgcagaaagataaggtccggcagttcatgatttttacacagtccagtgagaagaccgctgtcagctgtctgtcccagaatgactggaagctagacgtggcgacggacaacttcttccagaacccggagctctatataagagagtccgtcaagggcagtctcgatcgcaagaagctggagcaactgtataatcgctacaaagacccacaggacgagaataaaattggaatcgacgggatgaccgagctgggttgcgactctatagaaaagttaaaagcccagatacctaagatggagcaggagttgaaagagcccggtaggtttaaagacttttaccagttcacgtttaactttgccaaaaaccccggacaaaagggtctggatctggagatggccatagcctactggaatttggtgttaaatggaagattcaagtttctcgatctgtggaataagtttctcttggagcatcataagcggtcgatcccgaaggacacctggaacctgttgctagatttctcgacaatgatagcggacgatatgagcaactacgatgaagagggggcctggcccgttctgattgatgattttgtcgagttcgcaaggccccagattgcaggaaccaagtctaccactgtgtag

SEQ ID NO: 113878 - DNA, 387 bp, synthetic construct
  misc_feature 1..387: note = Description of Artificial Sequence: Synthetic coding sequence
  source 1..387: mol_type = other DNA
atgatctttactcagagcagcgagaaaacggccgtttcgtgcttgagccagaacgattggaagcttgacgtcgcgaccgataattttttccagaatcctgagctgtatattcgcgagtcagtaaaggggtcactcgaccgtaagaagcttgagcagctctacaaccgctataaagacccccaggacgaaaacaagatcggtattgacgggatacagcagttctgtgacgacctcgctctggacccggcgtccattagcgtgctcattatcgcgtggaagtttcgcgccgctactcagtgcgagttttcaaagcaagagttcatggacggaatgactgagctgggctgcgacagcattgagaagctgaaggcacagattcctaagtag
